United States Patent Application Publication US 2005/0228172 A9 - sequence listing, part 124

SEQ ID NO: 578268 - DNA, 586 bp, Homo sapiens
  misc_feature 350: n = A,T,C or G
gctttccaggtggctagggaggagactcgtggggcaaaggtgggccagcatgtacccttcccccataaatcccttccaaaggccccagctcagcactcaaggccttcaggatcctgtctcccatctgcctctccattctaaacttctgtgcctttgcatgtgctgttctaagtgcctagaatgatgatgataatgatgatattgatgataacataactttttgagcgcttagaatgtgttaggtgctgtgatgggcattattttcatgaactgctcagcaatgccgtgattaataccttttaaaattaataaatgccttaataaagtaaaggtattatcgttaaaattantagactttatgttttagaacatttttagatttatagaaaaattgagatgatattacagacagttcccatatatacctcctctaattttcctatgagtaataccttatgttactatttgttacgatttgttataattcttggtagatacttyccttgacacattattgttattaataactaaattccatagtttatttagattgtttttacctaatatcttttacatttagtagttc

SEQ ID NO: 578269 - DNA, 550 bp, Homo sapiens
agaaaagcaattctaatgtaagaaaaacaaagaacaaaaaaacagaagcactttgcaaacacaataaatgatattaatagattcaacccatcttcatcgctttaatgaaatgataatttttgaggcacttattaaaactcttacattgtcttttccattttgttgcttttgttttactaagaagtagaaatcttcagttagaaaaaaatcagaaaaacatgtggaactacaaatgtaactgatattacaaataggtagrctaaactttattttttccttttaagagcttggattaaggtcaaacaatcagaggggattttgggtttttttgttgttgttgttttgttttgttttgttttagaggcagggtcttgctctgtcacccaggctggagtgcagtggtgcaatcatggctcactgcatcctcgaactctagggctcaagtgatgttcttgcctcagcctcctgaataactacgactgtaggtgcacaaaacatgcctggctaatttttttgttttttgtagagatgttatctcgctatgttgccc

SEQ ID NO: 578270 - DNA, 617 bp, Homo sapiens
tttaatttatctccactctgaggtacgtatgtgtcataaaaataattgcatttaagaatgtactccattatgattacttacctagttcatctttattggtgtcatcaaatgtaaccaagtcttamctattttagaaatcatatttaaatgtattttcaaagtttaattgtatctaatgaaagagtaatgttttatttctctacctaggtagcgctcacccatgtttttgacagttttctgcctgtttctttaagaaaagttttaaaaacaagtctgtgatattttctgtaatttcatagaagactgataatttgacccttgttaaaattcttgcaagagaacctttaggtgtacaccagattgaagataaataagaatctgagttaagtgctcaaatcacattttttaggttgttcatctaaaataagtataataaataactggatttcataagatgcagctgagggagctcatcaactaataaaggaaaggagatggaagaacttcagaggtcacagacactcattgagtcatctcccttaaacatatgaattcaaggtgaagattaggataatcagacactacacgtaagagtcacaattctcactatgctgttg

SEQ ID NO: 578271 - DNA, 617 bp, Homo sapiens
tttaatttatctccactctgaggtacgtatgtgtcataaaaataattgcatttaagaatgtactccattatgattacttacctagttcatctttattggtgtcatcaaatgtaaccaagtcttacctattttagaaatcatatttaaatgtattttcaaagtttaattgtatctaatgaaagagtaatrttttatttctctacctaggtagcgctcacccatgtttttgacagttttctgcctgtttctttaagaaaagttttaaaaacaagtctgtgatattttctgtaatttcatagaagactgataatttgacccttgttaaaattcttgcaagagaacctttaggtgtacaccagattgaagataaataagaatctgagttaagtgctcaaatcacattttttaggttgttcatctaaaataagtataataaataactggatttcataagatgcagctgagggagctcatcaactaataaaggaaaggagatggaagaacttcagaggtcacagacactcattgagtcatctcccttaaacatatgaattcaaggtgaagattaggataatcagacactacacgtaagagtcacaattctcactatgctgttg

SEQ ID NO: 578272 - DNA, 617 bp, Homo sapiens
tttaatttatctccactctgaggtacgtatgtgtcataaaaataattgcatttaagaatgtactccattatgattacttacctagttcatctttattggtgtcatcaaatgtaaccaagtcttacctattttagaaatcatatttaaatgtattttcaaagtttaattgtatctaatgaaagagtaatgttttatttctctacctaggtagcgctcacccatgtttttgacagttttctgcctgtttctttaagaaaagttttaaaaacaagtctgtgatattttctgtartttcatagaagactgataatttgacccttgttaaaattcttgcaagagaacctttaggtgtacaccagattgaagataaataagaatctgagttaagtgctcaaatcacattttttaggttgttcatctaaaataagtataataaataactggatttcataagatgcagctgagggagctcatcaactaataaaggaaaggagatggaagaacttcagaggtcacagacactcattgagtcatctcccttaaacatatgaattcaaggtgaagattaggataatcagacactacacgtaagagtcacaattctcactatgctgttg

SEQ ID NO: 578273 - DNA, 617 bp, Homo sapiens
tttaatttatctccactctgaggtacgtatgtgtcataaaaataattgcatttaagaatgtactccattatgattacttacctagttcatctttattggtgtcatcaaatgtaaccaagtcttacctattttagaaatcatatttaaatgtattttcaaagtttaattgtatctaatgaaagagtaatgttttatttctctacctaggtagcgctcacccatgtttttgacagttttctgcctgtttctttaagaaaagttttaaaaacaagtctgtgatattttctgtaatttcatagaagactgataatttgacccttgttaaaattcttgcaagakaacctttaggtgtacaccagattgaagataaataagaatctgagttaagtgctcaaatcacattttttaggttgttcatctaaaataagtataataaataactggatttcataagatgcagctgagggagctcatcaactaataaaggaaaggagatggaagaacttcagaggtcacagacactcattgagtcatctcccttaaacatatgaattcaaggtgaagattaggataatcagacactacacgtaagagtcacaattctcactatgctgttg

SEQ ID NO: 578274 - DNA, 503 bp, Homo sapiens
gtaaaactccccaagaatggaccaaggatacctatcagatgaagaacactaccagagaacaaaaaggtaaaggattcgcagagcacacacaacacagggagacatttaaatggaatcaatcggagtagaaagactcgtttgaacatctaggtcatttagtagagacatcagaagcagcttaatattctgaacaaactatctctgcggtttacccagaggctagaactgggacacagttctagcctccctaaaccagctttttaaaagcttaaaaataagccttgaaagaactaagttgacccataacaaacttagacttaaaaaaaaaattaaaacaagtaatccttggggtctyacagatgtacagacttgagaagttccaaagctgcttctcttagccaaaatacagagtgtagttaaaaaaaaaaaatccacattttggcaataataccctcttcacacctttgggtatatacccaataatgggatggctgggtcaaatg

SEQ ID NO: 578275 - DNA, 598 bp, Homo sapiens
gaaaccaattgttttaacacayccattaagaatcattatatgccaagccttttatctagataggaagcacattttgaatttgaaaatattattgcttgatatgaagttaattataacttctttgaagatacaatgcaaacacaaaattcagaatacaaaagtatgtagacagtatgttgttaacaataagggaagaaaatatagcggggagattggcaggaaaaacaagacattttgattttatcactttgaggtttcttctactttacagttattttatttatttatttatttttaattttgtgggtacacagtaggtatatatatttatgggatgtatgaggtattttgatacaggcatgcaatgtgagataagcacatcatggagaatagggtatccatcccctcaagcatttatcctttgagttacaaacaacccaattacactaagttatatttaaggtatactattaaattattgttgactatagtagccttattgtgctatcaattagtaggtcttattcattcttctaattatttatttgtacctattgaaaataggtacccacctcctccctgacacccccaaccactg

SEQ ID NO: 578276 - DNA, 555 bp, Homo sapiens
cttttatctagataggaagcacattttgaatttgaaaataytattgcttgatatgaagttaattataacttctttgaagatacaatgcaaacacaaaattcagaatacaaaagtatgtagacagtatgttgttaacaataagggaagaaaatatagcggggagattggcaggaaaaacaagacattttgattttatcactttgaggtttcttctactttacagttattttatttatttatttatttttaattttgtgggtacacagtaggtatatatatttatgggatgtatgaggtattttgatacaggcatgcaatgtgagataagcacatcatggagaatagggtatccatcccctcaagcatttatcctttgagttacaaacaacccaattacactaagttatatttaaggtatactattaaattattgttgactatagtagccttattgtgctatcaattagtaggtcttattcattcttctaattatttatttgtacctattgaaaataggtacccacctcctccctgacacccccaaccactgccttc

SEQ ID NO: 578277 - DNA, 555 bp, Homo sapiens
cttttatctagataggaagcacattttgaatttgaaaatattattgcttgatatgaagttaattataacttctttgaagatacaatgcaaacacaaaattcagaatacaaaagtatgtagacagtatgttgttaacaataagggaagaaaatatagcggggagattggcaggaaaaacaagacattttgattttatcactttgaggtttcttctactttacagttattttatttatttatttatttttaattttgtgggtacacagtaggtatatatatttatgggrtgtatgaggtattttgatacaggcatgcaatgtgagataagcacatcatggagaatagggtatccatcccctcaagcatttatcctttgagttacaaacaacccaattacactaagttatatttaaggtatactattaaattattgttgactatagtagccttattgtgctatcaattagtaggtcttattcattcttctaattatttatttgtacctattgaaaataggtacccacctcctccctgacacccccaaccactgccttc

SEQ ID NO: 578278 - DNA, 529 bp, Homo sapiens
actcagctaaccccttcccatggagggagtacttaaaccaatgctagccatgayggtattgctgaccgcaggggtctgaaatcaagttcccacaaatcttgccacctagggctacctaccatgcattgtgtctctaaataaactagaaagacagtctaggacataaggactgcacacgtatgtgagtcctagtgctgaactaggctcagagactatggactgggggaagacacagaatattcagagacaccaactgcaccagctgaggcagccaagagcgtgctggcatcacccaacccctaaccccaggcttcacatttcacagctccaaaagaaaccccttccttctgcttgaggagaggagagggaagaacggggaagactttgtcttacatcttggatatcagctcagacaaagcaggatagggcaactgtcaaaggaatgaggcccctgctttaagccctagctcccagatgacatttcttgacataccctgaaccaaaagggaacccaatgccctgaaggaaa

SEQ ID NO: 578279 - DNA, 529 bp, Homo sapiens
actcagctaaccccttcccatggagggagtacttaaaccaatgctagccatgatggtattgctgaccgcaggggtctgaaatcaagttcccacaaatcttgccacctagggctacctaccatgcattgtgtctctaaataaactagaaagacagtctaggacataaggactgcacacrtatgtgagtcctagtgctgaactaggctcagagactatggactgggggaagacacagaatattcagagacaccaactgcaccagctgaggcagccaagagcgtgctggcatcacccaacccctaaccccaggcttcacatttcacagctccaaaagaaaccccttccttctgcttgaggagaggagagggaagaacggggaagactttgtcttacatcttggatatcagctcagacaaagcaggatagggcaactgtcaaaggaatgaggcccctgctttaagccctagctcccagatgacatttcttgacataccctgaaccaaaagggaacccaatgccctgaaggaaa

SEQ ID NO: 578280 - DNA, 529 bp, Homo sapiens
actcagctaaccccttcccatggagggagtacttaaaccaatgctagccatgatggtattgctgaccgcaggggtctgaaatcaagttcccacaaatcttgccacctagggctacctaccatgcattgtgtctctaaataaactagaaagacagtctaggacataaggactgcacacgtatgtgagtcytagtgctgaactaggctcagagactatggactgggggaagacacagaatattcagagacaccaactgcaccagctgaggcagccaagagcgtgctggcatcacccaacccctaaccccaggcttcacatttcacagctccaaaagaaaccccttccttctgcttgaggagaggagagggaagaacggggaagactttgtcttacatcttggatatcagctcagacaaagcaggatagggcaactgtcaaaggaatgaggcccctgctttaagccctagctcccagatgacatttcttgacataccctgaaccaaaagggaacccaatgccctgaaggaaa

SEQ ID NO: 578281 - DNA, 529 bp, Homo sapiens
actcagctaaccccttcccatggagggagtacttaaaccaatgctagccatgatggtattgctgaccgcaggggtctgaaatcaagttcccacaaatcttgccacctagggctacctaccatgcattgtgtctctaaataaactagaaagacagtctaggacataaggactgcacacgtatgtgagtcctagtgctgaactaggctcagagactatggactgggggaagacacagaatattcagagacaccaactgcaccagctgaggcagccaagagcrtgctggcatcacccaacccctaaccccaggcttcacatttcacagctccaaaagaaaccccttccttctgcttgaggagaggagagggaagaacggggaagactttgtcttacatcttggatatcagctcagacaaagcaggatagggcaactgtcaaaggaatgaggcccctgctttaagccctagctcccagatgacatttcttgacataccctgaaccaaaagggaacccaatgccctgaaggaaa

SEQ ID NO: 578282 - DNA, 577 bp, Homo sapiens
gctgaatatttcttccattcttgtaatttggaaacttagattttccttttgtttttctgtttcttattttaagtaatttcagtagattatgccctcccatgtattatcaagtacaataactgagaccagggaattgacatcagcacagagaccctgtctcaaaaaaaactgaaaaacttttaattgatttatttatgcacatataaagtacaaacattaatttatttctaaaatcctgtataattttacaaacttcaacacattttattttcatcttttttatttgttttgtgttctctgttttcggtgcccattgtgttccatcagttgrtaagttttaatggataatgacttgacttttacctactaactgagcaaagaaatgagaacaggttgtgatgtcctactcatgctattttcctccagggatcatgtaagctgatcatgcaagagtttacctaatccatagcttcctccgttgctaagagctccagcattctccagctgtactccataaagtccttcctatacatcccatcctttacttacaggacatattcttcctactgatgctcaa

SEQ ID NO: 578283 - DNA, 577 bp, Homo sapiens
gctgaatatttcttccattcttgtaatttggaaacttagattttccttttgtttttctgtttcttattttaagtaatttcagtagattatgccctcccatgtattatcaagtacaataactgagaccagggaattgacatcagcacagagaccctgtctcaaaaaaaactgaaaaacttttaattgatttatttatgcacatataaagtacaaacattaatttatttctaaaatcctgtataattttacaaacttcaacacattttattttcatcttttttatttgttttgtgttctctgttttcggtgcccattgtgttccatcagttggtaagttttaatggataatgacttgacttttacctactaactgagcaaagaaatgagaacaggttgtgatgtcctactcatgctattttcytccagggatcatgtaagctgatcatgcaagagtttacctaatccatagcttcctccgttgctaagagctccagcattctccagctgtactccataaagtccttcctatacatcccatcctttacttacaggacatattcttcctactgatgctcaa

SEQ ID NO: 578284 - DNA, 577 bp, Homo sapiens
gctgaatatttcttccattcttgtaatttggaaacttagattttccttttgtttttctgtttcttattttaagtaatttcagtagattatgccctcccatgtattatcaagtacaataactgagaccagggaattgacatcagcacagagaccctgtctcaaaaaaaactgaaaaacttttaattgatttatttatgcacatataaagtacaaacattaatttatttctaaaatcctgtataattttacaaacttcaacacattttattttcatcttttttatttgttttgtgttctctgttttcggtgcccattgtgttccatcagttggtaagttttaatggataatgacttgacttttacctactaactgagcaaagaaatgagaacaggttgtgatgtcctactcatgctattttcctccagggatcatgtaagmtgatcatgcaagagtttacctaatccatagcttcctccgttgctaagagctccagcattctccagctgtactccataaagtccttcctatacatcccatcctttacttacaggacatattcttcctactgatgctcaa

SEQ ID NO: 578285 - DNA, 544 bp, Homo sapiens
tttggttatctttacagcagcaccccactctactgtgtaataccaatttactgtattagttgattctcacactgctaataaaaacatacttgagactaggtaatttataaaggaaagagatttaatggactcacagttccacattgctgggaaggcctcaccatcatgacagaaggtgaatgagtagcaaaggtacatcttacatggtggcaggcaagagaacttgtccaggggaactttcatttataaaaccattagatctcatgagatgtrtttactaccatgagtggggtatggggaaactgctcccatgattccattatctccacctggccctacctttgatgcatggtgattatataattcaaggtgaaaattgggtgggacacagccaaaccatatcagcaattatttttgaaattttatttatgatatatgttgatgaagtagaattagtcactggaattaataaaacaattttttactttttattctccagtctctgcaaacctgttatttgaaaactgagttaagatttgatagc

SEQ ID NO: 578286 - DNA, 571 bp, Homo sapiens
agaattagtcactggaattaataaaacaattttttactttttattctccagtctctgcaaacctgttatttgaaaactgagttaagatttgatagcttatatcattcttcagtcttaaaaagttattcctagctttagccaccaaaacattctcagtctagcaattaatatttctcattctgtacaggactagatcattatacaagttcatgcttttttctctataatcaggaaaagtgttgggaaagggarcattgttttcttcttaccctgcaacttctcactaaccatatgctaactgggggtaaaaatctattaaagtgaatagagatttcaatttgttaacagggatatacaatcttttcaaaaaatccttatatacaaagaaaagtacagaacagaaagagagtgaaggcaattaacaggagaaaagacaaaaaaaaatctgaagcaaaacttaataagaaatgcaaaaaccatatgtgaagaaactttcaaaatatttgtattaagaaaatacaaatgtagccttaaataaatcagaaaaagaattatttccttaaataggaat

SEQ ID NO: 578287 - DNA, 571 bp, Homo sapiens
agaattagtcactggaattaataaaacaattttttactttttattctccagtctctgcaaacctgttatttgaaaactgagttaagatttgatagcttatatcattcttcagtcttaaaaagttattcctagctttagccaccaaaacattctcagtctagcaattaatatttctcattctgtacaggactagatcattatacaagttcatgcttttttctctataatcaggaaaagtgttgggaaagggagcattgttttcttcttaccctgcaacttctcactaaccatatgctaactgggggtaaaaatctattaaagtgaatagagatttcaatttgttaacagggatatacaatcttttcaaaaaatccttatatacaaagaaaagtacagaacagaaagagagtgaaggcaattaacaggagaaaagacaaaaaaaaatctgaagcaaaacttaataagaaatgcaaaaaccatatrtgaagaaactttcaaaatatttgtattaagaaaatacaaatgtagccttaaataaatcagaaaaagaattatttccttaaataggaat

SEQ ID NO: 578288 - DNA, 392 bp, Homo sapiens
acatacatacatacataaatatacctcaatatctatcagttatctctctctctatcaacatcatctatccctgtcatcttcattttctattttaaagagaggcaaggataagcacacagagttaatatgaatccctacatgattatggacaaattactctgtcttactatgccttcatctgtaaaatcagtaagataatgttacttccacatatggattttcttttataaaattcttttgtaaaaaaatttataatttttttttaagttccagggtacatgtgcaggatgtgcaggtttgttccataggtaaatgtgtgccatggtggtttgctgtacctatcaacccataccctaggtattaagcctarttcttacatgataaaaatgtca

SEQ ID NO: 578289 - DNA, 598 bp, Homo sapiens
gcctgggaaaattttcctcattgctttaatatgccatatgtatatgtaatcttttccataaggttgcctttttccctagaattctgtgcttgaatgctctttgcttctttagttttgaagactgaaagtcttgcttgtatcatagaactgatcttatatcttcagataattataatcctttcctgttcttgattgtgagaagaggtaatgcttttgctgtgaaacccatcttaggagtgtccatctcctcagtcaatcaaatttaagactcagaatttatctctgaaacctaacacttttctatgaaatcaagtttgaagatacttgtaaactattttgatttgaggatactaatttcttcttcagtcttrccacttgcatagtttggagctcaaacttggacatgatcatctacagaagtggatacttaagtaggggacaataattaaggtttagcccattgtaagatcagccaaaatatcagcgtcatcagtcaatatgaaaggtaaaaggtagcatagcatcaaaataaaggaaatgagtcacatcacagaaaagaacggcttgtatcatcctttacttaggaacttgagcactt

SEQ ID NO: 578290 - DNA, 598 bp, Homo sapiens
gcctgggaaaattttcctcattgctttaatatgccatatgtatatgtaatcttttccataaggttgcctttttccctagaattctgtgcttgaatgctctttgcttctttagttttgaagactgaaagtcttgcttgtatcatagaactgatcttatatcttcagataattataatcctttcctgttcttgattgtgagaagaggtaatgcttttgctgtgaaacccatcttaggagtgtccatctcctcagtcaatcaaatttaagactcagaatttatctctgaaacctaacacttttctatgaaatcaagtttgaagatacttgtaaactattttgatttgaggatactaatttcttcttcagtcttgccacttgcatagtttggagctcaaacttggacatgatcatctacagaagtggatacttaagtaggggacaataattaaggtttagcccattgtaagatcagccaaaatatcagcgtcatcagtcaatatgaaaggtaaaaggtagcatagcatcaaaataaaggaaatgagtcacatcacagaaaasaacggcttgtatcatcctttacttaggaacttgagcactt

SEQ ID NO: 578291 - DNA, 598 bp, Homo sapiens
gcctgggaaaattttcctcattgctttaatatgccatatgtatatgtaatcttttccataaggttgcctttttccctagaattctgtgcttgaatgctctttgcttctttagttttgaagactgaaagtcttgcttgtatcatagaactgatcttatatcttcagataattataatcctttcctgttcttgattgtgagaagaggtaatgcttttgctgtgaaacccatcttaggagtgtccatctcctcagtcaatcaaatttaagactcagaatttatctctgaaacctaacacttttctatgaaatcaagtttgaagatacttgtaaactattttgatttgaggatactaatttcttcttcagtcttgccacttgcatagtttggagctcaaacttggacatgatcatctacagaagtggatacttaagtaggggacaataattaaggtttagcccattgtaagatcagccaaaatatcagcgtcatcagtcaatatgaaaggtaaaaggtagcatagcatcaaaataaaggaaatgagtcacatcacagaaaagaackgcttgtatcatcctttacttaggaacttgagcactt

SEQ ID NO: 578292 - DNA, 598 bp, Homo sapiens
gcctgggaaaattttcctcattgctttaatatgccatatgtatatgtaatcttttccataaggttgcctttttccctagaattctgtgcttgaatgctctttgcttctttagttttgaagactgaaagtcttgcttgtatcatagaactgatcttatatcttcagataattataatcctttcctgttcttgattgtgagaagaggtaatgcttttgctgtgaaacccatcttaggagtgtccatctcctcagtcaatcaaatttaagactcagaatttatctctgaaacctaacacttttctatgaaatcaagtttgaagatacttgtaaactattttgatttgaggatactaatttcttcttcagtcttgccacttgcatagtttggagctcaaacttggacatgatcatctacagaagtggatacttaagtaggggacaataattaaggtttagcccattgtaagatcagccaaaatatcagcgtcatcagtcaatatgaaaggtaaaaggtagcatagcatcaaaataaaggaaatgagtcacatcacagaaaagaacggcttgtatcatcctktacttaggaacttgagcactt

SEQ ID NO: 578293 - DNA, 591 bp, Homo sapiens
ctgcaatctcagaagaaaatggttgagagacgatgtttatcaaaggttattrccagggttttttttgcgcctgtttgttcgttttgacagaaaaaaattgagtgaaagggaacaccacaattgcagaagttcagttattattgagagaggtaatgagaatgattgacatgaatttcccccaaaaaatgttctgtcaataattactatattatgaacaaatagagcatggaatatttttatagctgactcagcgaaaatagctattacagcaaacctatgtctatactgaaattcacatatacattcaaagaatattactctataccatttatctcaagataactaatcttcaaagcaaaagaaatcagcaacatgtttttaattaaaattttaacttccttcaaaaatgtctttttggccgggcgcagtggctcacacctgtaatcccagcactttgggaggccgaggagggcggatcacgaggtcaggagatcaagaccatcctggctaacagggcgaaaccccgtctctactaaaaaatatacaaaaaaaattagctgggcgtggtggcgggcgtctgtagtcccagct

SEQ ID NO: 578294 - DNA, 597 bp, Homo sapiens
tattatttatgcaatataaaatataaatattaatctcagtgtggtaggctgaataaccaccccccgctccaagatgtgcaccttccagtctctagagcctgtgaatattcccacacgtggcaaaagggactgtacagatgtgattaaattaaggatcttgagatgragacattgttctggattatctgggtaggcccaaatataaccagaaaggtccttataagtaacagatggagcaagagggaccatcacagagagatttgaatatgctatgctgctggttttcagatgatagaagggaccatataagcaaaggatgcaggggcctgtagaaattgaaaaaggccaggaaaaaaattctcccctaaagactctaaatttatgcaaaattgttagaccaacaataagcaactaatacactaagtaaaatcttgattaactaggagtcaaatttggattgagactatcagaagttttcaacacatggtcaaataataagaaaacaatcagattgtttaggtatatggagagggagaggatacacaccactgaagtgaagcccttaatatggtaaattttattttatgtaaaatttta

SEQ ID NO: 578295 - DNA, 597 bp, Homo sapiens
tattatttatgcaatataaaatataaatattaatctcagtgtggtaggctgaataaccaccccccgctccaagatgtgcaccttccagtctctagagcctgtgaatattcccacacgtggcaaaagggactgtacagatgtgattaaattaaggatcttgagatgaagacattgttctggattatctgggtaggcccaaatataaccagaaaggtccttataagtaacagatggagcaagagggaccatcacagagagatttgaatatgctatgctgctggttttcagatgatakaagggaccatataagcaaaggatgcaggggcctgtagaaattgaaaaaggccaggaaaaaaattctcccctaaagactctaaatttatgcaaaattgttagaccaacaataagcaactaatacactaagtaaaatcttgattaactaggagtcaaatttggattgagactatcagaagttttcaacacatggtcaaataataagaaaacaatcagattgtttaggtatatggagagggagaggatacacaccactgaagtgaagcccttaatatggtaaattttattttatgtaaaatttta

SEQ ID NO: 578296 - DNA, 597 bp, Homo sapiens
tattatttatgcaatataaaatataaatattaatctcagtgtggtaggctgaataaccaccccccgctccaagatgtgcaccttccagtctctagagcctgtgaatattcccacacgtggcaaaagggactgtacagatgtgattaaattaaggatcttgagatgaagacattgttctggattatctgggtaggcccaaatataaccagaaaggtccttataagtaacagatggagcaagagggaccatcacagagagatttgaatatgctatgctgctggttttcagatgatagaagggaccatataagcaaaggatgcaggggcctgtagaaattgaaaaaggccaggaaaaaaattmtcccctaaagactctaaatttatgcaaaattgttagaccaacaataagcaactaatacactaagtaaaatcttgattaactaggagtcaaatttggattgagactatcagaagttttcaacacatggtcaaataataagaaaacaatcagattgtttaggtatatggagagggagaggatacacaccactgaagtgaagcccttaatatggtaaattttattttatgtaaaatttta

SEQ ID NO: 578297 - DNA, 597 bp, Homo sapiens
tattatttatgcaatataaaatataaatattaatctcagtgtggtaggctgaataaccaccccccgctccaagatgtgcaccttccagtctctagagcctgtgaatattcccacacgtggcaaaagggactgtacagatgtgattaaattaaggatcttgagatgaagacattgttctggattatctgggtaggcccaaatataaccagaaaggtccttataagtaacagatggagcaagagggaccatcacagagagatttgaatatgctatgctgctggttttcagatgatagaagggaccatataagcaaaggatgcaggggcctgtagaaattgaaaaaggccaggaaaaaaattctcccctaaagactctaaatttatgcaaaattgttagaccaacaataagcaactaatacactaagtaaaatcttgattaactaggagtcaaatttggattgagactatcagaagttttcaacacatggtcaaatamtaagaaaacaatcagattgtttaggtatatggagagggagaggatacacaccactgaagtgaagcccttaatatggtaaattttattttatgtaaaatttta

SEQ ID NO: 578298 - DNA, 501 bp, Homo sapiens
gggcctctttgtcccctgctaaagaaaaatgactgggtttttttttttttttttttttttttttttgtatttgagcttctgtgtggttcaggaactcaatgcaataactagctttgagttacacatagagagggaagagaggccttggatcaacttatgaactcaggcatttagcaagcacaggaactaaaagagagacacagatagagccacaggagagtgatcaactttttaagccgtgtgtgactcccaatcaatgtactggattctagaatgtgtcagattagcaattttttccccttctcttgggagctgaaggagcagagaggcagcacacagagtgaggccaatgcctgctgcccttattcccgcaacgtggtttcatctgttaacccagctccatttagcagccattcttgcgatcaataattcagagatataaatattttccttagatgtggatactattagagttttaaraaacatttgcctctatttcca

SEQ ID NO: 578299 - DNA, 409 bp, Homo sapiens
atgtgtcatgcttaattgtgactatgcgaagctcagggatatctcatcagatgaggagcaagttaaatcttaaaacattacagygcaggatgtcagagtattggtatttgtgaacttaatgtgagttctgagttctttttctctgacttttatgttaaagcatactacaaacattgattaaaaacctattgtgcatcagatactgcactggatctcagttataaagcaataaagaaagccttcatgatccttacacttcaggactccaggaaagactcattaaacaattaattataatgaaaagtgatgagaattatgatagaagaagaattatatgttaagggattatatcacagaatatataatccatgagatgtggaaggttttcctcaaaaaaatactagggaaa

SEQ ID NO: 578300 - DNA, 379 bp, Homo sapiens
ttctaagcaagtatccctccagtttmtttcctttgcttcacctctactactattaccatactccatgccaccatcatcgccattgcctgaatgattgtctcctaactggccagctcactaacacttattctcttcacagtctattttctagactgtagccaaagcgattaaccctccaatcactttcccttgctcttagggaaaatattaaaatccttagcatggtttaaaagatgctccatgctgttatccctgcttacttctgtagcctcatctgatcttctctcacccctgctctctctgcaactccatacttttcgtttcagtttctataggtgacatgtctgctcaggtccttttttcctagaaagctttcttc

SEQ ID NO: 578301 - DNA, 593 bp, Homo sapiens
ggccctaaaacttccaagagtatacacattttgtcttcagttacaggtgagtagggaaggaccactgggtgggagcagggctaggcatgtctgagctcagacttcccttgggcaggtcttgctgcggctactgtgggcaatggagatgaggttcccaggtcagtggagttatgttcctaagaggattatggttatctctactgtgtcatgcaggttgtcagcgaggtgggagaaagccagcagtcacaggcctcgccagctcccacggaatctgaaggcccagtctcactcccaccatgtccccacccccaatagcaccgagtctgtttccaggcagtgggcaagcagggctgagaacttgccccaagctacctgcctctcagttgcaaaagcaagtatggatttcctttttcccccgcctatggactctgcacaccagattcatgcccttccctgagttctggccaggagacttcttgatcagttctaattgttacaaagttcagctggagatttccttctccctstggccttttcccaatgcctctgtccacccgcccaaaggacccctatgaggccaggcagaaatggtt

SEQ ID NO: 578302 - DNA, 545 bp, Homo sapiens
gcagcttgaccaatggaggggaccactagcaacaatgtagtggaaatggtaggtggaggttgggtgcagctaatacatctcctcacttaaagaggtggctttgtcatctcatggatttctcttcatgccagttctcagtcttgtcattaatttgcctccacactggttcatgtcacagcctcccagcaattttctctccagaagatcagactggcacatggaggtagtcagacaaacattcctctcaatacacacatgcaagaacatacatgcatacacaagtaatacaattacattgtttacctttgtatttatatccgtacctcactgcaaaatggatttggagtgggttagaaaaatgcctatagaataatagaatagactattgtatgaccaaagacatgcagaatgaaactggacattgatgttgccaggaagacaccttgtatttggatctaatatattaaargtttatatatttttatggcatgtaggatactttgtagtacttctaaattgcagaataagccattgggaaacctgat

SEQ ID NO: 578303 - DNA, 542 bp, Homo sapiens
gtgtgggtaactttgttgctattgcccttagtgaaggcaaccctgggagagggcaggaggtgagagatatggaattgtccttctcttagtcaattttagttcctgtgagccctcaaagtataagcaggattctagtgtttaaagatatgcatttttcataaaacatgacctctgagaagaaagccaattcctgtattttatttgatatagccatgtgttccagatctagagggcgaggtatctctttggggcatctttacatatggcctgtccccctccaccatcaagctttctaatagggtttcaagagtacttttgactctacaygattttgctttatttgctgacttttgaacttaactcccatacaaggtatcactccacagtaacctgtaagcatcatagtaccaagtgcaggccacatttctggtagaatatgtaaatttatggtctgtttgacttaaaaggtaatggaaaaagtagatggctctgagtagggtaacagatagttaacacttatgagagaggaatacccaagaaag

SEQ ID NO: 578304 - DNA, 439 bp, Homo sapiens
ggcttaatgacaagaatatgttctaaggaatatgttgttaggtgattttgtccttgtgctatcatcatagagcggacttacacaaacctaggtagtagagagcttactacacacccaggctatatagttaatatggtttggctgtgtcccccactaagtttcatcttgaactgtagctcccataatccccaagtgtcatgggacrgacccagtgggaggtaactgaatcatgggggcaggtttttccagtgttgttcttgtgatagtgaataaatctcacaagatctgatagttttataaagggcagttcccctgcacaggctctcttgcctgtcaccatgtaagacatgcctttgctccccctttgacttctaccatgattgtgaggcctccccagccatgtggaagtgtgaatcaattaaacctctttttctttata

SEQ ID NO: 578305 - DNA, 593 bp, Homo sapiens
actgtcctccagaccccaaaattgtagatccattgacaggttacaacatgcagctggaaaagccacagacactcaatgccagctcatgaaaacagccaggagsggggctgtacccagtaaagccacagagatggagctgcccatggctgtggaagcccacctcttgcatcgttgtgacctggatgtgagacatggagtcaaaggagatcattttgaatctttatggtttaatgactgtcctattggatttcagacttgcatggggcctgttcccccatcattttggccaatccaatttctttctattggaatgggtgtatttacccaatgcctgtacccccattgtatctaggaagtaattagcttgcttttgattttacaggctcataggcgggtgaatgctggaatgaattaagacttgggggactgttgggaaggcatgattggtttcaaaatgtgaggacatgagatttgggaggggccaggggcagaatgatatggtttggctatgtccccacccaaatctcaccttgagttgtagctctcataattcccacatgttgtgggagttaattgaatcatgggggcagatt

SEQ ID NO: 578306 - DNA, 553 bp, Homo sapiens
atatccacgatctcatattcttgacatgtagtatagttgcatctcgctaggttatagcattgctatgtctgcattcagctgggaaagtaaagccataatgttccatgttagagacacacagtatagagacattcctaaaacaccatgatccagtctgcctcgcagcccctgcattgcagtgtctcatctgctggcagagtgcatgttggctacataacagacaagcagtagacagactgaaattactttccatatttgagaatggctctgggggctaaagtcagaaagctgtgagaagaagacaggctttggagtcacgcaaacatcaaatggaaaccagcactgtctctcactgtttggataaacttggctaaattatktaatctccttaagctgcagtttctatatgtttaaagtaggaataattttacttacccggtaagtttaccatgaaggtataaggcatataagaattatattgtgagatgatagtttttctcttactgtctaccagttgcagcttattagatgttttgtttttatttgtttgttt

SEQ ID NO: 578307 - DNA, 569 bp, Homo sapiens
tttgtggtggccaagagagtcttttacatgcctacataattattgcatttgatttcctctttaatgagatctgctgtccatcaccatcatttatttgttcagagagaacaacttttgtgcatataaaaattaggtctataaggatttaaggtttttattacaatggctttaaaaacagcctcacagactgttgtacaagatgaaattcaagcccattcactttaatttataatggtttgtgcacaactgaaagatttatagcaaatttgaaatattgatttgagtacatgtaggttttcagcagcaaaagtttttgcaaagtttttcagcagacatgtacattttctgaaatgtaattgaagtagttgtctrtgttgatttgcataaaatgattgtgtttgattatgtatcattttaactaatctttcttttttccaaaaaaaaaaaaaaacaaggaaaatctcatgccaatttggccttgacaaacataaggttttaaagttacaacagtgttcagatattggtgattacataatgccacttagatttggaatatttgtactgttctg

SEQ ID NO: 578308 - DNA, 510 bp, Homo sapiens
gaggttatggggtgtccctataagcagcaggaacaggcaatgcttagacgttcacatggacaagcagcaacaaggaatatgtttcaggaggagatggggctttggccactgaggaggacaatacaagcaatgtcagatgcccctcttctagagaggacagtacaggtggcttaccaaaagaggctgcagttcacaagarcaggttagatgtctatctgtccatacaaggtcatgaggtggactccacaaccaggctgaagcctaatgcctaataactaactgagcagaggctccagaccagggtcagactgcacaagagagtgagtggtgctctatctagagtgttgagttagactatgatcctctgtataaggcatatttgttgggaactgtacaagactgagccttctgaaatgacttaagtagtcccggattaaaaggggcaggtcataggtacagtaggaagcccaggaatcgggtagaagatttgagcaggatgctttgtctgat

SEQ ID NO: 578309 - DNA, 623 bp, Homo sapiens
aattcctagtcattctgcctttatctcaccacctttcagagtcttcttagatttgttttatttataatatctgggctttttagttgtgtttagcagtaggaataggaaaaagtatgtctattctgttttcccagaagtgaaagtcaattgcctacattttacataaaataacttaaaagattggttattgttcttgcagttgttcttttatttgctcactcactcattcatgtagtagcactgacaaagtgcaaaccacttgccgcctctcggtgcagtaagactcagcacttccaacggttagtgctgggaggaaaggttctgggggagagggaagccaggcctggcctctttctccccaagcrcgacttctccttgacttctccaatgttccagctaagcctgctgccgcataggctcttaggtttccctagactcagctggaaccaaataagactgtaataagccaagggcagtaaatattaaacatttatttacagttacataactaagcttgtgaatccacgaaagaattttccagggaaaaaagtgctgagaaaaaaattttataacctgccattttagaaaactatttattagaaataatctccaacttatcaaaa

SEQ ID NO: 578310 - DNA, 421 bp, Homo sapiens
ccttgaactgacgaggtctggattgaacttgacattgaaagatcttttgcactggagaagcaacttaatctctgatttattttaggattttaagcaacgtgaaacttgccaagatattttcaaatctgagtaaaaattattttatatgacttatgatttctttaaacaatatctcaattcagtggttatcttagcccattttgtgttgctataatagaataccacagatagggtaatttataaagaatttatttctcagttctggtggctggaaagtctaatatctaggtgctgccatctggtgagggccttcttgctgayagaagacagaaggtggaaagacaagagaccatgagagcacaagatgggagttgtacacacttttataacacacctactcttaatgataatgaacccactc

SEQ ID NO: 578311 - DNA, 575 bp, Homo sapiens
tgggaagagaaagaggtgaactgaggttgtcttttcctgtgctcccacactcctatacagagctttcaggagggtgagaaggcataactcccagactcatggcctttcaggtttttatgaaggaatatttgtcaaataggaaaacagaacgtagtttataactgtttatcttgatgaataattttgaagtagaccaaaataggtcatgtgacctccatttctactcttgccccagaccctacaaatgctggggtgacagtaattaaaccagcgagtaagtgacacatagtaagaactcagtgaacactcaccaccatcatcatcattattktcctcatcatcttctgctctatgtcacatgtagccatttctctaaagtgggtggaaaagcagctccttccatgtattgtcagataccagctctatttcttaatgactgttgagattttatgaaaggagtctttaggaatgcagtgggagaagcagtgtgataggggttcagctgggcctatcacctaagatgactctcccagccctttgccatgggttgtgtctggtctctatcacactgtagg

SEQ ID NO: 578312 - DNA, 604 bp, Homo sapiens
tggcaagccacattttatgtcaaggattaatgattgctattcaaatcttccatagatgatgccaataatccaaagatatctcatcaatgttgcacctagtatggttctgttctttgtgatggaaatatgtagtaagtccaaagttgattgtagaaacccaaccattacatataatgtgattaaagagaatgtgtaacccaaaaggctgcttatgagcaaatgaaagaattttgtataatgtgaagagcaaggttatcaatatttttagaaactaaacctatctttttcttttattccaagtcctgagactttaagtaaacttactctctcaagccctcttattttattcaggaagagtaatgtgaggattaatccacacaggctgtgaagtataatctagtgcattggtttatgtagggactggagtgggataacctgacctgaatttcctttctagcttagccacctgtgcctccatttctcatacgtaagttggggtcatagtagtgtctacctcatagaaacataaaatraaatcatatttggaactgctatatgataaaaaaagaatagaagctattaatactacttctatgaagtaacc

SEQ ID NO: 578313 - DNA, 449 bp, Homo sapiens
aatgaagcaaggtcagggtttgtgaaagagcaggcaagtccaaccaagtcttcaaggttatttgtgagcatgaattaaaatttgaaggatgagtatacctcaaattagacatgatgaacaaaacccaatagcttgcagtactrtatgtcagtgattccacccacttgcatgttgaggagctacctgccaattttttcatgatccacttcaaaaaagtagcagaagtgtcaaccgtttgggtgaagatgatattttgggtgaagccctacttcagtttctcttctgtttcaaactataaacccactcaaccattcctgggacataaggctccaccaaggcctctctaattatgtgaagtggttttgtttggcaatactagatgcaatcttactgaataccttagcataagcctttgtgttggagaaaatccaagtttgggtaaagtttca

SEQ ID NO: 578314 - DNA, 449 bp, Homo sapiens
aatgaagcaaggtcagggtttgtgaaagagcaggcaagtccaaccaagtcttcaaggttatttgtgagcatgaattaaaatttgaaggatgagtatacctcaaattagacatgatgaacaaaacccaatagcttgcagtactgtatgtcagtgattccacccacttgcatgttgaggagctacctgccaattttttcatgakccacttcaaaaaagtagcagaagtgtcaaccgtttgggtgaagatgatattttgggtgaagccctacttcagtttctcttctgtttcaaactataaacccactcaaccattcctgggacataaggctccaccaaggcctctctaattatgtgaagtggttttgtttggcaatactagatgcaatcttactgaataccttagcataagcctttgtgttggagaaaatccaagtttgggtaaagtttca

SEQ ID NO: 578315 - DNA, 458 bp, Homo sapiens
cgaagtgccaggcgctgtgctaggtgtcagagataggacagtgaagaagacagagatcatgaccccaaggaacttccattccgctgagggaaatcagtgaaccagtgatttggatatggtgtgtagggactctaactggggtaaggatgggaacctatgggagcaaaggggacagcctcaaagaggtgaaactagagattgaagaccatgagagatggcaggaggggcatttttggaagtgcaaatcccaaggcttgatacccaggaaaaggcaaacagggcccttcaagctgaagcagctgcaaatgaccaaaagacctcccttgtgttgccttcaagaatgatggcctcagcatggaggtgcagacagagaaasttctaacctcctatttctgtgtccttgctgatggaaaattccacaggaaacaggacaaaatgaaacacatgcttctgtgaga

SEQ ID NO: 578316 - DNA, 553 bp, Homo sapiens
gtactgtctgccataggaatgttgaggctaatgtctgcagcagcaataagaggaggaacagtagttgggcaatgattctggggaaggtaatcagtggacagggggctgtggagagggaaaatctaaggaagattattgaattagggaactgtataaaatatgtgatgcttgccttcttgtatcttgataccctcaatgaaaagtggttgaaaacctgttatttattcacttagcaaagcttagggtatttcctgtatagtgctctggagtgtttctataccagtaaaagatgataggcttcttagtccacccatgataattccccactatgtaagatgtaaatgagggagctgacatggctctgttgctgtccttgttgataggttagttccaccttcctaattcagtcagggagaaatcagtacaattcccataacttcctgagkctttcaagacagagaattctgatttagctatttcaatgctttgcctcctacacccattcattcctacctccattttccttaatttccaattaccacagcaatatgga

SEQ ID NO: 578317 - DNA, 464 bp, Homo sapiens
gaatgtatgtatcgtatgtatactaaagggagctcatttgtttatgtaacaggattcaagattggtaacatgcctcaaagcattgttatagggattaaataatcatataatctgtatgaagcagcttttatgccatgatagatactcaataaagaatctaatatatcaacattgtcatccagaacccatatctttgcatctctccattctgcctaccatgccatcaactttttccttgttcatatccagtgagaaaaaaaaaacaactcttgcaaagggtgaggaaccatttttctcaaacatctcataacttattagtaggatttggatcatatttctatatcatcgtctatgtccaagagaatttcatttgcttattaacattgtctgycataaccgagacaagcactgtggttggggaaatgggtttaacatgggtagattaaataatagatagagctgac

SEQ ID NO: 578318 - DNA, 464 bp, Homo sapiens
gaatgtatgtatcgtatgtatactaaagggagctcatttgtttatgtaacaggattcaagattggtaacatgcctcaaagcattgttatagggattaaataatcatataatctgtatgaagcagcttttatgccatgatagatactcaataaagaatctaatatatcaacattgtcatccagaacccatatctttgcatctctccattctgcctaccatgccatcaactttttccttgttcatatccagtgagaaaaaaaaaacaactcttgcaaagggtgaggaaccatttttctcaaacatctcataacttattagtaggatttggatcatatttctatatcatcgtctatgtccaagagaatttcatttgcttattaacattgtctgtcataaccgagacaagcmctgtggttggggaaatgggtttaacatgggtagattaaataatagatagagctgac

SEQ ID NO: 578319 - DNA, 527 bp, Homo sapiens
aaacaccgactatattaaatgtccacatcaatcctgattttagaaacattataatgtgggaaaatatatatttagaattgaggaaatgtggtaatttatattggacatatcaccagggagttacgttgtttaaaactagatattttatgggtaattactgggatttttctaaagagctattaaaggtgaatggtaatgattccctgaaagtrtttcagagtaaagtcaccaagactatgactaaaacacaggaatcacaactttgttggtgcgttggagatcccagaacaatttctagaggtaaaccttggtcatttactcaggttttcccttaagtcacttctgctctgatctctttatattttccctcttgtaaagaatggtcagccacctatttaagaaaaaatagtgcaagcctctaagtaatgagtaaatgaaggaaagaagagaggaacaaactgaattgaccgagcaggcagagtgttctccaaaaaatcatctatcactaagtttgttactcctgcttt

SEQ ID NO: 578320 - DNA, 526 bp, Homo sapiens
agagaggaacaaactgaattgaccgagcaggcagagtgttctccaaaaaatcatctatcactaagtttgttactcctgctttctgaatcttctacttctctatctcactgtgggaggcaggagaatgacccccaacagatgtcaacaccttaatccccaacctgtgaatatgttgttacatggcaagggggaattaaggctgaagatgaaattaaagttgctaatcagctgaccttaggataaggagattagcctggattatccaggtgggcacaatgtcatctaagaacccttaaatggggaagagggaggcagaagagccagaaccagagagaaggcactatgcgaaacagtgggcagccactgctggctttgaagaccaagggagccatgaggtaaggaatgcagcagcctctrcagccgggaagcagattcttctctacagactccagaaaggaacacagccctgctgactgacttcaggccaccagaatgaggtgataataaacttgcattgtcttgagcc

SEQ ID NO: 578321 - DNA, 625 bp, Homo sapiens
ttcaccattgaattgattctaataatggaagaaacttgaattgaggaaataatcaagttaataaaagcagagactaaagctattctgcatgttatagctaattttttttttattttgcagaggaggttgtgattacaagctattttcatttttaaaaataacttaatcctttgtttcattgtactgacattgattaactgagaccatttcatcaaatatccatgattaaaaaggctgcccttttagaaaagatagacatgaaaagaagaaagcgtttacctaatgctggaattccccctagaaggataaacttttataattatcctctgcaggatctaactctgaagcagtgctgttgcrtcttctgcccaatgcaccctaaattaggaaagccagattggcctgataattggagagttacgtttcccttgtgtgccctcagatctataattgggccctgccgtgttctgagaagatgcctcaggtaagatgacagaaccctgtgtgagctctatctgcatctctggcacatacaaagaaacttatatttacaagctaaggcattttattcatatgcaggtagcaggcctgttcgaatgagcacaacttctccatggttttgagt

SEQ ID NO: 578322 - DNA, 625 bp, Homo sapiens
ttcaccattgaattgattctaataatggaagaaacttgaattgaggaaataatcaagttaataaaagcagagactaaagctattctgcatgttatagctaattttttttttattttgcagaggaggttgtgattacaagctattttcatttttaaaaataacttaatcctttgtttcattgtactgacattgattaactgagaccatttcatcaaatatccatgattaaaaaggctgcccttttagaaaagatagacatgaaaagaagaaagcgtttacctaatgctggaattccccctagaaggataaacttttataattatcctctgcaggatctaactctgaagcagtgctgttgcgtcttctgcccaatgcaccctaaattaggaaagccagattggcctgataattggagagttacgtttcccttgtgtgccctcagatctataattgggccctgccgtgttctgagaagatgcctcaggtaagatgacagaaccctgtgtgagctctatctgcatctctggcacatacaaagaaacttatatttacawgctaaggcattttattcatatgcaggtagcaggcctgttcgaatgagcacaacttctccatggttttgagt

SEQ ID NO: 578323 - DNA, 625 bp, Homo sapiens
ttcaccattgaattgattctaataatggaagaaacttgaattgaggaaataatcaagttaataaaagcagagactaaagctattctgcatgttatagctaattttttttttattttgcagaggaggttgtgattacaagctattttcatttttaaaaataacttaatcctttgtttcattgtactgacattgattaactgagaccatttcatcaaatatccatgattaaaaaggctgcccttttagaaaagatagacatgaaaagaagaaagcgtttacctaatgctggaattccccctagaaggataaacttttataattatcctctgcaggatctaactctgaagcagtgctgttgcgtcttctgcccaatgcaccctaaattaggaaagccagattggcctgataattggagagttacgtttcccttgtgtgccctcagatctataattgggccctgccgtgttctgagaagatgcctcaggtaagatgacagaaccctgtgtgagctctatctgcatctctggcacatacaaagaaacttatatttacaagctaaggcattttrttcatatgcaggtagcaggcctgttcgaatgagcacaacttctccatggttttgagt

SEQ ID NO: 578324 - DNA, 617 bp, Homo sapiens
aactgaatgtaaagctcttgggtactccatttacatcattgtattagtcagtgttctctagacggacagaactaataggatagataaatatataaaggrgagtttattaagtattaacttacatgaacacaaggtctcacagtaggtcgtctgcaagctgaggagcaaggagagccaggaatcccaaaactgaagaacttggagtctgatgttcgagagcaggaagcatctaacacgggagaaagatgtaggctgggaggctaggtcaggccagtcttttcatgtttgtctgcctgctttatattctagccactctggcagctgattaggtggtacccacctagattaagggtaggtctgcctttcccagcccactgattcaaatgttaatctcctttggcaacatcctcacagacacacccaggataaatactttgcatccttcagtccaatcaagtcgacactcagtattaaccatcacaatcacaatactgaattttcatggcagtcatcttgaaaatgtttcagatcattaatgtgtttaattttgaacttgtagcaacttgatacataaactttgcttttgaatcatgcaaatgtgagcaagacgaagcagg

SEQ ID NO: 578325 - DNA, 502 bp, Homo sapiens
ctcaggatatttttctgaaaaatcactaatgacacaattcagtatacagtaggcactcacagcttgagaagaatttacatggaaatactttatagcaattaaaatattctaccagattcgttacattagatttaaaataaaatgagatagtactttattgccatgctggaaatgtgagactttttaaaaatccatatgcatatttatattgattaaaaatgaatagttctgacactctcctcatatttttccacctggaggcagtatagaaaacatgatatgacttattggggaagcaaagatttggatactgcgttaatccacaactgaatgtaaagctcttgggtactccatttacatcattgtattagtcagtgttctctagacggacagaactaataggatagataaatatataaaggagagtttattaagtattaacttacatgawcacaaggtctcacagtaggtcgtctgcaagctgaggagcaaggagagccag

SEQ ID NO: 578326 - DNA, 567 bp, Homo sapiens
cgagtatccatacaaccattctgttttcacattcagtgcagtattcagtaaattgcatgagatattcaacattttattataaaataggctttgtcatagatgactttgcccaattgatgttctaagcacatataagttagtctaggctaagttatgatgttccataggctaggtgtattagatgcattttgacttacgatattttcaacttacaatgagtttatcatgacttaactgtattataagtttaagagcatctttatacatatggttttgtactatccatggtttcagacacccaatggagctcctagaacatatgccttaaggataatgggggattactataaatggaaggatatatttcatattcatggataggaaggtacaatattgacaacawgtcgattctacccaacttgatctatagattttaatgcaatcccagtgagaattccagcaagttattttttggatatcaacaaagtgattctaaattttgtggaaaaaaggcaaaaatacttagaataaccaacacaatactgaaaaagaaaagccaagttggag

SEQ ID NO: 578327 - DNA, 643 bp, Homo sapiens
ctatccatggtttcagacacccaatggagctcctagaacatatgccttaaggataatgggggattactataaatggaaggatatatttcatattcatggataggaaggtacaatattgacaacatgtcgattctacccaacttgawctatagattttaatgcaatcccagtgagaattccagcaagttattttttggatatcaacaaagtgattctaaattttgtggaaaaaaggcaaaaatacttagaataaccaacacaatactgaaaaagaaaagccaagttggagggctgacactatctgacttcaaggcttattataaaactacggtaattagacagtgtaataaacaactagatcaatggaacagaataaagagcccataactagacccaactaatcttgacaaagaaacaaaggtaatagaatggagaagatagtcttttcaaccaataatgctagaacattggatatccacatgcaaaaaaagaaatctagacacagtacttacagccttcacaaaaattaattcaaagtgagtcacggacctaactgaaaacagaaaactataaaccttttagaaggtaacataggagaaatatctaaatgacttaggcttcagcagtgacacaatacccaaga

SEQ ID NO: 578328 - DNA, 606 bp, Homo sapiens
tacaatattgacaacatgtcgattctacccaacttgatctatagattttaatgcaatcccagtgagaattccagcaagttattttttggatatcaacaaagtgattctaaattttgtggaaaaaaggcaaaaatacttagaataaccaacacaatactgaaaaagaaaagccaagttggagggctgacactatctgacttcaaggcttattataaaactacggtaattagacagtgtaataaacaactagatcaatggaacagaataaagagcccataactagacccaactaatcttgacaaagaaacaaaggtaatagaatggagaagatagtcttttcaaccaataatgctagaacattggatayccacatgcaaaaaaagaaatctagacacagtacttacagccttcacaaaaattaattcaaagtgagtcacggacctaactgaaaacagaaaactataaaccttttagaaggtaacataggagaaatatctaaatgacttaggcttcagcagtgacacaatacccaagacacaatctgtgaaagaaaaaaataataagctaggctttattaaaattaaaaatttctgacctgcaaaagac

SEQ ID NO: 578329 - DNA, 532 bp, Homo sapiens
ccataactagacccaactaatcttgacaaagaaacaaaggtaatagaatggagaagatagtcttttcaaccaataatgctagaacattggatatccacatgcaaaaaaagaaatctagacacagtacttacagccttcacaaaaattaattcaaagtgagtcacggacctaactgaaaacagaaaactataaaccttttagaaggtaacataggagaaatatctaaatgacttaggcttcagcagtgacacaayacccaagacacaatctgtgaaagaaaaaaataataagctaggctttattaaaattaaaaatttctgacctgcaaaagacactctcaagagaataaaaagagaagccacagactgggaaaaatatttgcacaagacctctgataaaggacagctatccaaaatacacaaagaactcttgcaaacccaacaataaaaaaaaaaaaaacaccaaattttaaaactggaccaaaaaccttaagatgcctcacccaagaaggtaacaagactgaattagttct

SEQ ID NO: 578330 - DNA, 608 bp, Homo sapiens
ttagttctcacaagaatgaattaatccctatgagaatgggttgttttaaagtgaggtcgtctcttgagtttggtctctttacacacacctgctttcctttccactctctgccatgtatgggacagcaggaagccctcaccaaaagccaagcagatgccagtcctatgctcttggactttctagccatcagaatcatgagccaaagaaaccccttttctttaaaaacttacccagccttaagtattctattatagcaacccacagaatggaccaagacagcagggttttgtttgtttgtttacaaaactaaacatacacttactatgcaatctagcaattgtggcccttgggatttgcccaatggagttgaaaactgatgtctacacacacacacacaaactgcatgtrctataaaagtttatagcacttttatttgtaattggcaaaacatggaagcatctggaatctctttcaataggtgaagagataagctgtggtacctccaaacaatgaaatgttatttattgctaaaaagaaaaagctatcaagccatgtaaatattattaagtgtaataagccagtcagaaaaggctacctactgtataatt

SEQ ID NO: 578331 - DNA, 590 bp, Homo sapiens
gtcttccacaatggttgaactagtttacagtcccaccaacagtgtaaaagtgttcctatttctccacaccctctccagcacctggacaggtggtttaaaaaaagtattaaatggattgttttatgccaaaagaaattattggggagaaggtgtggagatggatgrcaatactaaaaccattacaagcagaaaggacagatacattacatagcagagaggaaggggatgtggtgagagcaaagtactgcaaaatggcagtgggagatgagactggaaatgtggacacgaggccaatgagtgtacagctgccggagaaagacagtgcaggggatgtcatcacaggctctcaggtgcctatgatgtcccttccaatcctggttcttccacctatcagcctcagtttcctcaactgcaaaatggagatgataacagcaagtagcctcagagaattcctgtcagtattgaataggagaacttcttccacagtgcatactgtatcaagggatcaaaaaagcatgagttcttattattcaccacattgggtcttgttgggtcttgttgtgtcaccattagtgaggtcttgctctact

SEQ ID NO: 578332 - DNA, 590 bp, Homo sapiens
gtcttccacaatggttgaactagtttacagtcccaccaacagtgtaaaagtgttcctatttctccacaccctctccagcacctggacaggtggtttaaaaaaagtattaaatggattgttttatgccaaaagaaattattggggagaaggtgtggagatggatggcaatactaaaaccattacaagcagaaaggacagatacattacatagcagagaggaaggggrtgtggtgagagcaaagtactgcaaaatggcagtgggagatgagactggaaatgtggacacgaggccaatgagtgtacagctgccggagaaagacagtgcaggggatgtcatcacaggctctcaggtgcctatgatgtcccttccaatcctggttcttccacctatcagcctcagtttcctcaactgcaaaatggagatgataacagcaagtagcctcagagaattcctgtcagtattgaataggagaacttcttccacagtgcatactgtatcaagggatcaaaaaagcatgagttcttattattcaccacattgggtcttgttgggtcttgttgtgtcaccattagtgaggtcttgctctact

SEQ ID NO: 578333 - DNA, 603 bp, Homo sapiens
agtcttgcagtggaacaaagtttattttcatttaaaagccacaataaatatagaaacataattgagtggctgaaggaaaaggaataagttaggagtcatagaaataatctctaatccactgagaattttaatcttttaaattaaagcattagaaaacttaaagscttaatatacacaactccggtaatttaaggtgctctttatttgtacctagtaccatttccttaatcacaactagtaaaattagcaggcaagggcactgttatgcccttctatcctagccacagtctctgtgacgtatgaataggacataattcttgggagggaggaggtgcctaagggaaaaacgaaaggaaggaaacacaacaacaaaataagtccaaataaactatgacaatagggctgatactttatatttgcattatattttacagtttatgaagtgtttttccattcattcaattatttagtcttcactattctttaaaattattattgtccctaccttacaggtgaggaaaccatagctggaagaaattaagtaaactatatatcatttaaaaatacataaattattattttactcatattactaagaactag

SEQ ID NO: 578334 - DNA, 548 bp, Homo sapiens
agggggttgttctctggcgggaaggagtgggggtcacaaggtactcagtaggggagcttctgagccaggatgagctaggagaaggaatttcacaagataatgtcatcagttaaggcaggaacaggccattttcactccttttgtggtggaatgtcatcagttaaggcaggaactggccatctggatgcgtatgtgcaggtcacaggggatatgatggcttagcttgggctcagaggcctgacaagctggacttcctgggtcgagtagggacttggagaacttttctgtccagctagagaattgtaaatgcaccagtcagcactstaaaaactcaccaatcagcactgtgtctagctaaaggattgtaaatgcaccaatcaccactccgtaaaaacgcaccagtcagcgctctgtgtctagctaaaggattgtaaatgcaccagcaacgctctgtaaaatggaccaatcagcactctgtaaaatggaccaatcagtaggacatgggtggggccaaataagggaataaaagctggccacccaagccaaca

SEQ ID NO: 578335 - DNA, 621 bp, Homo sapiens
caaactaaactgagtcccttttagcaagctctggactgaattcatccctgaccaccatgtttatttgtttttgttttgtgttttctgtttttgtttttgttttttttgagacggagtttcactctgtcgcctaggctggaatgtagtggtgtgatctgactcactgcaacctctgtctcccgagttcaaatgattctcctgcctcagcctcccgaataactgggattacaggcrcctgccactacacccaactaatttttcatatttttagtagaaatgggatttcaccatgtgggccaggctggtctggaactcctgattcacccgcctcggcctcccaaaatgctgggattacaggtgtgagccaccatgtcaggcctctgaccaccatgtttattaattatctcacctttcttctgttagccccctacagtgggcttggtaaagaggaagctcagagacactgccagctctccccagacaggtgcagctcctgtcccaagagggacttaggggagtcagcaatctctgaaattataagtagcagtttgcatatgttttcatctatgtgtttttctgaggtaaaagtctcgcactgatcttcaatctcaacatgatctg

SEQ ID NO: 578336 - DNA, 645 bp, Homo sapiens
ttgtcactttaggaagttttatttaggaggctcccccttatttagcaattcttcttccttgagaaattccatttcctcaagaagtgaatctaatgtgaccaagtaatttactcttaattaaaaagttagcttcccatagcaatgaaagwctagaataatggaaagatttgtggctgaagaaattacctctgtttcaacatttctatttctatttctatttatttagcaacctataataaaatagaaaataacccaaaatggcatggtcttttccccaccctacatcagagggtgaaattcttaaattcctatagagaacactccaggggttgagttctctaaatctctttcatctcctgtcttacccctacaaaattggtcagtgggattttcctcatcattctatcgtatatgatcagcacacctggaaattaacaacaaaagcaaaaataataaggaactatttgtatataccagacactgttataagtaatttaaatatattaactcacataatataattccaggagccaaatcattatagttcccattttatagatgagaacaaatacctagaaataataatcactacatcagatattcttagctacttaatgcaatcatgagataaagaacctgaatgcg

SEQ ID NO: 578337 - DNA, 603 bp, Homo sapiens
tgggcaagacatttgtctgggtcaaagcatttgagacctagttctaattccacttattagggattaattattgattcttgaacgtgttatttcactgctttaaagccaaatttcttctagtatgtaatgagattatgtagcatttgccttgtttatctcataggctgtaaatattaaaacaacaataatgtataaaaaaagctctttgaaactataaaatgtatttccaatgtgtagtttttactgaaattgaagtccaggtttcttgacgtagcattcaaaacctccaaaatctgactatgagcagtatatccaaataatctcccaagtcagwtatgtccaaatcctccatgtcttctgggtcctccctctgtactttgagaccttggaatatacagcttcccctgcccagaatgccttttcattccatggcctctttcagatacttactcattctttaagacctaaataaaatccaattttctccaagacactgtctacaattcctcagcaggaattaatctctcccttccctggactttcataccacctagttaccatctgtgagctcttactatatatctgacattgtgccaatgcatt

SEQ ID NO: 578338 - DNA, 586 bp, Homo sapiens
tcaaattaaccttcaatatcccgttccatagctatgataaaatttgtcttcctgaaacattagattgttattccagcatgttacttataaagaaaggattgtgcacaagaaaatatttccttttgtcatatcaggaaatgtagaaacagggaatatgggaggcatgtggaaatataatttcagttctctaaaccaatttgaaaatcattaaagggatggcagtggaagtttcaatatattataattagaagggaccatagycttagagataagaaaaatgaagccagagatatcaagtgacttgtgcaaagtcatacagtcatttaatgtcaaagtgtcgaaagtcaaggtgaagttaggttctttatgctcagtgcagtgcttttctcaatacaccataccattaggttagtcagagaacccagactaacaatgtccattccctctacaatcgatagctttaattggttttggtgataatggccatacctatcattaatagtctcagagatgtttcgatttaacaacaatgtctggcattgagtgcatttcatatgtacttgtccgtgtgtgaagcacgttgtat

SEQ ID NO: 578339 - DNA, 586 bp, Homo sapiens
tcaaattaaccttcaatatcccgttccatagctatgataaaatttgtcttcctgaaacattagattgttattccagcatgttacttataaagaaaggattgtgcacaagaaaatatttccttttgtcatatcaggaaatgtagaaacagggaatatgggaggcatgtggaaatataatttcagttctctaaaccaatttgaaaatcattaaagggatggcagtggaagtttcaatatattataattagaagggaccatagccttagagataagaaaaatgaagccagagatatcaagtgacttgtgcaaagtcatacagtcatttaatgtcaaagtgtcgaaagtcaaggtgaagttaggttctttatgctcagtgcagtgcttttctyaatacaccataccattaggttagtcagagaacccagactaacaatgtccattccctctacaatcgatagctttaattggttttggtgataatggccatacctatcattaatagtctcagagatgtttcgatttaacaacaatgtctggcattgagtgcatttcatatgtacttgtccgtgtgtgaagcacgttgtat

SEQ ID NO: 578340 - DNA, 586 bp, Homo sapiens
tcaaattaaccttcaatatcccgttccatagctatgataaaatttgtcttcctgaaacattagattgttattccagcatgttacttataaagaaaggattgtgcacaagaaaatatttccttttgtcatatcaggaaatgtagaaacagggaatatgggaggcatgtggaaatataatttcagttctctaaaccaatttgaaaatcattaaagggatggcagtggaagtttcaatatattataattagaagggaccatagccttagagataagaaaaatgaagccagagatatcaagtgacttgtgcaaagtcatacagtcatttaatgtcaaagtgtcgaaagtcaaggtgaagttaggttctttatgctcagtgcagtgcttttctcaatacaccataccattaggttagtcagagaacccagactaacaatgtccattccctctacaatcgatagctttaattggttttggtgataatggccatacctatcattaatagtctcagagatgtttcsatttaacaacaatgtctggcattgagtgcatttcatatgtacttgtccgtgtgtgaagcacgttgtat

SEQ ID NO: 578341 - DNA, 740 bp, Homo sapiens
gttgaagcttgaggccattactccaagcaaaataatgcaggaacagaaaaccaaacaccacatattctcacttacaagtgggagctaaacactgagtagatatggacactaagaagggaacaactgttaccagggtctactcgagggtggagggtaagaggaggataaggatcaaaaactcctatcaggtactatccttattgcctgggtgattaaatgatctgtacaccaaatccacatgacacacaatctacatatataacaaacctgaatatgcaccccctgaacctaaaagtatttttaaaaaacattttaagccaaaaatatatacattcttcatacttgttcctcatgcagatcacatcacaatttctttcacagtcacaaataaaaattactkaaaggtaaatgcaaagcaaaaaataaagatctatgataaagaattaactcagttacataaaaaatctatgataaagaatgtaactcagttacataaagctctatgatcaataactaaaatgcattgattattcattaggttcagaaagatgcctgatcctaacctaatactgacattatccttccactcacccaactctaaatggttgtttttgatttgttttgcttctttttcaaattgtgataaattaattgcctccatctcctagaaatccagatttatgttctctttaaatattttaccagtactttggaggttaaatttttaagggcaaatattt

SEQ ID NO: 578342 - DNA, 568 bp, Homo sapiens
tcattttcaactgagaacagaatgaatttatcttcctttgtctgaaaatcatatgggtgttgaaaattgccaagcttcaatatccagtcaacattaagcaaaatgaaccaaggatagcaatagctagaaccattaccaaatgctacccataaattaaagaaatgttgtctccttagcatgtgatttacttggaaagcttttagtgctaatttctaatggatgccaaaagttattttattgagacgaagcattttagtgttgagttcagttccagtaccaatgctgtttccaataagctttcagatgaacacttcaacataattcctgttttgctacatattctggggactcaattagaaagaatgacaacattcctgcattctctggatttcactataaaggaatttgagagtccagcttgggtaaatcaaccaacccaaaaagcactggaagcagggctctttaagactaaacyctttcccctgatgataatcgtcaaaggaagttatctcataactaagaaagctagcaataccaatataatacaggttttataaatttcctaatg

SEQ ID NO: 578343 - DNA, 557 bp, Homo sapiens
ttattctttggatttttttttaaagaacattctgttcttgttccatgaatgcaacagattctgacagcgtttgctcaattttaggagcatttctgtggagggacacgtcagaactacctactctgccatttttgttgcatcatcctggaactattttttttagttgatattcctgaggtagctaagtagacactaatgtcacctacaaataatgactatttgtttttgaatccttataaatattagtatcttatatctgttgctgtgttactgcaatagttggaactgccaaaacaaacttgaagagttactgtgataagtgacactatgttctggttcttatatttaatagatcacagcaattattatctctagtggttcacctgmaagcaaaaattttgctttttattttaaatattttatcaagaagatccataccattcctgtacagataatttcatcaggaatgaagtctgaattgcatcaactgctctttttggcatttaccgttcttgttttacattaaacctataaatatgattttgtaatgatgaatc

SEQ ID NO: 578344 - DNA, 397 bp, Homo sapiens
aaacccatataatttttgttagcaactagtcatatgaacttcaatattaaagtggtactgaaaatggaaaatacatgctttttcaacacattagcccacccaaagatgaacagtttaggtcattttctaaaaggtttttattaccaacatcattttaaattaaactgaaaccttaacaatcatacatatggtcgcaacatttattatgtaatcacatttttcctttttaactttttagtataaaacatagcaaatacaaccaattattaaaatacactcttaagcaaggcacagaaagacaaacaccacatgatctcactgataygtggaatctaaaaacgtcaaactcaaaaatgtatagcggagaacgatggttatcagagggtgagggtgaggg

SEQ ID NO: 578345 - DNA, 611 bp, Homo sapiens
aggattttcagccatgcccagtggcttatgcctgtaatcccagtgctctgggaggccgagacggaagattgcttgaagccaggagtttgagaccagcctgggcaacattgcaagaccccacctctacaaaatatttaaaaattagccagatgtggtggcacacacctgtagtcctacctactcaagaggctgaggtgtgaggatcacttgagtgcaggggtttgaggcttcagtgagctatgattgtgccagcctgggtgagagggcaagaccctgtctccaatcaaataaataaataaataaataaaaatctaaaaataggattttaaataaattctacctcatactttaatatggaattaacagaaagaatttcagtcaaatttttaagttagttgaattgartaataaagaaatatagtgaagtcagccgcttcaccgtttctgaaagacatttggttcatttcttccttcaaaatcctgatcagacaattcctactactagaattcccaccctgcttccccaccacctttcataatccccaaatccttcagggcctctgtcagtaaccaccacctccatgatgctgtcacctattacaaaataggtg

SEQ ID NO: 578346 - DNA, 554 bp, Homo sapiens
actttgtgcttaactcaagtgcctctccctgccccccttggccactctgctgctctatcatacttacagaaacctaatccacttgtatatagtcttctacatttcaattcacgtggtgactctcaggatttggggattagaaagactacttaatttcatgtttaccaagcatcaaatcagagcacagttaatgaagtcctcctttttcttttatctggagatactttgttttttatttttaatttttatgagtacacagaaggtatatatatttatggggtacatgtgatgttttgatacaggcatgcaatgagtaataatcacatcatagaatatggggtatccatcccttcaagcatttatcctttgtgttacaaacaatccaattatactcttttagttctcttaaagtgtacaattaaattattattgactatagtcactctgttgtgctataaaatactagatattattcattcattctatttctttgtacccattaaccmtccccaccactgccctacccccaactacctttcccagcctctggtaac

SEQ ID NO: 578347 - DNA, 535 bp, Homo sapiens
atgaaactgttcttttgggttttttaaaaatagatgcacaatggaatgtgtcagcatggaggtaaaggtatacattaagaaaatctgaacaagcatttttctatttgctgtaaatgcatcttatgtctataagaggaaagcccctagtcaacctggacttaacacatgcatggacctgtgaacctaacttgttcgtgagcaaaagaaacttgcttgctcaggaattgataaaatgcaacaattattcattcgatgatcacaaaatatgtactgagtgactatyatatgccaggcactattttaggtctttgggatgcaatactggaaaaaaaacaaaaacaaaaacaaactatggtctctgctctcatggaactgttactttagtaaggcaagacagagaatagacaataaaatactaaacaagcaaattatatattatgataaaaggtgatacatgcctcagggaagagaaaaaatagagcaggttaagggagtttggaagtgggtggaggagaagatgtgatgtgcaatttca

SEQ ID NO: 578348 - DNA, 446 bp, Homo sapiens
tggaagaacccagtcagcgtgatgatatctctcgccttacagttcagatggaaaacacctatcagttgggtgtgttcttttatctctcactcctattttaaacttctaaattggtgactgattctcttaaaaatgatatttgataacctggcattgtcttcaattctagcacaatataagggactttaatgaattgagtgatttgatgttgctttagtttcttcctcagcaaaaaggtaacaacacttgctgtcttacttttctttactaatgtttcccaaatgccaaacaattcactgggtggcactgatgcatacagtatactactgacttaacaaattcactgagtatttctgggtacatagatatgacttaaatgaaagagataagtattgmtattttatccaacaaaaccaatcagtgttgttaggtgaaggaaaaaaaaa

SEQ ID NO: 578349 - DNA, 528 bp, Homo sapiens
atgagtctttagggttttctaggtatatgatctgtctgttttgtctgctatataagtagttactcctgcttactttyggctttcatttgcagggaatacctttttccatcccttttccttaaatttatgtgcgtccgtatgtgttaggtgagtctcttgaagacaacagatacttggtggatttttattcattctgccattctgtatctttcacatggagcatttaggccatttacagtcgatgttagtattgagatatgaggtattgttctattcctgatgctagttgttgcctgaaaaccatggccttttttttcattgtgttacggttttataggccctgtgagatgtatgctttaagaaggttgtattttggtgtatttcgatgttttgttttaagatttagaacttttagcatttcttgtagtgctggcttggtagtggcatgttctctcagcatttctttgtctgaaaaatactttatctctccttcatttatgaagcttagttttgctggatacagaattc

SEQ ID NO: 578350 - DNA, 528 bp, Homo sapiens
atgagtctttagggttttctaggtatatgatctgtctgttttgtctgctatataagtagttactcctgcttactttcggctttcatttgcagggaatacctttttccatcccttttccttaaatttatgtgcgtccgtatgtgttaggtgagtctcttgaagacaacagatacttggtggatttttattcattctgccattctgtatctttcacatrgagcatttaggccatttacagtcgatgttagtattgagatatgaggtattgttctattcctgatgctagttgttgcctgaaaaccatggccttttttttcattgtgttacggttttataggccctgtgagatgtatgctttaagaaggttgtattttggtgtatttcgatgttttgttttaagatttagaacttttagcatttcttgtagtgctggcttggtagtggcatgttctctcagcatttctttgtctgaaaaatactttatctctccttcatttatgaagcttagttttgctggatacagaattc

SEQ ID NO: 578351 - DNA, 583 bp, Homo sapiens
aacaagagtgtaaaagcgttcctatttctccacagcctcactagcatctgttgtttcttgatgttttaataattgccactctgactggcatgagatagtggtatctcattgtggttttaatttgcatttctcttaatgatcagtgatgttgaactgttttttacatggtttttggccacataaaagtyttcttttgagaaatgtctgttcatgtcctttgcccatccttttttttttttttttttttttatggagtctccctctattacccaggatggagtgcagtggccaatctcggctcactgcaacctctgccacttgggttcaagtgattctcctgcctcagcctcctaagtagctggaattacaggcgtccatcaccacacccagctaacttttgtatttttagtagtaacggggtttcgccatgttggccaggctggtcttgaactcctgacttcaggtgatccacccgccttggcctctgaaagtgctgagattacaggagtgagccactgtgcccagccctttgctcactttttaatggggttgtttgtttttttttcttgtaaatttgtttaag

SEQ ID NO: 578352 - DNA, 583 bp, Homo sapiens
aacaagagtgtaaaagcgttcctatttctccacagcctcactagcatctgttgtttcttgatgttttaataattgccactctgactggcatgagatagtggtatctcattgtggttttaatttgcatttctcttaatgatcagtgatgttgaactgttttttacatggtttttggccacataaaagtcttyttttgagaaatgtctgttcatgtcctttgcccatccttttttttttttttttttttttatggagtctccctctattacccaggatggagtgcagtggccaatctcggctcactgcaacctctgccacttgggttcaagtgattctcctgcctcagcctcctaagtagctggaattacaggcgtccatcaccacacccagctaacttttgtatttttagtagtaacggggtttcgccatgttggccaggctggtcttgaactcctgacttcaggtgatccacccgccttggcctctgaaagtgctgagattacaggagtgagccactgtgcccagccctttgctcactttttaatggggttgtttgtttttttttcttgtaaatttgtttaag

SEQ ID NO: 578353 - DNA, 609 bp, Homo sapiens
ggctcacagttctgcaggctgtacaggaagcatggtgacagcatctgctcagcttcagtggaggcctcagggagcttttactcctggtggaaggtgaagcaggagcacacatgtcacatggccagagyaagagcaagagagagagatggcgggagaggggaaggtgccacacaattaaacagccggatctcatgaggactcagtctctattgtgagggcagcaccaggccatgagggatcttcccccaggtcccaaacttctcccaccagtccccacctccaacaccaacatatttcatcatgagatctggaggggccatccaaactatatcatcctccaaccagtcatactaaacttctttcaaattctggaacttgtcatgccttctttctttattataactccctgtattattccattcatagtccatgcttggcctttttcacatcccttttcctctattcatttccactcattatgctgatctcagtttaaattaactttgccaaggaagcctattttagcaatctcgagttgtgtgcctacccaatgatgttgggttgcctgactactcaacctcttgtctatgttaagactttctccatcag

SEQ ID NO: 578354 - DNA, 609 bp, Homo sapiens
ggctcacagttctgcaggctgtacaggaagcatggtgacagcatctgctcagcttcagtggaggcctcagggagcttttactcctggtggaaggtgaagcaggagcacacatgtcacatggccagagtaagagcaagagagagagatggcgggagaggggaaggtgccacacaattaaacagccggatctcatgaggactcagtctctattgtgagggcagcaccaggccatgagggatcttcccccaggtcccaaacttctcccaccagtccccacctcyaacaccaacatatttcatcatgagatctggaggggccatccaaactatatcatcctccaaccagtcatactaaacttctttcaaattctggaacttgtcatgccttctttctttattataactccctgtattattccattcatagtccatgcttggcctttttcacatcccttttcctctattcatttccactcattatgctgatctcagtttaaattaactttgccaaggaagcctattttagcaatctcgagttgtgtgcctacccaatgatgttgggttgcctgactactcaacctcttgtctatgttaagactttctccatcag

SEQ ID NO: 578355 - DNA, 609 bp, Homo sapiens
ggctcacagttctgcaggctgtacaggaagcatggtgacagcatctgctcagcttcagtggaggcctcagggagcttttactcctggtggaaggtgaagcaggagcacacatgtcacatggccagagtaagagcaagagagagagatggcgggagaggggaaggtgccacacaattaaacagccggatctcatgaggactcagtctctattgtgagggcagcaccaggccatgagggatcttcccccaggtcccaaacttctcccaccagtccccacctccaacaccaacatatttcatcatgagatctggaggggccatccaaactatatcatcctccaaccagtcatactaaacttctttcaaattctggaacttgtcatgccttctttctttattataactccctgtattattccattcatagtccatgcttggcctttttcacatcccttttsctctattcatttccactcattatgctgatctcagtttaaattaactttgccaaggaagcctattttagcaatctcgagttgtgtgcctacccaatgatgttgggttgcctgactactcaacctcttgtctatgttaagactttctccatcag

SEQ ID NO: 578356 - DNA, 609 bp, Homo sapiens
ggctcacagttctgcaggctgtacaggaagcatggtgacagcatctgctcagcttcagtggaggcctcagggagcttttactcctggtggaaggtgaagcaggagcacacatgtcacatggccagagtaagagcaagagagagagatggcgggagaggggaaggtgccacacaattaaacagccggatctcatgaggactcagtctctattgtgagggcagcaccaggccatgagggatcttcccccaggtcccaaacttctcccaccagtccccacctccaacaccaacatatttcatcatgagatctggaggggccatccaaactatatcatcctccaaccagtcatactaaacttctttcaaattctggaacttgtcatgccttctttctttattataactccctgtattattccattcatagtccatgcttggcctttttcacatcccttttcctctattcatttccactcattatgctgatctcagtttaaattaactttgccaaggaagcctattttagcaatctcgagttgtgtgcctacccaaygatgttgggttgcctgactactcaacctcttgtctatgttaagactttctccatcag

SEQ ID NO: 578357 - DNA, 566 bp, Homo sapiens
ggatgacccaatagtgtcaagatgtctgttcttgtcaacttgatatatagattcaatgaaatctccccaattgatattttgtggatatcaacaaaataattccaaagtttatatggaagcaaragacctagaatagtcaccgtgatattgagttaaaggaataaatttgaagcactgacattacccaacttcgatacttactataagactacagtaatcaagattgtgtagtattggtaaaaataaacaaagagaagaatggaatagaatagagagtccagaaataggcccacatgaatatattcaactgatctttgacaaaggaacaaaggcaacacaaagaaggaaagaaagtcctttcaacaaatggtgctggaacaactggacatttacatgcaaaaaaatcaatctagacacaagccttacacccttcacataaaataactcagaatgaatcacaaacctgaatgtggaatgaaaaactataaaactcctagaacatgagataggggagaatctagatgaccttggatttggcaatgacctttttgatataacaccaaagg

SEQ ID NO: 578358 - DNA, 566 bp, Homo sapiens
ggatgacccaatagtgtcaagatgtctgttcttgtcaacttgatatatagattcaatgaaatctccccaattgatattttgtggatatcaacaaaataattccaaagtttatatggaagcaagagacctagaatagtcaccgtgatattgagttaaaggaataaatttgaagcactgacattacccaacttcgatacttactataagactacagtaatcaagattgtgtagtattggtaaaaataaacaaagagaagaatggaatagaatagagagtccagaaataggcccrcatgaatatattcaactgatctttgacaaaggaacaaaggcaacacaaagaaggaaagaaagtcctttcaacaaatggtgctggaacaactggacatttacatgcaaaaaaatcaatctagacacaagccttacacccttcacataaaataactcagaatgaatcacaaacctgaatgtggaatgaaaaactataaaactcctagaacatgagataggggagaatctagatgaccttggatttggcaatgacctttttgatataacaccaaagg

SEQ ID NO: 578359 - DNA, 566 bp, Homo sapiens
ggatgacccaatagtgtcaagatgtctgttcttgtcaacttgatatatagattcaatgaaatctccccaattgatattttgtggatatcaacaaaataattccaaagtttatatggaagcaagagacctagaatagtcaccgtgatattgagttaaaggaataaatttgaagcactgacattacccaacttcgatacttactataagactacagtaatcaagattgtgtagtattggtaaaaataaacaaagagaagaatggaatagaatagagagtccagaaataggcccacatgaatatattcaactgatctttgacaaaggaacaaaggcaacacaaagaaggaaagaaagtcctttcaacaaatggtgctggaacaactggacatttacatgcaaaaaaatcaatctagacacaagccttacacccttcacataaaataactcagaatgaatcacaaacctgaatgtggaatgamaaactataaaactcctagaacatgagataggggagaatctagatgaccttggatttggcaatgacctttttgatataacaccaaagg

SEQ ID NO: 578360 - DNA, 563 bp, Homo sapiens
aaattgaaaatagttctctgaactatyaagaaaaaactaaaaattgaaatctgtttcttaatagaagcattaagatcataaatcatggcaggcagaggggagaagtcatctcaaaagggtaaagtgcaatcccctaagaacagaacacttgagctcagcctaaagggcatatcttcaaattgcacatgttggtttgttattttagaactgctcttgagagctggggttataggaaaggccttgtttccattggctgctataaataaaatgtgaaccattatatcatctcttaagagagttttatagaaacaccaggcatagcttcaagtatagcaatttatacaagtacctctctaaatatatgtcttggaatcgttgctaaaccaggtaataagggacattaccacttttgctaaggcatatttgtgtgacagattagaccctgtttaggcacctatttacaggtcaaagcctgcaggccttgaaaagagaaagcagggagttcaccccgcctggcctccagctccaaggcagctgtgtaatcccactgaacctgtttggca

SEQ ID NO: 578361 - DNA, 517 bp, Homo sapiens
gaattctgtctagaacaactaagtactcttacaaaactcaataatctaaaagcaggtaattaaaatatgagcaaaagatctgaatgaaaatttctccaaaaatgatatacaaatggcccataagcacatgaaaagatgctcaacatcattaacacccaggaaaatgcaaatcaaaactacaagatgccatttcacacccaccaggatgactataatagaaaagacagataatggcaagtgttggtgaggatgtggagaaatttgtaccctcatacacmgctactggggatgtaaaatagtgcaattgctttggaaaacagtccagtggttcttaaaaaggataaacttagagttatatgacccagcaatttctctcttaggtatatacccaagagaaataaaaacacatgtccatacacaaacttgtacataaatgttcacagcgatgttattcacaataggcaaaagtagaaaacatctaattgttcatcaactgatgaatggatacctaagatat

SEQ ID NO: 578362 - DNA, 435 bp, Homo sapiens
agtctttgcatgctttatgttttcatatttgtcatgccttttttttttttttttttttttgagacatggtcttgctatgttgcccaggatggaattgaacttttgagctcagcgatcttcctgcctcagcctctggagtagctgggactacagatgcctgccacggcaaccttccctccttccttcttgtttatgctatkggatgtgatctagttgattttttttatctcttctctccaacacattttctgtcagaattgcagcatgggaaagaaaaagcataggtagggcacgtttcctactgctccttagaggtgtttgagaacttcgaggaaaatctgaaagctcttcctcattttcgggagaacataaacttttttccatgtaaaatcatttctgggctggttttggtgaatttacacctcaagccaatgg

SEQ ID NO: 578363 - DNA, 603 bp, Homo sapiens
gtgtccaaaaagagattcactaaaaaaattactgatgtcatcatgcatctccatcattatgacagtcattaactctacattgcttcttctgcartctctaacatacaattagtagatgtcaatgctagaagtgagtttgctgttctgtagtgaagggcactgattataatggggtaaatgagatcaaccatcatgaattgatacatatttatttaatttcaatttcaattgtcattctaatgactatgtactacgtctcaacctatattccctaggtcctaattgagaaacatgtgctttaattaaagaaaaagtccttcacatccattccaaataggtcaaattgtatccatggttcaactattaatgcacacacacacactaacaatagaactcattaagatgtaaattcgaggtaagatagtgcagaagagggaataaatgtgggaatatggaagtagaacaatataagaccccttttgtgttctttttttaacttttattttcgtttcagtgggtacatgcgcaggtttgttatataggtaaattgtgtgtcccagaggtttggtgcacagattatttcaacacccaactaataaataa

SEQ ID NO: 578364 - DNA, 480 bp, Homo sapiens
tttgtgtgtgtacgttttgataaactgtaactttttatacagatttgtgtatgttttatggtagtaaagaataaaatacactaggatctacatatggtttacatgtcaataacatacctttttcttaattttttcagtatttctaggctatgcggtctgagagtttttaacaaattaatgcaaacctccacaaaattttacaatatatttattgaaagaaatctgcattataagtggacccacacagttcaaacctgtgttgcccaaggatgaactgtatttgcrcatatgatgtgctatactgccattttccaaaacgatattacaggtaactggagacaaaacaaaattacagtgtaatacacactaatctgcccaccaagctttcatttcatgcaaaccaaaatctctacagaaaataattccattcattttcagtactagtaaaatgtgccctcttgagaaacacacagtctttta

SEQ ID NO: 578365 - DNA, 581 bp, Homo sapiens
cattgcctattccaggatttacccctgtgtttttttctaagagtcttatggttttagctatgacatttaggtctgtgatccattttgagttaatttttatatgtggtaggaggtagggttcaacttaattcttttgcacatggatattcagttgtcttagcatcattcattgaaaagactttacttcatctttgaagaaagactacctcatctttggtatataattccagaatgtcacctttcttttctttcagaactttaaaaatgttctggctgacatggctctgacaagaagtatacagtcattttatctttgctcctttctatatattgtgtatattttctgtagatccttttcaagtttttytccttaccactggttttagccaatttgatgtgcattggtgttgttttcttgatgtttcctgtgcttgggatttgttgggcttcttgaatctgtgagttttcatcaaatttggaataccttcactcattatttattcaaaaatattttctgtctcttcatctccttcagagaccccaattacacatacattggactggttgaagttgtgcacact

SEQ ID NO: 578366 - DNA, 581 bp, Homo sapiens
tctgatagagttggtttagaatttctgtgaatgagtctttgtgactgctttatggtaagcttctttaaggtttctcattatttctaacattatttctaacattcagctagttgctacattgcctgatgatgttcagcctgggcctgatttttatggactgccatggaaacctgtatttatcactgccttcttgggaattgcttcgtttgccattttcttatggagaactgtccttgttgtgagtaaattaatgcatactttaactcataaattcaagtatggttttataatcacagtccttttgtttctttttcagtttctaatatgaacagaaattaatgcttttaattcaagctaaccttgtaaaataatttagtataatttttgtgttggtaaattcttaagtgaataagacaacatgtataatctcartgggaaaacttcagtttatatgtctcatatcaaagtctaaattttaagaattaggtgggtctgtatttcaactcacaaaggatgaaaagaaagaattagataggtcatatgtacactgttagtagaactaggaattcttagagccatcc

SEQ ID NO: 578367 - DNA, 622 bp, Homo sapiens
tgtggaaaaatctgaatacagcctgatatttgtcctcaggctttttctgcctagatgcctgtgggattctttctttatttttgatatttagcaacttctccagaatgtatgtatgaattattccatatcaattttcccttttggtatgcaaatttttatcatcatttagttcagaaaaaaaatcttctattatatcttcgaatttctttcatggggcacttgtctgctttctacatcaggaaacacctagtgtgtatattatgctgcatgtctgctctttgttttccatatctattatctgtcttccagttgctttaaattccttgatgaggccaggcacagtggctcacgcctgtaatcccaacattttgggatgccaaggcgggcggatcacttgaggtgtggagttcaagaccagcctgccaacatggcaaaaccccatctctaccaaaaatacaaaaattagtcaggcgtgctggtgtgtgcctttaatcccagctactcrggaggctgagcacaagaatcgcttgaacctggaggcggaggttgcagcgaactgagctcgcgacactgaactccagcctgggtgacagagcaagacttagtctcaaaaaactagaat

SEQ ID NO: 578368 - DNA, 349 bp, Homo sapiens
tctactgtttttttaggttaaaaacattatcttaggggctaggcatggtggctcatgcctgtaatcccagcactctgggaggccagaacaggaggattgcatgaggccaggagttcaagactggcctgggcaacatagcgagaccctgcctctaccaaaaaataaaaataaaawaataagccagacgttgtatgcacctgtagtcctagctactggggaggctgaggtgagagaatctcttgagctgaggaatccgaggttgcagtgagacaggatcacaccattgcgctccagcctgggtgacagagtaagaccctgtctcaaaaacaaaacaagaaaacaacaacgt

SEQ ID NO: 578369 - DNA, 503 bp, Homo sapiens
catatatataccatatatatcatatatatcatatatataccatatataccatatatatcatatataggatatatatcatatatatcatatatatgatatatgatatatatgatatatatcgtatatcatatatataccatatataccatatatatcatatatactatatatcatatataccatatatatcatatatactatatatcatatatataccatatatatcatatatactatatatcatatatataccatatatatcatatatatcatatatatcccatatatatcatatatatcatatatatctggtatatatatatcctatatatatctggtgtatatatatatcctatatatakctggtgtatatatcctatatatagctggtatatatatatcctatatatagctggtatatatatatcctatatagagctggtatatatatatcctatatagagctggtatatatatatcctatatagagctggtatatatat

SEQ ID NO: 578370 - DNA, 503 bp, Homo sapiens
catatatataccatatatatcatatatatcatatatataccatatataccatatatatcatatataggatatatatcatatatatcatatatatgatatatgatatatatgatatatatcgtatatcatatatataccatatataccatatatatcatatatactatatatcatatataccatatatatcatatatactatatatcatatatataccatatatatcatatatactatatatcatatatataccatatatatcatatatatcatatatatcccatatatatcatatatatcatatatatctggtatatatatatcctatatatatctggtgtatatatatatcctatatatatctggtrtatatatcctatatatagctggtatatatatatcctatatatagctggtatatatatatcctatatagagctggtatatatatatcctatatagagctggtatatatatatcctatatagagctggtatatatat

SEQ ID NO: 578371 - DNA, 503 bp, Homo sapiens
catatatataccatatatatcatatatatcatatatataccatatataccatatatatcatatataggatatatatcatatatatcatatatatgatatatgatatatatgatatatatcgtatatcatatatataccatatataccatatatatcatatatactatatatcatatataccatatatatcatatatactatatatcatatatataccatatatatcatatatactatatatcatatatataccatatatatcatatatatcatatatatcccatatatatcatatatatcatatatatctggtatatatatatcctatatatatctggtgtatatatatatcctatatatatctggtgtatatatcctatatakagctggtatatatatatcctatatatagctggtatatatatatcctatatagagctggtatatatatatcctatatagagctggtatatatatatcctatatagagctggtatatatat

SEQ ID NO: 578372 - DNA, 503 bp, Homo sapiens
catatatataccatatatatcatatatatcatatatataccatatataccatatatatcatatataggatatatatcatatatatcatatatatgatatatgatatatatgatatatatcgtatatcatatatataccatatataccatatatatcatatatactatatatcatatataccatatatatcatatatactatatatcatatatataccatatatatcatatatactatatatcatatatataccatatatatcatatatatcatatatatcccatatatatcatatatatcatatatatctggtatatatatatcctatatatatctggtgtatatatatatcctatatatatctggtgtatatatcctatatatagctggtatatatatatcctatatakagctggtatatatatatcctatatagagctggtatatatatatcctatatagagctggtatatatatatcctatatagagctggtatatatat

SEQ ID NO: 578373 - DNA, 517 bp, Homo sapiens
acacactcattagcttcataatcttggacaaattccttaacctttgtgagtctcatttttcttgtctatgtaatagatatgtaataggaatagactaggtaatgggattgtataaggattaattgagataacctggagcatagtgggtgctcagaaaatgttggtaaacctcaaacacattttctcccacaattaatccatcaataagtttcactgtactagagcaaagagcaaattagayagtttttactgtttgctgtatagaatcaggatctggctattgagctatatttgaacatgaggcaattgatgcattcagtttaggaaagagggggtcagtgtttaaactgaaaagatgtgtgttagattttaatacatgacaacctcttacctttttaatgcactttgttattgtagagctaaactcagaagtttgacattctttcaagccctactttttccatgctgaaaagatacaaatcccaaagcaatatacaactgcatacgtgaaagaaat

SEQ ID NO: 578374 - DNA, 517 bp, Homo sapiens
acacactcattagcttcataatcttggacaaattccttaacctttgtgagtctcatttttcttgtctatgtaatagatatgtaataggaatagactaggtaatgggattgtataaggattaattgagataacctggagcatagtgggtgctcagaaaatgttggtaaacctcaaacacattttctcccacaattaatccatcaataagtttcactgtactagagcaaagagcaaattagatagtttttactgtttgctgtatagaatcaggatctggctattgagctatatttgaacatgaggcaattgatgcattcagtttaggaargagggggtcagtgtttaaactgaaaagatgtgtgttagattttaatacatgacaacctcttacctttttaatgcactttgttattgtagagctaaactcagaagtttgacattctttcaagccctactttttccatgctgaaaagatacaaatcccaaagcaatatacaactgcatacgtgaaagaaat

SEQ ID NO: 578375 - DNA, 508 bp, Homo sapiens
ggacttgctgcggaataaattctggggtgtaactaaattacacaccatttcccatactttttttctttcaaattgcccattactttaaatgaaaacatgstttagaaaagaactgtaaccactcaaaatttctcaaggaccagtctcccttctccctggtgataaaatgtacttatgtttgtatttttcaacattctcctgctgaagttccaagggatttcaaaacttcattcacagttttccagtaaaacctgtaaaattcattttcagatcattggtttagcatgatccagcttcagctccacttttagcaaatgaatccatcttcgtttctattcatatgacaccaggagcatttctaacgatgcccctccctgctcaccatactccgtcatcctgcacttatgtatcatctcacgccagccgggtcagccggaggaaggcagaacatgggcttggggaattgggaagcccgacccaccagggcatcctgcacaagttgcataag

SEQ ID NO: 578376 - DNA, 321 bp, Homo sapiens
ctgtcattagcaatgacatggatgagactggaggacattatgttaaatcaaataagccaggcacagaaagataaatatcccatgttctcacttgtacgtggcagctaaaaaaaaaaaaaaaaaaaaaaaattaactcatggtgttaaagactggaatatgctttccagaggctggaaagagtaacaaagtggggtgaggggataaagtggagaygggtaatgggtacaaaaataccagttagatacaatgaataacatctagtatttggaggcacaatacaatgactatagttaacaataatttattgtatactttaaaat

SEQ ID NO: 578377 - DNA, 597 bp, Homo sapiens
tcctttcttttaggtatacattgagcaaaaggattactggatcatatagttgctcaatttttagttttctgaaaaaccttcaaactgttttctatagtagttgtactaatgtacattcccatgaacagtgtattaggattccctaatattttgctcactttttcattggcttattagattttttttttttagatggagtttcactcttcttgcctaggctggagtgcaatggcacgatctcagcccaccacaacctctgcctcctgggttcaagtgattctcctgtatcagcctcctgtgtagcrgggattacagacatgctccaccacacctggataatttttatatttttagtagagatgggttttcaccatgttaaccaagctggtcttgaactcctggcctcaggtgatcctcccacctcggcctcccaaagtgccaggattacaggtgtgagccaccatgcccagccagatgttttcctatagaattgtttgagctccttctacattgtcattattaattctttgtcagatgggcagtttgcaaatatcttcacccattctatgagttgtctcttcactttgttggttgtat

SEQ ID NO: 578378 - DNA, 597 bp, Homo sapiens
tcctttcttttaggtatacattgagcaaaaggattactggatcatatagttgctcaatttttagttttctgaaaaaccttcaaactgttttctatagtagttgtactaatgtacattcccatgaacagtgtattaggattccctaatattttgctcactttttcattggcttattagattttttttttttagatggagtttcactcttcttgcctaggctggagtgcaatggcacgatctcagcccaccacaacctctgcctcctgggttcaagtgattctcctgtatcagcctcctgtgtagcagggattacagacatgctccaccacacctggataatttttatatttttagtagagatgggttttcaccatgttraccaagctggtcttgaactcctggcctcaggtgatcctcccacctcggcctcccaaagtgccaggattacaggtgtgagccaccatgcccagccagatgttttcctatagaattgtttgagctccttctacattgtcattattaattctttgtcagatgggcagtttgcaaatatcttcacccattctatgagttgtctcttcactttgttggttgtat

SEQ ID NO: 578379 - DNA, 597 bp, Homo sapiens
tcctttcttttaggtatacattgagcaaaaggattactggatcatatagttgctcaatttttagttttctgaaaaaccttcaaactgttttctatagtagttgtactaatgtacattcccatgaacagtgtattaggattccctaatattttgctcactttttcattggcttattagattttttttttttagatggagtttcactcttcttgcctaggctggagtgcaatggcacgatctcagcccaccacaacctctgcctcctgggttcaagtgattctcctgtatcagcctcctgtgtagcagggattacagacatgctccaccacacctggataatttttatatttttagtagagatgggttttcaccatgttarccaagctggtcttgaactcctggcctcaggtgatcctcccacctcggcctcccaaagtgccaggattacaggtgtgagccaccatgcccagccagatgttttcctatagaattgtttgagctccttctacattgtcattattaattctttgtcagatgggcagtttgcaaatatcttcacccattctatgagttgtctcttcactttgttggttgtat

SEQ ID NO: 578380 - DNA, 597 bp, Homo sapiens
tcctttcttttaggtatacattgagcaaaaggattactggatcatatagttgctcaatttttagttttctgaaaaaccttcaaactgttttctatagtagttgtactaatgtacattcccatgaacagtgtattaggattccctaatattttgctcactttttcattggcttattagattttttttttttagatggagtttcactcttcttgcctaggctggagtgcaatggcacgatctcagcccaccacaacctctgcctcctgggttcaagtgattctcctgtatcagcctcctgtgtagcagggattacagacatgctccaccacacctggataatttttatatttttagtagagatgggttttcaccatgttaaccaagctggtcttgaactcctggcctcaggtgatcctcccacctyggcctcccaaagtgccaggattacaggtgtgagccaccatgcccagccagatgttttcctatagaattgtttgagctccttctacattgtcattattaattctttgtcagatgggcagtttgcaaatatcttcacccattctatgagttgtctcttcactttgttggttgtat

SEQ ID NO: 578381 - DNA, 427 bp, Homo sapiens
gtctctactaagaaaaaatacaaaattagccaggcgtggtggcacatgcctgtaatcccagctactcgggaggctgaggcagcagaatcacttsaacctgggaggtgcaggttgtggtgagctgagatcacgccattgcactccagcctggacaacaagagtgaaactccgtctcaaaacaaaaaaaaaaaaaatgaaaaaggagaaacaaataaaaaaactaaataaatgaagaaatatttcatattcatggataggaagactcaatattgtcaagatgtctattcttcccaacttaatctatgcattcattttaatcccagtcaaaattccagcagagtattttgtaaatattgacaaactaattctaaagcttatatggaaaggcaaaagaccaagaatagctaatgtgatactgagggaaaga

SEQ ID NO: 578382 - DNA, 427 bp, Homo sapiens
gtctctactaagaaaaaatacaaaattagccaggcgtggtggcacatgcctgtaatcccagctactcgggaggctgaggcagcagaatcacttcaacctgggaggtgcaggttgtggtgagctgagatcacrccattgcactccagcctggacaacaagagtgaaactccgtctcaaaacaaaaaaaaaaaaaatgaaaaaggagaaacaaataaaaaaactaaataaatgaagaaatatttcatattcatggataggaagactcaatattgtcaagatgtctattcttcccaacttaatctatgcattcattttaatcccagtcaaaattccagcagagtattttgtaaatattgacaaactaattctaaagcttatatggaaaggcaaaagaccaagaatagctaatgtgatactgagggaaaga

SEQ ID NO: 578383 - DNA, 615 bp, Homo sapiens
aatagctgggcacatgaatgttatcataaatcctcaatcacagtaaagtacttatggttacttcaccataattgaggaaactttcatgtaacaaattttagtgttggtatatttttgttcacttgtgtcacaaaataagggtcttgtccaggttaattttcattaattaggtcaatttttacatagtcatgcaatgataatatttttggttttttatgaagaaattttccagcaggtgagattatttaactacctttgtgtattatgtttaarcctctttatattttggtcatctgctttggatatttccatacctctgtaacaactgagataatgagaatcctgtgtggaattgtggaaactgtagccattagaaactagttctctaaccctggatcagtcattcatatttacatgttctgtgatcacaaataggtgcatgagatgtctacattaacactcagtgaaagaagcattgcttttctggattacagtgtgagcatttgaaaccagtgacaggagatattcattgaaaattcttgtgatatgaggaaatgtagctaatatcttaaataccatatgatattgttgaaggaatttaattgggaaagttag

SEQ ID NO: 578384 - DNA, 615 bp, Homo sapiens
aatagctgggcacatgaatgttatcataaatcctcaatcacagtaaagtacttatggttacttcaccataattgaggaaactttcatgtaacaaattttagtgttggtatatttttgttcacttgtgtcacaaaataagggtcttgtccaggttaattttcattaattaggtcaatttttacatagtcatgcaatgataatatttttggttttttatgaagaaattttccagcaggtgagattatttaactacctttgtgtattatgtttaagcctctttatattttggtcatctgctttggatatttccatacctctgtaacaactgagataatgagaatcctgtgtggaattgtggaaactgtagccattagaaactagttctctaaccctggatcagtcattcatatttacatgttctgtgatcayaaataggtgcatgagatgtctacattaacactcagtgaaagaagcattgcttttctggattacagtgtgagcatttgaaaccagtgacaggagatattcattgaaaattcttgtgatatgaggaaatgtagctaatatcttaaataccatatgatattgttgaaggaatttaattgggaaagttag

SEQ ID NO: 578385 - DNA, 646 bp, Homo sapiens
  misc_feature 1, 2, 3, 4, 5, 6, 7, 8, 9, 10, 11, 12, 13, 14, 15, 16, 17,18, 19, 20, 21, 22, 23, 24, 25, 26, 27, 28: n = A,T,C or G
nnnnnnnnnnnnnnnnnnnnnnnnnnnntgccaaaatctctttacttatgccttttttattttacaggttctatttattattctgagtagaagcatccatgttgtttaaattaagtgcctcatgtgacccttaggtgaggccagaatcaagtatgagaggttcgagatacatttatgaaagttaagttccacctttgaactaaagggtggtcacagggcctgttctgtttggatttggtagtgacaggaaagtgtagctcatattttcattactgtagcagaaattgatggagtctgttaaaagggaggtcacctgaggacaggaaagaagaagcttttacttttatttccatggagcagctcatcattcctgagtctttattttaatataaaaaacagaaatgggtggactttttttgcagctctgggtccttctgcttgtgggcgtggtggtagtaggtgaacatgtggtgctgacacctttaaaggcatattctccagatccaggtgtaatttgtccggagaatctcatctgaagtgaatttccagagaaggagtagaaagaggaaaaaatgacttttttttagctaagcatgtctcagatgaagagctgtgtccactctgygtcctagaatgccatatgttc

SEQ ID NO: 578386 - DNA, 544 bp, Homo sapiens
aaactgcactgtgatgtgtgcattcctctcacagagttaaacctttctttggattcagcaatttggaaacactctttttgtctattctgtgaatggacatttgggagctcattgagccaacggcaaaaaagtgaacatccaaggataaaatctagaaggaagcaatttgagaaaaagctttgtaacgtgtgcactcatctcccaatgttaaatctttatttgggttcaacagtttggaaatgctgtttttgttgattcagtgaatggacacttgggagctcactgaggccaaaggggaaaaagtgaatatcccaggataaaaaatagaatgaagcaatctgagaaaccactttgttatatgtgcattcatctctcagagttaaacctttcttttcattcagcagtttggaaacactgttttgctacaatctgtgaagtgatatttaggagcacattgaggcctctggtgaaaaaggaaatatcttcagataaaaactagaaagaagattcattagaaagtrctttttgatgtgtgcattcatct

SEQ ID NO: 578387 - DNA, 513 bp, Homo sapiens
attgtgtaagtgtgtcttggacacagcttaagctaagactaataagagatagaacagcgaattagacccaaggaaacaacccaagtaattaatcacactgctttattaaaagagaaaaaaagtacataattatctcaatagggggcacaaaaatcttctgataaaagtcaacatccggccgggtgcggagctcggggcctcataatccccagcactctgggaggccgagcaggcggatcacgwggtcaggagatcaagaccagcctgaccaacatggtgaaaccccgtctctactaaaaatacaacaaattagctgggtgtggtggcagccacctgtagtcccagctactcgggaggctgaggcaggagaatggcatgaacccgggaagcgattgccagtgagctgagattacgccagcctgggtgacagagcgagactccttctcagaaacaaagaagtcaacatccatttactggtataatgcgtagcagtcttagagtagaggagaattc

SEQ ID NO: 578388 - DNA, 234 bp, Homo sapiens
cttttgttatcctttaaggagccttggkaaaattgggagagggcagttagtcaattttgattcaaaaaatatttctttaataccctttaaaatgtactcaaaatatggagaaaactgtaaaaagtaacaatctgtttcaattccaacctttaaattttaatcctacaaagaattttagctctttcaatactctagaaccagaggcaatcacaagtaacaacgttaatatgtata

SEQ ID NO: 578389 - DNA, 234 bp, Homo sapiens
cttttgttatcctttaaggagccttgggaaaattgggagagggcagttagtcaattttgattcaaaawatatttctttaataccctttaaaatgtactcaaaatatggagaaaactgtaaaaagtaacaatctgtttcaattccaacctttaaattttaatcctacaaagaattttagctctttcaatactctagaaccagaggcaatcacaagtaacaacgttaatatgtata

SEQ ID NO: 578390 - DNA, 234 bp, Homo sapiens
cttttgttatcctttaaggagccttgggaaaattgggagagggcagttagtcaattttgattcaaaaaatayttctttaataccctttaaaatgtactcaaaatatggagaaaactgtaaaaagtaacaatctgtttcaattccaacctttaaattttaatcctacaaagaattttagctctttcaatactctagaaccagaggcaatcacaagtaacaacgttaatatgtata

SEQ ID NO: 578391 - DNA, 234 bp, Homo sapiens
cttttgttatcctttaaggagccttgggaaaattgggagagggcagttagtcaattttgattcaaaaaatatttctttaataccctttaaaatgtactcaaaatatggagaaaactgtaaaaagtaamaatctgtttcaattccaacctttaaattttaatcctacaaagaattttagctctttcaatactctagaaccagaggcaatcacaagtaacaacgttaatatgtata

SEQ ID NO: 578392 - DNA, 523 bp, Homo sapiens
ttggtaatgctttggcttacctccctgaccttccataaaccatgcatggctgaactcaccctgtccctgcccagattttgcactgttgagattatgaggcacttcctaatggttgctgcagctgcacgccataaaacagagctctttgcatgtgtgaagaaaatcrtaataagaggggcctccagagccatgccacatctctcaggcagtacagcctctttaatggaatcatatgaatgattaaaccaaagctgcctgatttgtcttcctgttttatagcagaaacttttctacaggttctggcatcagaaataatctttccactccgaaatttgggaagtattggagatgaaagggtatgtttgttgttgttgttgttgtttgagagagttttgctctgtcgcccatgctggattgtagtggcggtgtattctcggctcactgaagtctctacctctagggctcaagtgattctcatgcctcaacctcctgggtagctgggattacaggcacccaccaccaa

SEQ ID NO: 578393 - DNA, 526 bp, Homo sapiens
ggggcaaggctctattctgggggttggatttggtacacagatactgcttggtgttaagcacaactatttggcctatagacactacatgtgccctgaatgtgagcttcattcactaaatcattcaacaaatctgtaatgacaatggcaacaataactaccctttattagataattgtgtgccatatattgtgtcagatgctgtattgtactgatttcatccatgcaacaaacctgaaatttaaattatcctattttatagatgaggaaattgaggcagatagtttaagtaattttatttaaagggcctatcatgtgccaagccgtggatatacaactggaagagtaggagggaggcactggagaaagaggttgtaagaagtaaaaacaaagtgctagtgatgggcatattgacctagacttttatctaaatgctttgktcacctatgaccctttctttttaggaactgaaaaccaaacattctgtagcttttcttctaaatctcttattttccttctggaatagaaa

SEQ ID NO: 578394 - DNA, 444 bp, Homo sapiens
catacatcacatgacgaaagtgtttggtaacccttaataaacacacaatgtaatgatcttaaaaaggaaagatgcctcagtacatctctaaaagaattggttgatttcattttgttagtaatagaaaattaaattaaccttttctgctttttaattatactttaagttctggagtacatgtgcagaacatgaaggtttgttacataggtatacacacacgtgccatggtggtttgctgcacccgtcaatccatcatctacattaggtatttttcctaatgctatccctcccccagccccctacccccctacagaccctccttgttctccttcccatgtccacgtgttctcattgatcaactcccacttatgagtgagaacatgaattgtttggttttctgttcttgtgttagtttgctgakaatgatggtttccagcatcatcc

SEQ ID NO: 578395 - DNA, 582 bp, Homo sapiens
ttacttgaaattgttttctaaattatttcctatatttgtaaatacagtggctaatgatgattttcaactacacatttttcgattttattcatatataactatataaggatatcctcaagcaagtgttaaaattttaaaaaattacatttaagctcataactatttatgagtttactctgaactacctagaatatttaagcaatccattttccaattattgctcacacttctatttttaatacagtgtattgttttccccacttcttagtaatattttgagtgtagaaaagccaagagatttgtaggcttatctgtagatcatrgaacgctagaagggaatgtgtctggaactctctactagccaagtcatcctgtgaattgaactgacagtgctttatttctaaagaatgacaataactaggttgctataaaaaacctttctgaatgtgattttgagagagggtgtatattatgtcatttccagagaaatgaccagaggcctaggtcaattgactgaggtcggtaatggtggtagcccccatccactatggtgagttctctattagggctattacccgcttg

SEQ ID NO: 578396 - DNA, 644 bp, Homo sapiens
ttaaaatagactagagtaaaatgtaaatatcaacatgtattacatcataggttagatattttgtaaatttcactttagttacacatagccataaatagcctgtgggttatcatttaaaatatatttcttctgtgtcttgcagctaaaaaattaaaagtttaaaagtgacttactctacttctctttttcactttgttcctaaatacttttctagagaaatgtaaccaatacacatgaatttattcttctgtgacaatgtcatttaatttatattttctggagtgatgggtttatgtcttatttaaaacaagcaaaaatttcaaggcacccatggtaggaaatgatagaagcatcgaacaactatctcttagggcaggtatttttatctcaatttgataataaggaaattaaatttwcttgtccaaagtccctcaactagcaagactattaatcagtatttgtactcaaatttgcctgggttcatcctactacttaaatgagaattatttcaaagggtcaaaaatcagattccaaagatatatttgcaacaaactgtgaatttaagttattgcactgtaggttactcattgaacaattataccaattatgtaaataattggtataattttggtaaatggtatacg

SEQ ID NO: 578397 - DNA, 569 bp, Homo sapiens
tataatcacacagtttcacagtatatagtcatttactatttattttaatgatctcattttatttctatgaacatacggccaattttatctttatgaaatttcatttttttctatcatgtcaccatctctgcttaraacatgtctgccacattttagccacttaataaatatttactcaatgaatacatgaattgacatccttaaagttgcctttcatttacttcaataacccattaattcatgagaaaaaaattgaaatgaagacctattcagatttatggttaaaaaaaattaacagcagagactaggattgcaaccctgctttttttttgttttgttttccatttgcttggtagatcttcctccatccctttattttgagcctatgtgtgtctcagcacatgagatgggtcacctgaatacagcatactgatgggtcttgactctttatccaatttgccaatctgtgtcttttaattggagcatttagtccatttacatttaaggttaatattgttatgtgtgaatttcatcctgtcattatgatgttagctggttattttgctcgt

SEQ ID NO: 578398 - DNA, 202 bp, Homo sapiens
gaagcatacattcttcctggatagggttcaaatgttacctttatttttagtcctttcccctcatccccagtgccacaaccaatcacagcccaactcagagaacatacttattttttgttttgttttatagaaacaggatctcactatgctscctgggttagtctggaactccaggcctcaaatgatcctcccgcctcggctc

SEQ ID NO: 578399 - DNA, 202 bp, Homo sapiens
gaagcatacattcttcctggatagggttcaaatgttacctttatttttagtcctttcccctcatccccagtgccacaaccaatcacagcccaactcagagaacatacttattttttgttttgttttatagaaacaggatctcactatgctccctgggttagtctggaactccmggcctcaaatgatcctcccgcctcggctc

SEQ ID NO: 578400 - DNA, 554 bp, Homo sapiens
ttggggcaagtcgagtaccaggttaccaagttttatttttttctctgacccaaaaaacaatttggcagccggtgagaaacyctcacagctctggatgtgagtttaggacactgcatttctaccattcaatttcttactacttttttgcacagggatcatggcacaagttgcagtttccaccctgcccatggaagatgaggagtccatggaagatgaggagtctgttgaagatgattccgtggagagcaggatggtggtgacatttctcatatcagctctcgagtccacggtgagaccttctgttctaacatgatataattgggtagaactgggtggtagataaggttgatttgtttttgtagaacttataattttatgatttgtagttctaatgagtagatctttttctggaatagtagttatggtcaaacacttctaaccaaaagtgccatgttgtccagtctggtctcaaaatatggggctcaagagacctgcccaccttggcctcccaaaatactgggattacaggtgtaagcccctgaatctggccagat

SEQ ID NO: 578401 - DNA, 576 bp, Homo sapiens
taattatgctctttattatttctttccttctgctagctttggatttagtcttccacctggatttattttgggagtgatattgatgtaacttcatggaaataatactagatagaaagttagcggatagattctctatctgatgagagtttggggcaagtcgagtaccaggttaccaagttttatttttttctctgacccaaaaaacaatttggcagccggtgagaaactctcacagctctggatstgagtttaggacactgcatttctaccattcaatttcttactacttttttgcacagggatcatggcacaagttgcagtttccaccctgcccatggaagatgaggagtccatggaagatgaggagtctgttgaagatgattccgtggagagcaggatggtggtgacatttctcatatcagctctcgagtccacggtgagaccttctgttctaacatgatataattgggtagaactgggtggtagataaggttgatttgtttttgtagaacttataattttatgatttgtagttctaatgagtagatctttttctggaatagtagttatggtcaa

SEQ ID NO: 578402 - DNA, 610 bp, Homo sapiens
atttatgctctaattatgctctttattatttctttccttctgctagctttggatttagtcttccacctggatttattttgggagtgatattgatgtaacttcatggaaataatactagatagaaagttagcggatagattctctatctgatgagagtttggggcaagtcgagtaccaggttaccaagttttatttttttctctgacccaaaaaacaatttggcagccggtgagaaactctcacagctctggatgtgagtttaggacactgcatttctaccattcaatttcttactacttttttgcacagggatcatggcacaagttgcagwttccaccctgcccatggaagatgaggagtccatggaagatgaggagtctgttgaagatgattccgtggagagcaggatggtggtgacatttctcatatcagctctcgagtccacggtgagaccttctgttctaacatgatataattgggtagaactgggtggtagataaggttgatttgtttttgtagaacttataattttatgatttgtagttctaatgagtagatctttttctggaatagtagttatggtcaaacacttctaaccaaaagtgccatg

SEQ ID NO: 578403 - DNA, 576 bp, Homo sapiens
taattatgctctttattatttctttccttctgctagctttggatttagtcttccacctggatttattttgggagtgatattgatgtaacttcatggaaataatactagatagaaagttagcggatagattctctatctgatgagagtttggggcaagtcgagtaccaggttaccaagttttatttttttctctgacccaaaaaacaatttggcagccggtgagaaactctcacagctctggatgtgagtttaggacactgcatttctaccattcaatttcttactacttttttgcacagggatcatggcacaagttgcagtttccaccctgccmatggaagatgaggagtccatggaagatgaggagtctgttgaagatgattccgtggagagcaggatggtggtgacatttctcatatcagctctcgagtccacggtgagaccttctgttctaacatgatataattgggtagaactgggtggtagataaggttgatttgtttttgtagaacttataattttatgatttgtagttctaatgagtagatctttttctggaatagtagttatggtcaa

SEQ ID NO: 578404 - DNA, 576 bp, Homo sapiens
taattatgctctttattatttctttccttctgctagctttggatttagtcttccacctggatttattttgggagtgatattgatgtaacttcatggaaataatactagatagaaagttagcggatagattctctatctgatgagagtttggggcaagtcgagtaccaggttaccaagttttatttttttctctgacccaaaaaacaatttggcagccggtgagaaactctcacagctctggatgtgagtttaggacactgcatttctaccattcaatttcttactacttttttgcacagggatcatggcacaagttgcagtttccaccctgcccatggaagatgaggagtccatkgaagatgaggagtctgttgaagatgattccgtggagagcaggatggtggtgacatttctcatatcagctctcgagtccacggtgagaccttctgttctaacatgatataattgggtagaactgggtggtagataaggttgatttgtttttgtagaacttataattttatgatttgtagttctaatgagtagatctttttctggaatagtagttatggtcaa

SEQ ID NO: 578405 - DNA, 576 bp, Homo sapiens
taattatgctctttattatttctttccttctgctagctttggatttagtcttccacctggatttattttgggagtgatattgatgtaacttcatggaaataatactagatagaaagttagcggatagattctctatctgatgagagtttggggcaagtcgagtaccaggttaccaagttttatttttttctctgacccaaaaaacaatttggcagccggtgagaaactctcacagctctggatgtgagtttaggacactgcatttctaccattcaatttcttactacttttttgcacagggatcatggcacaagttgcagtttccaccctgcccatggaagatgaggagtccatggaagatgaggagtctgttgaagatgattccgtggagagcaggatggtggtracatttctcatatcagctctcgagtccacggtgagaccttctgttctaacatgatataattgggtagaactgggtggtagataaggttgatttgtttttgtagaacttataattttatgatttgtagttctaatgagtagatctttttctggaatagtagttatggtcaa

SEQ ID NO: 578406 - DNA, 270 bp, Homo sapiens
cattttacattccaaaaagcaatgcatacagcttccaatttctctatagcmttgctgacagttaatattttctgtttatgtattgtatttttatagtgtttgaaattaatctgaggctttttgctgataccaaaatattaggaaaggttttccaaaaataatactgcttattataaaggattttacgtgttacttgatgccctgtgatctgttttctaagtaagaagaggaacttcttggctgggcacagcggctcatgcctgtaatcct

SEQ ID NO: 578407 - DNA, 270 bp, Homo sapiens
cattttacattccaaaaagcaatgcatacagcttccaatttctctatagccttgctgacagttaatattttctgtttatgtattgtatttttatagtgtttgaaattaatctgaggcttttygctgataccaaaatattaggaaaggttttccaaaaataatactgcttattataaaggattttacgtgttacttgatgccctgtgatctgttttctaagtaagaagaggaacttcttggctgggcacagcggctcatgcctgtaatcct

SEQ ID NO: 578408 - DNA, 270 bp, Homo sapiens
cattttacattccaaaaagcaatgcatacagcttccaatttctctatagccttgctgacagttaatattttctgtttatgtattgtatttttatagtgtttgaaattaatctgaggctttttrctgataccaaaatattaggaaaggttttccaaaaataatactgcttattataaaggattttacgtgttacttgatgccctgtgatctgttttctaagtaagaagaggaacttcttggctgggcacagcggctcatgcctgtaatcct

SEQ ID NO: 578409 - DNA, 550 bp, Homo sapiens
ggtgtgatctctgctcactgcaacctcagcctcctgggttcaagtgattctcctgcctcagcctcccaagaagctgggactacaggcacatgccaccacacctggctaawtttttttatttttagtagagacagggtatcaccatgttggccaggctggtcttgaactcctgacttcaggtgatccacccaccttggcctcccaaagtgctggggttaaaggcatgagacactgcgcccgtccacctcctcttttacttgggagaaatgcacagattctgggtgccatgtgcatttttttggggagtgataattgatctaacttatggaaataatactagatagttagcggatggattctgtatctgatgagagttttgggcaaaacgaattcctactttctgagtcgtatttttcccctgattcaagaaaactgtgaattatccagccagtaaaaaactctcacagctccggatgtgagtttaggacactggatttctaccactcattttcttactacttttcttgtgcaaggatcatggcacaagttg

SEQ ID NO: 578410 - DNA, 550 bp, Homo sapiens
ggtgtgatctctgctcactgcaacctcagcctcctgggttcaagtgattctcctgcctcagcctcccaagaagctgggactacaggcacatgccaccacacctggctaaatttttttatttttagtagagacagggtatcaccatgttggccaggctggtcttgaactcctgacttcaggtgatccacccaccttggcctcccaaagtgctggggttaaaggcatgagacactgcgcccgtccacctcctcttttacttgggagaaatgcacagattctgggtgccatgtgcatttktttggggagtgataattgatctaacttatggaaataatactagatagttagcggatggattctgtatctgatgagagttttgggcaaaacgaattcctactttctgagtcgtatttttcccctgattcaagaaaactgtgaattatccagccagtaaaaaactctcacagctccggatgtgagtttaggacactggatttctaccactcattttcttactacttttcttgtgcaaggatcatggcacaagttg

SEQ ID NO: 578411 - DNA, 550 bp, Homo sapiens
ggtgtgatctctgctcactgcaacctcagcctcctgggttcaagtgattctcctgcctcagcctcccaagaagctgggactacaggcacatgccaccacacctggctaaatttttttatttttagtagagacagggtatcaccatgttggccaggctggtcttgaactcctgacttcaggtgatccacccaccttggcctcccaaagtgctggggttaaaggcatgagacactgcgcccgtccacctcctcttttacttgggagaaatgcacagattctgggtgccatgtgcatttttttkgggagtgataattgatctaacttatggaaataatactagatagttagcggatggattctgtatctgatgagagttttgggcaaaacgaattcctactttctgagtcgtatttttcccctgattcaagaaaactgtgaattatccagccagtaaaaaactctcacagctccggatgtgagtttaggacactggatttctaccactcattttcttactacttttcttgtgcaaggatcatggcacaagttg

SEQ ID NO: 578412 - DNA, 535 bp, Homo sapiens
ttacttgggagaaatgcacagattctgggtgccatgtgcatttttttggggagtgataattgatctaacttatggaaataatactagatagttagcggatggattctgtatctgatgagagttttgggcaaaacgaattcctastttctgagtcgtatttttcccctgattcaagaaaactgtgaattatccagccagtaaaaaactctcacagctccggatgtgagtttaggacactggatttctaccactcattttcttactacttttcttgtgcaaggatcatggcacaagttgcagtttccaccctgcccattgaagatgaggagtctgttgaagatgaggagtccttggagagcaggatggtggtgacattcctgtcagctctcgactccatggtcagaccttctgttctcacattctgtagttcagtaggactgggcggtagataaggttgatttgtttttgtagaacttacaattttgtgatttttagttctaatgagtagacctttttcgtgaatagtagttacggt

SEQ ID NO: 578413 - DNA, 550 bp, Homo sapiens
ggtgtgatctctgctcactgcaacctcagcctcctgggttcaagtgattctcctgcctcagcctcccaagaagctgggactacaggcacatgccaccacacctggctaaatttttttatttttagtagagacagggtatcaccatgttggccaggctggtcttgaactcctgacttcaggtgatccacccaccttggcctcccaaagtgctggggttaaaggcatgagacactgcgcccgtccacctcctcttttacttgggagaaatgcacagattctgggtgccatgtgcatttttttggggagtgataattgatctaacttatggaaataatactagatagttagcggatggattctgtatctgatgagagttttgggcaaaacgaattcctactttctgagtcktatttttcccctgattcaagaaaactgtgaattatccagccagtaaaaaactctcacagctccggatgtgagtttaggacactggatttctaccactcattttcttactacttttcttgtgcaaggatcatggcacaagttg

SEQ ID NO: 578414 - DNA, 479 bp, Homo sapiens
gtagcatgggactcctgggctcaagtgatcctcccacctcagcctcccaaatagctgagattataggcctgtaccagcatatctggctatgttctcttactttttgtagagatggggtcttgttatgttgcccaggctggtctcaaatttctgggctcacatgatcctcccacctcaacttcacaaaatgctgggattatgggcatgaaccactgcatctcaccaatttattttcttttactkcttcattttaaaggctaaatctcagaaacagccagtgaaagagatgtacatgctgggcacagtggctcatgcctgtaatttcagcactttgggagactgaggcgggagcatcgcttaagtgctcaggagattaagaccagcctgggtaacaaggtgaaaatgcatctctacaaaaagatttttctaaaaattagccaggcacagttatctatagttctagctactcagtgcctata

SEQ ID NO: 578415 - DNA, 479 bp, Homo sapiens
gtagcatgggactcctgggctcaagtgatcctcccacctcagcctcccaaatagctgagattataggcctgtaccagcatatctggctatgttctcttactttttgtagagatggggtcttgttatgttgcccaggctggtctcaaatttctgggctcacatgatcctcccacctcaacttcacaaaatgctgggattatgggcatgaaccactgcatctcaccaatttattttcttttacttsttcattttaaaggctaaatctcagaaacagccagtgaaagagatgtacatgctgggcacagtggctcatgcctgtaatttcagcactttgggagactgaggcgggagcatcgcttaagtgctcaggagattaagaccagcctgggtaacaaggtgaaaatgcatctctacaaaaagatttttctaaaaattagccaggcacagttatctatagttctagctactcagtgcctata

SEQ ID NO: 578416 - DNA, 490 bp, Homo sapiens
gttctagctactcagtgcctataattctagctactcaggaggctgaggtgagaggatgagaggatggggcttgagatagggaggcatagtttgcagtgagccacgattgtgccayagcactctaggctgggagacagagccagactctgtctcaaaaaaaaaaaaaaaaaaacacacagggcaaggtatgtcgagaggggtacagaacttccatgtcctctattgtgcatgttaccttcctggtatctcccttgtgttcagcaacccagacattctccaactccagttgttgagggcgcttatgaacgcttcattatgcaggcatgattgatgaagtcattgaccattggtaattaagtcagtcttcggccactatttcttcctggagcccagggggtgaggctgacagttccaagcctctaatcacatggtttgttcttctgacaacaaccacccctttttctgaagctgtctaggagctttcagtcac

SEQ ID NO: 578417 - DNA, 490 bp, Homo sapiens
gttctagctactcagtgcctataattctagctactcaggaggctgaggtgagaggatgagaggatggggcttgagatagggaggcatagtttgcagtgagccacgattgtgccacagcactctaggctgggagacagagccagactctgtctcaaaaaaaaaaaaaaaaaaacacacagggcaaggtatgtcgagaggggtacagaacttccatgtcctctattgtgcatgttaccttcctggtatctcccttgtgttcagcaacccagacattctccaactccagttgttgagggcgcttatgaacgcttcattatgcaggcatgattgatgaagtcattgaycattggtaattaagtcagtcttcggccactatttcttcctggagcccagggggtgaggctgacagttccaagcctctaatcacatggtttgttcttctgacaacaaccacccctttttctgaagctgtctaggagctttcagtcac

SEQ ID NO: 578418 - DNA, 490 bp, Homo sapiens
gttctagctactcagtgcctataattctagctactcaggaggctgaggtgagaggatgagaggatggggcttgagatagggaggcatagtttgcagtgagccacgattgtgccacagcactctaggctgggagacagagccagactctgtctcaaaaaaaaaaaaaaaaaaacacacagggcaaggtatgtcgagaggggtacagaacttccatgtcctctattgtgcatgttaccttcctggtatctcccttgtgttcagcaacccagacattctccaactccagttgttgagggcgcttatgaacgcttcattatgcaggcatgattgatgaagtcattgaccattggtrattaagtcagtcttcggccactatttcttcctggagcccagggggtgaggctgacagttccaagcctctaatcacatggtttgttcttctgacaacaaccacccctttttctgaagctgtctaggagctttcagtcac

SEQ ID NO: 578419 - DNA, 490 bp, Homo sapiens
gttctagctactcagtgcctataattctagctactcaggaggctgaggtgagaggatgagaggatggggcttgagatagggaggcatagtttgcagtgagccacgattgtgccacagcactctaggctgggagacagagccagactctgtctcaaaaaaaaaaaaaaaaaaacacacagggcaaggtatgtcgagaggggtacagaacttccatgtcctctattgtgcatgttaccttcctggtatctcccttgtgttcagcaacccagacattctccaactccagttgttgagggcgcttatgaacgcttcattatgcaggcatgattgatgaagtcattgaccattggtaattaagtcagtcttcggccactatttcttcctggagcccagggggtgaggctgacagttccaagcctctaatcacatggtttgttcttctgacaacarccacccctttttctgaagctgtctaggagctttcagtcac

SEQ ID NO: 578420 - DNA, 619 bp, Homo sapiens
aacatcaccaaatgcattcttactatggtgatcccaaaggtcttagaggctcttgtgttagaaacctgggactaagaccaaatattgaaacagaagatgccccatcactttcatcaccaaggcctttataagagcttgagaagctctgtgccaggatgaggggcagaaaccaaatgtgtatttcttttctttttcttttgaacacagagtctctgtttcacccratctggagtgcagtgatggtgttgtagctaactgcagcctcaaccacctgtgctcaagcaattctcccacctcagccttccaagcatctgggactacaggtgcacaccatccatgcccagctaatttttgtattttttttttgtagagatgggatcttgttatattgccgaggctggtcttgaactctggggctaaagcgatcctttcaccacaacctctcaagtagctgaaactacagatgcatactaccatgcccagctaattttttcttatttctttttgttgtttaattgagggggtctcgccgtgtttcccaggctggtcctgaagttttggcctcaagcgtttctcctgctttgacctcctaaactgttgggattatggttgtgagcca

SEQ ID NO: 578421 - DNA, 613 bp, Homo sapiens
tggtgttgtagctaactgcagcctcaaccacctgtgctcaagcaattctcccacctcagccttccaagcatctgggactacaggtgcacaccatccatgcccagctaatttttgtattttttttttgtagagatgggatcttgttatattgccgaggctggtcttgaactctggggctaaagcgatcctttcaccacaacctctcaagtagctgaaactacagatgcatactaccatgcccagctaattttttcttatttctttttgttgtttaattgagggggtctcgccgtgtttcccaggctggtcctgaagttttggcctcaagcgtttctcctgctttgacctcctaaactgttgggattatggttgtgagccacggcctctgtgtccagcaawcacaagaggtctttataagtgaaagagggaggtaagagagtccgaattgaaggagatttgatgatggaagcacaggtcacagagggagattcgaatatgctttgcttctggctttgaagatgcagttaggagccatgagccaaagaatagcagtggctttagcaactgggaaagacaagggaacatattctctccagaacctccagaagggatg

SEQ ID NO: 578422 - DNA, 372 bp, Homo sapiens
tgatgatggaagcacaggtcacagagggagattcgaatatgctttgcttctggctttgaagatgcagttaggagccatgagccaaagaatagcagtggctttagcaactgggaaagrcaagggaacatattctctccagaacctccagaagggatgcagtcctgctggcaccttgactttagccttaatagacctattttggacttctggcccccagacctcttagttagtagatttgtggtgtattaagccactcaatgtagggtagtttgtaacagcagcaagaagaaatgaacatgaagccagaattggtggcccacacctataattccagctatttaggaggctgaggcaggatggttgctttggccc

SEQ ID NO: 578423 - DNA, 372 bp, Homo sapiens
tgatgatggaagcacaggtcacagagggagattcgaatatgctttgcttctggctttgaagatgcagttaggagccatgagccaaagaatagcagtggctttagcaactgggaaagacaagggaacatattctctccagaacctccagaagggatgcagtcctgctggcamcttgactttagccttaatagacctattttggacttctggcccccagacctcttagttagtagatttgtggtgtattaagccactcaatgtagggtagtttgtaacagcagcaagaagaaatgaacatgaagccagaattggtggcccacacctataattccagctatttaggaggctgaggcaggatggttgctttggccc

SEQ ID NO: 578424 - DNA, 417 bp, Homo sapiens
tattctctccagaacctccagaagggatgcagtcctgctggcaccttgactttagccttaatagacctattttggacttctggcccccagacctcttagttagtagatttgtggtgtattaagccactcaatgtagggtagtttgtaacagcagcaagaagaaatgaacatgaagccagaattggtggcccacacctataattccagctatttaggaggctgaggcaggatggttgctttggcccaggagttcacgataagtctgggcaacaaaatgrtaccctgtctacatggaaaaaaaaattagcgggtgtggtggcatgcacttgtagtcttagccactagaggccctgaggcaggacaatttcttgacctaggagctccaggtctcagtgcgttgtgatcgtgccatggcac

SEQ ID NO: 578425 - DNA, 417 bp, Homo sapiens
tattctctccagaacctccagaagggatgcagtcctgctggcaccttgactttagccttaatagacctattttggacttctggcccccagacctcttagttagtagatttgtggtgtattaagccactcaatgtagggtagtttgtaacagcagcaagaagaaatgaacatgaagccagaattggtggcccacacctataattccagctatttaggaggctgaggcaggatggttgctttggcccaggagttcacgataagtctgggcaacaaaatggtaccctgtctacatggaaaaaaaaattagcgggtgtggtggcatgcacttgtagtcttagcyactagaggccctgaggcaggacaatttcttgacctaggagctccaggtctcagtgcgttgtgatcgtgccatggcac

SEQ ID NO: 578426 - DNA, 402 bp, Homo sapiens
ataaaaattaataaaatataattatcccggcatagtggtattttcctgtagaacctgttacttaggttgttgaggtgggcagatctcttgagggcgggagtttgaggccagcttgggcaacatagcaaggctcctctttctacaaaaaaaaaaaaaaattagctgggtgttttggtgctcatctgtagccgtagctatggtgagggtgaggcaggaggatccccggagcccaggaggtcayggctgcagttagctatgagtgcacccctgcattgcagccagagtgacagagtgagacccggtctcagaatacagatacaagtaaagaaatctcagctcagagcagtctgtttgtcactatgcagccttttcaaccccatagctgcgcgattgggtttgtgt

SEQ ID NO: 578427 - DNA, 604 bp, Homo sapiens
agcttgtaactattcaaatctcttattggttctataattaattctttttctaattagctttttaaaaatcagaattgatattagactaatcagttattaatgaggagatgaaattgagttgtttgtacactttatctaagatagtgttatattggctaactcaaatcatagttcagcaaatgcagaatcagagcttcttcagygcggaactctcttgtggttcttgaagatgccatttctttttcttttcttttttttttttttttggagacagcatcttcctctgtcaccaggctcgagtgcagtggcacaatctcaattcacagcaacttctgcctcccgggttcaagcatttcttttgcctcagcctctgaagtagctgggactacaggcacgtgtcactatgcccggctaagctttgtattttctgtagatacggggtttcagcatgttggacaggctggtcttgaactcctgaccttgtgatccactggccttggactcctaaagtgctgggattacaggtgtgagccaccttgcctggcctcttttttcagtctttaataaactgctgccatcatttcagaccacttgctattttagg

SEQ ID NO: 578428 - DNA, 587 bp, Homo sapiens
taattctttttctaattagctttttaaaaatcagaattgatattagactaatcagttattaatgaggagatgaaattgagttgtttgtacactttatctaagatagtgttatattggctaactcaaatcatagttcagcaaatgcagaatcagagcttcttcagcgyggaactctcttgtggttcttgaagatgccatttctttttcttttcttttttttttttttttggagacagcatcttcctctgtcaccaggctcgagtgcagtggcacaatctcaattcacagcaacttctgcctcccgggttcaagcatttcttttgcctcagcctctgaagtagctgggactacaggcacgtgtcactatgcccggctaagctttgtattttctgtagatacggggtttcagcatgttggacaggctggtcttgaactcctgaccttgtgatccactggccttggactcctaaagtgctgggattacaggtgtgagccaccttgcctggcctcttttttcagtctttaataaactgctgccatcatttcagaccacttgctattttaggcacttagaaatttttcactgg

SEQ ID NO: 578429 - DNA, 620 bp, Homo sapiens
gaattctcctttgaatagcttgtaactattcaaatctcttattggttctataattaattctttttctaattagctttttaaaaatcagaattgatattagactaatcagttattaatgaggagatgaaattgagttgtttgtacactttatctaagatagtgttatattggctaactcaaatcatagttcagcaaatgcagaatcagagcttcttcagcgcggaactctcttgtggttcttgaagatgccatttctttttcttttcttttttttttttttttkgagacagcatcttcctctgtcaccaggctcgagtgcagtggcacaatctcaattcacagcaacttctgcctcccgggttcaagcatttcttttgcctcagcctctgaagtagctgggactacaggcacgtgtcactatgcccggctaagctttgtattttctgtagatacggggtttcagcatgttggacaggctggtcttgaactcctgaccttgtgatccactggccttggactcctaaagtgctgggattacaggtgtgagccaccttgcctggcctcttttttcagtctttaataaactgctgccatcatttcagaccacttgctattttagg

SEQ ID NO: 578430 - DNA, 613 bp, Homo sapiens
aaatctcttattggttctataattaattctttttctaattagctttttaaaaatcagaattgatattagactaatcagttattaatgaggagatgaaattgagttgtttgtacactttatctaagatagtgttatattggctaactcaaatcatagttcagcaaatgcagaatcagagcttcttcagcgcggaactctcttgtggttcttgaagatgccatttctttttcttttcttttttttttttttttggagacagcatcttcctctgtcaccaggctcgagtgcagtggcacaatctcaattcacagcaacttctgcctcccgggttcaagcatttcttttgcctcagcctctgaagkagctgggactacaggcacgtgtcactatgcccggctaagctttgtattttctgtagatacggggtttcagcatgttggacaggctggtcttgaactcctgaccttgtgatccactggccttggactcctaaagtgctgggattacaggtgtgagccaccttgcctggcctcttttttcagtctttaataaactgctgccatcatttcagaccacttgctattttaggcacttagaaatttttcactggaat

SEQ ID NO: 578431 - DNA, 629 bp, Homo sapiens
tttgaatagcttgtaactattcaaatctcttattggttctataattaattctttttctaattagctttttaaaaatcagaattgatattagactaatcagttattaatgaggagatgaaattgagttgtttgtacactttatctaagatagtgttatattggctaactcaaatcatagttcagcaaatgcagaatcagagcttcttcagcgcggaactctcttgtggttcttgaagatgccatttctttttcttttcttttttttttttttttggagacagcatcttcctctgtcaccaggctcgagtgcagtggcacaatctcaattcacagcaacttctgcctcccgggttcaagcatttcttttgcctcagcctctgaagtagctgggactacaggcacrtgtcactatgcccggctaagctttgtattttctgtagatacggggtttcagcatgttggacaggctggtcttgaactcctgaccttgtgatccactggccttggactcctaaagtgctgggattacaggtgtgagccaccttgcctggcctcttttttcagtctttaataaactgctgccatcatttcagaccacttgctattttaggcacttagaaatttttcac

SEQ ID NO: 578432 - DNA, 629 bp, Homo sapiens
tttgaatagcttgtaactattcaaatctcttattggttctataattaattctttttctaattagctttttaaaaatcagaattgatattagactaatcagttattaatgaggagatgaaattgagttgtttgtacactttatctaagatagtgttatattggctaactcaaatcatagttcagcaaatgcagaatcagagcttcttcagcgcggaactctcttgtggttcttgaagatgccatttctttttcttttcttttttttttttttttggagacagcatcttcctctgtcaccaggctcgagtgcagtggcacaatctcaattcacagcaacttctgcctcccgggttcaagcatttcttttgcctcagcctctgaagtagctgggactacaggcacgtgtcacyatgcccggctaagctttgtattttctgtagatacggggtttcagcatgttggacaggctggtcttgaactcctgaccttgtgatccactggccttggactcctaaagtgctgggattacaggtgtgagccaccttgcctggcctcttttttcagtctttaataaactgctgccatcatttcagaccacttgctattttaggcacttagaaatttttcac

SEQ ID NO: 578433 - DNA, 613 bp, Homo sapiens
aaatctcttattggttctataattaattctttttctaattagctttttaaaaatcagaattgatattagactaatcagttattaatgaggagatgaaattgagttgtttgtacactttatctaagatagtgttatattggctaactcaaatcatagttcagcaaatgcagaatcagagcttcttcagcgcggaactctcttgtggttcttgaagatgccatttctttttcttttcttttttttttttttttggagacagcatcttcctctgtcaccaggctcgagtgcagtggcacaatctcaattcacagcaacttctgcctcccgggttcaagcatttcttttgcctcagcctctgaagtagctgggactacaggcacgtgtcactatgcccggctaagctttgtattttctgtagatacggggtttcagcatgttggacaggctggtcttgaactcctgaccttgtgatccactggccttggactcctaaagtgctgggattacaggtgtgagccaccktgcctggcctcttttttcagtctttaataaactgctgccatcatttcagaccacttgctattttaggcacttagaaatttttcactggaat

SEQ ID NO: 578434 - DNA, 440 bp, Homo sapiens
ttttcagatactactcagctggccactgaacctaaccagcaacccaccctcaaccattcagtggtcttttgttcttctctgttcctcctgaatgttgattactctcagaaggtgataaaaacttggatttcttttttttttctttctagagacagggttttgttctgtcacccaggctgcagtgcggtggcatgatcatggttcactgcagcctgaaaccccggactcaaacagtcctcccacctcagcctcccaagtagctgggactacatacatttgcccctatgcccagctaacttctttattttttattgtacagatgggatcttgctgtgttgctcaggatgtkgtcagactcctggcctcaagtgatcattctgcctcagcttcccaaagtgcttggattatatgtaggtgggagccaactgtgttcaataccc

SEQ ID NO: 578435 - DNA, 634 bp, Homo sapiens
tttatcaaagtacgcaattcaggccaggtgcagtggctaattcctataacgctaagactttgggcagctgaggcaggtggatcgcttgtgttcaggagtttgcgactagcctgggcaacatgrcaaaacagcatctctagcaaaattacaaaaattagctgggtgtggtggctcatgcctgtagtcccaactacttggggacatgagactggaagatcacttgagcccagaagccataggttgcagtgagaccagatggcaccactgcactacagcatgggtgacaaaaggagaccctgtctttaaataactaaagaaaaaagaaagtatacaattgagtggtttttagaatattcaaggagctgtgcatccatcaccacagtctttcttagaagtgattacccacttgtgagttacccacttatgagtgagaaaccctcacctcttagccgctacctcctacgtaccccatgttcataggcaaccactgatttattttctgtcattgtagttttgcctaatctggaccttttatagaaatagaattgtacaatgtgtgatcttttgtaatttgcttttttttttctcttagcagaatgttttcaaatttctttcatgttacagtgtgtatcag

SEQ ID NO: 578436 - DNA, 634 bp, Homo sapiens
tttatcaaagtacgcaattcaggccaggtgcagtggctaattcctataacgctaagactttgggcagctgaggcaggtggatcgcttgtgttcaggagtttgcgactagcctgggcaacatgacaaaacagcatctctagcaaaawtacaaaaattagctgggtgtggtggctcatgcctgtagtcccaactacttggggacatgagactggaagatcacttgagcccagaagccataggttgcagtgagaccagatggcaccactgcactacagcatgggtgacaaaaggagaccctgtctttaaataactaaagaaaaaagaaagtatacaattgagtggtttttagaatattcaaggagctgtgcatccatcaccacagtctttcttagaagtgattacccacttgtgagttacccacttatgagtgagaaaccctcacctcttagccgctacctcctacgtaccccatgttcataggcaaccactgatttattttctgtcattgtagttttgcctaatctggaccttttatagaaatagaattgtacaatgtgtgatcttttgtaatttgcttttttttttctcttagcagaatgttttcaaatttctttcatgttacagtgtgtatcag

SEQ ID NO: 578437 - DNA, 634 bp, Homo sapiens
tttatcaaagtacgcaattcaggccaggtgcagtggctaattcctataacgctaagactttgggcagctgaggcaggtggatcgcttgtgttcaggagtttgcgactagcctgggcaacatgacaaaacagcatctctagcaaaattacaaaaattagctgggtgtggtggctcatgcctgtagtcccaactacttggggacatgagactggaagatcacttgagcccagaagccataggttgcagtgagaccagatggcaccactgcactacagcatgggtgacaaaaggagaccctgtctttaaataactaaagaaaaaagaaagtatacaattgagtggtttttagaatattcaaggagctgtgcatccatcaccacagtctttcttagaagtgattacccacttgtgagttacccacttatgartgagaaaccctcacctcttagccgctacctcctacgtaccccatgttcataggcaaccactgatttattttctgtcattgtagttttgcctaatctggaccttttatagaaatagaattgtacaatgtgtgatcttttgtaatttgcttttttttttctcttagcagaatgttttcaaatttctttcatgttacagtgtgtatcag

SEQ ID NO: 578438 - DNA, 546 bp, Homo sapiens
ggagctgtgcatccatcaccacagtctttcttagaagtgattacccacttgtgagttacccacttatgagtgagaaaccctcacctcttagccgctacctcctacgtaccccatgttcataggcaaccastgatttattttctgtcattgtagttttgcctaatctggaccttttatagaaatagaattgtacaatgtgtgatcttttgtaatttgcttttttttttctcttagcagaatgttttcaaatttctttcatgttacagtgtgtatcaggatttctttccttttgtagctgagtaatagtttatgtttatccattcattagttgacggacatttgtgttgtttttgcgtattcaccatcatgagtcaggctgctatgaacactcgtacgtaagttttagtgtgaacatatatttttatttctcttggatttacactcaggagtgaaattgttgcattatgtgattactatacatttagtctttgaggaactgccacgttgtttttcaaagtggttacactggtcaggcacagtggctca

SEQ ID NO: 578439 - DNA, 546 bp, Homo sapiens
ggagctgtgcatccatcaccacagtctttcttagaagtgattacccacttgtgagttacccacttatgagtgagaaaccctcacctcttagccgctacctcctacgtaccccatgttcataggcaaccactgatttattttctgtcattgtagttttgcctaatctggaccttttatagaaatagaattgtacaatgtgtgatcttttgtaatttgcttttttttttctcttagcagaatgttttcaaatttctttcatgttayagtgtgtatcaggatttctttccttttgtagctgagtaatagtttatgtttatccattcattagttgacggacatttgtgttgtttttgcgtattcaccatcatgagtcaggctgctatgaacactcgtacgtaagttttagtgtgaacatatatttttatttctcttggatttacactcaggagtgaaattgttgcattatgtgattactatacatttagtctttgaggaactgccacgttgtttttcaaagtggttacactggtcaggcacagtggctca

SEQ ID NO: 578440 - DNA, 534 bp, Homo sapiens
ccgctacctcctacgtaccccatgttcataggcaaccactgatttattttctgtcattgtagttttgcctaatctggaccttttatagaaatagaattgtacaatgtgtgatcttttgtaatttgcttttttttttctcttagcagaatgttttcaaatttctttcatgttacagtgtgtatcaggatttctttccttttgtagctgagtaatagtttatgtttatccattcattagttgayggacatttgtgttgtttttgcgtattcaccatcatgagtcaggctgctatgaacactcgtacgtaagttttagtgtgaacatatatttttatttctcttggatttacactcaggagtgaaattgttgcattatgtgattactatacatttagtctttgaggaactgccacgttgtttttcaaagtggttacactggtcaggcacagtggctcacacctttaatctcaggtatttgagacgctgagtttggaggattttcttagctcgggagttcaggacaaccctgggcaac

SEQ ID NO: 578441 - DNA, 546 bp, Homo sapiens
ggagctgtgcatccatcaccacagtctttcttagaagtgattacccacttgtgagttacccacttatgagtgagaaaccctcacctcttagccgctacctcctacgtaccccatgttcataggcaaccactgatttattttctgtcattgtagttttgcctaatctggaccttttatagaaatagaattgtacaatgtgtgatcttttgtaatttgcttttttttttctcttagcagaatgttttcaaatttctttcatgttacagtgtgtatcaggatttctttccttttgtagctgagtaatagtttatgtttatccattcattagttgacggacatttgtgttgtttttgcgtattcaccatcatgagtcaggctgctatgaacactygtacgtaagttttagtgtgaacatatatttttatttctcttggatttacactcaggagtgaaattgttgcattatgtgattactatacatttagtctttgaggaactgccacgttgtttttcaaagtggttacactggtcaggcacagtggctca

SEQ ID NO: 578442 - DNA, 549 bp, Homo sapiens
gttttagtgtgaacatatatttttatttctcttggatttacactcaggagtgaaattgttgcattatgtgattactatacatttagtctttgagraactgccacgttgtttttcaaagtggttacactggtcaggcacagtggctcacacctttaatctcaggtatttgagacgctgagtttggaggattttcttagctcgggagttcaggacaaccctgggcaacatagggaaacaatgtcttgattttttaaaaaaatcaaatgccaagaaaacacccaaattgattacaccattttatgttcccaccagtaatgtatgtgagttccaattattccaattgtcaccaacttttttttttttgagacaaaatcttgctctgttgcccaggctggagtgcagtgacatgaacatggccagtgcagctgtgaccttccaggcacaagtgatcctctcacctcagcctcctaagtagctgggacttacaggtgcatgctatcatgtgcagctgatttttacagtttttggtagaaatggggtgttgtcatg

SEQ ID NO: 578443 - DNA, 549 bp, Homo sapiens
gttttagtgtgaacatatatttttatttctcttggatttacactcaggagtgaaattgttgcattatgtgattactatacatttagtctttgaggaactkccacgttgtttttcaaagtggttacactggtcaggcacagtggctcacacctttaatctcaggtatttgagacgctgagtttggaggattttcttagctcgggagttcaggacaaccctgggcaacatagggaaacaatgtcttgattttttaaaaaaatcaaatgccaagaaaacacccaaattgattacaccattttatgttcccaccagtaatgtatgtgagttccaattattccaattgtcaccaacttttttttttttgagacaaaatcttgctctgttgcccaggctggagtgcagtgacatgaacatggccagtgcagctgtgaccttccaggcacaagtgatcctctcacctcagcctcctaagtagctgggacttacaggtgcatgctatcatgtgcagctgatttttacagtttttggtagaaatggggtgttgtcatg

SEQ ID NO: 578444 - DNA, 549 bp, Homo sapiens
gttttagtgtgaacatatatttttatttctcttggatttacactcaggagtgaaattgttgcattatgtgattactatacatttagtctttgaggaactgccacgttgtttttcaaagtggttacactggtcaggcacagtggctcacacctttaatctcaggtatttgagacgctgagtttggaggattttcttagctcrggagttcaggacaaccctgggcaacatagggaaacaatgtcttgattttttaaaaaaatcaaatgccaagaaaacacccaaattgattacaccattttatgttcccaccagtaatgtatgtgagttccaattattccaattgtcaccaacttttttttttttgagacaaaatcttgctctgttgcccaggctggagtgcagtgacatgaacatggccagtgcagctgtgaccttccaggcacaagtgatcctctcacctcagcctcctaagtagctgggacttacaggtgcatgctatcatgtgcagctgatttttacagtttttggtagaaatggggtgttgtcatg

SEQ ID NO: 578445 - DNA, 599 bp, Homo sapiens
atttattttctgtcattgtagttttgcctaatctggaccttttatagaaatagaattgtacaatgtgtgatcttttgtaatttgcttttttttttctcttagcagaatgttttcaaatttctttcatgttacagtgtgtatcaggatttctttccttttgtagctgagtaatagtttatgtttatccattcattagttgacggacatttgtgttgtttttgcgtattcaccatcatgagtcaggctgctatgaacactcgtacgtaagttttagtgtgaacatatatttttatttctcttggatttacactcaggagtgaaattgttgcattatgtgattactatacatttagtctttgaggaactgccacgttgtttttcaaagtggttacactggtcaggcacagtggctcacacctttaatctcaggtatttgagacgctgagtttggaggattttcttagctcgggagttcaggacaaccctgggcaacatagggaaacaatgtcttgattttttaaaaaaatcaaatgccaagaaaacacccaaattgattacaccatttkatgttcccaccagtaatgtatgtgagttccaat

SEQ ID NO: 578446 - DNA, 549 bp, Homo sapiens
gttttagtgtgaacatatatttttatttctcttggatttacactcaggagtgaaattgttgcattatgtgattactatacatttagtctttgaggaactgccacgttgtttttcaaagtggttacactggtcaggcacagtggctcacacctttaatctcaggtatttgagacgctgagtttggaggattttcttagctcgggagttcaggacaaccctgggcaacatagggaaacaatgtcttgattttttaaaaaaatcaaatgccaagaaaacacccaaattgattacaccattttatgttcccaccagtaatgtatgtgagttccaattattccaattgtcaccaacttttttttttttgagacaaaatcttgctctgttgcmcaggctggagtgcagtgacatgaacatggccagtgcagctgtgaccttccaggcacaagtgatcctctcacctcagcctcctaagtagctgggacttacaggtgcatgctatcatgtgcagctgatttttacagtttttggtagaaatggggtgttgtcatg

SEQ ID NO: 578447 - DNA, 529 bp, Homo sapiens
gattacaccattttatgttcccaccagtaatgtatgtgagttccaattattccaattgtcaccaacttttttttttttgagacaaaatcttgctctgttgcccaggctggagtgcagtgacatgaacatggccagtgcagctgtgaccttccaggcacaagtgatcctctcacctcagcctcctaagtagctgggacttacagktgcatgctatcatgtgcagctgatttttacagtttttggtagaaatggggtgttgtcatgtagcccaggtttgtgtcaaactcctgagctcaagtgatctgcctgcttcagcttccggaagtgctgagattacaggtgtgtgccaccacgcccgactggtgtaaccactttggaaagcagccactgagcccggccttcaccggtataccaatatttgttaatatcgttttattttttacaatttttccatttttaaaaacttattcttttacctgtattattgattataataaacaacgaataattttgcagtagagttgagtcc

SEQ ID NO: 578448 - DNA, 529 bp, Homo sapiens
gattacaccattttatgttcccaccagtaatgtatgtgagttccaattattccaattgtcaccaacttttttttttttgagacaaaatcttgctctgttgcccaggctggagtgcagtgacatgaacatggccagtgcagctgtgaccttccaggcacaagtgatcctctcacctcagcctcctaagtagctgggacttacaggtgcatgctatcatgtgcagctgatttttacagtttttggtagaaatggggtgttgtcatgtagcccaggtttgtgtcaaactcctgagctcaagtgatctgcctgcttcagcttccggaagtgctgagattacaggtgtgtgccaccacgcccgactggtgtaaccactttggaaagcagccactgagcccggccttcaccrgtataccaatatttgttaatatcgttttattttttacaatttttccatttttaaaaacttattcttttacctgtattattgattataataaacaacgaataattttgcagtagagttgagtcc

SEQ ID NO: 578449 - DNA, 505 bp, Homo sapiens
atttattgtttaactgaagtagtttttttttttaatctggatatatattttttcattttcactttatttttagtgtttatttttaraaattatttatatgtatttttattttaataggtgtttgagaaacaggtggtgtttggttccatgaataagttcttcagtgttgatttctgaaatgtagtacccctcattacttcttaaattatatattaagtcattataaaataattaataaaccaaggactttagtaaaatgggaattttattttaacttgcaacctgggacgtaactgtcaaaaaaattagagaaattaccacattaaggttttaaaatcttgaactgaaaaatgaaaaccttggtgcacctaagaaccaccagcccactggtcaaagtgaacaaaactaaatgaaaaaataaaaccaagaaaaccaaactcaggattattaggtattttgtaatgctattttacctttggactcacagaaaagagttattattatt

SEQ ID NO: 578450 - DNA, 505 bp, Homo sapiens
atttattgtttaactgaagtagtttttttttttaatctggatatatattttttcattttcactttatttttagtgtttatttttaaaaattatttatatgtatttttattttaataggtgtttgagaaacaggtggtgtttggttccatgaataagttcttcagtgttgatttctgaaatgtagtacccctcattacttmttaaattatatattaagtcattataaaataattaataaaccaaggactttagtaaaatgggaattttattttaacttgcaacctgggacgtaactgtcaaaaaaattagagaaattaccacattaaggttttaaaatcttgaactgaaaaatgaaaaccttggtgcacctaagaaccaccagcccactggtcaaagtgaacaaaactaaatgaaaaaataaaaccaagaaaaccaaactcaggattattaggtattttgtaatgctattttacctttggactcacagaaaagagttattattatt

SEQ ID NO: 578451 - DNA, 426 bp, Homo sapiens
caagtcagaatacatcctatttttgaatatttgatgactttaggatactatattaactcttaattgaattaatacaagtttaggtgtaaagatgawgtttatgttgacaaaaatgattaatgttttacatatatgaaagtaacaatatcatatatttttcatacttgtacaatactttgaaatctattattagctaatattttatattcattttgtgttttcacattattgttagatccagagaaaagtaatattgtgtgaatactcaaatcataaacattttgctggatgcattcatagatactttatttaaaaagtacactaattgaagttttacaccattttatgattcatcaaacacagcaactgaatactggcgtatagcaacattacagatgatgtaagtgtaagataaaactcataaca

SEQ ID NO: 578452 - DNA, 426 bp, Homo sapiens
caagtcagaatacatcctatttttgaatatttgatgactttaggatactatattaactcttaattgaattaatacaagtttaggtgtaaagatgatgtttatgttgacaaaaatkattaatgttttacatatatgaaagtaacaatatcatatatttttcatacttgtacaatactttgaaatctattattagctaatattttatattcattttgtgttttcacattattgttagatccagagaaaagtaatattgtgtgaatactcaaatcataaacattttgctggatgcattcatagatactttatttaaaaagtacactaattgaagttttacaccattttatgattcatcaaacacagcaactgaatactggcgtatagcaacattacagatgatgtaagtgtaagataaaactcataaca

SEQ ID NO: 578453 - DNA, 426 bp, Homo sapiens
caagtcagaatacatcctatttttgaatatttgatgactttaggatactatattaactcttaattgaattaatacaagtttaggtgtaaagatgatgtttatgttgacaaaaatgattaatgttttacatatatgaaagtaacaatatcatatatttttcatacttgtacaatactttgaaatctattattagctaatattttatattcattttgkgttttcacattattgttagatccagagaaaagtaatattgtgtgaatactcaaatcataaacattttgctggatgcattcatagatactttatttaaaaagtacactaattgaagttttacaccattttatgattcatcaaacacagcaactgaatactggcgtatagcaacattacagatgatgtaagtgtaagataaaactcataaca

SEQ ID NO: 578454 - DNA, 426 bp, Homo sapiens
caagtcagaatacatcctatttttgaatatttgatgactttaggatactatattaactcttaattgaattaatacaagtttaggtgtaaagatgatgtttatgttgacaaaaatgattaatgttttacatatatgaaagtaacaatatcatatatttttcatacttgtacaatactttgaaatctattattagctaatattttatattcattttgtgttttcacattattgttagatccagagaaaagtaatattgtgtgaatactcaaatcataaacattttgctggatgcattcatagatactttatttaaaaagtacactaattgaagttttacaccattttatgattcatcaaacacagcaactgaatactggcktatagcaacattacagatgatgtaagtgtaagataaaactcataaca

SEQ ID NO: 578455 - DNA, 590 bp, Homo sapiens
caccattttatgattcatcaaacacagcaactgaatactggcgtatagcaacattacagatgatgtaagtgtaagataaaactcataacacattttaaaaagggtaaaaggaaggaaaggaaaaaggatacaaggctgtagaaagattttaaaaacaaacgtcrtatgtctgaacctttgcctggagtttcatattttgtgaaaagcagtttgtaagtagaggactcgtaagtgcacctagtacactgcaatggcacagacacggcagatagtcaataaaatgatctttaacttctgatctaggttatttttgttgttgttcatgtattaacctagtgaaactcagccaatagatggagtggcattgacctgtacaacttccaaaatcccatccaaccttagtgtcctctgaagttctccataacttattgtctgttccaaccaacatttagcataagctacagcttatattgttaataattcttctatgtttatgtgctgatttgcaaataaatgggcctatatagtctctatctagtgttggattgggatcaaaagtttcatgaaatcattgtttttagtatatgtac

SEQ ID NO: 578456 - DNA, 590 bp, Homo sapiens
caccattttatgattcatcaaacacagcaactgaatactggcgtatagcaacattacagatgatgtaagtgtaagataaaactcataacacattttaaaaagggtaaaaggaaggaaaggaaaaaggatacaaggctgtagaaagattttaaaaacaaacgtcgtatgtctgaacctttgcctggagtttcatattttgtgaaaagcagtttgtaagtagaggactcgtaagtgcacctagtacactgcaatggcacagacacggcagatagtcaataaaatgayctttaacttctgatctaggttatttttgttgttgttcatgtattaacctagtgaaactcagccaatagatggagtggcattgacctgtacaacttccaaaatcccatccaaccttagtgtcctctgaagttctccataacttattgtctgttccaaccaacatttagcataagctacagcttatattgttaataattcttctatgtttatgtgctgatttgcaaataaatgggcctatatagtctctatctagtgttggattgggatcaaaagtttcatgaaatcattgtttttagtatatgtac

SEQ ID NO: 578457 - DNA, 523 bp, Homo sapiens
caaccaacatttagcataagctacagcttatattgttaataattcttctatgtttatgtgctgatttgcaaataaatgggcctatatagtctytatctagtgttggattgggatcaaaagtttcatgaaatcattgtttttagtatatgtacagatggataattgtataaataagtacagatgtgtataaatgtgtgagtatacatacatatattttctagctcctctaacaaaagggcctagaaacaacatcatcccagtaacaatgagaacaccattctccaattaaaggaaccaaggctccttggggacatatttgatatcaggattgggcagggaaaatacaagattagtttgaaatattttgtcatgttaggaagtaaggaaatgctcacaaaatggggaaaatgtgaaagggaaacagatccactttgaataaacttccatagccaaatttgagaaaattggggcaataaaatagataacaatagtaatatattacaatctacagaagaaaattttc

SEQ ID NO: 578458 - DNA, 523 bp, Homo sapiens
caaccaacatttagcataagctacagcttatattgttaataattcttctatgtttatgtgctgatttgcaaataaatgggcctatatagtctctatctagtgttggattgggatcaaaagtttcatgaaatcattgtttttagtataygtacagatggataattgtataaataagtacagatgtgtataaatgtgtgagtatacatacatatattttctagctcctctaacaaaagggcctagaaacaacatcatcccagtaacaatgagaacaccattctccaattaaaggaaccaaggctccttggggacatatttgatatcaggattgggcagggaaaatacaagattagtttgaaatattttgtcatgttaggaagtaaggaaatgctcacaaaatggggaaaatgtgaaagggaaacagatccactttgaataaacttccatagccaaatttgagaaaattggggcaataaaatagataacaatagtaatatattacaatctacagaagaaaattttc

SEQ ID NO: 578459 - DNA, 531 bp, Homo sapiens
gtctgttccaaccaacatttagcataagctacagcttatattgttaataattcttctatgtttatgtgctgatttgcaaataaatgggcctatatagtctctatctagtgttggattgggatcaaaagtttcatgaaatcattgtttttagtatatgtacagatggataatygtataaataagtacagatgtgtataaatgtgtgagtatacatacatatattttctagctcctctaacaaaagggcctagaaacaacatcatcccagtaacaatgagaacaccattctccaattaaaggaaccaaggctccttggggacatatttgatatcaggattgggcagggaaaatacaagattagtttgaaatattttgtcatgttaggaagtaaggaaatgctcacaaaatggggaaaatgtgaaagggaaacagatccactttgaataaacttccatagccaaatttgagaaaattggggcaataaaatagataacaatagtaatatattacaatctacagaagaaaattttc

SEQ ID NO: 578460 - DNA, 531 bp, Homo sapiens
gtctgttccaaccaacatttagcataagctacagcttatattgttaataattcttctatgtttatgtgctgatttgcaaataaatgggcctatatagtctctatctagtgttggattgggatcaaaagtttcatgaaatcattgtttttagtatatgtacagatggataattgtataaataagtacagatgtgtataaatgtgtgagtatacatacatatattttctagctcctctaacaaaagggcctagaaacaacatcatcccagtaacaatgagaacaccattctccaattaaaggaaccaaggctccttggggacatatttgatatcaggattgggcagggaaaatacaagattagtttgaaatattttgtcatgttaggaagtaaggaaatgctcacaaaatggggaaaatgtgaaagggaaacagatccactttgaataaacttccatagccaaatttgagaaaattggggcaataaaatagataacaatartaatatattacaatctacagaagaaaattttc

SEQ ID NO: 578461 - DNA, 558 bp, Homo sapiens
aactcaaaaaaaaaatccatattgacataaataataaaccaaagattgagagtgggtagtattttattacagtaagatttcattaaatgtaggagacataaaatataagaatcatcactttgcaaatatcatagtaataattgttgcaagaaagaaccttggaggaatgctaagattagtggtgaatatatgttgggaaagaacatatttgcataatatgaaagtatcttcccacaagataattatagaatagtaacttcaaagtggagatgtcaactkagccaagtgatcaaagttaacattactaataataagataaatgaacttcatgtaatttcttatatgatgcactgagtaggacaaaacatcaattctatggtattcttagacaaaatgtataactttagtcctaaccgtgagaaaacatcagattaactgaaattgaggcgggacattctacaaaataactgccagtattcatcaaaagcattttagaaagactgaggaattctccagagacatggaggcatgttatctaagtgcaatggagaacatgca

SEQ ID NO: 578462 - DNA, 558 bp, Homo sapiens
aactcaaaaaaaaaatccatattgacataaataataaaccaaagattgagagtgggtagtattttattacagtaagatttcattaaatgtaggagacataaaatataagaatcatcactttgcaaatatcatagtaataattgttgcaagaaagaaccttggaggaatgctaagattagtggtgaatatatgttgggaaagaacatatttgcataatatgaaagtatcttcccacaagataattatagaatagtaacttcaaagtggagatgtcaactgagccaagtgatcaaagttaacattactaataataagataaatgaacttcatgtaatttcttatatgatgcactgagtaggacaaaacatcaattctatggtattcttagacaaaatgtataactttagtcctaaccgtgagaaaacatcagattaactgaaattgaggmgggacattctacaaaataactgccagtattcatcaaaagcattttagaaagactgaggaattctccagagacatggaggcatgttatctaagtgcaatggagaacatgca

SEQ ID NO: 578463 - DNA, 433 bp, Homo sapiens
attggccaagaaaagtttcacacacaaaaaaaatagtttaaactgaaagaaaattttttaaaaacttaataaaatgtgggatgcagataaatcgtttcttaaaggtacatttatasatgtaatatattgaaaataaaaggcttcaatcaatgacctttaggttcttttttaagaggctaaaaaataagcaaagtatatccaaattaagaagaaggaagatgataaagataaaaatgtaaaccaacaacatagcaaataacaaaaggtggagctaattaatatacccacaaattggttctttgaaaaaaatttttttaataaacaatggctagcaagatttatctcgaaaaaaattagagaagctacataatgtagataatgggaattaaatagaggatgtaactacagaacctacagacatcaatataattat

SEQ ID NO: 578464 - DNA, 650 bp, Homo sapiens
aattaatatacccacaaattggttctttgaaaaaaatttttttaataaacaatggctagcaagatttatctcgaaaaaaattagagaagctacataatgtagataatgggaattaaatagaggatgtaactacagaacctacagacatcaatataattatgaaaactttaggccaatacatttgacaattaaaataacatgggaaattatttgtaaaactaattcttaaaactaatgcaaaatgmaatagaaaaagtaatagcttctctatgtattgaagaatttttttaatttaaaaagatttctataattacaggctacatgctttctcaggtgaattctatcaaacatttaagaaagtacagagagtcctcaacttacagtggtttgacttgtgctcttcttacttgataatggtgctttcatctgtgtacgttaatgatgagcatcaatatgaccagtttttcactatcagtatagttttcaacaaatttcatgagatactcaatattttaaaatgggccttgtggtagatgatattgcccaattgtaggataatgtaagtgttctgagcaagtttaaggtaggcgaggctaagacatgatattcagtaggttaaatatattaaatgtgttttagacttacaatat

SEQ ID NO: 578465 - DNA, 650 bp, Homo sapiens
aattaatatacccacaaattggttctttgaaaaaaatttttttaataaacaatggctagcaagatttatctcgaaaaaaattagagaagctacataatgtagataatgggaattaaatagaggatgtaactacagaacctacagacatcaatataattatgaaaactttaggccaatacatttgacaattaaaataacatgggaaattatttgtaaaactaattcttaaaactaatgcaaaatgcaatagaaaaagtaatagcttctctatgtattgaagaatttttttaatttaaaaagatttctataattacaggctacatgctttctcaggtgaattctatcaaacatttaagaaagtacagagagtcctcaacttacagtggtttgacttgtgctcttcttacttgataatggtgctttcatctgtgtacgttaatgatgagcatcaatatgaccagtttttcactatcagtatagttttcaacaaatttcatgagatactcaatattttaaaatgggccttgtggtagatgatwttgcccaattgtaggataatgtaagtgttctgagcaagtttaaggtaggcgaggctaagacatgatattcagtaggttaaatatattaaatgtgttttagacttacaatat

SEQ ID NO: 578466 - DNA, 611 bp, Homo sapiens
ccaaatgtacattctatttccaaaggacatttgtgaagccagtggaaagcgaacaaacaagctgctaaataagtcacaagtgtgttctcrtacagttttgcgattaactaaataggacattcaacagataaaatttgttttacatagttactcctctaacaggatgaacttgtggattgtgagatagggctgatataacctgttttctctctgcctctttttttttcccccaagttttgtgtgcaatacattaggaaaaatataattgggctacaaagctacaaagatggcttcctggcagttccatgcttgtttccatgtggtgcctatgtttggcactgtgttctcatttgcactttcctacttgattagttaatgtatgaaggacaagcctgatctctactgtgaatttttaccaaggtattctagtagaaaaatgagtatgtaatggtgctgtggaatgctaaagtgtgtaaaacattaagaatctaaaaatatgctcatttccaagttttgtcccagagcaactgtgcactctgattatatcgctactgctatttaaagttatccatttgcatgtctaaaaaatagattcatactgattgtcccat

SEQ ID NO: 578467 - DNA, 611 bp, Homo sapiens
ccaaatgtacattctatttccaaaggacatttgtgaagccagtggaaagcgaacaaacaagctgctaaataagtcacaagtgtgttctcgtacagttttgcgattaactaaataggacattcaacagataaaatttgttttacatagttactcctctaayaggatgaacttgtggattgtgagatagggctgatataacctgttttctctctgcctctttttttttcccccaagttttgtgtgcaatacattaggaaaaatataattgggctacaaagctacaaagatggcttcctggcagttccatgcttgtttccatgtggtgcctatgtttggcactgtgttctcatttgcactttcctacttgattagttaatgtatgaaggacaagcctgatctctactgtgaatttttaccaaggtattctagtagaaaaatgagtatgtaatggtgctgtggaatgctaaagtgtgtaaaacattaagaatctaaaaatatgctcatttccaagttttgtcccagagcaactgtgcactctgattatatcgctactgctatttaaagttatccatttgcatgtctaaaaaatagattcatactgattgtcccat

SEQ ID NO: 578468 - DNA, 655 bp, Homo sapiens
taacaggatgaacttgtggattgtgagatagggctgatataacctgttttctctctgcctctttttttttcccccaagttttgtgtgcaatacattaggaaaaatataattgggctayaaagctacaaagatggcttcctggcagttccatgcttgtttccatgtggtgcctatgtttggcactgtgttctcatttgcactttcctacttgattagttaatgtatgaaggacaagcctgatctctactgtgaatttttaccaaggtattctagtagaaaaatgagtatgtaatggtgctgtggaatgctaaagtgtgtaaaacattaagaatctaaaaatatgctcatttccaagttttgtcccagagcaactgtgcactctgattatatcgctactgctatttaaagttatccatttgcatgtctaaaaaatagattcatactgattgtcccattttgatctcaaaaaactcctgaatatgagagtcgtgatcaagggacgcttcatgaaatgttccaaagttaaagtgtgcaatgaaaccagatttatcatagccttatttaaaataattatttctaaaattgttattgtttaattataaacggtatcctttcaggatacttggaagatccatagcagtgtttttattttcac

SEQ ID NO: 578469 - DNA, 611 bp, Homo sapiens
ccaaatgtacattctatttccaaaggacatttgtgaagccagtggaaagcgaacaaacaagctgctaaataagtcacaagtgtgttctcgtacagttttgcgattaactaaataggacattcaacagataaaatttgttttacatagttactcctctaacaggatgaacttgtggattgtgagatagggctgatataacctgttttctctctgcctctttttttttcccccaagttttgtgtgcaatacattaggaaaaatataattgggctacaaagctacaaaratggcttcctggcagttccatgcttgtttccatgtggtgcctatgtttggcactgtgttctcatttgcactttcctacttgattagttaatgtatgaaggacaagcctgatctctactgtgaatttttaccaaggtattctagtagaaaaatgagtatgtaatggtgctgtggaatgctaaagtgtgtaaaacattaagaatctaaaaatatgctcatttccaagttttgtcccagagcaactgtgcactctgattatatcgctactgctatttaaagttatccatttgcatgtctaaaaaatagattcatactgattgtcccat

SEQ ID NO: 578470 - DNA, 611 bp, Homo sapiens
ccaaatgtacattctatttccaaaggacatttgtgaagccagtggaaagcgaacaaacaagctgctaaataagtcacaagtgtgttctcgtacagttttgcgattaactaaataggacattcaacagataaaatttgttttacatagttactcctctaacaggatgaacttgtggattgtgagatagggctgatataacctgttttctctctgcctctttttttttcccccaagttttgtgtgcaatacattaggaaaaatataattgggctacaaagctacaaagatggcttcctggcagttccatgcttgtttccatgtggtgcctatgtttggcactgtgttctcatttgcastttcctacttgattagttaatgtatgaaggacaagcctgatctctactgtgaatttttaccaaggtattctagtagaaaaatgagtatgtaatggtgctgtggaatgctaaagtgtgtaaaacattaagaatctaaaaatatgctcatttccaagttttgtcccagagcaactgtgcactctgattatatcgctactgctatttaaagttatccatttgcatgtctaaaaaatagattcatactgattgtcccat

SEQ ID NO: 578471 - DNA, 655 bp, Homo sapiens
taacaggatgaacttgtggattgtgagatagggctgatataacctgttttctctctgcctctttttttttcccccaagttttgtgtgcaatacattaggaaaaatataattgggctacaaagctacaaagatggcttcctggcagttccatgcttgtttccatgtggtgcctatgtttggcactgtgttctcatttgcactttcctacttgattagttaatgtatgaaggacaagcctgatctctactgtgaatttttaccaaggtattctagtagaaaaatgagtatgtaatggtgctgtggaatgctaaagtgtgyaaaacattaagaatctaaaaatatgctcatttccaagttttgtcccagagcaactgtgcactctgattatatcgctactgctatttaaagttatccatttgcatgtctaaaaaatagattcatactgattgtcccattttgatctcaaaaaactcctgaatatgagagtcgtgatcaagggacgcttcatgaaatgttccaaagttaaagtgtgcaatgaaaccagatttatcatagccttatttaaaataattatttctaaaattgttattgtttaattataaacggtatcctttcaggatacttggaagatccatagcagtgtttttattttcac

SEQ ID NO: 578472 - DNA, 655 bp, Homo sapiens
taacaggatgaacttgtggattgtgagatagggctgatataacctgttttctctctgcctctttttttttcccccaagttttgtgtgcaatacattaggaaaaatataattgggctacaaagctacaaagatggcttcctggcagttccatgcttgtttccatgtggtgcctatgtttggcactgtgttctcatttgcactttcctacttgattagttaatgtatgaaggacaagcctgatctctactgtgaatttttaccaaggtattctagtagaaaaatgagtatgtaatggtgctgtggaatgctaaagtgtgtaaaacattaagaatctaaaaatatgctcatttccaagttttgtcccagagcaactgtgcactctgattatatcgctactgctatttaaagttatccatttgcatgtctaaaaaatagattcatactgattgtcccattttgatctcaaaaaactcctgaatrtgagagtcgtgatcaagggacgcttcatgaaatgttccaaagttaaagtgtgcaatgaaaccagatttatcatagccttatttaaaataattatttctaaaattgttattgtttaattataaacggtatcctttcaggatacttggaagatccatagcagtgtttttattttcac

SEQ ID NO: 578473 - DNA, 537 bp, Homo sapiens
ttcttttttaagcaagtccccttttttaagaggggaactctctgacctgatctctgctgggcaatcttgaacatgagatggggctgatctgagcttagcattcctaaagtgctgggataaagtgtctcacaagggcaagtggagcctagagagatagctgtccctcgctctgggctycacatcacctgacttgctgctccaccactctgcttgtctcctaggtgctccatcccggagagatgtgagttagcaatcacttagcgtaatcagcccaggatggagggtctgtgttgtaagcccaagccagggttccctctctggtgatgagcagtggggggtgtgtggtacccgtgggagatggactggcttgttcgttgggtcaactgcagcttattggaggtgtcgatatggcacttagggtctttgctcccttgatattctgagggtagcaagggcagttccactgcagagacagtggcagagggaatttcctttgctcctggaagctctgtccagggaattgctgagttgctactg

SEQ ID NO: 578474 - DNA, 537 bp, Homo sapiens
ttcttttttaagcaagtccccttttttaagaggggaactctctgacctgatctctgctgggcaatcttgaacatgagatggggctgatctgagcttagcattcctaaagtgctgggataaagtgtctcacaagggcaagtggagcctagagagatagctgtccctcgctctgggcttcacatcacctgacttgctgctccaccactctgcttgtctcctaggtgctccatcccggagagatgtgagttagcaatcacttagcgtaatcagcccaggatggagggtctgtgttgtaagcccaagccagggttccctctctggtgatgagcagtgkggggtgtgtggtacccgtgggagatggactggcttgttcgttgggtcaactgcagcttattggaggtgtcgatatggcacttagggtctttgctcccttgatattctgagggtagcaagggcagttccactgcagagacagtggcagagggaatttcctttgctcctggaagctctgtccagggaattgctgagttgctactg

SEQ ID NO: 578475 - DNA, 283 bp, Homo sapiens
caacttttgcaatgaatgcatgcttgaaaatttcttagaaaactctgccctttataaaagtttaatccattttttacttcaataaattttatcttaaaaagaaatttctgttctctacttatagkaaacttttctttttttttttctagtttgtattccaaattaacgtggtacctctgtaagtttcttccaaaggcatattgagggataccgaggtttgcagtacaattaaacctatcacacaggttgtgagcataggacccaagaagtagtttttcaaccc

SEQ ID NO: 578476 - DNA, 569 bp, Homo sapiens
ccctttataaaagtttaatccattttttacttcaataaattttatcttaaaaagaaatttctgttctctacttatagtaaacttttctttttttttttctagtttgtattccaaattaacgtggtacctctgtaagtttcttccaaaggcatattgagggataccgaggtttgcagtacaattaaacctatcacacaggttgtgagcataggacccaagaagtagtttttcaaccctggcccactctgtccctccccgttcttatttccyagtgtctattattcccacctttatgacaatgtgcacccaatatataactcccacatgagtgaaaacatgagatatttggtttctgtttctgcgttggtttgcttaggagagtggattccagctgtattcatgttgctgcaaatgacgtgattttgttcttttcatggctgcatagtattccatggtatatatggaattttccaatctaccttggattttcaatctaccttggatgtacctggattgactccacatctttgctattgtaaatagtgctgcaatgaacatacatgtgtata

SEQ ID NO: 578477 - DNA, 569 bp, Homo sapiens
ccctttataaaagtttaatccattttttacttcaataaattttatcttaaaaagaaatttctgttctctacttatagtaaacttttctttttttttttctagtttgtattccaaattaacgtggtacctctgtaagtttcttccaaaggcatattgagggataccgaggtttgcagtacaattaaacctatcacacaggttgtgagcataggacccaagaagtagtttttcaaccctggcccactctgtccctccccgttcttatttcctagtgtctattattcccacctttatgacaatgtgcacccaatatataactcccacatgagtgaaaacatgagatatttggtttctgtttctgcgttggtttgcttaggagagtggattccagctgtattcatgttgctgcaaatgacgtgattttgttcttttcatggctgcatagtattccatggtatatatggaattttccaatctaccttggattttcaatctaccttggatgtacctggattgactccacatctttgctattgtraatagtgctgcaatgaacatacatgtgtata

SEQ ID NO: 578478 - DNA, 560 bp, Homo sapiens
gattctggataataggtgtttgctatatccatactttgtgaatattttcttccattcttttaggctgtctgtttaatcccgtgatagtttctcatgctgtgcagaagctatttagctaaattagatcacacttktcaatttttgttattcttgcaattgcttttgaggacttagccataaattaattgacaaatatgatatccagaagagtatttcctaggttttcttcaaggatttttatagtcagaagatgtactcttatgtaagaaaagcacaaacctttttttttgttttgttttgagacagagtctccatcaccaaggctatagtgcagtggtatgatcttggcttactgcaacctctgtctcctgggttcaagtgattctcctgcctcagcctcctgagtatctgagattacacatgcctgccaacacgccttgctaatttttgtatttttactagagacaggtttcatcatgttggccaggctggcctcaaactcctgacgtcaggtgattcacctgcctcggcctccccaaattttgggattacaagtgtga

SEQ ID NO: 578479 - DNA, 194 bp, Homo sapiens
ccatgccttggggttcatatggcactgtgggccacagaaggctgagtcccctgggtggtaatcctgcctgctttctgcacttgaacataaagtcctcctcaagacggcctgtggtctacttcttggccccacctttagggtagaagaactgatgtaccaygtctgacagtgagtgaggttggcggctgatccac

SEQ ID NO: 578480 - DNA, 568 bp, Homo sapiens
taaggcatgctgtgctgttgggtctctcagggcccttcccacagagccccgatctaaacacacaacacagaggctacaggaagactaatccagaacctctgagacagccagggaccacatgaggactctccccagacagccagaaggccctttgctagtttcttggtacytcagtggatgtggcagtggttcttctgttggggaccagtgagtacacaatggggagggctcacctgtgcttcctcagtggctccacctcttcttctaaaaaaaattactcattccagagctggcgcagagaaaatacaagctgagcttagaacatcttctgccagaaagtaaaaaagtgccgacagagtaatggagacaaatcaaagagacataaagtcagcttggaatgtctactactggcctaatcttggggaattggagcatcagaatcatgagctttccttctcccttatttattggttttatttctccacgtagaacaaagaagagaataagaaaataatcatctggtaaccatcatagtaataattgttcaaacacaagtcatccatgaaat

SEQ ID NO: 578481 - DNA, 586 bp, Homo sapiens
ctggcgcagagaaaatacaagctgagcttagaacatcttctgccagaaagtaaaaaagtgccgacagagtaatggagacaaatcaaagagacataaagtcagcttggaatgtctactactggcctaatcttggggaattggagcatcagaatcatgagctttccttctcccttatttattggttttatttctccaygtagaacaaagaagagaataagaaaataatcatctggtaaccatcatagtaataattgttcaaacacaagtcatccatgaaatgctaaatctagtgggttctgaggagtaaccagatatttacagagcctcaaagtatctccatacaaaatacggttgaactacaaaaagaaaattgtaacattagcatggacaaacctggcaggtactccttaactctcctaagtaataaaaactgtaaaatgcaaataagccttcgatgacctttactaacctttactaaagtatcagtgatgacttggttgtttaaacagctgacatttgggcaatttgagtatgtcaaactcaataatactggttttcatttgcaagatccacttaaaacttaagg

SEQ ID NO: 578482 - DNA, 547 bp, Homo sapiens
aatggggagggctcacctgtgcttcctcagtggctccacctcttcttctaaaaaaaattactcattccagagctggcgcagagaaaatacaagctgagcttagaacatcttctgccagaaagtaaaaaagtgccgacagagtaatggagacaaatcaaagagacataaagtcagcttggaatgtctactactggcctaatcttggggaattggagcatcagaatcatgagctttccttctcccttatttattggttttatttctccacgtagaacaaagaagagaataagaaaataatcatctggtaaccatcatagtaataattgttcaaacacaagtcatccatgaaatgctaaatctagtgggttctgaggagtaaccagatatttacagagcctcaaagtatctccatacaaaatacrgttgaactacaaaaagaaaattgtaacattagcatggacaaacctggcaggtactccttaactctcctaagtaataaaaactgtaaaatgcaaataagccttcgatgacctttactaacctttac

SEQ ID NO: 578483 - DNA, 547 bp, Homo sapiens
aatggggagggctcacctgtgcttcctcagtggctccacctcttcttctaaaaaaaattactcattccagagctggcgcagagaaaatacaagctgagcttagaacatcttctgccagaaagtaaaaaagtgccgacagagtaatggagacaaatcaaagagacataaagtcagcttggaatgtctactactggcctaatcttggggaattggagcatcagaatcatgagctttccttctcccttatttattggttttatttctccacgtagaacaaagaagagaataagaaaataatcatctggtaaccatcatagtaataattgttcaaacacaagtcatccatgaaatgctaaatctagtgggttctgaggagtaaccagatatttacagagcctcaaagtatctccatacaaaatacggttgaactacaaaaagaaaattgtaacattarcatggacaaacctggcaggtactccttaactctcctaagtaataaaaactgtaaaatgcaaataagccttcgatgacctttactaacctttac

SEQ ID NO: 578484 - DNA, 570 bp, Homo sapiens
ggttttatttctccacgtagaacaaagaagagaataagaaaataatcatctggtaaccatcatagtaataattgttcaaacacaagtcatccatgaaatgctaaatctagtgggttctgaggagtaaccagatatttacagagcctcaaagtatctccatacaaaatacggttgaactacaaaaagaaaattgtaacattagcatggacaaacctggcaggtactccttaactctcctaagtaataaaaactgtaaaatgcaaataagccttcgatgacmtttactaacctttactaaagtatcagtgatgacttggttgtttaaacagctgacatttgggcaatttgagtatgtcaaactcaataatactggttttcatttgcaagatccacttaaaacttaaggaggccaaaaaacatcatttaaaataccctataaattataatcgtacatgtgatacaaaaatatcctacttcagtaaatattggaatgttatatattttatgagaaacaattaaaatgtgtaaatagcccagtaataaagttttataatcttttaaatcatcata

SEQ ID NO: 578485 - DNA, 570 bp, Homo sapiens
ggttttatttctccacgtagaacaaagaagagaataagaaaataatcatctggtaaccatcatagtaataattgttcaaacacaagtcatccatgaaatgctaaatctagtgggttctgaggagtaaccagatatttacagagcctcaaagtatctccatacaaaatacggttgaactacaaaaagaaaattgtaacattagcatggacaaacctggcaggtactccttaactctcctaagtaataaaaactgtaaaatgcaaataagccttcgatgacctttactaacctttactaaagtatcartgatgacttggttgtttaaacagctgacatttgggcaatttgagtatgtcaaactcaataatactggttttcatttgcaagatccacttaaaacttaaggaggccaaaaaacatcatttaaaataccctataaattataatcgtacatgtgatacaaaaatatcctacttcagtaaatattggaatgttatatattttatgagaaacaattaaaatgtgtaaatagcccagtaataaagttttataatcttttaaatcatcata

SEQ ID NO: 578486 - DNA, 570 bp, Homo sapiens
ggttttatttctccacgtagaacaaagaagagaataagaaaataatcatctggtaaccatcatagtaataattgttcaaacacaagtcatccatgaaatgctaaatctagtgggttctgaggagtaaccagatatttacagagcctcaaagtatctccatacaaaatacggttgaactacaaaaagaaaattgtaacattagcatggacaaacctggcaggtactccttaactctcctaagtaataaaaactgtaaaatgcaaataagccttcgatgacctttactaacctttactaaagtatcagtgatgacttggttgtttaaacagctgacatttgggcaatttgagtatgtcaaactcaataatactggttttcatttgcaagatccacttaaaacttaaggaggccaaaaaacatcatttaaaataccctataaattataatcrtacatgtgatacaaaaatatcctacttcagtaaatattggaatgttatatattttatgagaaacaattaaaatgtgtaaatagcccagtaataaagttttataatcttttaaatcatcata

SEQ ID NO: 578487 - DNA, 570 bp, Homo sapiens
ggttttatttctccacgtagaacaaagaagagaataagaaaataatcatctggtaaccatcatagtaataattgttcaaacacaagtcatccatgaaatgctaaatctagtgggttctgaggagtaaccagatatttacagagcctcaaagtatctccatacaaaatacggttgaactacaaaaagaaaattgtaacattagcatggacaaacctggcaggtactccttaactctcctaagtaataaaaactgtaaaatgcaaataagccttcgatgacctttactaacctttactaaagtatcagtgatgacttggttgtttaaacagctgacatttgggcaatttgagtatgtcaaactcaataatactggttttcatttgcaagatccacttaaaacttaaggaggccaaaaaacatcatttaaaataccctataaattataatcgtacatrtgatacaaaaatatcctacttcagtaaatattggaatgttatatattttatgagaaacaattaaaatgtgtaaatagcccagtaataaagttttataatcttttaaatcatcata

SEQ ID NO: 578488 - DNA, 539 bp, Homo sapiens
gtatgagtttaaaaactaaagacttgagaactttatcagagttaataagaatgagatatgtatgtrcatttacaatacaaaattactatttaataatttacacatggcattaattctaattgtgtttaaatatcagagctttttcagtcttcattcatgtaatcaacagccacatgctaaggtactagaaccagcactggaattacaagatgaagatggcatggtccacctcccaacagtcataagctctaacctaaaaaacagacaggcaggcaatgtccatatagagtcatagataccatgacaggtatagagcagggcactactggaacacagagaagggacatctatccacttttatgtcaatatcatgggctttctggtggaggagataacataggttgatacctgaaggacaaggaaaagcttcccagatagaggaaagaggcaaaggcaaagagcctgaggtgaggaagagccctgcagagttccactccatccagtttggtgctagaacaaagggcagagtgcagtaagcg

SEQ ID NO: 578489 - DNA, 539 bp, Homo sapiens
gtatgagtttaaaaactaaagacttgagaactttatcagagttaataagaatgagatatgtatgtacatttacaatacaaaattactatttaataatttacacatggcattaattctaattgtgtttaaatatcagagctttttcagtcttcattcatgtaatcaacagccacatgctaaggtactagaaccagcactggaattacaagatgaagatggcatggtccacctcccaacagtcataarctctaacctaaaaaacagacaggcaggcaatgtccatatagagtcatagataccatgacaggtatagagcagggcactactggaacacagagaagggacatctatccacttttatgtcaatatcatgggctttctggtggaggagataacataggttgatacctgaaggacaaggaaaagcttcccagatagaggaaagaggcaaaggcaaagagcctgaggtgaggaagagccctgcagagttccactccatccagtttggtgctagaacaaagggcagagtgcagtaagcg

SEQ ID NO: 578490 - DNA, 513 bp, Homo sapiens
ttttccttaagactttatggttaaatattctcttcattagatgtggcttacccgtggattctagagaagaaagcagatgggagcaagtgtacaatacagcaacggctggaaagaaaaataaagaattttgttctttacctaaaacacttcagttaactaagtatgagtttaaaaactaaagacttgagaactttatcagagttaataagaatgagatatgtatgtacatttacaatacaaaattactatttaataatttacacatggcattaattctaattgtgtttaaatatcagagctttttcagtcttcattcatgtaatcaacagccacatgctaaggtactagaaccagcactggaattacaagatgaagatggcatggtccacctcccaacagtcataagctmtaacctaaaaaacagacaggcaggcaatgtccatatagagtcatagataccatgacaggtatagagcagggcactactggaacacagagaagggacatctatcc

SEQ ID NO: 578491 - DNA, 539 bp, Homo sapiens
gtatgagtttaaaaactaaagacttgagaactttatcagagttaataagaatgagatatgtatgtacatttacaatacaaaattactatttaataatttacacatggcattaattctaattgtgtttaaatatcagagctttttcagtcttcattcatgtaatcaacagccacatgctaaggtactagaaccagcactggaattacaagatgaagatggcatggtccacctcccaacagtcataagctctaacctaaaaaacagacaggcaggcaatgtccatatagagtcatagataccatgacaggtatagagcagggcactactggaacacagagaagggacatctayccacttttatgtcaatatcatgggctttctggtggaggagataacataggttgatacctgaaggacaaggaaaagcttcccagatagaggaaagaggcaaaggcaaagagcctgaggtgaggaagagccctgcagagttccactccatccagtttggtgctagaacaaagggcagagtgcagtaagcg

SEQ ID NO: 578492 - DNA, 395 bp, Homo sapiens
tggaacttttcctgagaacaagtgtaagccaatgacacagtaaatgacaggagatttaaaatgtcacctgtsaagtgactgcttatgaagggttattgctcagctaagtatttctgaatgagtcttaggtctgttggccttcaatctctactgaaaccctgagaacttgatgatgcttttgttttctgagaatcgtttcagtgtgctggctgacagttccatgaggatggcaaaacttaagaaagtgtagagccagtgaaaaagagatgcacagacttcttgggaactgtttaagctttggaacatgatgaatttatggtgcataagtacagtcttctctgtgaaagtttttgttttcacatctttcattagatgtgtgtaagaaaaaaaatatt

SEQ ID NO: 578493 - DNA, 546 bp, Homo sapiens
gccttcaatctctactgaaaccctgagaacttgatgatgcttttgttttctgagaatcgtttcagtgtgctggctgacagttccatgaggatggcaaaacttaagaaagtgtagagccagtgaaraagagatgcacagacttcttgggaactgtttaagctttggaacatgatgaatttatggtgcataagtacagtcttctctgtgaaagtttttgttttcacatctttcattagatgtgtgtaagaaaaaaaatattgatgtagtatctactaacccaagaatgaaaagtaatgccatttgctatttacactttatttctaaaataaacctaaatttaattaataaattttgtcaacgtatttctctttgtttctctaattatttattctacacagtccggccccatctaaaataagtaaaaataataataatgtctaaattaaacaagaaacattatcatgaaaatcatgtatcacttacaaaatgtggcctttagtatttttagtgactagacataacttgaagtttgcttaaatagaaaaa

SEQ ID NO: 578494 - DNA, 546 bp, Homo sapiens
gccttcaatctctactgaaaccctgagaacttgatgatgcttttgttttctgagaatcgtttcagtgtgctggctgacagttccatgaggatggcaaaacttaagaaagtgtagagccagtgaaaaagagatgcacagacttcttgggaactgtttaagctttggaacatgatgaatttatggtgcataagtacagtcttctctgtgaaagtttttgttttcacatctttcattagatgtgtgtaagaaaaaaaatattgatgtagtatctactaacccaagaatgaaaagkaatgccatttgctatttacactttatttctaaaataaacctaaatttaattaataaattttgtcaacgtatttctctttgtttctctaattatttattctacacagtccggccccatctaaaataagtaaaaataataataatgtctaaattaaacaagaaacattatcatgaaaatcatgtatcacttacaaaatgtggcctttagtatttttagtgactagacataacttgaagtttgcttaaatagaaaaa

SEQ ID NO: 578495 - DNA, 546 bp, Homo sapiens
gccttcaatctctactgaaaccctgagaacttgatgatgcttttgttttctgagaatcgtttcagtgtgctggctgacagttccatgaggatggcaaaacttaagaaagtgtagagccagtgaaaaagagatgcacagacttcttgggaactgtttaagctttggaacatgatgaatttatggtgcataagtacagtcttctctgtgaaagtttttgttttcacatctttcattagatgtgtgtaagaaaaaaaatattgatgtagtatctactaacccaagaatgaaaagtaatgccatttgctatttacactttatttctaaaataaacctaaatttaattaataaattttgtcaacgtayttctctttgtttctctaattatttattctacacagtccggccccatctaaaataagtaaaaataataataatgtctaaattaaacaagaaacattatcatgaaaatcatgtatcacttacaaaatgtggcctttagtatttttagtgactagacataacttgaagtttgcttaaatagaaaaa

SEQ ID NO: 578496 - DNA, 546 bp, Homo sapiens
gccttcaatctctactgaaaccctgagaacttgatgatgcttttgttttctgagaatcgtttcagtgtgctggctgacagttccatgaggatggcaaaacttaagaaagtgtagagccagtgaaaaagagatgcacagacttcttgggaactgtttaagctttggaacatgatgaatttatggtgcataagtacagtcttctctgtgaaagtttttgttttcacatctttcattagatgtgtgtaagaaaaaaaatattgatgtagtatctactaacccaagaatgaaaagtaatgccatttgctatttacactttatttctaaaataaacctaaatttaattaataaattttgtcaacgtatttctctttgtttctctaattatttattctacacagtccrgccccatctaaaataagtaaaaataataataatgtctaaattaaacaagaaacattatcatgaaaatcatgtatcacttacaaaatgtggcctttagtatttttagtgactagacataacttgaagtttgcttaaatagaaaaa

SEQ ID NO: 578497 - DNA, 563 bp, Homo sapiens
ccacatggccagcttctgggtgtgggcacagtgccacatcttccatcactttctaatatatcccaccaccactgaagagacagcctggagagagtgcaagaggaaggctgagaaggatgagatagtgagtgctggcttctttctgaccctcagcacacccccacgtggtgaccatcaacctttaggggtgggagagcaagattgatggcttcaaatacttccccaagaagatkgacacaggccactcagctcaacctcacagccaatgagttgacatgcaagcagattacagtgacaggcttttagaaagagcttcagaaggcggccagtttttcttcagcctcagccaggccttggaacttgactaggccatccacttcaccagagatgccttcaagaacatcagtgagctccttgccaatccgtccaggaaggacctggacccagccacggacctgttagtgctgtctcagggacaccagaccaacatcctggacatcatcctcatacacaaggaagctcttaccacagtcatggagaacaggcaacatgtggcagaaggg

SEQ ID NO: 578498 - DNA, 585 bp, Homo sapiens
  misc_feature 1, 2, 3, 4, 5, 6, 7, 8, 9, 10, 11, 12, 13, 14, 15, 16, 17,18, 19, 20, 21, 22, 23, 24, 25, 26, 27, 28: n = A,T,C or G
nnnnnnnnnnnnnnnnnnnnnnnnnnnnctgtttccgttttactgtgccaaggaaatgcatttgggttttgtggtggttgttgtggttgtggttgtttttgttttttgagatggaatttcactcttcctgcccagtctgaagtgcagtggtgtgayctcagctcatggcaacctctgcctcctgggttcaagcgattctcctgcctcagcctcccaagtagctggaattacaggcatgtgccaccatgaacagctaattttgtgtttttagtagagatgggtttctccatgttggtcaggctggtctcaaactcccaacctcaggttatctgcccgcctcagcctcccaaagtgctgggattacaggcactagccaccgcacccagcaacatagggggattttgttttaaaagttctcttttctggatctaccaagctcatgagaaaatagagcaaacaagtcatttgcataggtaagaaactttggatttatagcttgtcctcactactctagaagattatcatcatgttttgcaaagtaaaatgttaaacacagacataaggggaaaaagaaattaaaactat

SEQ ID NO: 578499 - DNA, 585 bp, Homo sapiens
  misc_feature 1, 2, 3, 4, 5, 6, 7, 8, 9, 10, 11, 12, 13, 14, 15, 16, 17,18, 19, 20, 21, 22, 23, 24, 25, 26, 27, 28: n = A,T,C or G
nnnnnnnnnnnnnnnnnnnnnnnnnnnnctgtttccgttttactgtgccaaggaaatgcatttgggttttgtggtggttgttgtggttgtggttgtttttgttttttgagatggaatttcactcttcctgcccagtctgaagtgcagtggtgtgatctcagctcatggcaacctctgcctcctgggttcaagcgattctcctgcctcagcctcccaagtagctggaattacaggcatgtgccaccatgaacagctaattttgtgtttttagtagagatgggtttctccatgttggtcaggctggtctcaaactcccaacctcargttatctgcccgcctcagcctcccaaagtgctgggattacaggcactagccaccgcacccagcaacatagggggattttgttttaaaagttctcttttctggatctaccaagctcatgagaaaatagagcaaacaagtcatttgcataggtaagaaactttggatttatagcttgtcctcactactctagaagattatcatcatgttttgcaaagtaaaatgttaaacacagacataaggggaaaaagaaattaaaactat

SEQ ID NO: 578500 - DNA, 585 bp, Homo sapiens
  misc_feature 1, 2, 3, 4, 5, 6, 7, 8, 9, 10, 11, 12, 13, 14, 15, 16, 17,18, 19, 20, 21, 22, 23, 24, 25, 26, 27, 28: n = A,T,C or G
nnnnnnnnnnnnnnnnnnnnnnnnnnnnctgtttccgttttactgtgccaaggaaatgcatttgggttttgtggtggttgttgtggttgtggttgtttttgttttttgagatggaatttcactcttcctgcccagtctgaagtgcagtggtgtgatctcagctcatggcaacctctgcctcctgggttcaagcgattctcctgcctcagcctcccaagtagctggaattacaggcatgtgccaccatgaacagctaattttgtgtttttagtagagatgggtttctccatgttggtcaggctggtctcaaactcccaacctcaggttatctgyccgcctcagcctcccaaagtgctgggattacaggcactagccaccgcacccagcaacatagggggattttgttttaaaagttctcttttctggatctaccaagctcatgagaaaatagagcaaacaagtcatttgcataggtaagaaactttggatttatagcttgtcctcactactctagaagattatcatcatgttttgcaaagtaaaatgttaaacacagacataaggggaaaaagaaattaaaactat

SEQ ID NO: 578501 - DNA, 585 bp, Homo sapiens
  misc_feature 1, 2, 3, 4, 5, 6, 7, 8, 9, 10, 11, 12, 13, 14, 15, 16, 17,18, 19, 20, 21, 22, 23, 24, 25, 26, 27, 28: n = A,T,C or G
nnnnnnnnnnnnnnnnnnnnnnnnnnnnctgtttccgttttactgtgccaaggaaatgcatttgggttttgtggtggttgttgtggttgtggttgtttttgttttttgagatggaatttcactcttcctgcccagtctgaagtgcagtggtgtgatctcagctcatggcaacctctgcctcctgggttcaagcgattctcctgcctcagcctcccaagtagctggaattacaggcatgtgccaccatgaacagctaattttgtgtttttagtagagatgggtttctccatgttggtcaggctggtctcaaactcccaacctcaggttatctgcccgcctcagcctcccaaagtgctgggattacaggcactagccaccgcacccagcaacatakggggattttgttttaaaagttctcttttctggatctaccaagctcatgagaaaatagagcaaacaagtcatttgcataggtaagaaactttggatttatagcttgtcctcactactctagaagattatcatcatgttttgcaaagtaaaatgttaaacacagacataaggggaaaaagaaattaaaactat

SEQ ID NO: 578502 - DNA, 482 bp, Homo sapiens
tgtgtttttagtagagatgggtttctccatgttggtcaggctggtctcaaactcccaacctcaggttatctgcccgcctcagcctcccaaagtgctgggattacaggcactagccaccgcacccagcaacatagggggattttgttttaaaagttctcttttctggatctaccaagctcatgagaaaatagagcaaacaagtcatttgcataggtaagaaactttggatttatagcttgtcctcactactctagaagattatcatcatgttttgcaaagyaaaatgttaaacacagacataaggggaaaaagaaattaaaactataggggtgggtgaaaaaatattgcataatttattactgttgacctcatcatatgactgattaagggcactgaatttaacttggatgtgaagtagacctcatattagctgcagttaatcagtagaccaggtgtcctagcagaattaaatttgatgctcc

SEQ ID NO: 578503 - DNA, 482 bp, Homo sapiens
tgtgtttttagtagagatgggtttctccatgttggtcaggctggtctcaaactcccaacctcaggttatctgcccgcctcagcctcccaaagtgctgggattacaggcactagccaccgcacccagcaacatagggggattttgttttaaaagttctcttttctggatctaccaagctcatgagaaaatagagcaaacaagtcatttgcataggtaagaaactttggatttatagcttgtcctcactactctagaagattatcatcatgttttgcaaagtaaaatgttaaacacagacataaggggaaaaagaaattaaaactataggggtgggtgaaaaaatattgcataatttattactgttgacctcatcatatgactgattaagggcactgaatttaacttggatgtgaagtagacctcatattagctgcagttaatcagtagaccaggygtcctagcagaattaaatttgatgctcc

SEQ ID NO: 578504 - DNA, 175 bp, Homo sapiens
agaattaaatttgatgctcctgtgttatctttaaatgacacagcttttctgaaaacccttactcatagtgcatgattatccattamgaaaaggtgatggaatatgtgaatacagctgaggagacaccacaaggcaaatgctcagtggttcccattaatattggggaaatcaacac

SEQ ID NO: 578505 - DNA, 505 bp, Homo sapiens
cagaaaaccatagacattatttaatatttggttttgggaggtatttttagtgacactgcttacagttgtacctaataattgctaaattagagacgtaaaagtaaaacaaaggcacattgtgtttgagtaggaaatctatagacatctagctggttttcccatccagycacaaaattctaaatataatcatggtacctgcactcaaatttatgttaaataccaacctcaatgaaatcactcttctcattctctttgttatttatatgttgctttccttaagggaagaatacaaataccttgctaagaaccattctgtttggttgtaggctgcataaggggagtaaacacaaagtacatttgaccacaaaatgactttttaaaagtcagaactatggtagcatgaagccaaacgaggtaatatagaataaaattttctatgcttctttcccttctttgctctctttctactctaataactgcgattcacacaggtaatgaagagtgt

SEQ ID NO: 578506 - DNA, 505 bp, Homo sapiens
cagaaaaccatagacattatttaatatttggttttgggaggtatttttagtgacactgcttacagttgtacctaataattgctaaattagagacgtaaaagtaaaacaaaggcacattgtgtttgagtaggaaatctatagacatctagctggttttcccatccagtcacaaaattctaaatataatcatggtacctgcactcaaatttatgttaaataccaacctcaatgaaatcactcttctcattctctttgttatttatatgttgctttccttaagggaagaatacaaatrccttgctaagaaccattctgtttggttgtaggctgcataaggggagtaaacacaaagtacatttgaccacaaaatgactttttaaaagtcagaactatggtagcatgaagccaaacgaggtaatatagaataaaattttctatgcttctttcccttctttgctctctttctactctaataactgcgattcacacaggtaatgaagagtgt

SEQ ID NO: 578507 - DNA, 543 bp, Homo sapiens
ctagctggttttcccatccagtcacaaaattctaaatataatcatggtacctgcactcaaatttatgttaaataccaacctcaatgaaatcactcttctcattctctttgttatttatatgttgctttccttaagggaagaatacaaataccttgctaagaaccattctgtttggttgtaggctgcataaggggagtaaacacaaagtacatttgaccacaaaatgactttttaaaagtcagaactatggtagcatgaagccaaacgaggtaatmtagaataaaattttctatgcttctttcccttctttgctctctttctactctaataactgcgattcacacaggtaatgaagagtgtaattccttgatagaaacacagctccaagattaatcctttctttaactatgaagttcgcgtgtccaaaatctgtggtagttgctgtctgatttttgatcactgatggtgatacagatacttatcatcaactcacaacttcccaaatctttgaaaagtcttactattgatggttcaactagtaga

SEQ ID NO: 578508 - DNA, 543 bp, Homo sapiens
ctagctggttttcccatccagtcacaaaattctaaatataatcatggtacctgcactcaaatttatgttaaataccaacctcaatgaaatcactcttctcattctctttgttatttatatgttgctttccttaagggaagaatacaaataccttgctaagaaccattctgtttggttgtaggctgcataaggggagtaaacacaaagtacatttgaccacaaaatgactttttaaaagtcagaactatggtagcatgaagccaaacgaggtaatatagaataaaattttctatgcttctttcccttctttgctctctttctactctaataactgcgattcacacaggtaawgaagagtgtaattccttgatagaaacacagctccaagattaatcctttctttaactatgaagttcgcgtgtccaaaatctgtggtagttgctgtctgatttttgatcactgatggtgatacagatacttatcatcaactcacaacttcccaaatctttgaaaagtcttactattgatggttcaactagtaga

SEQ ID NO: 578509 - DNA, 575 bp, Homo sapiens
acgtgtaaaagttctttcttcactgaagcagtaccatgttgtcctctaccccacaaatgcactactcccccgtggtctaatgtattttaaaagtcytgtaattgctattaactcagacaagtttacttaacttgttctaagtttctggtatttactacagtttactttcaatcactcaaccatctctgttatatatgttgttttccatgagaaatttgtttattagtaattaagattcttcagggagaagaaaatatttgaataactaagtttgtgcataaacacattaaggtcaaatacccatgacattattgtgtgtttctgtgtactagagacaaaaacttcaaaaaaaattttaatgaatatacgttaaattaaaaactgctttcattaaactgagataatcttccctcaatgcatgaataccttcagaattcacatagaccaaagaattgtataaaatataatagccttaaaaatcttatttgtagctggcacggtggctcccacctgtaatcccagcacattggcaagccgaggtgggcagatcacctgaggtcaggagttcaagagca

SEQ ID NO: 578510 - DNA, 575 bp, Homo sapiens
acgtgtaaaagttctttcttcactgaagcagtaccatgttgtcctctaccccacaaatgcactactcccccgtggtctaatgtattttaaaagtcctgtaattgctattaactcagacaagtttacttaacttgttctaagyttctggtatttactacagtttactttcaatcactcaaccatctctgttatatatgttgttttccatgagaaatttgtttattagtaattaagattcttcagggagaagaaaatatttgaataactaagtttgtgcataaacacattaaggtcaaatacccatgacattattgtgtgtttctgtgtactagagacaaaaacttcaaaaaaaattttaatgaatatacgttaaattaaaaactgctttcattaaactgagataatcttccctcaatgcatgaataccttcagaattcacatagaccaaagaattgtataaaatataatagccttaaaaatcttatttgtagctggcacggtggctcccacctgtaatcccagcacattggcaagccgaggtgggcagatcacctgaggtcaggagttcaagagca

SEQ ID NO: 578511 - DNA, 575 bp, Homo sapiens
acgtgtaaaagttctttcttcactgaagcagtaccatgttgtcctctaccccacaaatgcactactcccccgtggtctaatgtattttaaaagtcctgtaattgctattaactcagacaagtttacttaacttgttctaagtttctggtatttactacagtttactttcaatcactcaaccatctctgttatatatgttgttttccatgagaaatttgtttattagtaattaagattcttcagggakaagaaaatatttgaataactaagtttgtgcataaacacattaaggtcaaatacccatgacattattgtgtgtttctgtgtactagagacaaaaacttcaaaaaaaattttaatgaatatacgttaaattaaaaactgctttcattaaactgagataatcttccctcaatgcatgaataccttcagaattcacatagaccaaagaattgtataaaatataatagccttaaaaatcttatttgtagctggcacggtggctcccacctgtaatcccagcacattggcaagccgaggtgggcagatcacctgaggtcaggagttcaagagca

SEQ ID NO: 578512 - DNA, 603 bp, Homo sapiens
gtggactttttccagttcacgggtactttctacagcagaatgataacaatatcaaagagctrgtgccagctatcggtggtagtacaaggatgactttgtgctcaactgaaacccagctgaatatagaattgtgtaggaaagtgttaatatggtgatagaatagaaacagtagcaaatgaactaaatcatactatgaatgcctacactaccattataactttttgaagaatgataataccacttactttattgccttttgaagtaggaatattttagtggatatgctatagacctgaaaccatataaagaatcccaaagaagctggctggataaagcctgctatggatgtctttatacacaaagactgatgaggcaattcgaatatgtgtccccaccaaatctcatgttgagttatgcttcctaatgttggaggtggatcctggtataaggtgattgaatcatgaaggcaaatttctcatgagtggttcagcactatccccttggtactgtcctcacaatcatgagtgacttgtcgtgagatctggccactgaaaactctatatcactccctactctccgtgatttcctcttgccatgtgagac

SEQ ID NO: 578513 - DNA, 575 bp, Homo sapiens
acgtgtaaaagttctttcttcactgaagcagtaccatgttgtcctctaccccacaaatgcactactcccccgtggtctaatgtattttaaaagtcctgtaattgctattaactcagacaagtttacttaacttgttctaagtttctggtatttactacagtttactttcaatcactcaaccatctctgttatatatgttgttttccatgagaaatttgtttattagtaattaagattcttcagggagaagaaaatatttgaataactaagtttgtgcataaacacattaaggtcaaatacccatgacattattgtgtgtttctgtgtactagagacaaaaacttcaaaaaaaattttaatgaatatacgttaaattaaaaactgctttcattaaactgagataatcttccctcaatgcatgaataccttcagaattcacatagaccaaagaattgtataaaatataatagccttaaaaatcttatttgtagctggcacrgtggctcccacctgtaatcccagcacattggcaagccgaggtgggcagatcacctgaggtcaggagttcaagagca

SEQ ID NO: 578514 - DNA, 581 bp, Homo sapiens
tttcattaaactgagataatcttccctcaatgcatgaataccttcagaattcacatagaccaaagaattgtataaaatataatagccttaaaaatcttatttgtagctggcacggtggctcccacctgtaatcccagcacattggcaagccgaggtgggcagatcacctgaggtcaggagttcaagagcagcctggccaacctggtgaaaccccatctctactaaaaatagaaaaattagcagggtatggtagcacgtgcatgtagtatcagctactcgaggggctgaggcaggagaattgcttgaacccgagaggcagaggtgktaatgagccaagactgagccactgcactccagccttggtgacagcgcaagactctgtctcaaaaacacaaacaaacaaacaaaaaacctaattgttcccatataagtctatgttcatacaagatctgaagagtacacaacaccgtgagacaggacagacatatattttaaaagttatattcctgagtttctgtaaaaataaaatagttgaatttaagctttcaagacaagtcaatgaaaagagcaaaaaatgcaaa

SEQ ID NO: 578515 - DNA, 526 bp, Homo sapiens
tagcacgtgcatgtagtatcagctactcgaggggctgaggcaggagaattgcttgaacccgagaggcagaggtgttaatgagccaagactgagccactgcactccagccttggtgacagmgcaagactctgtctcaaaaacacaaacaaacaaacaaaaaacctaattgttcccatataagtctatgttcatacaagatctgaagagtacacaacaccgtgagacaggacagacatatattttaaaagttatattcctgagtttctgtaaaaataaaatagttgaatttaagctttcaagacaagtcaatgaaaagagcaaaaaatgcaaaagtgaaactcgaaaggtcatttccccatcaagggctcatgatcactggacattcacaaactatactgttcaaaacattagatctgaattttgatccgagtatccctttagtagcagtttcattcaaggatgcccaagaggtaaaataagacaatatcatttgctattttcagttttcttttctgagaacagccca

SEQ ID NO: 578516 - DNA, 581 bp, Homo sapiens
tttcattaaactgagataatcttccctcaatgcatgaataccttcagaattcacatagaccaaagaattgtataaaatataatagccttaaaaatcttatttgtagctggcacggtggctcccacctgtaatcccagcacattggcaagccgaggtgggcagatcacctgaggtcaggagttcaagagcagcctggccaacctggtgaaaccccatctctactaaaaatagaaaaattagcagggtatggtagcacgtgcatgtagtatcagctactcgaggggctgaggcaggagaattgcttgaacccgagaggcagaggtgttaatgagccaagactgagccactgcactccagccttggtgacagcgcaagactctgtctcaaaaacacaaayaaacaaacaaaaaacctaattgttcccatataagtctatgttcatacaagatctgaagagtacacaacaccgtgagacaggacagacatatattttaaaagttatattcctgagtttctgtaaaaataaaatagttgaatttaagctttcaagacaagtcaatgaaaagagcaaaaaatgcaaa

SEQ ID NO: 578517 - DNA, 579 bp, Homo sapiens
acaagatctgaagagtacacaacaccgtgagacaggacagacatatattttaaaagttatattcctgagtttctgtaaaaataaaatagttgaatttaagctttcaagacaagtcaaygaaaagagcaaaaaatgcaaaagtgaaactcgaaaggtcatttccccatcaagggctcatgatcactggacattcacaaactatactgttcaaaacattagatctgaattttgatccgagtatccctttagtagcagtttcattcaaggatgcccaagaggtaaaataagacaatatcatttgctattttcagttttcttttctgagaacagcccagcattcttcttcagagaaatgaattgtcctaacttcataggctaaaggctcatgagtcatagttctaagggcattaataaaatatggtggtgcatgcttgtattctgaacttttcaggtttaaactctcatatacaaacagattaaagaaaagccctcttaatctgacattatttttctttttatttcttcatttatcagcaacaggagagtctaactaaatgtggtaaagtggtatgagggaat

SEQ ID NO: 578518 - DNA, 579 bp, Homo sapiens
acaagatctgaagagtacacaacaccgtgagacaggacagacatatattttaaaagttatattcctgagtttctgtaaaaataaaatagttgaatttaagctttcaagacaagtcaatgaaaagagcaaaaaatgcaaaagtgaaactcgaaaggtcatttccccatcaagggctcatgatcactggacattcacaaactatactgttcaaaacattagatctgaattttgatccgagtatccctttagtagcagtttcattcaaggatgyccaagaggtaaaataagacaatatcatttgctattttcagttttcttttctgagaacagcccagcattcttcttcagagaaatgaattgtcctaacttcataggctaaaggctcatgagtcatagttctaagggcattaataaaatatggtggtgcatgcttgtattctgaacttttcaggtttaaactctcatatacaaacagattaaagaaaagccctcttaatctgacattatttttctttttatttcttcatttatcagcaacaggagagtctaactaaatgtggtaaagtggtatgagggaat

SEQ ID NO: 578519 - DNA, 532 bp, Homo sapiens
aagaggtaaaataagacaatatcatttgctattttcagttttcttttctgagaacagcccagcattcttcttcagagaaatgaattgtcctaacttcataggctaaaggctcatgagtcatagttctaagggcattaataaaatatggtggtgcatgcttgtattctgaacttttcaggtttaaactctcatatacaaacagattaaagaaaagccctcttaatctgacattatttttctttttatttcttcatttatcagcaacaggagagtctaactaaatgtggtaaagtggtatgagggaatacaatgaacagtgtaaaatgaattaaaccagagataatcacaccaatgtgggtacaagtggaaartataatacaaaacacaccaaagaaagtggcagaaaggtatataaagtgtataaccactcacatgccattttgggacacaaaaaattctgcatattatttctgagcatcacaatgtagttaaagatttcaaaagggcattgaaatgaaaaacaaccaactta

SEQ ID NO: 578520 - DNA, 532 bp, Homo sapiens
aagaggtaaaataagacaatatcatttgctattttcagttttcttttctgagaacagcccagcattcttcttcagagaaatgaattgtcctaacttcataggctaaaggctcatgagtcatagttctaagggcattaataaaatatggtggtgcatgcttgtattctgaacttttcaggtttaaactctcatatacaaacagattaaagaaaagccctcttaatctgacattatttttctttttatttcttcatttatcagcaacaggagagtctaactaaatgtggtaaagtggtatgagggaatacaatgaacagtgtaaaatgaattaaaccagagataatcacaccaatgtgggtacaagtggaaaatataatacaaaacacaccaaagaaagtggcagaaaggtatataaastgtataaccactcacatgccattttgggacacaaaaaattctgcatattatttctgagcatcacaatgtagttaaagatttcaaaagggcattgaaatgaaaaacaaccaactta

SEQ ID NO: 578521 - DNA, 532 bp, Homo sapiens
aagaggtaaaataagacaatatcatttgctattttcagttttcttttctgagaacagcccagcattcttcttcagagaaatgaattgtcctaacttcataggctaaaggctcatgagtcatagttctaagggcattaataaaatatggtggtgcatgcttgtattctgaacttttcaggtttaaactctcatatacaaacagattaaagaaaagccctcttaatctgacattatttttctttttatttcttcatttatcagcaacaggagagtctaactaaatgtggtaaagtggtatgagggaatacaatgaacagtgtaaaatgaattaaaccagagataatcacaccaatgtgggtacaagtggaaaatataatacaaaacacaccaaagaaagtggcagaaaggtatataaagtgtataaccactcacatrccattttgggacacaaaaaattctgcatattatttctgagcatcacaatgtagttaaagatttcaaaagggcattgaaatgaaaaacaaccaactta

SEQ ID NO: 578522 - DNA, 532 bp, Homo sapiens
aagaggtaaaataagacaatatcatttgctattttcagttttcttttctgagaacagcccagcattcttcttcagagaaatgaattgtcctaacttcataggctaaaggctcatgagtcatagttctaagggcattaataaaatatggtggtgcatgcttgtattctgaacttttcaggtttaaactctcatatacaaacagattaaagaaaagccctcttaatctgacattatttttctttttatttcttcatttatcagcaacaggagagtctaactaaatgtggtaaagtggtatgagggaatacaatgaacagtgtaaaatgaattaaaccagagataatcacaccaatgtgggtacaagtggaaaatataatacaaaacacaccaaagaaagtggcagaaaggtatataaagtgtataaccactcacatgccattttrggacacaaaaaattctgcatattatttctgagcatcacaatgtagttaaagatttcaaaagggcattgaaatgaaaaacaaccaactta

SEQ ID NO: 578523 - DNA, 362 bp, Homo sapiens
gaatagaaacagtagcaaatgaactaaatcatactatgaatgcctacactaccattataactttttgaagaatgataataccacttactttattgccttttgaagtaggaatattttagtggatatgctatagacctgaaaccatataaagaatcccaaagaagctggctggataaagcctgctatggatgtctttatacwcaaagactgatgaggcaattcgaatatgtgtccccaccaaatctcatgttgagttatgcttcctaatgttggaggtggatcctggtataaggtgattgaatcatgaaggcaaatttctcatgagtggttcagcactatccccttggtactgtcctcacaat

SEQ ID NO: 578524 - DNA, 603 bp, Homo sapiens
gtggactttttccagttcacgggtactttctacagcagaatgataacaatatcaaagagctagtgccagctatcggtggtagtacaaggatgactttgtgctcaactgaaacccagctgaatatagaattgtgtaggaaagtgttaatatggtgatagaatagaaacagtagcaaatgaactaaatcatactatgaatgcctacactaccattataactttttgaagaatgataataccacttactttattgccttttgaagtaggaatattttagtggatatgctatagacctgaaaccatataaagaatcccaaagaagctggctggataaagcctgctatggatgtctttatacacaaagactgatgaggcaattcgaatatgtgtccccaccaaatctcatgttgagttatgcttcctaatgttggaggtggatcctggtataaggtgattgaatyatgaaggcaaatttctcatgagtggttcagcactatccccttggtactgtcctcacaatcatgagtgacttgtcgtgagatctggccactgaaaactctatatcactccctactctccgtgatttcctcttgccatgtgagac

SEQ ID NO: 578525 - DNA, 509 bp, Homo sapiens
ttctctatgccccttccaaaactcatgtgaaagtacactccctaatgttagagtcggggcctaggtggaaaaagctttaatcataaaggagtgggagtggatccttcacaaatggcaaagcaccaagcccttaatgccatcctcctgatagtgagtgagttctcatgagatctagtagtttaaaaggctgtggaacctctttcctctgtcttgttccaacttctgccatatgaaacatgtcattgccgyttggatttccagtgtggttaggaggggcctgatcagtgtgggcctggtcagtggacctaggtctgtgaggactatttagtgggatcgtggtcagcaggggtctgcttagagagggtctcattagtggggtctagtagtgggggttttggtgagtggggacctattggctgccagttgtttggtgtctggtcagtgcaaacctgggctgtggggcttgatcagtggagacctggtcagctggggcttagtgctggcctggt

SEQ ID NO: 578526 - DNA, 338 bp, Homo sapiens
tctagtagtttaaaaggctgtggaacctctttcctctgtcttgttccaacttctgccatatgaaacatgtcattgccgcttggatttccrgtgtggttaggaggggcctgatcagtgtgggcctggtcagtggacctaggtctgtgaggactatttagtgggatcgtggtcagcaggggtctgcttagagagggtctcattagtggggtctagtagtgggggttttggtgagtggggacctattggctgccagttgtttggtgtctggtcagtgcaaacctgggctgtggggcttgatcagtggagacctggtcagctggggcttagtgctggcctgg

SEQ ID NO: 578527 - DNA, 509 bp, Homo sapiens
ttctctatgccccttccaaaactcatgtgaaagtacactccctaatgttagagtcggggcctaggtggaaaaagctttaatcataaaggagtgggagtggatccttcacaaatggcaaagcaccaagcccttaatgccatcctcctgatagtgagtgagttctcatgagatctagtagtttaaaaggctgtggaacctctttcctctgtcttgttccaacttctgccatatgaaacatgtcattgccgcttggatttccagtgtggttaggaggggcctgatcagtgtgggcctggtcagtggacctaggtcwgtgaggactatttagtgggatcgtggtcagcaggggtctgcttagagagggtctcattagtggggtctagtagtgggggttttggtgagtggggacctattggctgccagttgtttggtgtctggtcagtgcaaacctgggctgtggggcttgatcagtggagacctggtcagctggggcttagtgctggcctggt

SEQ ID NO: 578528 - DNA, 509 bp, Homo sapiens
ttctctatgccccttccaaaactcatgtgaaagtacactccctaatgttagagtcggggcctaggtggaaaaagctttaatcataaaggagtgggagtggatccttcacaaatggcaaagcaccaagcccttaatgccatcctcctgatagtgagtgagttctcatgagatctagtagtttaaaaggctgtggaacctctttcctctgtcttgttccaacttctgccatatgaaacatgtcattgccgcttggatttccagtgtggttaggaggggcctgatcagtgtgggcctggtcagtggacctaggtctgtgaggactatttagtgggatmgtggtcagcaggggtctgcttagagagggtctcattagtggggtctagtagtgggggttttggtgagtggggacctattggctgccagttgtttggtgtctggtcagtgcaaacctgggctgtggggcttgatcagtggagacctggtcagctggggcttagtgctggcctggt

SEQ ID NO: 578529 - DNA, 575 bp, Homo sapiens
gattccagaagcctgctgctggggtctgaatgtttgtcccccatctaggattccagaacactgctgcgagggtctgaatgtctgtccctcacatatgattctagaacattgatgctagggtctgtatgtttgcccttaacatatgatttcaaaacactgctcctggattctgaatgtttgwccttcacataggaatacagaactctgctgctggagtctgaatggttgtcactcacatagaattccagaacactgctgtgaggatctgaatgcttgaccctcacatgggattccagaacactgttgcgagggtctaaatgtctgtccctcacacaggtttcccgaacaatgttacgaggttctgaatgtttgtccctaacgtaggattccagagcactcctgctgtgctctgaatgcttctccctcacataggattccagaacactgctacgagggtctgaatgcttatccctcatataggattccagaacacttctgctgtggtctgaatgtttgctcctcacataggattccagaatactcctgccgtggtctgaatgtttgtccctcacata

SEQ ID NO: 578530 - DNA, 575 bp, Homo sapiens
gattccagaagcctgctgctggggtctgaatgtttgtcccccatctaggattccagaacactgctgcgagggtctgaatgtctgtccctcacatatgattctagaacattgatgctagggtctgtatgtttgcccttaacatatgatttcaaaacactgctcctggattctgaatgtttgtccttcacataggaatacagaacwctgctgctggagtctgaatggttgtcactcacatagaattccagaacactgctgtgaggatctgaatgcttgaccctcacatgggattccagaacactgttgcgagggtctaaatgtctgtccctcacacaggtttcccgaacaatgttacgaggttctgaatgtttgtccctaacgtaggattccagagcactcctgctgtgctctgaatgcttctccctcacataggattccagaacactgctacgagggtctgaatgcttatccctcatataggattccagaacacttctgctgtggtctgaatgtttgctcctcacataggattccagaatactcctgccgtggtctgaatgtttgtccctcacata

SEQ ID NO: 578531 - DNA, 461 bp, Homo sapiens
atctgaatgcttgaccctcacatgggattccagaacactgttgcgagggtctaaatgtctgtccctcacacaggtttcccgaacaatgttacgaggttctgaatgtttgtccctaacrtaggattccagagcactcctgctgtgctctgaatgcttctccctcacataggattccagaacactgctacgagggtctgaatgcttatccctcatataggattccagaacacttctgctgtggtctgaatgtttgctcctcacataggattccagaatactcctgccgtggtctgaatgtttgtccctcacataggattccagaacattcatgctggggtctcaatgtttcccttaacataggatttcagaacactgctcttggggtctgaatgtttgtcactcacataggattacagaacactgttgctggagtctgaatgtttgtcagtcacatagaattc

SEQ ID NO: 578532 - DNA, 461 bp, Homo sapiens
atctgaatgcttgaccctcacatgggattccagaacactgttgcgagggtctaaatgtctgtccctcacacaggtttcccgaacaatgttacgaggttctgaatgtttgtccctaacgtaggattccagagcactcctgctgtgctctgaatgcttctccctcacataggattccagaacactgctacgagggtcygaatgcttatccctcatataggattccagaacacttctgctgtggtctgaatgtttgctcctcacataggattccagaatactcctgccgtggtctgaatgtttgtccctcacataggattccagaacattcatgctggggtctcaatgtttcccttaacataggatttcagaacactgctcttggggtctgaatgtttgtcactcacataggattacagaacactgttgctggagtctgaatgtttgtcagtcacatagaattc

SEQ ID NO: 578533 - DNA, 461 bp, Homo sapiens
atctgaatgcttgaccctcacatgggattccagaacactgttgcgagggtctaaatgtctgtccctcacacaggtttcccgaacaatgttacgaggttctgaatgtttgtccctaacgtaggattccagagcactcctgctgtgctctgaatgcttctccctcacataggattccagaacactgctacgagggtctgaatgcttatccctcatataggattccagaacacttctgctgtggtctgaatgtttgctcctcacataggattccagaatactcctgccgtggtctgaatgtttgtccctcacataggattccagaacattcatgctggggtctcartgtttcccttaacataggatttcagaacactgctcttggggtctgaatgtttgtcactcacataggattacagaacactgttgctggagtctgaatgtttgtcagtcacatagaattc

SEQ ID NO: 578534 - DNA, 461 bp, Homo sapiens
atctgaatgcttgaccctcacatgggattccagaacactgttgcgagggtctaaatgtctgtccctcacacaggtttcccgaacaatgttacgaggttctgaatgtttgtccctaacgtaggattccagagcactcctgctgtgctctgaatgcttctccctcacataggattccagaacactgctacgagggtctgaatgcttatccctcatataggattccagaacacttctgctgtggtctgaatgtttgctcctcacataggattccagaatactcctgccgtggtctgaatgtttgtccctcacataggattccagaacattcatgctggggtctcaatgtttcccttaacataggatttcagaacactgctcttggggtctgaatgtttgtcrctcacataggattacagaacactgttgctggagtctgaatgtttgtcagtcacatagaattc

SEQ ID NO: 578535 - DNA, 460 bp, Homo sapiens
tctgaatgcttgaccctcacatgggattccagaacactgttgcgagggtctaaatgtctgtccctcacacaggtttcccgaacaatgttacgaggttctgaatgtttgtccctaacgtaggattccagagcactcctgctgtgctctgaatgcttctccctcacataggattccagaacactgctacgagggtctgaatgcttatccctcatataggattccagaacacttctgctgtggtctgaatgtttgctcctcacataggattccagaatactcctgccgtggtctgaatgtttgtccctcacataggattccagaacattcatgctggggtctcaatgtttcccttaacataggatttcagaacactgctcttggggtctgaatgtttgtcactcacataggattacagaacactgytgctggagtctgaatgtttgtcagtcacatagaattc

SEQ ID NO: 578536 - DNA, 480 bp, Homo sapiens
gatgctgtggtctgaatgtttgtccctcacatagaattccggaacactgctacaagggtctgaatgtttgtccttcacataccattccagaacactgctgccgtggtctgaatgtatgtccctcacataggattccagaacactgctactaggttctgaatgtttttcccacacctaggattccagaacacttctgctggtgtctgaatkgttgttcctcagatatgattccaggacactgctatgagagtcttaatgtttgtccttcacgtaggattctagaacactgctcccgtggtctgaatgtttgtccttcacatagcattccagaacactgctgctggggtctgaatgtctgcctctcaaatcagattccagaacactgctgctggggtttgaatgtctttccctcacatagaattccagaacatggctgggagggtctgaatgtttgtccctcacatgggataccagaacact

SEQ ID NO: 578537 - DNA, 442 bp, Homo sapiens
tgtttatacaaagatgattcaaaagattgtcctctacagtctagcagcaaagggggtcaacatgtaaagacatgatgtgcaggtcaggtggtaaagtgacactagaaaaattgacaaggtactragggaccccaaggaagcagacacctgtgtgtgtgcagaaagatagctagaatcaaggaagatctcacatagcattctgagcctttgttttcctctttttggagacaagttcttactctatcacccaggattggagtgcaatggcatgattgagactcactgaaacctcagactcctgggctcgagggatcttctcatctaagcttcttgagtagcggggacaacaggaacatatcaccatacctgtctaattttttgtagagtcaaggttacctatggttcccaggctggtcttaaactcttggccttgagcaattct

SEQ ID NO: 578538 - DNA, 442 bp, Homo sapiens
tgtttatacaaagatgattcaaaagattgtcctctacagtctagcagcaaagggggtcaacatgtaaagacatgatgtgcaggtcaggtggtaaagtgacactagaaaaattgacaaggtactgagggaccccaasgaagcagacacctgtgtgtgtgcagaaagatagctagaatcaaggaagatctcacatagcattctgagcctttgttttcctctttttggagacaagttcttactctatcacccaggattggagtgcaatggcatgattgagactcactgaaacctcagactcctgggctcgagggatcttctcatctaagcttcttgagtagcggggacaacaggaacatatcaccatacctgtctaattttttgtagagtcaaggttacctatggttcccaggctggtcttaaactcttggccttgagcaattct

SEQ ID NO: 578539 - DNA, 442 bp, Homo sapiens
tgtttatacaaagatgattcaaaagattgtcctctacagtctagcagcaaagggggtcaacatgtaaagacatgatgtgcaggtcaggtggtaaagtgacactagaaaaattgacaaggtactgagggaccccaaggaagcagacacctgtgtgtgtgsagaaagatagctagaatcaaggaagatctcacatagcattctgagcctttgttttcctctttttggagacaagttcttactctatcacccaggattggagtgcaatggcatgattgagactcactgaaacctcagactcctgggctcgagggatcttctcatctaagcttcttgagtagcggggacaacaggaacatatcaccatacctgtctaattttttgtagagtcaaggttacctatggttcccaggctggtcttaaactcttggccttgagcaattct

SEQ ID NO: 578540 - DNA, 453 bp, Homo sapiens
agtattgggtcatattactgaggaatagaaattatgaacagtttaacaacaatggccactgagttaaactagtgttaaaggagtcatcattgccagtgcttcaaatgttgcagttttatattgctggtcaccagtgccgaggttaaagatttattctgttttgtggtcaccagttgacttctgtgtctgtgttcagggagtgaatggggtcataaaagtcaatgcagttgcctattaagagaatcctaccttgcagaatgggacctttggtgtcagggtgtgaacaataactttatttcaacataaatacatagtaaacattactaaaatttaaaaaatccaaaccctatcactaccggaacttaaaatatattaraagtggatataagcagaaattctatctagatacataacactatcatagtatatcatttgaattagaatttaaaattt

SEQ ID NO: 578541 - DNA, 570 bp, Homo sapiens
ataaatcagggaaaaaggttttatagaataaaataataattatcacccatctccctttccttaggggtcaaagaaggaaataatacaaacaaaagtgaaaaaatacaactatcagaaaatgtatgtcatagtacatcttctgctgctgctgacagattaaccaaacaaagaaaggttgggaaaacgtatcctcagcaatttcccaagaaactgaaggaagagcatgataggtaagtaagcctatagcagtgtgtttttgtttttttgttttgttttgtttttttctgagatggagtttctctcttgttgcccaagctggagtgcaatggtgtgttctcacctcactgcarcctatgcatactgggttcaagtgattctcctgactcagcctccctagtagctgagattacagacatgtgccaccatgcccagctaattttttgtatttttagtagaaatgaggtttcaccatgttatccaggcttgtctcgaactcctgacctcaggtgttctgcccacctcagcctcccaaagtgctgggtttacaggagtgagccaccgtgcctggcc

SEQ ID NO: 578542 - DNA, 570 bp, Homo sapiens
ataaatcagggaaaaaggttttatagaataaaataataattatcacccatctccctttccttaggggtcaaagaaggaaataatacaaacaaaagtgaaaaaatacaactatcagaaaatgtatgtcatagtacatcttctgctgctgctgacagattaaccaaacaaagaaaggttgggaaaacgtatcctcagcaatttcccaagaaactgaaggaagagcatgataggtaagtaagcctatagcagtgtgtttttgtttttttgttttgttttgtttttttctgagatggagtttctctcttgttgcccaagctggagtgcaatggtgtgttctcacctcactgcaacctatgcatactgggttcaagtgattctcctgactcagcctccctagtagctgagattacagacatrtgccaccatgcccagctaattttttgtatttttagtagaaatgaggtttcaccatgttatccaggcttgtctcgaactcctgacctcaggtgttctgcccacctcagcctcccaaagtgctgggtttacaggagtgagccaccgtgcctggcc

SEQ ID NO: 578543 - DNA, 602 bp, Homo sapiens
ggcttgtctcgaactcctgacctcaggtgttctgcccacctcagcctcccaaagtgctgggtttacaggagtgagccaccgtgcctggccacctatagcagtatttmtcagcggataattgtcattgtgctataaactaattcaaaattggactaatgttccttatgattaacaagttttatagttttaccagggatatttagccctgcctggtaatcagaaaaatgcaaattaacataaaataagatatattttgtaaagtcatgctgatattgaaaaagtaattactaccattgaaaatgtgaggaaaaaagcattctcatacactgttggtatatgaaattggtaaattatttctgaagggtaacttagtgctgtgtatcaaaatttcaaataacctgacatccctttaactcaacaactccacttctgggactagatttcacaggaaaacataacttgtgtaaacatacacacacttattaagggcattaattatatattacacataatgaacaatagcttaataaatatataaaatatatgtaataagaaggtgaattggaagtattaagaaagaattataaaaagtgtggggtaac

SEQ ID NO: 578544 - DNA, 602 bp, Homo sapiens
ggcttgtctcgaactcctgacctcaggtgttctgcccacctcagcctcccaaagtgctgggtttacaggagtgagccaccgtgcctggccacctatagcagtatttctcagcggataattgtcattgtgctataaactaattcaaaattggactaatgttccttatgattaacaagttttatagttttaccagggatatttagccctgcctggtaatcagaaaaatgcaaattaacataaaataagatatattttgtaaagtcatgctgatattgaaaaagtaattactaccattgaaaatgtgaggaaaaargcattctcatacactgttggtatatgaaattggtaaattatttctgaagggtaacttagtgctgtgtatcaaaatttcaaataacctgacatccctttaactcaacaactccacttctgggactagatttcacaggaaaacataacttgtgtaaacatacacacacttattaagggcattaattatatattacacataatgaacaatagcttaataaatatataaaatatatgtaataagaaggtgaattggaagtattaagaaagaattataaaaagtgtggggtaac

SEQ ID NO: 578545 - DNA, 481 bp, Homo sapiens
aagaaagtctctttcaatatgagagagagaaagcagaaaaagtagtaagtatcaaggaagataaatrttttcaaacttttagaaagaaaatttaaacatttggttctggatacatgttgaacttagttgaatataaaaatcaatggataaaaagtgtgtttaccatactgtataattccatttacatgaagcatccagaaaagataaacgtatagggacaaaaagtagactaatgtttgcaaagggctgggtctgaaagctggtagtgactgctaatgggcgtgagggatcttgcagtgatggaaatgctgtaaagttggattgtagagatggctgcacaactcagtaaatggactaaaaaatcttttaactttaagttaaaacagatacattctatagtatgtaaattatatttcaacaaagctgttttaataaaaaaaaaaggaaaaccgtgtttactataccagcttagaaatgtgtc

SEQ ID NO: 578546 - DNA, 639 bp, Homo sapiens
ctagatttcccagatgaactgaagtgtattgctttgtcttgtaataccttgctttaagtagctttttatgtattttagttggtatatctttgttattaatcatattaatttaacaaatctgaaaatatgtcaaattacatatttttatgactatgtaatgttttaaaggcacctacttgttataaaatcataatttaggatacatgtggtaatatttagcaaaattatatttggtttagtcttcccactggtattcatagtttactttgaatatttmtattaataattagctcctaatttttatttcaaggctcaatgactatcattggaatataattttgttcagtacaaagatacttgtaactgcctgtgatttatgagtaaggcattagatccctattttcagactgaggggtggcaggcttcacgtacagtgggaatggagtaattgcaggagggagttgtaggagctttgaagtcagagagggaggtagagacctgtttacctaggacctcaaaggccattgaaattttacttttattctgagataggaatctgttggaaggatttgaacaggtgattgaatatgtcaggaactttgaggttgagttgagcttctaagatgattgaatggtggg

SEQ ID NO: 578547 - DNA, 639 bp, Homo sapiens
ctagatttcccagatgaactgaagtgtattgctttgtcttgtaataccttgctttaagtagctttttatgtattttagttggtatatctttgttattaatcatattaatttaacaaatctgaaaatatgtcaaattacatatttttatgactatgtaatgttttaaaggcacctacttgttataaaatcataatttaggatacatgtggtaatatttagcaaaattatatttggtttagtcttcccactggtattcatagtttactttgaatatttctattaataattagctcctaatttttatttcaaggctcaatgactatcattggaatataattttgttcagtacaaagatacttgtaactgcctgtgatttatgagtaaggcattagatccctattttcagactgaggggtggcaggcttcacgtacagtgggaatggagtaattgcaggagggagttgtaggagctttgaagtcagagagggakgtagagacctgtttacctaggacctcaaaggccattgaaattttacttttattctgagataggaatctgttggaaggatttgaacaggtgattgaatatgtcaggaactttgaggttgagttgagcttctaagatgattgaatggtggg

SEQ ID NO: 578548 - DNA, 627 bp, Homo sapiens
caaagatacttgtaactgcctgtgatttatgagtaaggcattagatccctattttcagactgaggggtggcaggcttcacgtacagtgggaatggagtaattgcaggagggagttgtaggagctttgaagtcagagagggaggtagagacctgtttacctaggacctcaaaggccattgaaattttacttttattctgagataggaatctgttggaaggatttgaacaggtgattgaatatgtcaggaastttgaggttgagttgagcttctaagatgattgaatggtgggatgaatctgttatgtaagtaagagaataccaactttggcaggaagaggaacatattgtgcatccctcactgaattcagtaatatataacaatgtgtacatgtgattaaaagaaggtgaatttatatgtgtggtgataattttcaaagtaggtatgttagagttaaatattattaacataatttaataataaggcaatttataaaatcagtaacaaaaatattttctcaggtggttgtgagaaaacttcaacaagaagcggctgacagcctaaaaaaattaactatgttagagtctccactggaaggtatatcacattatcacattaatttggatga

SEQ ID NO: 578549 - DNA, 621 bp, Homo sapiens
tttgaacaggtgattgaatatgtcaggaactttgaggttgagttgagcttctaagatgattgaatggtgggatgaatctgttatgtaagtaagagaataccaactttggcaggaagaggaacatattgtgcatccctcactgaattcagtaatatataacaatgtgtacatgtgattaaaagaaggtgaatttatatgtgtggtgataattttcaaagtaggtatgttagagttaaatattattaacataatttaataataaggcaatttataaaatcagtaacaaaaatattttctcaggtggttgtgagaaaacttcaacaagaagcggctgacagcctaaaaaaattaactatgttagagtctccactggaaggyatatcacattatcacattaatttggatgagacacaggtcccaaagaagaaattatttcaagtggaaagtcaagtatgtatggaacttagcatgtaaactgttattctgtagctagttgaattacatacatgttttaggatactaattatggcagaagcttgattttttattttcattacaatgaattatttccattttactatctctataatgtacttatttttataaagtgactttcattct

SEQ ID NO: 578550 - DNA, 621 bp, Homo sapiens
tttgaacaggtgattgaatatgtcaggaactttgaggttgagttgagcttctaagatgattgaatggtgggatgaatctgttatgtaagtaagagaataccaactttggcaggaagaggaacatattgtgcatccctcactgaattcagtaatatataacaatgtgtacatgtgattaaaagaaggtgaatttatatgtgtggtgataattttcaaagtaggtatgttagagttaaatattattaacataatttaataataaggcaatttataaaatcagtaacaaaaatattttctcaggtggttgtgagaaaacttcaacaagaagcggctgacagcctaaaaaaattaactatgttagagtctccactggaaggtatatcacattatcacattaatttggatgagacacaggtcccaaagaagaaattatttcaagtggaaagtcaagtatgtatggaacttagcatgtmaactgttattctgtagctagttgaattacatacatgttttaggatactaattatggcagaagcttgattttttattttcattacaatgaattatttccattttactatctctataatgtacttatttttataaagtgactttcattct

SEQ ID NO: 578551 - DNA, 618 bp, Homo sapiens
acagtgagatagtccccctttgagattagaaaataacagtatactcaaagtaacattaatgagaaccaacataaaatagacaacattcactatctacaaaagtaatctgcaccaattagcaatgtatgagcatgtggttgagaatattttctataatatgtgtactagaaggaagagacctcaagaaaatggtcagagctggaaatgtagattagggaatctaggtcaaagttttgagattttaggagycctgagagaatttaaaaagagaaatagccaccaggcatggtggccacacctgtaatcccagcactttgggaggccaaggcaggaagatcatgaggtcaggagttcaagaccagtctggccaacaagtttcttatataggtaaacgtgttccatgatggtttgctgcacctatcaatccatcacctagatattaagccctgtgggcattagttattgatcttgatgctctccctcctgaccccaacaggccccagtgtttgttgttcccctccccgagtctatgtgttcttatcgttcagctcccgcttataagtgagaagatgcagtgtttggttttttcttcctgcattagtttgctgaatatatcag

SEQ ID NO: 578552 - DNA, 618 bp, Homo sapiens
acagtgagatagtccccctttgagattagaaaataacagtatactcaaagtaacattaatgagaaccaacataaaatagacaacattcactatctacaaaagtaatctgcaccaattagcaatgtatgagcatgtggttgagaatattttctataatatgtgtactagaaggaagagacctcaagaaaatggtcagagctggaaatgtagattagggaatctaggtcaaagttttgagattttaggagccctgagagaatttaaaaagagaaatagccaccaggcatggtggccacacctgtaatcccagcactttgggaggccaaggcaggaagatcatgaggtcaggagttcaagacyagtctggccaacaagtttcttatataggtaaacgtgttccatgatggtttgctgcacctatcaatccatcacctagatattaagccctgtgggcattagttattgatcttgatgctctccctcctgaccccaacaggccccagtgtttgttgttcccctccccgagtctatgtgttcttatcgttcagctcccgcttataagtgagaagatgcagtgtttggttttttcttcctgcattagtttgctgaatatatcag

SEQ ID NO: 578553 - DNA, 618 bp, Homo sapiens
acagtgagatagtccccctttgagattagaaaataacagtatactcaaagtaacattaatgagaaccaacataaaatagacaacattcactatctacaaaagtaatctgcaccaattagcaatgtatgagcatgtggttgagaatattttctataatatgtgtactagaaggaagagacctcaagaaaatggtcagagctggaaatgtagattagggaatctaggtcaaagttttgagattttaggagccctgagagaatttaaaaagagaaatagccaccaggcatggtggccacacctgtaatcccagcactttgggaggccaaggcaggaagatcatgaggtcaggagttcaagaccagtctggccaacaagtttcttatataggtaaacgtgttccatgatggtttgctgcacctatcaatccatcacctagatattaagccctgtgggcattagttattgatcttgatgctctccctcctgaccccaacaggccccagtgtttgttgttcccctccccgagtctatgtgttcttatcgttcagctcccrcttataagtgagaagatgcagtgtttggttttttcttcctgcattagtttgctgaatatatcag

SEQ ID NO: 578554 - DNA, 467 bp, Homo sapiens
acaattcattaactttagtattttcagagagttatgccgtcatcattacaattaattttagaacattttcatcaccctaaaaacaaaccccacaacatttagccatcttcactagttttcccttcctccctcagccctagggaaccacccaccttctttgtatagatttgcctataagyctctgaaataaaaagcaagtggtctgctgggactggcttatttcacttagcataatttttcatgctgcatctgtgctgtagcaggtattgatgccgggtttttgctccttagttcagctacatctgggttcttctctcatgaccaggaaaaatcaagcatgcagacacattgaggagggcagaatttatttgtgaaaggacagctctcagcaaagagagggatcctgcaaagaggtttccacctcacaattgaataccaggatcacatgagctgaaatggccaggctc

SEQ ID NO: 578555 - DNA, 462 bp, Homo sapiens
tcattaactttagtattttcagagagttatgccgtcatcattacaattaattttagaacattttcatcaccctaaaaacaaaccccacaacatttagccatcttcactagttttcccttcctccctcagccctagggaaccacccaccttctttgtatagatttgcctataagcctctgaaataaaaagcaagtggtctgctgggactggcttatttcacttagcataatttttcatgctgcatctgtgctgtagcaggtattgatgccgggtttttgctccttagttcagctacatctgkgttcttctctcatgaccaggaaaaatcaagcatgcagacacattgaggagggcagaatttatttgtgaaaggacagctctcagcaaagagagggatcctgcaaagaggtttccacctcacaattgaataccaggatcacatgagctgaaatggccaggctc

SEQ ID NO: 578556 - DNA, 467 bp, Homo sapiens
acaattcattaactttagtattttcagagagttatgccgtcatcattacaattaattttagaacattttcatcaccctaaaaacaaaccccacaacatttagccatcttcactagttttcccttcctccctcagccctagggaaccacccaccttctttgtatagatttgcctataagcctctgaaataaaaagcaagtggtctgctgggactggcttatttcacttagcataatttttcatgctgcatctgtgctgtagcaggtattgatgccgggtttttgctccttagttcagctacatctgggttcttctctcrtgaccaggaaaaatcaagcatgcagacacattgaggagggcagaatttatttgtgaaaggacagctctcagcaaagagagggatcctgcaaagaggtttccacctcacaattgaataccaggatcacatgagctgaaatggccaggctc

SEQ ID NO: 578557 - DNA, 471 bp, Homo sapiens
ttttcagagagttatgccgtcatcattacaattaattttagaacattttcatcaccctaaaaacaaaccccacaacatttagccatcttcactagttttcccttcctccctcagccctagggaaccacccaccttctttgtatagatttgcctataagcctctgaaataaaaagcaagtggtctgctgggactggcttatttcacttagcataatttttcatgctgcatctgtgctgtagcaggtattgatgccgggtttttgctccttagttcagctacatctgggttcttctctcatgaccaggaaaaatyaagcatgcagacacattgaggagggcagaatttatttgtgaaaggacagctctcagcaaagagagggatcctgcaaagaggtttccacctcacaattgaataccaggatcacatgagctgaaatggccaggctcctcctctgcataaggcttgaattc

SEQ ID NO: 578558 - DNA, 471 bp, Homo sapiens
ttttcagagagttatgccgtcatcattacaattaattttagaacattttcatcaccctaaaaacaaaccccacaacatttagccatcttcactagttttcccttcctccctcagccctagggaaccacccaccttctttgtatagatttgcctataagcctctgaaataaaaagcaagtggtctgctgggactggcttatttcacttagcataatttttcatgctgcatctgtgctgtagcaggtattgatgccgggtttttgctccttagttcagctacatctgggttcttctctcatgaccaggaaaaatcaagcatgcagacacattgaggagggcagaatttatttgtgaaagsacagctctcagcaaagagagggatcctgcaaagaggtttccacctcacaattgaataccaggatcacatgagctgaaatggccaggctcctcctctgcataaggcttgaattc

SEQ ID NO: 578559 - DNA, 467 bp, Homo sapiens
acaattcattaactttagtattttcagagagttatgccgtcatcattacaattaattttagaacattttcatcaccctaaaaacaaaccccacaacatttagccatcttcactagttttcccttcctccctcagccctagggaaccacccaccttctttgtatagatttgcctataagcctctgaaataaaaagcaagtggtctgctgggactggcttatttcacttagcataatttttcatgctgcatctgtgctgtagcaggtattgatgccgggtttttgctccttagttcagctacatctgggttcttctctcatgaccaggaaaaatcaagcatgcagacacattgaggagggcagaatttatttgtgaaaggacagctctcagcaaagagagggrtcctgcaaagaggtttccacctcacaattgaataccaggatcacatgagctgaaatggccaggctc

SEQ ID NO: 578560 - DNA, 467 bp, Homo sapiens
acaattcattaactttagtattttcagagagttatgccgtcatcattacaattaattttagaacattttcatcaccctaaaaacaaaccccacaacatttagccatcttcactagttttcccttcctccctcagccctagggaaccacccaccttctttgtatagatttgcctataagcctctgaaataaaaagcaagtggtctgctgggactggcttatttcacttagcataatttttcatgctgcatctgtgctgtagcaggtattgatgccgggtttttgctccttagttcagctacatctgggttcttctctcatgaccaggaaaaatcaagcatgcagacacattgaggagggcagaatttatttgtgaaaggacagctctcagcaaagagagggatcctgcaaagaggtttccacctcacaattgaataccaggakcacatgagctgaaatggccaggctc

SEQ ID NO: 578561 - DNA, 582 bp, Homo sapiens
ttgaacaaagattttatcctgtgttgtgaagtgataccacatgtggttttgatttacattttcctaatgactaattacattaagcatctattaatgtgcttatccatctttatatcttctttgcagatatatctattcaaaatctttgcccattttttaaaattggcttatcttgttatttattaattgcaagagttatttatatttcctatatatgtaagtcccttatcagatacacgcttttcaaatactttcttctacttggygtcttaccttttcacttcttcatactgtcttctgaggcacagcagttttcaattttgaagtccattgaatccatttttcctttggagtcatagctaagaaaacactggcaaatgcagtcacaaagatttatgccagtgttttcttctgagggatttatagttttagcttttacagttaactattttattttgagttaattattaaataagatatttggtcgaactttatttattttttgcttatggatacccagttgtcccagcaccatttgttgaaaagactattcttttcccattttgctcttttgttaagctt

SEQ ID NO: 578562 - DNA, 563 bp, Homo sapiens
aactattttattttgagttaattattaaataagatatttggtcgaactttatttattttttgcttatggatacccagttgtcccagcaccatttgttgaaaagactattcttttcccattttgytcttttgttaagcttgtataaaatcaattgactgtaaaagtgcaggcttatttttagattgtcaattcttagcttgtttatgtctattcttatgtcaaggcccaatcgaattgaatgagaagtttttttcaatcatgttgcatattaccagttgtcttatgtcataataaaaattaaatttagtagaatgtctgtaacttcaccttttttgtcacaaaggagtctctggccagcttataccttacttcctctaagacatgatcagacgccaggcttacaagacacacttaatttctttttttctccattcaagcctttagtctcttttccattgcctcccactatagttacattttcagtaagttttggttacaggatctgctgacatagtctaatattcagtgcattatgttttactaactcattataattcatagaa

SEQ ID NO: 578563 - DNA, 563 bp, Homo sapiens
aactattttattttgagttaattattaaataagatatttggtcgaactttatttattttttgcttatggatacccagttgtcccagcaccatttgttgaaaagactattcttttcccattttgctcttttgttaagcttgtataaaatcaattgactgtaaaagtgcaggcttatttttagattgtcaattcttagcttgtttatgtctattcttatgtcaaggcccaatcgaattgaatgagaagtttttttcaatcatgttgcatattaccagttgtcttatgtcataataaaaattaaatttagtrgaatgtctgtaacttcaccttttttgtcacaaaggagtctctggccagcttataccttacttcctctaagacatgatcagacgccaggcttacaagacacacttaatttctttttttctccattcaagcctttagtctcttttccattgcctcccactatagttacattttcagtaagttttggttacaggatctgctgacatagtctaatattcagtgcattatgttttactaactcattataattcatagaa

SEQ ID NO: 578564 - DNA, 413 bp, Homo sapiens
gtgcattatgttttactaactcattataattcatagaaccttccatagatgttcaccatctaggaaggagaagtttaagtctgagccaccagctttcctcagtggaaatcaagtgaagtcatcatcttgcagtttacagaccctctttcctcctggtagctggttctcttgggtagcactgtggctaatccttttmttagtgcagatcttgcattctcagaaaccacagttccctgtattgacctccttttactgaaacagagatgcacagctctgctttctatctcagtagaggattcttggaataaaacgtttaactcattccaagaaagtcttaggagtgcagcacttcaaaatcaggtaacgttcaggcaatttatcagagacacatagtaaattagtattttgacttt

SEQ ID NO: 578565 - DNA, 575 bp, Homo sapiens
ttattagatcctgctttaaaggagactcttttctgctgcataagttatgtttcctgttgtctctttttaaaacttattttcctaacaattacccagagtcttgtggcttgaaagaaaaacatttattttgttcatgaacctgtggtttgggaaaaacttggccaggacagcttgtctytgctcccttcagcttccctaggaacagctgatcagttggggaaatggaatcctctgaagctttggtcacccacttgtttgatggttgatgctgccatcggctgtaaacttggttgggacaggcagcgtgaacactgacacaggcactttcaggctatctttgtggcctgatggctctcacaattggggctgggttccaagggaaaacagtctgagatagggaagccacatggtatccctttcactacattctactcattagaaggaagtcagtaaggctggcctatattctgttttttaaatgggatgaatgtagcttctcttttattttaattgacacatatatacataattatgggctatagagtgatatttttatacacgtatatagtgtgtaa

SEQ ID NO: 578566 - DNA, 575 bp, Homo sapiens
ttattagatcctgctttaaaggagactcttttctgctgcataagttatgtttcctgttgtctctttttaaaacttattttcctaacaattacccagagtcttgtggcttgaaagaaaaacatttattttgttcatgaacctgtggtttgggaaaaacttggccaggacagcttgtctctgctcccttcagcttccctaggaacagctgatcagttggggaaatggaatcctctgaagctttggtcacccacttgtttgatggttgatgctgccatcggctgtaaacttggttgggacaggcagcgtgaacactgacacaggcactttcaggctatctttgtggcctgatggctctcacaattggggctgggttccaagggaaaacagtctgagatagggaagccacatggtatccctttcactacattctactcattagaaggaagtcagtaaggctggcctatattctgttttttaaatgggatgaatgtagcttctcttttrttttaattgacacatatatacataattatgggctatagagtgatatttttatacacgtatatagtgtgtaa

SEQ ID NO: 578567 - DNA, 594 bp, Homo sapiens
acttttggtctcaaatgattctcttgccttggtcttacaaagagctaggaaattacaggcatcagcmatattgcccagccttcaatttccctttagctcccttacatgagtaagaatgtgcagtatttatctttctgtgtctgcacttaacataacatccgtcagactgatccacgtggccacgaataacaggatttaattcctttatacggtgaatagtattccactgtgtttgtgtgccacagtttttcgtccattcatttggtgatggacatgtaggttgattccatacacaagctgttgtggatagtgctacagtaaacatatgaggacagatatccttttgatctattgttttcttttctattgcctgaatgcccggtagtgaggttgctggatccctcggcagtcccattattagtttttttgagaaaacctcctgttgttctctattgtggctgcactaatttaccttcccaccaacagcatgtaagagtttactgttctctggagcctcaccagcatttgtttttttttttgtcttttcaatgacagcaatttattcaaattgaagcaagattatatcacattgta

SEQ ID NO: 578568 - DNA, 594 bp, Homo sapiens
acttttggtctcaaatgattctcttgccttggtcttacaaagagctaggaaattacaggcatcagccatattgcccagccttcaatttycctttagctcccttacatgagtaagaatgtgcagtatttatctttctgtgtctgcacttaacataacatccgtcagactgatccacgtggccacgaataacaggatttaattcctttatacggtgaatagtattccactgtgtttgtgtgccacagtttttcgtccattcatttggtgatggacatgtaggttgattccatacacaagctgttgtggatagtgctacagtaaacatatgaggacagatatccttttgatctattgttttcttttctattgcctgaatgcccggtagtgaggttgctggatccctcggcagtcccattattagtttttttgagaaaacctcctgttgttctctattgtggctgcactaatttaccttcccaccaacagcatgtaagagtttactgttctctggagcctcaccagcatttgtttttttttttgtcttttcaatgacagcaatttattcaaattgaagcaagattatatcacattgta

SEQ ID NO: 578569 - DNA, 563 bp, Homo sapiens
atactgagcattttaaaatttatttattggctatttgtatttctttttctaaaaaaaagtatagttagatattttgcccaattttaaactcagatttttttttactgtgaagttgtttgagtttttttgtatatttygtatattagtcccttattagatgaatagcttgacaatattttctcctattctacaggttttctcttcactcagttgtttgctggacagaagctctttagcttaatgtagtgtcttttgtctatgatttgttgtttgcctatgcttctgatgtcttacccataaaaatctttgtgcagactaatgtcctcaagcattttccctatatttacttagagtagtttgataattttgggccttacatttcagtcttcaatcgattctgagtttatgttgttatatggtgttacataggaagctaatatcattcttctccatatggatatttagttttcccagtgtcattcatttgaagaggctgtcctttccccagcgtatgttcttggcatgttcgtccaaaatcagttggctggaaatatgtggattta

SEQ ID NO: 578570 - DNA, 529 bp, Homo sapiens
ccttacatttcagtcttcaatcgattctgagtttatgttgttatatggtgttacataggaagctaatatcattcttctccatatggatatttagttttcccagtgtcattcatttgaagaggctgtcctttccccagcgtaygttcttggcatgttcgtccaaaatcagttggctggaaatatgtggatttatttctgggtgccgtattctatggtctttaccccaagaatcattacttcttaaaatgcaattcaaattagcatgaaacatttgcagtttaaggaaaggcttatagcatcagaatccttaatcatagatttcattattttgtgtttttttttttgagatagggtctttgtctgtcatccaggcagaagtgcagtgataataattcactgcagccctgaactctgggtacaagccatccttttgcctcagtatcccaactagctgggtctacaggcatgagccaccatgcccgggtaattaaaaaacatttttttttttgtagagatgggggtctcacta

SEQ ID NO: 578571 - DNA, 529 bp, Homo sapiens
ccttacatttcagtcttcaatcgattctgagtttatgttgttatatggtgttacataggaagctaatatcattcttctccatatggatatttagttttcccagtgtcattcatttgaagaggctgtcctttccccagcgtatgttcttggcatgttcgtccaaaatcagttggctggaaatatgtgratttatttctgggtgccgtattctatggtctttaccccaagaatcattacttcttaaaatgcaattcaaattagcatgaaacatttgcagtttaaggaaaggcttatagcatcagaatccttaatcatagatttcattattttgtgtttttttttttgagatagggtctttgtctgtcatccaggcagaagtgcagtgataataattcactgcagccctgaactctgggtacaagccatccttttgcctcagtatcccaactagctgggtctacaggcatgagccaccatgcccgggtaattaaaaaacatttttttttttgtagagatgggggtctcacta

SEQ ID NO: 578572 - DNA, 529 bp, Homo sapiens
ccttacatttcagtcttcaatcgattctgagtttatgttgttatatggtgttacataggaagctaatatcattcttctccatatggatatttagttttcccagtgtcattcatttgaagaggctgtcctttccccagcgtatgttcttggcatgttcgtccaaaatcagttggctggaaatatgtggatttatttcwgggtgccgtattctatggtctttaccccaagaatcattacttcttaaaatgcaattcaaattagcatgaaacatttgcagtttaaggaaaggcttatagcatcagaatccttaatcatagatttcattattttgtgtttttttttttgagatagggtctttgtctgtcatccaggcagaagtgcagtgataataattcactgcagccctgaactctgggtacaagccatccttttgcctcagtatcccaactagctgggtctacaggcatgagccaccatgcccgggtaattaaaaaacatttttttttttgtagagatgggggtctcacta

SEQ ID NO: 578573 - DNA, 529 bp, Homo sapiens
ccttacatttcagtcttcaatcgattctgagtttatgttgttatatggtgttacataggaagctaatatcattcttctccatatggatatttagttttcccagtgtcattcatttgaagaggctgtcctttccccagcgtatgttcttggcatgttcgtccaaaatcagttggctggaaatatgtggatttatttctgggtgccrtattctatggtctttaccccaagaatcattacttcttaaaatgcaattcaaattagcatgaaacatttgcagtttaaggaaaggcttatagcatcagaatccttaatcatagatttcattattttgtgtttttttttttgagatagggtctttgtctgtcatccaggcagaagtgcagtgataataattcactgcagccctgaactctgggtacaagccatccttttgcctcagtatcccaactagctgggtctacaggcatgagccaccatgcccgggtaattaaaaaacatttttttttttgtagagatgggggtctcacta

SEQ ID NO: 578574 - DNA, 587 bp, Homo sapiens
ctcaccagctgcctgttatgtgctgacagtcatctcattcatcctcgcagcaattccattttgcatcttttctgatcacctccgtgaccacacaggacaaccccatcagggcccctgtcaccaggcccagtctagctccatgataaccaagacagaggtccagagacaatcgtcctacattgtgcctgcatctgaccccccttggtaggtagtgaccagcacaacatggaagaagccagggcagcatgcagccagctgctctgcakccccaaatggctcctgggacttgggaagtcattcataaaggggaagctggtcactttgaggtccctgaagggaagggtgaacgtgtatcccaacagccctggcagccagcagcatgccatacatcttctcacccaacctgtgtgacagaggtcccctcctggggcacaagtcccatacctaaagcatcctgtcccagtcggacctcatcctgagccctgggaggggaggggcaccatgggcccccctgcagcagccaggattaccacccaggggactcggccttctgtggccctggccagacttagaatttggcccaagac

SEQ ID NO: 578575 - DNA, 360 bp, Homo sapiens
ttccactctgtcagtgagctctttgccagtcagtccaggaaggacctggacccagccatggacctgttagtgctgtctcagggacaccagaccaacatcctggacatcatccacatacacaaggaagctcttaccaaagtcatggagagcaggcaacatgtggccgaagggaagacagaggtgcagaggctgatgaygtcagaatcacaggaacaggatttctttggccactttggctgaaattcaccacttccatccaattccagtgagagacatggactcacagatgcagcatttcttgcaacaagagatactactttttcaaaaagtcacccaggaattgttagtgttgaacgactc

SEQ ID NO: 578576 - DNA, 516 bp, Homo sapiens
ttctttgccttccatgattattgaaagatttctgagacctagaagcagaagcactgtgcttagaaccatgagccaattaaacctctttttcaaaataaatcatacagaaaatggcaaatgaggactggagcgttgctataaagatacctggaaatgtggaagcagctttggaaccaggtaatggacggaggttggaagagtttggagggctcaaaagaagacagatgagaaaacttttggaccatcttagagtctggttcaatggttgtgacaaaaatcctgacagaaacatggacagtgaaggccaggctgaggaggtctcagagagaaataagaagctttctggaaaatgtcttccttttggatatggaaagctyacacaatgcctgctttttatttcagagactcataggcaaaagagactgtagccttgacccagatgagactttggactttgtaactttgagttaatgctgaaatgagttaagactttgggagactgctggcaaggcatgt

SEQ ID NO: 578577 - DNA, 513 bp, Homo sapiens
gatctggttgtttaacagatctcatcctcctgctcctgctttaggagacatctcattgtcmcttggctttctgatataatgaggaggcttcctgattcctcccagaaacagaagacactatacttccttcacagcttgcagaaccatgagtcaattacacctcttttatttacaataatacagaaaagtagaactgcagagaggagctgtgaaatgccttcaaggcctttttccctttgttttggctattagcacagggattctttatatgcaaatttctgaaatcttcttgaatgtttccccttaaatgggatttttgttattgctacatagacaacctgctatacagatttctgaaaaagtagaagcaggctcagtagtgggtagcaaacaaagattggaagggtttggagggattagattatgacagggagtgggagggagtgatttaatcatggatgggtgggggtggatgtggaagggaaaaaggggtgggtagggtgggagggagta

SEQ ID NO: 578578 - DNA, 566 bp, Homo sapiens
agcttgcagaaccatgagtcaattacacctcttttatttacaataatacagaaaagtagaactgcagagaggagctgtgaaatgccttcaaggcctttttccctttgttttggctattagcacagggmttctttatatgcaaatttctgaaatcttcttgaatgtttccccttaaatgggatttttgttattgctacatagacaacctgctatacagatttctgaaaaagtagaagcaggctcagtagtgggtagcaaacaaagattggaagggtttggagggattagattatgacagggagtgggagggagtgatttaatcatggatgggtgggggtggatgtggaagggaaaaaggggtgggtagggtgggagggagtagactggctgtacggtggtgggagggtggtgggtagtaggaaggggtagtagcctgctgcagaggcagagtctcatggaaaatccctactagggaagcgcacctgtggctttgcaggtttgagccccaatggctgctctcatggactggactagtgttgagtgcctgtagcttttccacatggagg

SEQ ID NO: 578579 - DNA, 513 bp, Homo sapiens
gatctggttgtttaacagatctcatcctcctgctcctgctttaggagacatctcattgtcccttggctttctgatataatgaggaggcttcctgattcctcccagaaacagaagacactatacttccttcacagcttgcagaaccatgagtcaattacacctcttttatttacaataatacagaaaagtagaactgcagagaggagctgtgaaatgccttcaaggcctttttccctttgttttggctattagcacagggattctttatatgcaaatttytgaaatcttcttgaatgtttccccttaaatgggatttttgttattgctacatagacaacctgctatacagatttctgaaaaagtagaagcaggctcagtagtgggtagcaaacaaagattggaagggtttggagggattagattatgacagggagtgggagggagtgatttaatcatggatgggtgggggtggatgtggaagggaaaaaggggtgggtagggtgggagggagta

SEQ ID NO: 578580 - DNA, 513 bp, Homo sapiens
gatctggttgtttaacagatctcatcctcctgctcctgctttaggagacatctcattgtcccttggctttctgatataatgaggaggcttcctgattcctcccagaaacagaagacactatacttccttcacagcttgcagaaccatgagtcaattacacctcttttatttacaataatacagaaaagtagaactgcagagaggagctgtgaaatgccttcaaggcctttttccctttgttttggctattagcacagggattctttatatgcaaatttctgaaatcttcttgaatgtttccccttaaatgggatttttgttattgctacatagmcaacctgctatacagatttctgaaaaagtagaagcaggctcagtagtgggtagcaaacaaagattggaagggtttggagggattagattatgacagggagtgggagggagtgatttaatcatggatgggtgggggtggatgtggaagggaaaaaggggtgggtagggtgggagggagta

SEQ ID NO: 578581 - DNA, 566 bp, Homo sapiens
agcttgcagaaccatgagtcaattacacctcttttatttacaataatacagaaaagtagaactgcagagaggagctgtgaaatgccttcaaggcctttttccctttgttttggctattagcacagggattctttatatgcaaatttctgaaatcttcttgaatgtttccccttaaatgggatttttgttattgctacatagacaacctgctatacagatttctgaaaaagtagaagcaggctcagtagtgggtagcaaacaaagattggaagggtttggagggattagattatgacagggagtgggagggagtgatttaatcatggatgggtgggggtggatgtggaagggaaaaaggggtgggtagggtgsgagggagtagactggctgtacggtggtgggagggtggtgggtagtaggaaggggtagtagcctgctgcagaggcagagtctcatggaaaatccctactagggaagcgcacctgtggctttgcaggtttgagccccaatggctgctctcatggactggactagtgttgagtgcctgtagcttttccacatggagg

SEQ ID NO: 578582 - DNA, 566 bp, Homo sapiens
agcttgcagaaccatgagtcaattacacctcttttatttacaataatacagaaaagtagaactgcagagaggagctgtgaaatgccttcaaggcctttttccctttgttttggctattagcacagggattctttatatgcaaatttctgaaatcttcttgaatgtttccccttaaatgggatttttgttattgctacatagacaacctgctatacagatttctgaaaaagtagaagcaggctcagtagtgggtagcaaacaaagattggaagggtttggagggattagattatgacagggagtgggagggagtgatttaatcatggatgggtgggggtggatgtggaagggaaaaaggggtgggtagggtgggagggagtagactgrctgtacggtggtgggagggtggtgggtagtaggaaggggtagtagcctgctgcagaggcagagtctcatggaaaatccctactagggaagcgcacctgtggctttgcaggtttgagccccaatggctgctctcatggactggactagtgttgagtgcctgtagcttttccacatggagg

SEQ ID NO: 578583 - DNA, 549 bp, Homo sapiens
cagaaaattagtactatgaagtggagccatgaaatgccttcaaggccctttcccctttgtcttggcaaccagcactcagcttcttttcatgcaaatatctgaatccttcatgaactttccccctgaaaatggacttttctgttttaccacattgccaggctgtgataaagatagctgacaatgtagaaccaggttcagaagtgggtaaaagacagaggtcagaagagttggraaaacttagaagacagcaagatgaggaaaatattggaccactatagagaattgttaaatacttgtgataggaaggctgacaaaagtgtaaacactgaagtccagacctaaaagttctcagatgaaaatgaggaatttcctatgaacaagagacaagattacatttgattggccttagcaaagaagctggctgcatggggaccctgccctggagatctgtgaaactatgaacttgggggtgatgatttaggatgtatctggtgaaatgaacatctaggcagcatagcacaagaggtgtcctgcctacattgaacagct

SEQ ID NO: 578584 - DNA, 368 bp, Homo sapiens
tagcctgctgcaggggccgaggctcatggaaaacytctaccagggcagccacctgtggctttgcaggctttagccccatggctgctctcatgggctgggctggtgttgagagcctatcacttttccatactgagggtgtgaactgttggtaggtctatgaatctggggtctcgaggatggtggcctcctgcatagtcagtcaaagcccttattttccttctgcactgccatagtacaggattcccaagagcctctgcctctgcagcaggcttctgtctggaacactaggaggtggagctgtgttggggggcggatccttcaccaatggttaagcaccatcttcttgatgctgaccaagtgatagtgag

SEQ ID NO: 578585 - DNA, 368 bp, Homo sapiens
tagcctgctgcaggggccgaggctcatggaaaacttctaccagggcagccacctgtggctttgcaggctttagccccatggctgctctcatgggctgggctggtgttgagwgcctatcacttttccatactgagggtgtgaactgttggtaggtctatgaatctggggtctcgaggatggtggcctcctgcatagtcagtcaaagcccttattttccttctgcactgccatagtacaggattcccaagagcctctgcctctgcagcaggcttctgtctggaacactaggaggtggagctgtgttggggggcggatccttcaccaatggttaagcaccatcttcttgatgctgaccaagtgatagtgag

SEQ ID NO: 578586 - DNA, 591 bp, Homo sapiens
tcctactcctgccgtatgaaatatttcattgttgttttcctattggtatgattgggagtcttcctgagtcctcccagaagcaaaagccactatgctttctttacagcctgcagaaccatgagccaattaaaccccttttcattatgatcatacagaaaataaagtactgcgaagtggagctatgaaatatcttcaatgacatttccccatcgtcttggctattagcactggacttctttttaatgcaaatatctgaagcctttttgaagtttccccctgaaaatgtacttctttttcttctacattgtcaggctgcaacaaagatagctgaaaatgtaaagcaggttcagaagtgggtaacagccagaggttggagagtttggagagcttgaaagaagacaggaagatgaaagaaattttggaccatcgtaggcayttgttgaatagttgtgattaaaaggctggcagaatgatggacagtgaaggccaggcttacaaggtctcagatgaaaatgaggaaattactgggaacaggagccaaggttacttttgttttgctgtagcaaagaacatggctgcagggcgaccttg

SEQ ID NO: 578587 - DNA, 288 bp, Homo sapiens
ctccggggtttgattgtggcaaggatgctgctggtgtcaaaaccacaacgtgggaaccacagaaccactagtkggttttcagtgtttcagtgcatacaattcctaatatatctggccaagaaaacttggaagttcttagattgtcccaaaggtggcgcatgaaatcaaagcaggagaacagtttcctacgaggtgtagcctgggaaagttgggggtgactgacggaaaggaggagtgaagctcgccctttccgctgctaggctgcgcccgaggctatttaaacccacc

SEQ ID NO: 578588 - DNA, 293 bp, Homo sapiens
gtggatctccggggtttgattgtggcaaggatgctgctggtgtcaaaaccacaacgtgggaaccacagaaccactagttggttttcagtgtttcagtgcatacaattcctaatawatctggccaagaaaacttggaagttcttagattgtcccaaaggtggcgcatgaaatcaaagcaggagaacagtttcctacgaggtgtagcctgggaaagttgggggtgactgacggaaaggaggagtgaagctcgccctttccgctgctaggctgcgcccgaggctatttaaacccac

SEQ ID NO: 578589 - DNA, 288 bp, Homo sapiens
ctccggggtttgattgtggcaaggatgctgctggtgtcaaaaccacaacgtgggaaccacagaaccactagttggttttcagtgtttcagtgcatacaattcctaatatatctggcyaagaaaacttggaagttcttagattgtcccaaaggtggcgcatgaaatcaaagcaggagaacagtttcctacgaggtgtagcctgggaaagttgggggtgactgacggaaaggaggagtgaagctcgccctttccgctgctaggctgcgcccgaggctatttaaacccacc

SEQ ID NO: 578590 - DNA, 293 bp, Homo sapiens
gtggatctccggggtttgattgtggcaaggatgctgctggtgtcaaaaccacaacgtgggaaccacagaaccactagttggttttcagtgtttcagtgcatacaattcctaatatatctggccaagaaaacytggaagttcttagattgtcccaaaggtggcgcatgaaatcaaagcaggagaacagtttcctacgaggtgtagcctgggaaagttgggggtgactgacggaaaggaggagtgaagctcgccctttccgctgctaggctgcgcccgaggctatttaaacccac

SEQ ID NO: 578591 - DNA, 293 bp, Homo sapiens
gtggatctccggggtttgattgtggcaaggatgctgctggtgtcaaaaccacaacgtgggaaccacagaaccactagttggttttcagtgtttcagtgcatacaattcctaatatatctggccaagaaaacttgkaagttcttagattgtcccaaaggtggcgcatgaaatcaaagcaggagaacagtttcctacgaggtgtagcctgggaaagttgggggtgactgacggaaaggaggagtgaagctcgccctttccgctgctaggctgcgcccgaggctatttaaacccac

SEQ ID NO: 578592 - DNA, 293 bp, Homo sapiens
gtggatctccggggtttgattgtggcaaggatgctgctggtgtcaaaaccacaacgtgggaaccacagaaccactagttggttttcagtgtttcagtgcatacaattcctaatatatctggccaagaaaacttggaagttcttagattgtcccaaaggtggcgcatgaaatcaaagcaggagaacagtttcctacgaggtgtagcctgggaaagttgggggtgactgayggaaaggaggagtgaagctcgccctttccgctgctaggctgcgcccgaggctatttaaacccac

SEQ ID NO: 578593 - DNA, 288 bp, Homo sapiens
ctccggggtttgattgtggcaaggatgctgctggtgtcaaaaccacaacgtgggaaccacagaaccactagttggttttcagtgtttcagtgcatacaattcctaatatatctggccaagaaaacttggaagttcttagattgtcccaaaggtggcgcatgaaatcaaagcaggagaacagtttcctacgaggtgtagcctgggaaagttgggggtgactgacggaaaggaggagtgaagctcgccctttccgctgytaggctgcgcccgaggctatttaaacccacc

SEQ ID NO: 578594 - DNA, 527 bp, Homo sapiens
  misc_feature 1, 2, 3, 4, 5, 6, 7, 8, 9, 10, 11, 12, 13, 14, 15, 16, 17,18, 19, 20, 21, 22, 23, 24, 25, 26, 27, 28, 29, 30, 31,32, 33, 34, 35, 36, 37, 38, 39, 40, 41, 42, 43, 44, 45,46: n = A,T,C or G
nnnnnnnnnnnnnnnnnnnnnnnnnnnnnnnnnnnnnnnnnnnnnnctattcaaaacattaaaacagagacatctgacytaaagcttacattttttaaatcttttttatgcttctaaatttgtttttattcaaatatggataccaacaataacatttatgtcaatgtcttctgttcaatattgaacaaatagaattaggaataagaataatatgagtacatccaatcattgaatgtactttatttccagtattccattaaatgtacctgctctcaatgtctgtacattctttctttgtactgctcctttcacagcaggatcttccacttcagtgctaggctgaatgggttttaaaagaaaacgattcataaatcatatatattttatacaacatggagttagtgattcaaaaatatacataattaattaccttcaaggaaggatgttttgcaggaggccctacaaagcaaaggggatatgtcatcaattatatgtaagtatgacagggccaaacaaacattcatgca

SEQ ID NO: 578595 - DNA, 527 bp, Homo sapiens
  misc_feature 1, 2, 3, 4, 5, 6, 7, 8, 9, 10, 11, 12, 13, 14, 15, 16, 17,18, 19, 20, 21, 22, 23, 24, 25, 26, 27, 28, 29, 30, 31,32, 33, 34, 35, 36, 37, 38, 39, 40, 41, 42, 43, 44, 45,46: n = A,T,C or G
nnnnnnnnnnnnnnnnnnnnnnnnnnnnnnnnnnnnnnnnnnnnnnctattcaaaacattaaaacagagacatctgacttaaagcttacattttttaaatcttttttatgcttctaaatttgtttttattcaaatatggataccaacaataacatttatgtcaawgtcttctgttcaatattgaacaaatagaattaggaataagaataatatgagtacatccaatcattgaatgtactttatttccagtattccattaaatgtacctgctctcaatgtctgtacattctttctttgtactgctcctttcacagcaggatcttccacttcagtgctaggctgaatgggttttaaaagaaaacgattcataaatcatatatattttatacaacatggagttagtgattcaaaaatatacataattaattaccttcaaggaaggatgttttgcaggaggccctacaaagcaaaggggatatgtcatcaattatatgtaagtatgacagggccaaacaaacattcatgca

SEQ ID NO: 578596 - DNA, 527 bp, Homo sapiens
  misc_feature 1, 2, 3, 4, 5, 6, 7, 8, 9, 10, 11, 12, 13, 14, 15, 16, 17,18, 19, 20, 21, 22, 23, 24, 25, 26, 27, 28, 29, 30, 31,32, 33, 34, 35, 36, 37, 38, 39, 40, 41, 42, 43, 44, 45,46: n = A,T,C or G
nnnnnnnnnnnnnnnnnnnnnnnnnnnnnnnnnnnnnnnnnnnnnnctattcaaaacattaaaacagagacatctgacttaaagcttacattttttaaatcttttttatgcttctaaatttgtttttattcaaatatggataccaacaataacatttatgtcaatgycttctgttcaatattgaacaaatagaattaggaataagaataatatgagtacatccaatcattgaatgtactttatttccagtattccattaaatgtacctgctctcaatgtctgtacattctttctttgtactgctcctttcacagcaggatcttccacttcagtgctaggctgaatgggttttaaaagaaaacgattcataaatcatatatattttatacaacatggagttagtgattcaaaaatatacataattaattaccttcaaggaaggatgttttgcaggaggccctacaaagcaaaggggatatgtcatcaattatatgtaagtatgacagggccaaacaaacattcatgca

SEQ ID NO: 578597 - DNA, 527 bp, Homo sapiens
  misc_feature 1, 2, 3, 4, 5, 6, 7, 8, 9, 10, 11, 12, 13, 14, 15, 16, 17,18, 19, 20, 21, 22, 23, 24, 25, 26, 27, 28, 29, 30, 31,32, 33, 34, 35, 36, 37, 38, 39, 40, 41, 42, 43, 44, 45,46: n = A,T,C or G
nnnnnnnnnnnnnnnnnnnnnnnnnnnnnnnnnnnnnnnnnnnnnnctattcaaaacattaaaacagagacatctgacttaaagcttacattttttaaatcttttttatgcttctaaatttgtttttattcaaatatggataccaacaataacatttatgtcaatgtcttctgttcaatattgaacaaatagaattaggaataagaataatatgagtacatccaatcattgaatgtactttatttmcagtattccattaaatgtacctgctctcaatgtctgtacattctttctttgtactgctcctttcacagcaggatcttccacttcagtgctaggctgaatgggttttaaaagaaaacgattcataaatcatatatattttatacaacatggagttagtgattcaaaaatatacataattaattaccttcaaggaaggatgttttgcaggaggccctacaaagcaaaggggatatgtcatcaattatatgtaagtatgacagggccaaacaaacattcatgca

SEQ ID NO: 578598 - DNA, 541 bp, Homo sapiens
ggttttaaaagaaaacgattcataaatcatatatattttatacaacatggagttagtgattcaaaaatatacataattaattaccttcaaggaaggatgttttgcaggaggccctacaaagcaaaggggatatgtcatcaattatatgtaagtatgacagggccaamcaaacattcatgcagtgttactgtcgagctgaattctcaggcctggctataaaaataattacttaaggttttgagggttcttcttggcttcttcttttcattgcctaggacagcaacatgacagaaacacaatgaggaaaataggaatataggattcccaaaatgcacagtttacatttcagtagtgagattatgtttcaaatgcctatatttaaaatagaaaagcattgatataaccgtgaacacgtggactgatgaggagaaaagggaccattaaacagaggggcaaatcaaacctgagagaatcaatgtcaaagctgatggtgaatgtacagagtattttaactccacacaccagaggcactgctgccagc

SEQ ID NO: 578599 - DNA, 541 bp, Homo sapiens
ggttttaaaagaaaacgattcataaatcatatatattttatacaacatggagttagtgattcaaaaatatacataattaattaccttcaaggaaggatgttttgcaggaggccctacaaagcaaaggggatatgtcatcaattatatgtaagtatgacagggccaaacaaacattcatgcagtgttactgtcgagctgaattctcaggcctggctataaaaataattacttaaggttttgagggttcttcttggcttcttcttttcattgcctaggacagcaacatgacagaaacacaatgaggaaaataggaatataggattcccaaaatgcacagtttacatttcagtagtgagattatgtttcaaatgcctatayttaaaatagaaaagcattgatataaccgtgaacacgtggactgatgaggagaaaagggaccattaaacagaggggcaaatcaaacctgagagaatcaatgtcaaagctgatggtgaatgtacagagtattttaactccacacaccagaggcactgctgccagc

SEQ ID NO: 578600 - DNA, 600 bp, Homo sapiens
aatgtacagagtattttaactccacacaccagaggcactgctgccagcacagcacaaataaattccccttgtcttgtcactgaggaaatackcagttgggatgacagttcaggtgaatgtgtgattcacctctcatcaaagaaagggttctacattgatcagctaggatacacacttatgaaataacagctaatcaaactactcatttttcccatgatcacatgggctactgcagcacctacatttctcctatcccctcatttggccttgaattagagctccttgatccactcatgcaaggtggtccatgaaacacatcaaataaaccatgtcgaataagcttctgatatcaaaatatttatcaaaaaagaaaacattgaatgaccacagacttgctggatattaatacatatttatatttcaaaatcagtgcagtatttattgaaaatgataattttggttttcatggaatgaattttatgattacttctaaaattaactaagtttggtatattatcttacactgtaaaggacttttataaaacagctatcatatcaaagaactggctgtctcaaaaaaatttcgccaaagcatctata

SEQ ID NO: 578601 - DNA, 600 bp, Homo sapiens
aatgtacagagtattttaactccacacaccagaggcactgctgccagcacagcacaaataaattccccttgtcttgtcactgaggaaatacgcagttgggatgacagttcaggtgaatgtgkgattcacctctcatcaaagaaagggttctacattgatcagctaggatacacacttatgaaataacagctaatcaaactactcatttttcccatgatcacatgggctactgcagcacctacatttctcctatcccctcatttggccttgaattagagctccttgatccactcatgcaaggtggtccatgaaacacatcaaataaaccatgtcgaataagcttctgatatcaaaatatttatcaaaaaagaaaacattgaatgaccacagacttgctggatattaatacatatttatatttcaaaatcagtgcagtatttattgaaaatgataattttggttttcatggaatgaattttatgattacttctaaaattaactaagtttggtatattatcttacactgtaaaggacttttataaaacagctatcatatcaaagaactggctgtctcaaaaaaatttcgccaaagcatctata

SEQ ID NO: 578602 - DNA, 600 bp, Homo sapiens
aatgtacagagtattttaactccacacaccagaggcactgctgccagcacagcacaaataaattccccttgtcttgtcactgaggaaatacgcagttgggatgacagttcaggtgaatgtgtgattcacctctcatcaaagaaagggttctacattgatcagctaggatacacacttatgaaataacagctaatcaaastactcatttttcccatgatcacatgggctactgcagcacctacatttctcctatcccctcatttggccttgaattagagctccttgatccactcatgcaaggtggtccatgaaacacatcaaataaaccatgtcgaataagcttctgatatcaaaatatttatcaaaaaagaaaacattgaatgaccacagacttgctggatattaatacatatttatatttcaaaatcagtgcagtatttattgaaaatgataattttggttttcatggaatgaattttatgattacttctaaaattaactaagtttggtatattatcttacactgtaaaggacttttataaaacagctatcatatcaaagaactggctgtctcaaaaaaatttcgccaaagcatctata

SEQ ID NO: 578603 - DNA, 472 bp, Homo sapiens
ttgggatgacagttcaggtgaatgtgtgattcacctctcatcaaagaaagggttctacattgatcagctaggatacacacttatgaaataacagctaatcaaactactcatttttcccatgatcacatgggctactgcagcacctacatttctcctatcccctcatttggccttgaattagagctccttgatccactcatgcaaggtggtccatraaacacatcaaataaaccatgtcgaataagcttctgatatcaaaatatttatcaaaaaagaaaacattgaatgaccacagacttgctggatattaatacatatttatatttcaaaatcagtgcagtatttattgaaaatgataattttggttttcatggaatgaattttatgattacttctaaaattaactaagtttggtatattatcttacactgtaaaggacttttataaaacagctatcatatcaaagaactgg

SEQ ID NO: 578604 - DNA, 576 bp, Homo sapiens
accacagacttgctggatattaatacatatttatatttcaaaatcagtgcagtatttattgaaaatgataattttggttttcatggaatgaattttatgattacttctaaaattaactaagtttggtatattatcttacactgtaaaggacttttataaaacagctatcatatcaaagaactggctgtctcaaaaaaatttcgccaaagcatctatatgcaacttaatcatatcttattcactcatgtcagtgaaacttctctccctgaggcctgacagttatcaagtgaaatgagctgctgtggtttaccccaactctagcactccctcctgtctccagtactctccacagcaataacctcttttgtgagactgggcatatgctgaagcaactggaagtgagttgtctcaagtttacttggctttaactcccaagaccccagcaaatgtctttctttcctccttttgtgtccwttcaccatccctcttcctttgaaaaaatgattatcagaactgtcatcctgatgtttcccttcctaactgctttttatggatgattatggccattttttcatc

SEQ ID NO: 578605 - DNA, 627 bp, Homo sapiens
tatgcaacttaatcatatcttattcactcatgtcagtgaaacttctctccctgaggcctgacagttatcaagtgaaatgagctgctgtggtttaccccaactctagcactccctcctgtctccagtactctccacagcaataacctcttttgtgagactgggcatatgctgaagcaactggaagtgagttgtctcaagtttacttggctttaactcccaagaccccagcaaatgtctttctttcctccttttgtgtcctttcaccatccctcttcctttgaaaaaatgattatcagaactgtcatcctgatgyttcccttcctaactgctttttatggatgattatggccattttttcatctgtattcagcagtagtatacacttgtaatctctcttttttcatctcattttccttcccctgtggctagaatcatgctcagaaataaaaggaaattaaagctttccctggattctgttattttttaaattgctctccagtggttcttgttccagatttctctaaaggaaggctattcccttgctattcagagctgtgtccaaggaccagcacaaacatcacctgagtgctcatgagaaatgcagactccaatacctgctgagtcaga

SEQ ID NO: 578606 - DNA, 627 bp, Homo sapiens
tatgcaacttaatcatatcttattcactcatgtcagtgaaacttctctccctgaggcctgacagttatcaagtgaaatgagctgctgtggtttaccccaactctagcactccctcctgtctccagtactctccacagcaataacctcttttgtgagactgggcatatgctgaagcaactggaagtgagttgtctcaagtttacttggctttaactcccaagaccccagcaaatgtctttctttcctccttttgtgtcctttcaccatccctcttcctttgaaaaaatgattatcagaactgtcatcctgatgtttcccttcctaactgctttttatggatgattatggccattttttcatctgtattcagcagtagtatacacytgtaatctctcttttttcatctcattttccttcccctgtggctagaatcatgctcagaaataaaaggaaattaaagctttccctggattctgttattttttaaattgctctccagtggttcttgttccagatttctctaaaggaaggctattcccttgctattcagagctgtgtccaaggaccagcacaaacatcacctgagtgctcatgagaaatgcagactccaatacctgctgagtcaga

SEQ ID NO: 578607 - DNA, 523 bp, Homo sapiens
tttttcatctcattttccttcccctgtggctagaatcatgctcagaaataaaaggaaattaaagctttccctggattctgttatyttttaaattgctctccagtggttcttgttccagatttctctaaaggaaggctattcccttgctattcagagctgtgtccaaggaccagcacaaacatcacctgagtgctcatgagaaatgcagactccaatacctgctgagtcagaatgtgcactttccagaagctcctcaacgaattcatgacaatttgaatgccctgttctacactggtgtgcttccatattggtttaccctaattggcctttttggctagcctcaacttctttcctattatgtccctgaatttaatactatgttataagccataatgtttctaatgaacttttaatcaggcaaagcttatctaattaatttcttcccaataaatcacccaacactattcttttcaattatgttaatatgatactatcctatgaagttacaacattttctataaaa

SEQ ID NO: 578608 - DNA, 523 bp, Homo sapiens
tttttcatctcattttccttcccctgtggctagaatcatgctcagaaataaaaggaaattaaagctttccctggattctgttattttttaaattgctctccagtggttcttkttccagatttctctaaaggaaggctattcccttgctattcagagctgtgtccaaggaccagcacaaacatcacctgagtgctcatgagaaatgcagactccaatacctgctgagtcagaatgtgcactttccagaagctcctcaacgaattcatgacaatttgaatgccctgttctacactggtgtgcttccatattggtttaccctaattggcctttttggctagcctcaacttctttcctattatgtccctgaatttaatactatgttataagccataatgtttctaatgaacttttaatcaggcaaagcttatctaattaatttcttcccaataaatcacccaacactattcttttcaattatgttaatatgatactatcctatgaagttacaacattttctataaaa

SEQ ID NO: 578609 - DNA, 523 bp, Homo sapiens
tttttcatctcattttccttcccctgtggctagaatcatgctcagaaataaaaggaaattaaagctttccctggattctgttattttttaaattgctctccagtggttcttgttccagatttctctaaaggaaggctattcccttgctattcagagctgtgtccaaggaccagcacaaacatcacctgagtgctcatgagaaatgcagactccaatacctgctgagtcagaatgtgcactttccagaagctcctcaacgaattcatgacaatttgaatgccctgttctacactggtgtgcttccatattggtttaccctaattggcctttttggctagcctcaacttctttcctattatgtccctgaatttaatactaygttataagccataatgtttctaatgaacttttaatcaggcaaagcttatctaattaatttcttcccaataaatcacccaacactattcttttcaattatgttaatatgatactatcctatgaagttacaacattttctataaaa

SEQ ID NO: 578610 - DNA, 523 bp, Homo sapiens
tttttcatctcattttccttcccctgtggctagaatcatgctcagaaataaaaggaaattaaagctttccctggattctgttattttttaaattgctctccagtggttcttgttccagatttctctaaaggaaggctattcccttgctattcagagctgtgtccaaggaccagcacaaacatcacctgagtgctcatgagaaatgcagactccaatacctgctgagtcagaatgtgcactttccagaagctcctcaacgaattcatgacaatttgaatgccctgttctacactggtgtgcttccatattggtttaccctaattggcctttttggctagcctcaacttctttcctattatgtccctgaatttaatactatgttataagccataatgtttctaatgaacttttaatcaggcaaagcttmtctaattaatttcttcccaataaatcacccaacactattcttttcaattatgttaatatgatactatcctatgaagttacaacattttctataaaa

SEQ ID NO: 578611 - DNA, 285 bp, Homo sapiens
agtgtgcaccaccacacccagccctaatcaatttctttaaatcaatctcaatgttgcccaggcatggtggctcwcacctgtaatctcagccctttgcaaggccaaggtgggtggattgcttgagttcaggagttggaaacaagcctgggcaacataatgagaacacatctctacacaaaaaataccaaaaggagtcaggcatgatggtgtgtgcctgtagtcccagctgcttgggaagctgaagtgggaggatcacttgagcctcagaggtggatacagcagtga

SEQ ID NO: 578612 - DNA, 573 bp, Homo sapiens
caggcatgatggtgtgtgcctgtagtcccagctgcttgggaagctgaagtgggaggatcacttgagcctcagaggtggatacagcagtgagccaagatcatgccactacactgcagcatgaacaacagagcaagaccctgcctccccaaaaatttcaatttaaaatgtgagaacaaagagagatacaaacaaaaaacaagcctaattagtcaaygaaatatgagcttaagccaagaaagaaaacgaaaaacatgaagtacaataaagtacatggggaaatagatctataacagagccttcggtctttcataactctgataatactaattaatatttatgctgcaattagttttttgtaagtacttctgtgatagtgtttcttactataagacattcaattagctaaatatggtcatctaccattacctgaaagaacattattataacagagagagaaaactggaactttccatcaactttccacccagaaaaagaattggtcaccagaattctaaagagtaatgtatggcagacacatgaaaaaaatgctcatcatcactggccatcagaaaa

SEQ ID NO: 578613 - DNA, 573 bp, Homo sapiens
caggcatgatggtgtgtgcctgtagtcccagctgcttgggaagctgaagtgggaggatcacttgagcctcagaggtggatacagcagtgagccaagatcatgccactacactgcagcatgaacaacagagcaagaccctgcctccccaaaaatttcaatttaaaatgtgagaacaaagagagatacaaacaaaaaacaagcctaattagtcaacgaaatatgagcttaagccaagaaagaaaacgaaaarcatgaagtacaataaagtacatggggaaatagatctataacagagccttcggtctttcataactctgataatactaattaatatttatgctgcaattagttttttgtaagtacttctgtgatagtgtttcttactataagacattcaattagctaaatatggtcatctaccattacctgaaagaacattattataacagagagagaaaactggaactttccatcaactttccacccagaaaaagaattggtcaccagaattctaaagagtaatgtatggcagacacatgaaaaaaatgctcatcatcactggccatcagaaaa

SEQ ID NO: 578614 - DNA, 573 bp, Homo sapiens
caggcatgatggtgtgtgcctgtagtcccagctgcttgggaagctgaagtgggaggatcacttgagcctcagaggtggatacagcagtgagccaagatcatgccactacactgcagcatgaacaacagagcaagaccctgcctccccaaaaatttcaatttaaaatgtgagaacaaagagagatacaaacaaaaaacaagcctaattagtcaacgaaatatgagcttaagccaagaaagaaaacgaaaaacatgaagtayaataaagtacatggggaaatagatctataacagagccttcggtctttcataactctgataatactaattaatatttatgctgcaattagttttttgtaagtacttctgtgatagtgtttcttactataagacattcaattagctaaatatggtcatctaccattacctgaaagaacattattataacagagagagaaaactggaactttccatcaactttccacccagaaaaagaattggtcaccagaattctaaagagtaatgtatggcagacacatgaaaaaaatgctcatcatcactggccatcagaaaa

SEQ ID NO: 578615 - DNA, 570 bp, Homo sapiens
tgtaaccctctttgctaccgatgacctctttctattttatttcctttttaattatggcataatttctcaamataacatgtcaaaacttatacacccttaaatattaaaaaataatacaatgtaagcaatattttaaatacaatatttaatgattagatacattaggtttattatattacttataacattccattatataaaaattcatttgtttatttattcagattaaacaactattaaggctgaatgtctcatgtctgtaaccccagcactttgagaggctgaggcgagcagaacacttgagcccaatagttaaagaagagcctgggcaacaaggcaaaaccctatctctacaaaactcagcacagcatggtgacacaggtctatggtgacatagctctattgtttcaactacttggatggctgaggtgtgaggatcacctgagcctaggaaatggagatcggagtgagccaagatctcaccagtgccctccagcctgggtgacagagtgaaaccccatctcaaaaaacaacaagtaaaatgcttcttacatggaagactgtattcta

SEQ ID NO: 578616 - DNA, 404 bp, Homo sapiens
ataatttctcaaaataacatgtcaaaacttatacacccttaaatattaaaaaataatacaatgtaagcaatattttaaatacaatatttaatgattagatacattaggtttattatattacttataacattccattatataaaaattcatttgtttatttattcagattaaacaactattaaggctgaatgtctcatgtctgtaaccccagcactttgagaggctgaggcgagcagaacacttgagcccaayagttaaagaagagcctgggcaacaaggcaaaaccctatctctacaaaactcagcacagcatggtgacacaggtctatggtgacatagctctattgtttcaactacttggatggctgaggtgtgaggatcacctgagcctaggaaatggagat

SEQ ID NO: 578617 - DNA, 404 bp, Homo sapiens
ataatttctcaaaataacatgtcaaaacttatacacccttaaatattaaaaaataatacaatgtaagcaatattttaaatacaatatttaatgattagatacattaggtttattatattacttataacattccattatataaaaattcatttgtttatttattcagattaaacaactattaaggctgaatgtctcatgtctgtaaccccagcactttgagaggctgaggcgagcagaacacttgagcccaatagttaaagaagagcctgggcaacaaggcaaaaccctatctctacaaaactcagcmcagcatggtgacacaggtctatggtgacatagctctattgtttcaactacttggatggctgaggtgtgaggatcacctgagcctaggaaatggagat

SEQ ID NO: 578618 - DNA, 457 bp, Homo sapiens
gcaactgggattacaggcatgcactatcatgcctggataatttttgtgctttttttttttttagggacagggtttcaccatgttggccaggctgatcttgaactcctgacctcaggtgatctayccacctcggcctccaaaagtgctgggatcacaggtgtgagccaccacgcctggccaagtaaatattttaaataaactacaatgacaaaattatgatgataaagacttaccatattggtattaagagtctctgcttctagaactggttatttgcaggaaaatacatgttattcaattagatgaagtgttttatataaactcttcatggacaactcataaatcacataaaaatccctttgcaatacaaatcttgagaacataaatttaaatttctacatttccacaatttatatttttaaatcagatacaatgttgcccaggctgttctcaaact

SEQ ID NO: 578619 - DNA, 457 bp, Homo sapiens
gcaactgggattacaggcatgcactatcatgcctggataatttttgtgctttttttttttttagggacagggtttcaccatgttggccaggctgatcttgaactcctgacctcaggtgatctatccacctcggcctccaaaagtgctgggatyacaggtgtgagccaccacgcctggccaagtaaatattttaaataaactacaatgacaaaattatgatgataaagacttaccatattggtattaagagtctctgcttctagaactggttatttgcaggaaaatacatgttattcaattagatgaagtgttttatataaactcttcatggacaactcataaatcacataaaaatccctttgcaatacaaatcttgagaacataaatttaaatttctacatttccacaatttatatttttaaatcagatacaatgttgcccaggctgttctcaaact

SEQ ID NO: 578620 - DNA, 540 bp, Homo sapiens
caatgacaaaattatgatgataaagacttaccatattggtattaagagtctctgcttctagaactggttatttgcaggaaaatacatgttattcaattagatgaagtgttttatataaactcttcatggacaactcataaatcacataaaaatccctttgcaatacaaatcttgagaacataaatttaaatttctacatttccacaatttatatttttaaatcagatacaatgttgcccaggctgttctcaaactcctgtgttcaagcratcttactgtctcaaactcccaagtagcagggactacaggtgtacgccaccaaactcagctatttttctacaatttttaatacttttttgtctctctacagaaccaataatataagtagagaaacaatctctcctaaaaactatgtggcaccaaaatgataagtttccaagaacaaaagctatatgctatgtgctgaacatttctgccactaaaaattaccaggaggattccatgattactgcaaacaatttgatccactgaagatttata

SEQ ID NO: 578621 - DNA, 540 bp, Homo sapiens
caatgacaaaattatgatgataaagacttaccatattggtattaagagtctctgcttctagaactggttatttgcaggaaaatacatgttattcaattagatgaagtgttttatataaactcttcatggacaactcataaatcacataaaaatccctttgcaatacaaatcttgagaacataaatttaaatttctacatttccacaatttatatttttaaatcagatacaatgttgcccaggctgttctcaaactcctgtgttcaagcgatcttactgtctcaaactcccaagtagcagggactacaggtgtacrccaccaaactcagctatttttctacaatttttaatacttttttgtctctctacagaaccaataatataagtagagaaacaatctctcctaaaaactatgtggcaccaaaatgataagtttccaagaacaaaagctatatgctatgtgctgaacatttctgccactaaaaattaccaggaggattccatgattactgcaaacaatttgatccactgaagatttata

SEQ ID NO: 578622 - DNA, 540 bp, Homo sapiens
caatgacaaaattatgatgataaagacttaccatattggtattaagagtctctgcttctagaactggttatttgcaggaaaatacatgttattcaattagatgaagtgttttatataaactcttcatggacaactcataaatcacataaaaatccctttgcaatacaaatcttgagaacataaatttaaatttctacatttccacaatttatatttttaaatcagatacaatgttgcccaggctgttctcaaactcctgtgttcaagcgatcttactgtctcaaactcccaagtagcagggactacaggtgtacgccaccaaactcagctatttttctacaatttttaatacttttttgtctctctacagaaccaataatataagtagagaaacaatctctcctaaaaactatrtggcaccaaaatgataagtttccaagaacaaaagctatatgctatgtgctgaacatttctgccactaaaaattaccaggaggattccatgattactgcaaacaatttgatccactgaagatttata

SEQ ID NO: 578623 - DNA, 540 bp, Homo sapiens
caatgacaaaattatgatgataaagacttaccatattggtattaagagtctctgcttctagaactggttatttgcaggaaaatacatgttattcaattagatgaagtgttttatataaactcttcatggacaactcataaatcacataaaaatccctttgcaatacaaatcttgagaacataaatttaaatttctacatttccacaatttatatttttaaatcagatacaatgttgcccaggctgttctcaaactcctgtgttcaagcgatcttactgtctcaaactcccaagtagcagggactacaggtgtacgccaccaaactcagctatttttctacaatttttaatacttttttgtctctctacagaaccaataatataagtagagaaacaatctctcctaaaaactatgtgrcaccaaaatgataagtttccaagaacaaaagctatatgctatgtgctgaacatttctgccactaaaaattaccaggaggattccatgattactgcaaacaatttgatccactgaagatttata

SEQ ID NO: 578624 - DNA, 608 bp, Homo sapiens
actgctaaatttgaaaagtaaatrctatgcaaaactacactcagagtgagaagattaattttacaagagaccactttaccttagtagcaacactcaagtcttcatcatccaatgtaggcaatgaatccacacacagttcatgcaaaatgcttgagagcaaaaatacacaatgaaaatgagcaagttgatttctttacaatttttttaactgccagtttatatccagcttccccctcaaaaaaaggaaaacataatctggggaaaggtcagtgatctatatattaaattatgattcttgatataattaaaatatatcctctgttctaaaaatagattttagttacctatttctgcctccacctgtctaaatctataaaatattcaatgaaaactaaccttgaggtttataacaaatagtgacagtcaatatattggcagagcctgacaataatgtgccctcacaaattatctgtcctgaagctgaacttaaaattcaattagtggatgacataaattttgttccctaaactggaataaaactgatgacctaaaacaaggtagaaagatccactatctcttttccgtgatctgtctctggataaaagact

SEQ ID NO: 578625 - DNA, 646 bp, Homo sapiens
ccctgtcacagtacttaccaatctttattagttaccaaactgaaacacattttttgaatcaactagccatgtgtatgtttttctctgaccagctttccattaccaccataaaacaatgataggtaaaccactgctaaatttgaaaagtaaatactatgcaaaactacacycagagtgagaagattaattttacaagagaccactttaccttagtagcaacactcaagtcttcatcatccaatgtaggcaatgaatccacacacagttcatgcaaaatgcttgagagcaaaaatacacaatgaaaatgagcaagttgatttctttacaatttttttaactgccagtttatatccagcttccccctcaaaaaaaggaaaacataatctggggaaaggtcagtgatctatatattaaattatgattcttgatataattaaaatatatcctctgttctaaaaatagattttagttacctatttctgcctccacctgtctaaatctataaaatattcaatgaaaactaaccttgaggtttataacaaatagtgacagtcaatatattggcagagcctgacaataatgtgccctcacaaattatctgtcctgaagctgaacttaaaattcaattagtggatgacataaattt

SEQ ID NO: 578626 - DNA, 646 bp, Homo sapiens
ccctgtcacagtacttaccaatctttattagttaccaaactgaaacacattttttgaatcaactagccatgtgtatgtttttctctgaccagctttccattaccaccataaaacaatgataggtaaaccactgctaaatttgaaaagtaaatactatgcaaaactacactcagagtgagaagattaattttacaagagaccactttaccttagtagcaacactcaagtcttcatcatccaatgtaggcaatgaatccacacacagttcatgcaaaatgcttgagagcaaaaatacacaatgaaaatgagcaagttgatttctttacaatttttttaactgccagtttatatccagcttccccctcaaaaaaaggaaaacataatctggggaaargtcagtgatctatatattaaattatgattcttgatataattaaaatatatcctctgttctaaaaatagattttagttacctatttctgcctccacctgtctaaatctataaaatattcaatgaaaactaaccttgaggtttataacaaatagtgacagtcaatatattggcagagcctgacaataatgtgccctcacaaattatctgtcctgaagctgaacttaaaattcaattagtggatgacataaattt

SEQ ID NO: 578627 - DNA, 646 bp, Homo sapiens
ccctgtcacagtacttaccaatctttattagttaccaaactgaaacacattttttgaatcaactagccatgtgtatgtttttctctgaccagctttccattaccaccataaaacaatgataggtaaaccactgctaaatttgaaaagtaaatactatgcaaaactacactcagagtgagaagattaattttacaagagaccactttaccttagtagcaacactcaagtcttcatcatccaatgtaggcaatgaatccacacacagttcatgcaaaatgcttgagagcaaaaatacacaatgaaaatgagcaagttgatttctttacaatttttttaactgccagtttatatccagcttccccctcaaaaaaaggaaaacataatctggggaaaggtcagtgatctatatattaaattaygattcttgatataattaaaatatatcctctgttctaaaaatagattttagttacctatttctgcctccacctgtctaaatctataaaatattcaatgaaaactaaccttgaggtttataacaaatagtgacagtcaatatattggcagagcctgacaataatgtgccctcacaaattatctgtcctgaagctgaacttaaaattcaattagtggatgacataaattt

SEQ ID NO: 578628 - DNA, 471 bp, Homo sapiens
cttccccctcaaaaaaaggaaaacataatctggggaaaggtcagtgatctatatattaaattatgattcttgatataattaaaatatrtcctctgttctaaaaatagattttagttacctatttctgcctccacctgtctaaatctataaaatattcaatgaaaactaaccttgaggtttataacaaatagtgacagtcaatatattggcagagcctgacaataatgtgccctcacaaattatctgtcctgaagctgaacttaaaattcaattagtggatgacataaattttgttccctaaactggaataaaactgatgacctaaaacaaggtagaaagatccactatctcttttccgtgatctgtctctggataaaagactaatctacatcacttcaaaatggtagtcttgattcctcagcatggatccaacttaggaaggtcctattgctttcctttaccctaaattgg

SEQ ID NO: 578629 - DNA, 602 bp, Homo sapiens
aatgaatccacacacagttcatgcaaaatgcttgagagcaaaaatacacaatgaaaatgagcaagttgatttctttacaatttttttaactgccagtttatatccagcttccccctcaaaaaaaggaaaacataatctggggaaaggtcagtgatctatatattaaattatgattcttgatataattaaaatatatcctctgttctaaaaatagattttagttacctatttctgcctccacctgtctaaatctataaaatattcaatgaaaactaaccttgaggtttataacaaatagtgacagtcaatatattggcagagcctgacaataatgtgccctcacaaattatctgtcctgaagctgaacttaaaattcaattartggatgacataaattttgttccctaaactggaataaaactgatgacctaaaacaaggtagaaagatccactatctcttttccgtgatctgtctctggataaaagactaatctacatcacttcaaaatggtagtcttgattcctcagcatggatccaacttaggaaggtcctattgctttcctttaccctaaattggtacaggaaagcccccacaatattt

SEQ ID NO: 578630 - DNA, 415 bp, Homo sapiens
tttataacaaatagtgacagtcaatatattggcagagcctgacaataatgtgccctcacaaattatctgtcctgaagctgaacttaaaattcaattagtggatgacataaattttgttccctaaactggaataaaactsatgacctaaaacaaggtagaaagatccactatctcttttccgtgatctgtctctggataaaagactaatctacatcacttcaaaatggtagtcttgattcctcagcatggatccaacttaggaaggtcctattgctttcctttaccctaaattggtacaggaaagcccccacaatatttgaaatgtatgaaagctaaatgtacagaagtcaaatagcaaaggtgtatgttcttattgagaatacttttcccagaaatattaaaatattaacaatta

SEQ ID NO: 578631 - DNA, 530 bp, Homo sapiens
ttagttacctatttctgcctccacctgtctaaatctataaaatattcaatgaaaactaaccttgaggtttataacaaatagtgacagtcaatatattggcagagcctgacaataatgtgccctcacaaattatctgtcctgaagctgaacttaaaattcaattagtggatgacataaattttgttccctaaactggaataaaactgatgacctaaaacaaggtagaaagatccactatctcttttccgtgatctgtctctggataaaagactaatctacatcacttcaaaatggtagtcttgattcctcagcatggatccaacttaggaaggtcctattgctttcctttaccctaaattggtacaggaaagcccccacaatatttgaaatgtatgaaagctaaatgtacagaagtcaaatagcaaaggtgtatgttcttattgagaatacttttcccagaaakattaaaatattaacaattataaaatcccattattttcactctataggtcctaccttattcaggtcca

SEQ ID NO: 578632 - DNA, 438 bp, Homo sapiens
tgccagaaaagaaacagagtcatgatagttgtacctctatttccctaagtactatctaagtatatttcttcctatggacacccacttccagattctacttctgcagggttccacagaagtctccaatcttcaaatcttcagtgtatgaaagcacagattcctgaaagaatggcctcaaatgaccaggagtaggagctctctatatccctgctcctgaaaaacaagctaactggagtctccatcacctgccaccagctatacacactaccaactaccyaactgaactccatgactgatttgccagctaatcatgcccctaacccagcccacatggacatgggaaggacatcagtgaactgtgaaaagaggcagaggtgaggagacacctgccctgtgccacacatctatgtagttcagcaatttccagccccttagtac

SEQ ID NO: 578633 - DNA, 438 bp, Homo sapiens
tgccagaaaagaaacagagtcatgatagttgtacctctatttccctaagtactatctaagtatatttcttcctatggacacccacttccagattctacttctgcagggttccacagaagtctccaatcttcaaatcttcagtgtatgaaagcacagattcctgaaagaatggcctcaaatgaccaggagtaggagctctctatatccctgctcctgaaaaacaagctaactggagtctccatcacctgccaccagctatacacactaccaactacctaactgaactccatgactgatttgccagctaatcatgcccctracccagcccacatggacatgggaaggacatcagtgaactgtgaaaagaggcagaggtgaggagacacctgccctgtgccacacatctatgtagttcagcaatttccagccccttagtac

SEQ ID NO: 578634 - DNA, 587 bp, Homo sapiens
cctgctcctgaaaaacaagctaactggagtctccatcacctgccaccagctatacacactaccaactacctaactgaactccatgactgatttgccagctaatcatgcccctaacccagcccacatggacatgggaaggacatcagtgaactgtgaaaagaggcagaggtgaggagacacctgccctgtgccacacatctatgtagttcagcaatttccagccccttagtactccaggggctctaagccacccctttgtaagtcaggatggaagtagatgacaccacatttctatctgctgtagacattcttcccagtgtctcaaaatgttttggcatctttcagtaaaaatcttcaagtttgtcagtccttgatttaaaaaaaaagcagcaaaatttttagagctcccttgaaccttctattttaatgtgcctttgtagataattcccaacatcttgtgtccttcatttttataatttatctttatcaaacttgtcataaaccccaatactttgatctcttgtagaagagttcatactcctatccartccagtgttgtttatcttcaaacttggacttcccctgct

SEQ ID NO: 578635 - DNA, 329 bp, Homo sapiens
taaaaagaagcaagaatactgggctttaccatgagttcaaatctcatttctgccaattcctatgtctaaaaaaamcagcttcctaatctctttgagcctcacattctctaactagagaatcacttgaccagaatgttcaacgcagataaaaatactagaaggtattttaattcattccaagattccttaaaattctgtaattctatgtcctcttgattctgtctatagaaaaacttggaatacataggcagcagagtttgaaaaaataatagaacaaaagaaacaccaagaaaaacagagaagaaagttttaaaaaatgaagacaagat

SEQ ID NO: 578636 - DNA, 329 bp, Homo sapiens
taaaaagaagcaagaatactgggctttaccatgagttcaaatctcatttctgccaattcctatgtctaaaaaaacmagcttcctaatctctttgagcctcacattctctaactagagaatcacttgaccagaatgttcaacgcagataaaaatactagaaggtattttaattcattccaagattccttaaaattctgtaattctatgtcctcttgattctgtctatagaaaaacttggaatacataggcagcagagtttgaaaaaataatagaacaaaagaaacaccaagaaaaacagagaagaaagttttaaaaaatgaagacaagat

SEQ ID NO: 578637 - DNA, 373 bp, Homo sapiens
aagaaacaccaagaaaaacagagaagaaagttttaaaaaatgaagacaagattatataaaagtcatggaaaaagcaacaagactaaaraatgtattatggaagtaagcagaaatacttgcctaaatggaaaaccaaactgggaagtcaaataatttgtctctaagacttgcctaaacttgctttggtaaaacttacagtcctatggccaaagctaagtcagatctgccctagagcctttgaaggtaaaaataagatactggttaccactgaaatcgtcaaatttattaggactaaccacattctaacaataaacttaaatgagagttcaaggtatttaaactctcattaatttagaagttaatcaaattaatg

SEQ ID NO: 578638 - DNA, 620 bp, Homo sapiens
gcctaaatggaaaaccaaactgggaagtcaaataatttgtctctaagacttgcctaaacttgctttggtaaaacttacagtcctatggccaaagctaagtcagatctgccctagagcctttgaaggtaaaaataagatactggttaccactgaaatcgtcaaatttattaggactaaccacattctaacaataaacttaaatgagagttcaaggtatttaaactctcattaatttagaagttaatcaaattaatgaatctgattgatctgattcagacctatactttgatccaagggctgcacagatatctatcaatctatgctgaggagcaagagaaaggatttggaaggcaggcaggctgatggtcaaactgtaggccagctactttgttaacyatgggatcatgaggcaattaatcagctctaatccatagttgtttatttaacagtaggttataggaacacagatgttatgatggctttatgagatgacaaatgcatagaacatattaggatgtctagcccagaatacaacactcaacagatattagtttcttccatctatattttcttagttcacataatttttaaatctatgaaatcttacctgactgcagatt

SEQ ID NO: 578639 - DNA, 620 bp, Homo sapiens
gcctaaatggaaaaccaaactgggaagtcaaataatttgtctctaagacttgcctaaacttgctttggtaaaacttacagtcctatggccaaagctaagtcagatctgccctagagcctttgaaggtaaaaataagatactggttaccactgaaatcgtcaaatttattaggactaaccacattctaacaataaacttaaatgagagttcaaggtatttaaactctcattaatttagaagttaatcaaattaatgaatctgattgatctgattcagacctatactttgatccaagggctgcacagatatctatcaatctatgctgaggagcaagagaaaggatttggaaggcaggcaggctgatggtcaaactgtaggccagctactttgttaaccatgggatcatgaggcaattaatcagctctaatccatagttgtttatttaacagtaggttataggaacacagatgttatgatggctttatgagatgayaaatgcatagaacatattaggatgtctagcccagaatacaacactcaacagatattagtttcttccatctatattttcttagttcacataatttttaaatctatgaaatcttacctgactgcagatt

SEQ ID NO: 578640 - DNA, 520 bp, Homo sapiens
gtggtttccttagttgtagctatttgctctggcctacgtataacaaggcccaaattcacctgccattttacctcccacagaaagaaccactggaaagatcactcctttaagagcttatccacattcagagagaagctgaataaacactggggaggtatggcaggctgccgggcaatattatctgatgtgaaaaaatatatagaaagaaaaytatcaatgcccttttactaccagaatgttctaatgcttgcccatctccctagtagcagaaaaaatttttttcacctcgcataaagcaaaactcccttgtcatctctcatgacagaatctagttttaggtgagtcatgtcatcataatacaggctgttgtcaacctcatccctcaaaggaagaggatcagtgaggaacttatgtatttacctaatagcattcactgcctggtcttatttccaaccgaaggtaagtatgaaagactttgtgactccagttttataaagcataaccctttacactcctcccc

SEQ ID NO: 578641 - DNA, 520 bp, Homo sapiens
gtggtttccttagttgtagctatttgctctggcctacgtataacaaggcccaaattcacctgccattttacctcccacagaaagaaccactggaaagatcactcctttaagagcttatccacattcagagagaagctgaataaacactggggaggtatggcaggctgccgggcaatattatctgatgtgaaaaaatatatagaaagaaaattatcaatgcccttttactaccagaatgttctaatgcttgcccatctccctagtagcagaaaaaatttttttcacctcgcataaagcaaaactcccttgtcatctctcatgacagaatctagttktaggtgagtcatgtcatcataatacaggctgttgtcaacctcatccctcaaaggaagaggatcagtgaggaacttatgtatttacctaatagcattcactgcctggtcttatttccaaccgaaggtaagtatgaaagactttgtgactccagttttataaagcataaccctttacactcctcccc

SEQ ID NO: 578642 - DNA, 520 bp, Homo sapiens
gtggtttccttagttgtagctatttgctctggcctacgtataacaaggcccaaattcacctgccattttacctcccacagaaagaaccactggaaagatcactcctttaagagcttatccacattcagagagaagctgaataaacactggggaggtatggcaggctgccgggcaatattatctgatgtgaaaaaatatatagaaagaaaattatcaatgcccttttactaccagaatgttctaatgcttgcccatctccctagtagcagaaaaaatttttttcacctcgcataaagcaaaactcccttgtcatctctcatgacagaatctagttttaggtgagtcatgtcatcataatacaggctgttgtcaacctcatccctcaaaggaagaggatcagtgaggaacttatgtatttacctaatagcattcactgcctggtcttatttccaaccgaaggtaagtatgaaagactttgtgaytccagttttataaagcataaccctttacactcctcccc

SEQ ID NO: 578643 - DNA, 580 bp, Homo sapiens
gctgtgtagtacggcgtgatgtccttttcctcaactctttctattatgtgccacatatctataaaaatcatgttttctaagtatgtaaatcatatctcatcagaatacatcattctttacaatgataaagaagcaaaagaaaaacaaaaggacraagaacatcttaaatgactacattcaactgccatggagctttaattttttaactactcaaaaagatatccactcttcttattccaactatatgactcttctgaaaaaagtaaaactatgaagacaagtaaacatcaatggttgtcacgagttgctagggagaaagggagagatgaacagacatagcacagagaatttttagggcggtgaaactgttctgtcgataatattacagtaatagatacatgtcatgtcattatacatttgtccaaattcacagaatgtacagcatcaagagtgaggcctgatgtaaactatgaacttcaagtgattataatgtgtcaatgtaagttcatgagttgtaacaaatggaccactctctggtggaaaatactaataatgggggaggctatgcgtgtgtgggagg

SEQ ID NO: 578644 - DNA, 580 bp, Homo sapiens
gctgtgtagtacggcgtgatgtccttttcctcaactctttctattatgtgccacatatctataaaaatcatgttttctaagtatgtaaatcatatctcatcagaatacatcattctttacaatgataaagaagcaaaagaaaaacaaaaggacgaagaacatcttaaatgactacattcaactgccatggagctttaatttyttaactactcaaaaagatatccactcttcttattccaactatatgactcttctgaaaaaagtaaaactatgaagacaagtaaacatcaatggttgtcacgagttgctagggagaaagggagagatgaacagacatagcacagagaatttttagggcggtgaaactgttctgtcgataatattacagtaatagatacatgtcatgtcattatacatttgtccaaattcacagaatgtacagcatcaagagtgaggcctgatgtaaactatgaacttcaagtgattataatgtgtcaatgtaagttcatgagttgtaacaaatggaccactctctggtggaaaatactaataatgggggaggctatgcgtgtgtgggagg

SEQ ID NO: 578645 - DNA, 564 bp, Homo sapiens
ttttagggcggtgaaactgttctgtcgataatattacagtaatagatacatgtcatgtcattatacatttgtccaaattcacagaatgtacagcatcaagagtgaggcctgatgtaaactatgaacttcaagtgattataatgtgtcaatgtaagttcatsagttgtaacaaatggaccactctctggtggaaaatactaataatgggggaggctatgcgtgtgtgggaggcatgggatatatgagaaatctctgtaccttcctctcaattttgctgtgaacctaaaacgactctaagaaataaggttattgatttaaaaaaatattcagctgggctcagtggctcatgcctgtaatctcagcactttgggaggcaaaggtgggtggatcacctgaggtcaggagttcaagaccagcctggccaacatggcaaaacctcatctctaataaaaatacaaaaattagctgggcatggtagctggcacctgtaatttcagctacccgggaggctgaggcaggagaatcgcttgagcctagaaagcagaggttgcagttaaccaagat

SEQ ID NO: 578646 - DNA, 461 bp, Homo sapiens
agcatcaagagtgaggcctgatgtaaactatgaacttcaagtgattataatgtgtcaatgtaagttcatgagttgtaacaaatggaccactctctggtggaaaatactaataatgggggaggctatgcgtgtgtgggaggcatgggatatatgagaaatctctgtaccttcctctcaattttgctgtgaacctaaaackactctaagaaataaggttattgatttaaaaaaatattcagctgggctcagtggctcatgcctgtaatctcagcactttgggaggcaaaggtgggtggatcacctgaggtcaggagttcaagaccagcctggccaacatggcaaaacctcatctctaataaaaatacaaaaattagctgggcatggtagctggcacctgtaatttcagctacccgggaggctgaggcaggagaatcgcttgagcctagaaagcagaggttgca

SEQ ID NO: 578647 - DNA, 541 bp, Homo sapiens
aaccagcgctgcaacttaagatggatcatacaacagaaattagtaccaagttaccttatcttataatattatgttattaaaatgaaattttaaaacaacaccaaaaattaagttggggctatacaaagtgtgcagaaaagatttcatataacaggcaagagactgccatccttagaaaggcctgcatgcaaggctggcccttggctggtgtttaggaaattggaattgggagggtttccaccattccctgagaagagtggctcactgtgtctaaagtttttatagaaaccgccaatgggtgaaatccaaagcagcagcgggtgtatccattaacattctcaaaacaggatgcatctggacccctgtgtgcaatcttcatagcacacagacagtaaacagaaaggcagtcattgctgccaaacaggacccaaatgccacacacagtgcaatgaagctataagctccctatggagagaaaagtagacaaatcaaaartattcaatatccaatccaagtccacattaaatcttgattccagaaa

SEQ ID NO: 578648 - DNA, 566 bp, Homo sapiens
aatgtatgattataatgaaaaccatctcaagcaattttgaaatgaagtaccacatgtcttatgctgtcccttccatgcacttgacaaaacagcctataacaaattgtttactttgagatttagcaggaaaattccatgaggtttaaatgagatgactamtaataaaccatctacctttgactctattccaattaaaaatgggttaggaaagtgctttgaaaatcaagtgtgttcatcagggaatcatttacctaagtcttcttaacactgcttagtgaatattaagcctgatatagtaaatacacgctaaccactaaattgaaggggaaagagggagaacaaagagacgtgtaaagtacacttactttttctagtaggaaaaagccaattaaaactatcacctattagttttattggaatcagtcttacaggaggtcaaacttcctactgtcgctacctattctcaatatttttcttatttcttcctaaacttctagagccgtgctgtccaataaatatgtgagccacatatgtaattttaaatgtactagtaagccccattaaaa

SEQ ID NO: 578649 - DNA, 595 bp, Homo sapiens
caaataatgtatgattataatgaaaaccatctcaagcaattttgaaatgaagtaccacatgtcttatgctgtcccttccatgcacttgacaaaacagcctataacaaattgtttactttgagatttagcaggaaaattccatgaggtttaaatgagatgactaataataarccatctacctttgactctattccaattaaaaatgggttaggaaagtgctttgaaaatcaagtgtgttcatcagggaatcatttacctaagtcttcttaacactgcttagtgaatattaagcctgatatagtaaatacacgctaaccactaaattgaaggggaaagagggagaacaaagagacgtgtaaagtacacttactttttctagtaggaaaaagccaattaaaactatcacctattagttttattggaatcagtcttacaggaggtcaaacttcctactgtcgctacctattctcaatatttttcttatttcttcctaaacttctagagccgtgctgtccaataaatatgtgagccacatatgtaattttaaatgtactagtaagccccattaaaaggtgaaattaattttaaatatact

SEQ ID NO: 578650 - DNA, 595 bp, Homo sapiens
caaataatgtatgattataatgaaaaccatctcaagcaattttgaaatgaagtaccacatgtcttatgctgtcccttccatgcacttgacaaaacagcctataacaaattgtttactttgagatttagcaggaaaattccatgaggtttaaatgagatgactaataataaaccatctacctttgactctattccaattaaaaatgggttaggaaagtgctttgaaaatcaagtgtgttcatcagggaatcatttacctaagtcttcttaacactgcttagtgaatattaagcctgatatagtaaatacacgctaaccactaaattgaaggggaaagagggagaacaaagagacrtgtaaagtacacttactttttctagtaggaaaaagccaattaaaactatcacctattagttttattggaatcagtcttacaggaggtcaaacttcctactgtcgctacctattctcaatatttttcttatttcttcctaaacttctagagccgtgctgtccaataaatatgtgagccacatatgtaattttaaatgtactagtaagccccattaaaaggtgaaattaattttaaatatact

SEQ ID NO: 578651 - DNA, 566 bp, Homo sapiens
aatgtatgattataatgaaaaccatctcaagcaattttgaaatgaagtaccacatgtcttatgctgtcccttccatgcacttgacaaaacagcctataacaaattgtttactttgagatttagcaggaaaattccatgaggtttaaatgagatgactaataataaaccatctacctttgactctattccaattaaaaatgggttaggaaagtgctttgaaaatcaagtgtgttcatcagggaatcatttacctaagtcttcttaacactgcttagtgaatattaagcctgatatagtaaatacacgctaaccactaaattgaaggggaaagagggagaacaaagagacgygtaaagtacacttactttttctagtaggaaaaagccaattaaaactatcacctattagttttattggaatcagtcttacaggaggtcaaacttcctactgtcgctacctattctcaatatttttcttatttcttcctaaacttctagagccgtgctgtccaataaatatgtgagccacatatgtaattttaaatgtactagtaagccccattaaaa

SEQ ID NO: 578652 - DNA, 595 bp, Homo sapiens
caaataatgtatgattataatgaaaaccatctcaagcaattttgaaatgaagtaccacatgtcttatgctgtcccttccatgcacttgacaaaacagcctataacaaattgtttactttgagatttagcaggaaaattccatgaggtttaaatgagatgactaataataaaccatctacctttgactctattccaattaaaaatgggttaggaaagtgctttgaaaatcaagtgtgttcatcagggaatcatttacctaagtcttcttaacactgcttagtgaatattaagcctgatatagtaaatacacgctaaccactaaattgaaggggaaagagggagaacaaagagacgtgtaaagtacacttactttttctagtaggaaaaagccaattaaaactatcacctattagttttattggaatcagtcttacaggaggtcaaacttcctactgtygctacctattctcaatatttttcttatttcttcctaaacttctagagccgtgctgtccaataaatatgtgagccacatatgtaattttaaatgtactagtaagccccattaaaaggtgaaattaattttaaatatact

SEQ ID NO: 578653 - DNA, 573 bp, Homo sapiens
caccgcccctcaccgccgccatctctggtctcactctggtctcacacacatrcacaaattaaatttaatttaaaaatttaaaaattgttttaaaataagtggaatatttacatggattatgtatacattcattttgtaggactatagatcccatgtaactgggaactctttactcttctaacacaacatttatttagccacaaatgaaagaccagtgatgtagcctgtacacaaaaaagtaagaaaacactggttaggctgtggcaggggtggggggaagagatctacaaatttaaaattttattgggaaggatcactaattagaatcagaacaattactgctttaaagtagttaagaacagagcacaaggaacccagagaagaagcagatatgattcagagcagagcttacagagcagatggtatctgagccgagactgatagaataacattaataagggcattcacggccatttattatcacttaactgcaatgcattttgtataagttatttctactcttcatatcaaccatggaaaataatacttattcttctcttttgaagttaaaga

SEQ ID NO: 578654 - DNA, 573 bp, Homo sapiens
caccgcccctcaccgccgccatctctggtctcactctggtctcacacacatacacaaattaaatttaatttaaaaattwaaaaattgttttaaaataagtggaatatttacatggattatgtatacattcattttgtaggactatagatcccatgtaactgggaactctttactcttctaacacaacatttatttagccacaaatgaaagaccagtgatgtagcctgtacacaaaaaagtaagaaaacactggttaggctgtggcaggggtggggggaagagatctacaaatttaaaattttattgggaaggatcactaattagaatcagaacaattactgctttaaagtagttaagaacagagcacaaggaacccagagaagaagcagatatgattcagagcagagcttacagagcagatggtatctgagccgagactgatagaataacattaataagggcattcacggccatttattatcacttaactgcaatgcattttgtataagttatttctactcttcatatcaaccatggaaaataatacttattcttctcttttgaagttaaaga

SEQ ID NO: 578655 - DNA, 573 bp, Homo sapiens
caccgcccctcaccgccgccatctctggtctcactctggtctcacacacatacacaaattaaatttaatttaaaaatttaaaaattgttttaaaataagtggaatatttacatggattatgtatacattcattttgtagractatagatcccatgtaactgggaactctttactcttctaacacaacatttatttagccacaaatgaaagaccagtgatgtagcctgtacacaaaaaagtaagaaaacactggttaggctgtggcaggggtggggggaagagatctacaaatttaaaattttattgggaaggatcactaattagaatcagaacaattactgctttaaagtagttaagaacagagcacaaggaacccagagaagaagcagatatgattcagagcagagcttacagagcagatggtatctgagccgagactgatagaataacattaataagggcattcacggccatttattatcacttaactgcaatgcattttgtataagttatttctactcttcatatcaaccatggaaaataatacttattcttctcttttgaagttaaaga

SEQ ID NO: 578656 - DNA, 573 bp, Homo sapiens
caccgcccctcaccgccgccatctctggtctcactctggtctcacacacatacacaaattaaatttaatttaaaaatttaaaaattgttttaaaataagtggaatatttacatggattatgtatacattcattttgtaggactatagatcccatgtaactgggaactctttactcttctaacacaacatttatttagccacaaatgaaagaccagtgatgtagcctgtacacaaaaaagtaagaaaacactggttaggctgkggcaggggtggggggaagagatctacaaatttaaaattttattgggaaggatcactaattagaatcagaacaattactgctttaaagtagttaagaacagagcacaaggaacccagagaagaagcagatatgattcagagcagagcttacagagcagatggtatctgagccgagactgatagaataacattaataagggcattcacggccatttattatcacttaactgcaatgcattttgtataagttatttctactcttcatatcaaccatggaaaataatacttattcttctcttttgaagttaaaga

SEQ ID NO: 578657 - DNA, 518 bp, Homo sapiens
ggtgtacacacagggtgtttatggtattggaagtagtattatctcccccgtggatattactaataatatcacaggggtgtgtacatcccctgtgatacagggagtaatatcatcctttcccagcctggatattacaaacaatatggcagggggcagtacaccctggcgatatgtgtagtaacatcatctcctccccacgtggatattatgaacaatattctagggggttgtacaccccctgcaatatggggagtagcatcatcctctcccccactagatattataaacaatatcacaagggggtgtacacttcctgcgataaaaggagaaatatarttctttcccccagagatattatgaacaatatcgcagggaattgttctcccatgctatatggggagtaacatcttcatcttccccctggatattacgaaaaataatgcaggggaatgtaaatcccctgcgatatggggagtaaaatcattctctctggccaggagcggtggctcacacctgta

SEQ ID NO: 578658 - DNA, 518 bp, Homo sapiens
ggtgtacacacagggtgtttatggtattggaagtagtattatctcccccgtggatattactaataatatcacaggggtgtgtacatcccctgtgatacagggagtaatatcatcctttcccagcctggatattacaaacaatatggcagggggcagtacaccctggcgatatgtgtagtaacatcatctcctccccacgtggatattatgaacaatattctagggggttgtacaccccctgcaatatggggagtagcatcatcctctcccccactagatattataaacaatatcacaagggggtgtacacttcctgcgataaaaggagaaatataattctttcccccagagatattatgaacaatatcrcagggaattgttctcccatgctatatggggagtaacatcttcatcttccccctggatattacgaaaaataatgcaggggaatgtaaatcccctgcgatatggggagtaaaatcattctctctggccaggagcggtggctcacacctgta

SEQ ID NO: 578659 - DNA, 544 bp, Homo sapiens
tccttagcagcattgattttctgtgtcgttgttatgaaagccttactagtggatgcaaagtggcatctcatttgggttttgccttgcattttattaatgaataatggtgtttagcatcttttcttttccttcttagacatttgtgtatcttctttggagaaatgtctgttcaagtcctttgyctatttttttaattgggatcttagaaattctgttgttgagttgtgggatattaagcttttatcagatacacattttgattttatcagatacatattttctcacatattatgggttgtcttttcactcccttgatagtgtcctttgatgcataaagggttttttattttgattaaatctaattttcgtgtattttcttttgttatctgtgcttttctgtcatatttcaaaatacacttaaaactcaaaggtcataaaggtttaccgtgtgttttcttctaagagttacatatttttagtccttacatttaagtcttttattaatttagaattaatttttgtgtatactgcaaggtaggggtct

SEQ ID NO: 578660 - DNA, 544 bp, Homo sapiens
tccttagcagcattgattttctgtgtcgttgttatgaaagccttactagtggatgcaaagtggcatctcatttgggttttgccttgcattttattaatgaataatggtgtttagcatcttttcttttccttcttagacatttgtgtatcttctttggagaaatgtctgttcaagtcctttgtctatttttttaattgggatcttagaaattctgttgttgagttgtgggatattaagcttttatcagatacacattttgattttatcagatacatattttctcacatattatgggttgtcttttcactcccttgatagtrtcctttgatgcataaagggttttttattttgattaaatctaattttcgtgtattttcttttgttatctgtgcttttctgtcatatttcaaaatacacttaaaactcaaaggtcataaaggtttaccgtgtgttttcttctaagagttacatatttttagtccttacatttaagtcttttattaatttagaattaatttttgtgtatactgcaaggtaggggtct

SEQ ID NO: 578661 - DNA, 592 bp, Homo sapiens
tctatttttttaattgggatcttagaaattctgttgttgagttgtgggatattaagcttttatcagatacacattttgattttatcagatacatattttctcacatattatgggttgtcttttcactcccttgatagtgtcctttgatgcataaagggttttttattttgattaaatctaattttcgtgtattttcttttgttatctgtgcttttctgtcatatttcaaaatacacttaaaactcaaaggtcataaaggtttaccgtgtgttttcttctaagagttacatatttttagtccttacatttaagtcttttattaatttagaattaatttttgtrtatactgcaaggtaggggtctaacttctctcttgtgcactgacatccaactgttgaagagactgttctttcctcccttgactagacttggccaccttgttgaacagtcattgaccatatatgtgaggactaacttgtaggatctcaaatctgttctattgtatttgtctgaaagtctattggtcttattccagtaccacactctcttgattactgtagatttgtagtaggctgtgaaactgaaaaatgtg

SEQ ID NO: 578662 - DNA, 571 bp, Homo sapiens
gggtctaacttctctcttgtgcactgacatccarctgttgaagagactgttctttcctcccttgactagacttggccaccttgttgaacagtcattgaccatatatgtgaggactaacttgtaggatctcaaatctgttctattgtatttgtctgaaagtctattggtcttattccagtaccacactctcttgattactgtagatttgtagtaggctgtgaaactgaaaaatgtgagttttccaatgttctttttcaagactcttttgtctgtcagatcctttgaatttttgtatgattttagaatgagtttctttgtttctgcaaaaatgcctttgggattttgatggtattgcattgaatctgtagattactttagatggtattgtcatcttaacaatattgtcttacaacccgtgaacacagaatgtctttccacttatttccactctctttagttttttgcagcaatgttttgtgtataccaccatggttagatttatgcctgaataacgtattctttgatgtcattataaatggaatttttaaaatgttttcatagttctttacaa

SEQ ID NO: 578663 - DNA, 609 bp, Homo sapiens
tttaccgtgtgttttcttctaagagttacatatttttagtccttacatttaagtcttttattaatttagaattaatttttgtgtatactgcaaggtaggggtctaacttctctcttgtgcactgacatccaactgttgaagagactgttctttcctcccttgactagacttggccaccttgttgaacagtcattgaccatatatgtgaggactaacttgtaggatctcaaatctgttctattgtatttgtctgaaagtctattggtcttattccagtaccacactctcttgattactgtagatttgtagtaggctgtgaaactgaaaaatgtragttttccaatgttctttttcaagactcttttgtctgtcagatcctttgaatttttgtatgattttagaatgagtttctttgtttctgcaaaaatgcctttgggattttgatggtattgcattgaatctgtagattactttagatggtattgtcatcttaacaatattgtcttacaacccgtgaacacagaatgtctttccacttatttccactctctttagttttttgcagcaatgttttgtgtataccaccatggttagatttatgcctgaata

SEQ ID NO: 578664 - DNA, 571 bp, Homo sapiens
gggtctaacttctctcttgtgcactgacatccaactgttgaagagactgttctttcctcccttgactagacttggccaccttgttgaacagtcattgaccatatatgtgaggactaacttgtaggatctcaaatctgttctattgtatttgtctgaaagtctattggtcttattccagtaccacactctcttgattactgtagatttgtagtaggctgtgaaactgaaaaatgtgagttttccaatgttctttttcaagactsttttgtctgtcagatcctttgaatttttgtatgattttagaatgagtttctttgtttctgcaaaaatgcctttgggattttgatggtattgcattgaatctgtagattactttagatggtattgtcatcttaacaatattgtcttacaacccgtgaacacagaatgtctttccacttatttccactctctttagttttttgcagcaatgttttgtgtataccaccatggttagatttatgcctgaataacgtattctttgatgtcattataaatggaatttttaaaatgttttcatagttctttacaa

SEQ ID NO: 578665 - DNA, 571 bp, Homo sapiens
gggtctaacttctctcttgtgcactgacatccaactgttgaagagactgttctttcctcccttgactagacttggccaccttgttgaacagtcattgaccatatatgtgaggactaacttgtaggatctcaaatctgttctattgtatttgtctgaaagtctattggtcttattccagtaccacactctcttgattactgtagatttgtagtaggctgtgaaactgaaaaatgtgagttttccaatgttctttttcaagactcttttgtctgtcagatcctttgaatttttstatgattttagaatgagtttctttgtttctgcaaaaatgcctttgggattttgatggtattgcattgaatctgtagattactttagatggtattgtcatcttaacaatattgtcttacaacccgtgaacacagaatgtctttccacttatttccactctctttagttttttgcagcaatgttttgtgtataccaccatggttagatttatgcctgaataacgtattctttgatgtcattataaatggaatttttaaaatgttttcatagttctttacaa

SEQ ID NO: 578666 - DNA, 571 bp, Homo sapiens
gggtctaacttctctcttgtgcactgacatccaactgttgaagagactgttctttcctcccttgactagacttggccaccttgttgaacagtcattgaccatatatgtgaggactaacttgtaggatctcaaatctgttctattgtatttgtctgaaagtctattggtcttattccagtaccacactctcttgattactgtagatttgtagtaggctgtgaaactgaaaaatgtgagttttccaatgttctttttcaagactcttttgtctgtcagatcctttgaatttttgtatgattttagaatgagtttctttgtttctgcaaaaatgyctttgggattttgatggtattgcattgaatctgtagattactttagatggtattgtcatcttaacaatattgtcttacaacccgtgaacacagaatgtctttccacttatttccactctctttagttttttgcagcaatgttttgtgtataccaccatggttagatttatgcctgaataacgtattctttgatgtcattataaatggaatttttaaaatgttttcatagttctttacaa

SEQ ID NO: 578667 - DNA, 557 bp, Homo sapiens
ctaccatacccaatccttgaaatatgacaatacactgaatcttctaacctaagtacctattargttattctgccacaaaaggtctcattaggaataattcgatttataatattttaaactcgttttcatatttcttccccacttcaggagccactcaaacttgttcttcttcctccattcaacctttcctaattatttccaagaaaaggccatttccctttttgttgtggataaactcacctttcaccatattaaggacttcagttcattaattaaacctactttgtctattaccattctgattagtatataatcatgttatgggatattttatcttaacagaaacaatttttttcatatacctctagctccagctattacagttttctctctgcttttcttaatgcaaaagtccagtaactccctcttattttgggggatatattctaagaccctcagtggatgcctgaaaccacagatagcatggaaccctatacatatcatttttttcataaatatacatatctctcattaagtttaatcagcagacgcaacct

SEQ ID NO: 578668 - DNA, 557 bp, Homo sapiens
ctaccatacccaatccttgaaatatgacaatacactgaatcttctaacctaagtacctattaggttattctgccacaaaaggtctcattargaataattcgatttataatattttaaactcgttttcatatttcttccccacttcaggagccactcaaacttgttcttcttcctccattcaacctttcctaattatttccaagaaaaggccatttccctttttgttgtggataaactcacctttcaccatattaaggacttcagttcattaattaaacctactttgtctattaccattctgattagtatataatcatgttatgggatattttatcttaacagaaacaatttttttcatatacctctagctccagctattacagttttctctctgcttttcttaatgcaaaagtccagtaactccctcttattttgggggatatattctaagaccctcagtggatgcctgaaaccacagatagcatggaaccctatacatatcatttttttcataaatatacatatctctcattaagtttaatcagcagacgcaacct

SEQ ID NO: 578669 - DNA, 557 bp, Homo sapiens
ctaccatacccaatccttgaaatatgacaatacactgaatcttctaacctaagtacctattaggttattctgccacaaaaggtctcattaggaataattcgatttataatattttaaactcgttttcatatttcttccccacttcargagccactcaaacttgttcttcttcctccattcaacctttcctaattatttccaagaaaaggccatttccctttttgttgtggataaactcacctttcaccatattaaggacttcagttcattaattaaacctactttgtctattaccattctgattagtatataatcatgttatgggatattttatcttaacagaaacaatttttttcatatacctctagctccagctattacagttttctctctgcttttcttaatgcaaaagtccagtaactccctcttattttgggggatatattctaagaccctcagtggatgcctgaaaccacagatagcatggaaccctatacatatcatttttttcataaatatacatatctctcattaagtttaatcagcagacgcaacct

SEQ ID NO: 578670 - DNA, 557 bp, Homo sapiens
ctaccatacccaatccttgaaatatgacaatacactgaatcttctaacctaagtacctattaggttattctgccacaaaaggtctcattaggaataattcgatttataatattttaaactcgttttcatatttcttccccacttcaggagccactcaaacttgttcttcttcctccattcaacctttcctaattatttccaagaaaaggccatttccctttttgttgtggataaactcacctttcaccatattaargacttcagttcattaattaaacctactttgtctattaccattctgattagtatataatcatgttatgggatattttatcttaacagaaacaatttttttcatatacctctagctccagctattacagttttctctctgcttttcttaatgcaaaagtccagtaactccctcttattttgggggatatattctaagaccctcagtggatgcctgaaaccacagatagcatggaaccctatacatatcatttttttcataaatatacatatctctcattaagtttaatcagcagacgcaacct

SEQ ID NO: 578671 - DNA, 529 bp, Homo sapiens
ttctctgaaataggaaagacaatttcttcagagaattaaggggaggaggcagtgagatagtttcaatggaataggaaawgatcaccctataaattttccttttaaaagacattatttcctataaacatcaataatagcaaatacatacatagaattaagatcaaagatttgataaaatgtatttctttacattttaagtctgctttgtaataataatgccatacataaaaataattatcacttttcactccctagtatgtctacaatatcatcctagatactttatgtaattcattccgtacaaaaccattatgaggtaggtatttcgtataactcccacttcaggtgatgaaaattaactctgaaagcttgggaaacttacctcttggtcactcatgtagcatgtggatgagtgggtacagattttatatgcaactatatttctcccaagctgctgttctgaaccaccacattcttctactcttggcaagtatagggataattgactagagaaaaaaatgtttctaag

SEQ ID NO: 578672 - DNA, 529 bp, Homo sapiens
ttctctgaaataggaaagacaatttcttcagagaattaaggggaggaggcagtgagatagtttcaatggaataggaaatgatcaccctataaattttccttttaaaagacattatttcctataaacatcaataatagcaaatacatacatagaattaagatcaaagatttgataaaatgtatttctttacattttaagtctgctttgtaataataatgccatamataaaaataattatcacttttcactccctagtatgtctacaatatcatcctagatactttatgtaattcattccgtacaaaaccattatgaggtaggtatttcgtataactcccacttcaggtgatgaaaattaactctgaaagcttgggaaacttacctcttggtcactcatgtagcatgtggatgagtgggtacagattttatatgcaactatatttctcccaagctgctgttctgaaccaccacattcttctactcttggcaagtatagggataattgactagagaaaaaaatgtttctaag

SEQ ID NO: 578673 - DNA, 529 bp, Homo sapiens
ttctctgaaataggaaagacaatttcttcagagaattaaggggaggaggcagtgagatagtttcaatggaataggaaatgatcaccctataaattttccttttaaaagacattatttcctataaacatcaataatagcaaatacatacatagaattaagatcaaagatttgataaaatgtatttctttacattttaagtctgctttgtaataataatgccatacataaaaataattatcacttttcactccctagtatgtctacaatatcatcctagatacttyatgtaattcattccgtacaaaaccattatgaggtaggtatttcgtataactcccacttcaggtgatgaaaattaactctgaaagcttgggaaacttacctcttggtcactcatgtagcatgtggatgagtgggtacagattttatatgcaactatatttctcccaagctgctgttctgaaccaccacattcttctactcttggcaagtatagggataattgactagagaaaaaaatgtttctaag

SEQ ID NO: 578674 - DNA, 563 bp, Homo sapiens
gcctatactgatatgataaaatattattctagttttgctctctctgtttattaaactacatgaaattggtgtttgctattgatgagagttatagacccagaacattctcaaaagagataatcaatttttccatcagtattaatttctctttttcttccattctgatctgcaagtgtatttctgccatgtatgaagtttccatagaaatgtggatatttctttcttggatttcagttctgtttaattgggaaatgtctatatccctccaggattttgacaggatggtaactaatatgattttatagtaagttttctcatgttgtggaacaagttcctccatcatgtgcaatttaaacattgcctttgttatattcagtcctttgcccatgcagatcagtattagaaagatctgataaactgatttcattggcagattaagttaaggagaataaaggcttttctaattttttaaatcttatttataagcatagmaaattccttctattgacgtcattttcttagttattttatttctatctatattttaattaaaatcaataata

SEQ ID NO: 578675 - DNA, 563 bp, Homo sapiens
gcctatactgatatgataaaatattattctagttttgctctctctgtttattaaactacatgaaattggtgtttgctattgatgagagttatagacccagaacattctcaaaagagataatcaatttttccatcagtattaatttctctttttcttccattctgatctgcaagtgtatttctgccatgtatgaagtttccatagaaatgtggatatttctttcttggatttcagttctgtttaattgggaaatgtctatatccctccaggattttgacaggatggtaactaatatgattttatagtaagttttctcatgttgtggaacaagttcctccatcatgtgcaatttaaacattgcctttgttatattcagtcctttgcccatgcagatcagtattagaaagatctgataaactgatttcattggcagattaagttaaggagaataaaggcttttctaattttttaaatcttatttataagcatagcaaattccttctattgacgtcattttcttarttattttatttctatctatattttaattaaaatcaataata

SEQ ID NO: 578676 - DNA, 602 bp, Homo sapiens
caggctgctgtcttctccaggaaaaaaaaaaatgagaaacaggacaggagttttactactctaccattaggaacaaggaaaaagaaacaaattgaaggcataaaactggtctctccaaggtcttaccgtagtgaatatatagagaaacctcgagaattccaagagagaaccagtaaggaaagtatttttctctaccaaccctgttcttcacacaatggtaatagaacttagaataatccatgcccataatattctagattgttgtgatcccattttttatagaaattggcaaggcatacaacatgtattttgattaatttttcagacatattattgcaaaacctatacaacaggtagaatcaaatgaatgagtaacaggttatttaattcaagttgttgttycagtgtctatcttagtgcttggcacaaaacaggcaccaaatatctttctactgaataactgaattaatttttatttgtgttgagtaaaataatttcatatgatgatgaatggaaattgctccagttatattaaccctgcctggagctaggtgtaccttattcataatagagatatgcattttattattgtaacagaaaac

SEQ ID NO: 578677 - DNA, 363 bp, Homo sapiens
caatagatgtagaaaaggtctttgataaaattcaacatcccttcatggtaaaaactctcagtaaactaggtattgacgaaacatctcaaaatagtaagagatatttatgrcagccaataccatactgcatgtgcaaaaggtggaaccattccctgtgaaaaccaacacaagatgaggatgccctctttcgtcttaaactaaagagcttcagcacagcaaagaaactatcatcagagaaaacaggcaaactacagaatgggagaaaatttttgaaatctacccatctgatgaaggtctaacatccagaatctacaaggaacttaaacaaatttacaagaaaaaacaaacaaccccaccaaaaat

SEQ ID NO: 578678 - DNA, 363 bp, Homo sapiens
caatagatgtagaaaaggtctttgataaaattcaacatcccttcatggtaaaaactctcagtaaactaggtattgacgaaacatctcaaaatagtaagagatatttatgacagccaataccatactgcatgkgcaaaaggtggaaccattccctgtgaaaaccaacacaagatgaggatgccctctttcgtcttaaactaaagagcttcagcacagcaaagaaactatcatcagagaaaacaggcaaactacagaatgggagaaaatttttgaaatctacccatctgatgaaggtctaacatccagaatctacaaggaacttaaacaaatttacaagaaaaaacaaacaaccccaccaaaaat

SEQ ID NO: 578679 - DNA, 565 bp, Homo sapiens
aaattcagtaaagtctcaggatacaaatcaacatacaaaaatcagcagcctttctatacataaacaatgaactagctaaaaaaaaataggaaacaattccacatataacagctataaacaattcctaggagtaaatttaactaaggtgaagaaatatctctatgacataaatataaaatgtaaaacaccgatgaaagaaactgaagaagacacacaaaaaaygagaagacatcccatggtcacggacttgagtaattaatattattaaaatgagcatactaaccacagcaacctatagattcaatgcaatcattatcaaaatgccaatggcatattttacatatatttaaaaaattctaaaatttatatggagccacaaaaatccccaatagataactactcctaaacaaaaagaacaaaaccagacacatttcactatgagtcttcaaaatatactataaagttgtattagccaaaacagcatggtaccaatgaaaagcatatatgcaaatcaatggaacagaatagagaacccagaaattaatccgtttatttacaaccaact

SEQ ID NO: 578680 - DNA, 565 bp, Homo sapiens
aaattcagtaaagtctcaggatacaaatcaacatacaaaaatcagcagcctttctatacataaacaatgaactagctaaaaaaaaataggaaacaattccacatataacagctataaacaattcctaggagtaaatttaactaaggtgaagaaatatctctatgacataaatataaaatgtaaaacaccgatgaaagaaactgaagaagacacacaaaaaatgagaagacatcccatggtcacggacttgagtaattaatattattaaaatgagcatactaaccacagcaacctatagattcaatgcaatcattatcaaaatgccaatggcatattttacatatatttaaaaaattctaaaatttatatggagccacaaaaatccccaatagataactactcctaaacaaaaagaacaaaamcagacacatttcactatgagtcttcaaaatatactataaagttgtattagccaaaacagcatggtaccaatgaaaagcatatatgcaaatcaatggaacagaatagagaacccagaaattaatccgtttatttacaaccaact

SEQ ID NO: 578681 - DNA, 662 bp, Homo sapiens
aaaatttatatggagccacaaaaatccccaatagataactactcctaaacaaaaagaacaaaaccagacacatttcactatgagtcttcaaaatatactataaagttgtattagccaaaacagcatggtaccaatgaaaagcatatatgcaaatcaatggaacagaatagagaacccagaaattaatccgtttatttacaaccaacttatttttgacagagataccaagaacactcattaggcagtcacttcaataaatgttgctgggaaaactagatacctatgtgcaaaagaataaagctatactctcttctttcaccctaattgaaacaaaaatctactcaaaatgggttaaagacctacatgtaagacttaaagctttaaaactaccaaaggaaaacccagagagaacacttcaagacattggtctgagaaaatattttatgaataaggccttaaaatcacaggcaacaaaaggaaaaataagcaaacaggattatatcaaactaaaaaacttctgcatagcaatagaaataatcaacagtgtaaaaagacaacctccagaataagcaaaattatttgcaactcctcttcccacataatattaatgtccagaatatacaaagaactcaactatctsaacaggaaaaaaattgatttaa

SEQ ID NO: 578682 - DNA, 496 bp, Homo sapiens
ggattgttggaggattgggggaagagagagagaatagagtatacgaccatagaaaaactgaraaaaacgtgtttttttaaagtcacatggaacattacccaagatatggctacaaagcaagtctaaattacttttaagtgattaaaattatagtgagtatgctctctgacaatgaattggattaaaaacaaataaaaataaaacaattatatccctagatatttgtaaataagcaacatacttttaacatttttatattttaaatgctgggatacatgtgcagaacatacaggtttgttacttatgtgtacatttgccatggtggtttgctacacccatcaacccatcaaaaaaagtttaaaaccccacatgcattaggtacttttcctaatgctatccctcacctttccccccactccctgacaggccccagtgtgtgatgttcccctccctgtgtccatgtgttctcattgttcaactcttacttatgagtaaa

SEQ ID NO: 578683 - DNA, 405 bp, Homo sapiens
ggctataaatatttgtatcaaaagaaaaacagctgttatatataatcttattttctatatagatttctctatctttgccgtatacaaattttctgaagaagacatttcggttttataatctaaaaagagcattttacaatgactataaaaagttatatacgattatgctgaagatgacaatgaagatgataattatgatcatgataaatgctaatgtttattaagcatttaactcacggtagagagggctgagtactttttattttcattattttacattatttcatttaattttctcrccaaacctgtaaagtagggaggtattattattttcaatgttttaaaattaggaaactgaggctcacagaggaaagcaactttccttagttaaatcattaatgtaag

SEQ ID NO: 578684 - DNA, 405 bp, Homo sapiens
ggctataaatatttgtatcaaaagaaaaacagctgttatatataatcttattttctatatagatttctctatctttgccgtatacaaattttctgaagaagacatttcggttttataatctaaaaagagcattttacaatgactataaaaagttatatacgattatgctgaagatgacaatgaagatgataattatgatcatgataaatgctaatgtttattaagcatttaactcacggtagagagggctgagtactttttattttcattattttacattatttcatttaattttctcaccaaacctgtraagtagggaggtattattattttcaatgttttaaaattaggaaactgaggctcacagaggaaagcaactttccttagttaaatcattaatgtaag

SEQ ID NO: 578685 - DNA, 614 bp, Homo sapiens
ttatattttcaatttttgtgctttcatttggctatttctattgacttgtttttcttttcttggaagagctttctgttgcctttaatattcttttaaatgcatttattttgatagatttttttttagttctagaatttgcattgaattattttttaatattttccgattctttggtgaatttttccattatttcatcagctttttcccattttcctttactttttgaaaaatactaattggatttactttagttaattcaaagttcttttctgttctgctggtgtgtctttttccctctgtctgggcaaagcccatatcctcatccttttcctcttgcagagaattgacatatgcctccagggaaagaaaatggctctagatgtcagtttacctctccaaggttctccactctycagaatctgagagggcaacctgttgttgcccttgcttcctagcttcctagcttcctaatgcctttgaacacacacagacacacacagtgattttaaaatatgacttttctagttattttcagcaggaatattggtcttccatagactacaacatcctgcttagaagtcagggcatcccttttaaaaaaggttagtaccacc

SEQ ID NO: 578686 - DNA, 614 bp, Homo sapiens
ttatattttcaatttttgtgctttcatttggctatttctattgacttgtttttcttttcttggaagagctttctgttgcctttaatattcttttaaatgcatttattttgatagatttttttttagttctagaatttgcattgaattattttttaatattttccgattctttggtgaatttttccattatttcatcagctttttcccattttcctttactttttgaaaaatactaattggatttactttagttaattcaaagttcttttctgttctgctggtgtgtctttttccctctgtctgggcaaagcccatatcctcatccttttcctcttgcagagaattgacatatgcctccagggaaagaaaatggctctagatgtcagtttacctctccaaggttctccactctccagaatctgagagggcaacctgttgttgcccttgcttcmtagcttcctagcttcctaatgcctttgaacacacacagacacacacagtgattttaaaatatgacttttctagttattttcagcaggaatattggtcttccatagactacaacatcctgcttagaagtcagggcatcccttttaaaaaaggttagtaccacc

SEQ ID NO: 578687 - DNA, 441 bp, Homo sapiens
ttcagtacgataatagctcctgtgccaaagaccctgggcagtgtcaggatagctgtrtagctcagtgggctgtagatggctataaagcggtccaaagacatggccagcagcacagctgactccatcatggataaagaatggatggagaacatctggaaaaagataagcttcaagactaatttcagtatttccaaaaaggaatatgcctaacactgtaggcagggtggatgcagagacacgaacctcggccagtgccaacatggcaaggaagaggtacatgggttgatgtagggcaatatctgttctgatgacgtgaagaatgatgccattcccaaggaaaatgatgatgtatatcagagagaaggggacggatatccagaggtgctctgactccagccctgggatgccaaccaaaatgaatgtcgtaggtaaaaaccccaa

SEQ ID NO: 578688 - DNA, 441 bp, Homo sapiens
ttcagtacgataatagctcctgtgccaaagaccctgggcagtgtcaggatagctgtatagctcagtgggctgtagatggctataaagcggtccaaagacatggccagcagcacagctgactccatcatggataaagaatggatggagaacatctggaaaaagayaagcttcaagactaatttcagtatttccaaaaaggaatatgcctaacactgtaggcagggtggatgcagagacacgaacctcggccagtgccaacatggcaaggaagaggtacatgggttgatgtagggcaatatctgttctgatgacgtgaagaatgatgccattcccaaggaaaatgatgatgtatatcagagagaaggggacggatatccagaggtgctctgactccagccctgggatgccaaccaaaatgaatgtcgtaggtaaaaaccccaa

SEQ ID NO: 578689 - DNA, 441 bp, Homo sapiens
ttcagtacgataatagctcctgtgccaaagaccctgggcagtgtcaggatagctgtatagctcagtgggctgtagatggctataaagcggtccaaagacatggccagcagcacagctgactccatcatggataaagaatggatggagaacatctggaaaaagataagcttcaagactaatttcagtatttccaaaaaggaatatgcctaacactgtaggcagggtggatgcagagacaygaacctcggccagtgccaacatggcaaggaagaggtacatgggttgatgtagggcaatatctgttctgatgacgtgaagaatgatgccattcccaaggaaaatgatgatgtatatcagagagaaggggacggatatccagaggtgctctgactccagccctgggatgccaaccaaaatgaatgtcgtaggtaaaaaccccaa

SEQ ID NO: 578690 - DNA, 473 bp, Homo sapiens
ggaaatcacactcagaaatgcataagagataaaaatttatwatcacagtttctagagggaaccagaggcatgccatgcaaggggccctatgagaagaactcctagggaacaggctccatcaagcaggagagccaagagagaatgtgaacccatgggcaggtacctccattgagagtcaacgtggactacacaagcaagaagcatgaggggattttactggtacatttgaatatcactaggtcacaatcagggaaggcaagaagaggaacttgtggcaggaaccagacttatcacaccggtgtacctggtaacttggtgaggggtgggttgctcagagtctgttcatggagaggttaaggtatcaggaacatatgaagttaaaaaaaattgcaatatgccaccctgctacgctgtattttgcttacaaattttatggagaataacttttctatctcttcactttcagcctatgc

SEQ ID NO: 578691 - DNA, 473 bp, Homo sapiens
ggaaatcacactcagaaatgcataagagataaaaatttataatcacagtttctagagggaaccagaggcatgccatgyaaggggccctatgagaagaactcctagggaacaggctccatcaagcaggagagccaagagagaatgtgaacccatgggcaggtacctccattgagagtcaacgtggactacacaagcaagaagcatgaggggattttactggtacatttgaatatcactaggtcacaatcagggaaggcaagaagaggaacttgtggcaggaaccagacttatcacaccggtgtacctggtaacttggtgaggggtgggttgctcagagtctgttcatggagaggttaaggtatcaggaacatatgaagttaaaaaaaattgcaatatgccaccctgctacgctgtattttgcttacaaattttatggagaataacttttctatctcttcactttcagcctatgc

SEQ ID NO: 578692 - DNA, 473 bp, Homo sapiens
ggaaatcacactcagaaatgcataagagataaaaatttataatcacagtttctagagggaaccagaggcatgccatgcaaggggccctatgagaagaactcctagggaacaggctccatcaagcaggagagccaagagagaatgtgaacccatgggcaggtacctccattgagagtcaacgtggactacacaagcaagaagcatgaggggattttactggtacatttgaatatcactaggtcacaatcagggaaggcaagaagaggaacttgtggcaggaaccagacttatcacaccggtgtacctggtaacttggtgaggggtgggttgctcagagtctgttcatggagaggttaaggtatcaggaacatatgaagttaaaaaaaattgcaatatgccaccctgctacrctgtattttgcttacaaattttatggagaataacttttctatctcttcactttcagcctatgc

SEQ ID NO: 578693 - DNA, 404 bp, Homo sapiens
agctaaattttttgtatttttagtagaaacggggtttcaccatattggccaggctggtgtcgaactcctgacctcaggtgatccacccgcctcggcctcccaaaatgctgggattacaggcgtgagctactgcactcgaccaaaaacaagatttttaaaaattctgcttctaaaatgtgagtgtgccttcctcctgtgactcattgaggtatgttttgttaaaagcctktaaaaggacagagagctgggacttcatcaaccttaaaaaactgtttatatgagctcttttgttactgctattaatcaatgttcatttaataaatgttaatgtgtaagacaaaatttggtctgagacttgctttcattataacttcgtagggagattgcaataaagtaagtaatcc

SEQ ID NO: 578694 - DNA, 547 bp, Homo sapiens
tccatcccaggcctagagctctgctggaccttccagcctggccacctgactttcccctggacatcccacagtcctttcaaactcagcaaggatcaaggggcgtcaaggccttcccctggaccccatccttcttccatctgtgttcccaggcactgaaaccaactgcagagctacccatggtgcctccctcccctttgccctcctctcgttttgtctatagattaattggttagcttcagtctcattctgtgaattgcacctcttagcattcttaattttcaygtttcagctgttcttgaccacatttgggctccctccagctgctccaaatcccgcagctgccacttagcaatgctcgttctctttcctgcagtgcctgcctcggtcaggcctaggtgcatctctaggtgctgatttcaagacagctgagttccctttagccgggcacggtggctcacgcctgtaatcctaacactttgggaggccgaggcgggcggattgcctgacctcaggagttcaagaccagcctgggtaacatggtgaaacc

SEQ ID NO: 578695 - DNA, 581 bp, Homo sapiens
cccgagatctactatgcacaagatgccagggtggtggggaggagcatctggcaggggctcttggcagccactggagttctttctccctaggagggatgcagctatcagaggggtggctttagttctgaagggagatgggctttgcaatgtctgcacttctgaggggtatgaggagagggaagagaaagactgaggccaatgagggaacacagctcctttcttctctctagaaagcccacgtcttcctcctctccaggagccgtcactaaccatgcactcttacagagaacttgctggagagagtgaggacccagaccctgccttaaccataggaacaaaagtgacagacactcacaggccttagtgcccgtgctcaggctattcctactatcrgggctgtacttccactccctctcctcaaccccttctaggtcctcccagctcagtgccacctcctccaggaaggcttccctgaccaccccacctggaaatggcctgtgcgcgtgcacttccttagccctttcactaagcctctggtagagtattcagccagtcccacctccctgtcgtcacttatgttc

SEQ ID NO: 578696 - DNA, 419 bp, Homo sapiens
tcctcttttactaaactgagtgctgctataaatatgttaccttgtaactggcactgaacagctagtgacttgggtgctatattttactccactgtaaagcattttctctttgaagtaaaaagtaagttagtactgcaaactgaaattcaggtttccttggtgggaacagggactttagatgtatcagctcagaatatgacagggagtgttaataaaaagtggacaacttggctgggcacggtggctcacacctgtaatcccaagcactttgggaggccgaggcaggyggatcacgaggtcaggagatcacaaccattctggctaacacggtgaaaccctgtctctactaaaaatacaaaaaaattagccgagcttggtggcaggcgcctgtagtcccagctactcgggaggctgaggca

SEQ ID NO: 578697 - DNA, 541 bp, Homo sapiens
ggtgttcatattcaagactcagttcatatgcaagactcagtatttagatgataactcktctcaagttgagctgtagagtcagtgcagttcctatcaacacccagtaggctttttccccctcagaaattaacaacacgattctaaaatttaagtggatattcaaaggacacagaatagctcaaacatcttgaagaagaacaaaggtgtagggcttacactttctattttaaaaccatactatgaagctactgtaatagaggcaaatgtgttcctggcaactacaaaggtaattcaattggaaaaggatagtcatttaaacaaacggtgctggaacaattggatttcaacatacatgaagacaaagttagatgtatatctgtatttatagattttcctattccagatatttcaaataaatagaatcatataatatatgacctttggtgttgggcttctttcacttagcgtaatgcttttgaggtgcattcacattgtagcaggtatcagtacttcatcttttttatggcaggaaaatattcca

SEQ ID NO: 578698 - DNA, 541 bp, Homo sapiens
ggtgttcatattcaagactcagttcatatgcaagactcagtatttagatgataactcgtctcaagttgagctgtagagtcagtgcagttcctatcaacacccagtaggctttttccccctcagaaattaacaacacgattctaaaatttaagtggatattcaaaggacacagaatagctcaaacatcttgaagaagaacaaaggtgtagggcttacactttctattttaaaaccatactatgaagctactgtaatagaggcaaatgtgttcctggcaactacaaaggtaattcaattggaaaaggatagtcatttaaacaaacggtgctgraacaattggatttcaacatacatgaagacaaagttagatgtatatctgtatttatagattttcctattccagatatttcaaataaatagaatcatataatatatgacctttggtgttgggcttctttcacttagcgtaatgcttttgaggtgcattcacattgtagcaggtatcagtacttcatcttttttatggcaggaaaatattcca

SEQ ID NO: 578699 - DNA, 539 bp, Homo sapiens
ttaaagcaaaattaggaatgcctttattctcaagatattgggatatctggacactcccaagtctggatctgtttagtaaaccttctcagtctgttcccttaaccgtaaacctctagcggctagaaatacctaactttctgggaatgcagaccagcaagtcccagccttattttcctagccctcacccaagatggagttgctctggtttgaacacgtctgacactttgaaatattttgaaatggccctgcaatgctttctcttgtggggggaaatttacgctgtgtasagaatcccccttcccttccaggccttttcctgatccaggagagaattaactaagattctggcaccttttaaaggtctgaataggaaacatttgccatctatagcatctaagggcagctgctgaagagatttcacccacataatcagaaccctgttgtccacaaccccagcactcctttcgattcattccaggtctttagataataactctttcaaccaattgccaatcagaaaacctttgaatccacctatg

SEQ ID NO: 578700 - DNA, 630 bp, Homo sapiens
tcactcaaaataattagaggattttataggagagaaaagcaaaatgcttcaaaaccaattggtttgaatgggattgtttctgaccaacaatggcctgcagagtgtagtttttctcttttcatctttctgaatgttggaagaagcctagtaagccagtcactgctgccatttggaaatgtcagaatgtctctcgcttggcttccctgattccagcaaccagaaacaccaagacacacatcccaaatgcacatacatcccccaacacaccacacaccacaaacacatgcacagtacatacaaatgcactcatataccacaccacacatrccacacaaatgcacactcactacaccacataccacacaccacactacacacacatacaacacacataccacacataaatgcatactcataccacaccacacacacatgtatgccccacaccacacacacacatacacacagacaccatatcacagcccaaagatagtccataccccacacctgtaccacacaccatacaaacacactcacactacacacacataccataccacataccaacaccacacacacagattcacactatagaacacatatgaacaccccacacacatataccccaca

SEQ ID NO: 578701 - DNA, 509 bp, Homo sapiens
gccggaactcacacacagtcccctgaccctaaactgcatgctgggtcccctgtgctaagccacttatcacggctgctccctgccaggcaccctgagcctgctaacattcacagcatgacatcaggtaccagattctacagccaggaagcaccattctctagtcagccgtgccagcctctggtgcacctttctgacgttgatgcactttgcattattgtaatcaatgaaacacagtggctgtgaagtttctgtaagaaatttgtgttcaagtctttaatccatcttgaattgatttttgtataaggtgtaaggaagggatccagtttcagctttctacatatggctagccagttttcccaccaccatttattaaatagggaatcctttccccattgcttgtttttctcaggtttgtcaaagatcagatagttgtagatatgcrgcgttatttctgagggctctgttctgttccattgatctatatctctgttttggtaccagacttaaac

SEQ ID NO: 578702 - DNA, 615 bp, Homo sapiens
gtgtgtaccgtgagtcaggactgtattttattttttacatgtggactatgaagtgtcctgagtgttacactgatattttgttgtttccctattgatgtatcgtgccaattttattgtatactaactccccatatttccatatgggcacacagttcagatccattagctatctatctatacttgggttaataaaataaacattatgtacaatagcttcattattagcttaacatgttgatcatgtctttctgagggttaatattatttcttatagatactattatttgatacagttaattccatataattttaaagatgaatttgtacatctatgttaaacctttcattgggaattttattgaattctgaaattagtttgaaatgaattataagtttgatcatgtagagcctttctatatgccagattgaatagtatattggctcaggtatgctttctgtstcttcaataaaggttcatatttctctgtacagattttatacaacattgttagatttattttggaataagtaaatgtcataacttttgttataactgttgtcagtattattaataacattttaaataattttttctgtcttttaaattagttattc

SEQ ID NO: 578703 - DNA, 617 bp, Homo sapiens
ttccatcctatttgatgattttacaaaacatatttacttaagttcatttggaatttcaacatcacataggggaaaggtaaagtaaactgatgttctacttctgttttatccttcccttccttatcacctcctcctgaattactacttttaataggatatttactgcatgcattattccagtatatttctgggaagctattartgatagcaagcccaggattgtcagggaaattaacagtttcatctcttttgtattccatttcctaaaacttgtactgtaagttctgacatgtctatagcctatacttttaagcatttttacatatggcccaaagccaggttactgttaaatgttccacttgcctatttcaaggcgcacgcaaagtaagaggcaaaacaatgaatcaaggtaattgtgattactttgaatagtcataattgcaacaatcattccctgcaatattaaaaagaatcagattccaatagtgtaatttgcttttatatctagccaactagaatgttgttaccattaagatatattgcttacatctgtttcttctttaaatatattgtgccattatatagataatagcttactttaagtaggtgaacataat

SEQ ID NO: 578704 - DNA, 617 bp, Homo sapiens
ttccatcctatttgatgattttacaaaacatatttacttaagttcatttggaatttcaacatcacataggggaaaggtaaagtaaactgatgttctacttctgttttatccttcccttccttatcacctcctcctgaattactacttttaataggatatttactgcatgcattattccagtatatttctgggaagctattaatgatagcaagcccaggattgtcagggaaattaacagtttcayctcttttgtattccatttcctaaaacttgtactgtaagttctgacatgtctatagcctatacttttaagcatttttacatatggcccaaagccaggttactgttaaatgttccacttgcctatttcaaggcgcacgcaaagtaagaggcaaaacaatgaatcaaggtaattgtgattactttgaatagtcataattgcaacaatcattccctgcaatattaaaaagaatcagattccaatagtgtaatttgcttttatatctagccaactagaatgttgttaccattaagatatattgcttacatctgtttcttctttaaatatattgtgccattatatagataatagcttactttaagtaggtgaacataat

SEQ ID NO: 578705 - DNA, 617 bp, Homo sapiens
ttccatcctatttgatgattttacaaaacatatttacttaagttcatttggaatttcaacatcacataggggaaaggtaaagtaaactgatgttctacttctgttttatccttcccttccttatcacctcctcctgaattactacttttaataggatatttactgcatgcattattccagtatatttctgggaagctattaatgatagcaagcccaggattgtcagggaaattaacagtttcatctcttttgtattccatttcctaaaacttgtactgtaagttctgacatgtctatagcctatacttttaagcatttttacatatggcccaaagccaggttactgttaaatgttccacttgcctatttcaaggcgcacgcaaagtaagaggcaaaacaatgaatcaaggtaattgtgattactttgaatagtcataattgcaacaatcattcccygcaatattaaaaagaatcagattccaatagtgtaatttgcttttatatctagccaactagaatgttgttaccattaagatatattgcttacatctgtttcttctttaaatatattgtgccattatatagataatagcttactttaagtaggtgaacataat

SEQ ID NO: 578706 - DNA, 617 bp, Homo sapiens
ttccatcctatttgatgattttacaaaacatatttacttaagttcatttggaatttcaacatcacataggggaaaggtaaagtaaactgatgttctacttctgttttatccttcccttccttatcacctcctcctgaattactacttttaataggatatttactgcatgcattattccagtatatttctgggaagctattaatgatagcaagcccaggattgtcagggaaattaacagtttcatctcttttgtattccatttcctaaaacttgtactgtaagttctgacatgtctatagcctatacttttaagcatttttacatatggcccaaagccaggttactgttaaatgttccacttgcctatttcaaggcgcacgcaaagtaagaggcaaaacaatgaatcaaggtaattgtgattactttgaatagtcataattgcaacaatcattccctgcaatattaaaaagaatcagattccaatagtgtaatttgcttttatatctagccaactagaatgttgttaccattaagatatattgcttacatctgtttcttctttaaatatattgygccattatatagataatagcttactttaagtaggtgaacataat

SEQ ID NO: 578707 - DNA, 458 bp, Homo sapiens
tgtctaaaactttcaataagatactgagtaaaatatgtcaaagcaaatgcacttttttttgatctccaatcctaaagagaaacatttcatttttcatcattaagtatgatgctaactgtagtttctggtgttttgtttttgataagttttttttttttttgtagatgttctggaaaaaaacccacacatttttaatttgctaagagttttaaaaataaatgggtgttaaatktggttaaatgttttttctacatttattgagttcatcattttgacttttttatttctttttaaaacttttgttaatagagtgaaagacatagattgattttaaaatattaaaccaatctcatactcctgaagtaaaccatacttgatcatggtgtaatattgtcatgtcattaagttcaatttgttaaggatttttacatctatgttcagaaatgatattgatttgg

SEQ ID NO: 578708 - DNA, 550 bp, Homo sapiens
agtgagaatatgtgatatttatctttctgtgcctggtttattttagtctagctaaatttttgtcatattttttatcctttcaaaaatccaagtcttagttttattgattattttcctaatttttaaaactctctgtttgatttatatttgctcaaaattttactaatyctttccttctgctagctttgggcttaatttgttctttctgtagttccttaaggtataaagttaggttgtttattttacatctttcttcatatttagtgtagtcatttaatgctataaactttttccttagtacttccttctctgcatcccaaaagttttggtatgttgtgtctcttctgttgaggtatttttaaaattctcttttgatttcctttttgaccaatggtaaacttgacataaatattcattcaaatttaagttgaagctttctttttaatgttactttacataatttgtgaatatattttacactgatcatgtctcagtatgagacacaatgttttaaagaataaacagatgagataaaatggcatattagtaa

SEQ ID NO: 578709 - DNA, 425 bp, Homo sapiens
ccctccccttctctcccctcccttctcctcccctcccctccactttcttctcttcccctccttcctctcttcctttctccctccctcccttcttccctccctcctttccttcctccctttctttcttttctttctggcagggkctccctctgttgcccaagctgagtgcagtggaatgatcatggttcactgtagcctcaacctcctgggctcaaatgatccttcctcttcagcctcctgaggtgctgggactacagggatgtgccaccaaacctggctaatttttttaattttttgtagagacagggtcttgctgtgttgcccaggctggtcttgaactcctggcctctgaccctcctccactgggcctggccaaattctttttcttattttcttttttttgttaacctggctgtttaagaatt

SEQ ID NO: 578710 - DNA, 425 bp, Homo sapiens
ccctccccttctctcccctcccttctcctcccctcccctccactttcttctcttcccctccttcctctcttcctttctccctccctcccttcttccctccctcctttccttcctccctttctttcttttctttctggcaggggctccctctgttgcccaagctgagtgcagtggaatgatcatggttcactgtagcctcaacctcctgggctcaaatgatccttcctcttcagcctcctgaggtgctgggactacagggatgtgccaccaaacctggctaatttttttaattttttgtagagacagggtcttgctrtgttgcccaggctggtcttgaactcctggcctctgaccctcctccactgggcctggccaaattctttttcttattttcttttttttgttaacctggctgtttaagaatt

SEQ ID NO: 578711 - DNA, 436 bp, Homo sapiens
gaattctgactgccattctttgtrctaaatttcttcctgaggggcctagagggaggcaaatccattagccaaagagctaacattttttttctgccgacccccaaattttaaaccaaaccttcttttctttaaccaattacaaatcagaaaacccttgaatctatgtatggcctgtaagcccctgcttcaaaatatcgtgacttttcaggacaaaaccaatgtgtaaactccatgtactgatttataattttgccagtaacttctgctttcctgaaatttacccctgctttaaaaaaacccttacctgcaagccactggggaagtgggaacttaagcattagctgcctcatccgccttgcttcacaatgtccagataaacacctccttttctcccactgcaaatgtcagtgtaggtatctagtcttactgtactggg

SEQ ID NO: 578712 - DNA, 436 bp, Homo sapiens
gaattctgactgccattctttgtactaaatttcttcctgaggggcctagagggaggcaaatccattagccaaagagctaacattttttttctgccracccccaaattttaaaccaaaccttcttttctttaaccaattacaaatcagaaaacccttgaatctatgtatggcctgtaagcccctgcttcaaaatatcgtgacttttcaggacaaaaccaatgtgtaaactccatgtactgatttataattttgccagtaacttctgctttcctgaaatttacccctgctttaaaaaaacccttacctgcaagccactggggaagtgggaacttaagcattagctgcctcatccgccttgcttcacaatgtccagataaacacctccttttctcccactgcaaatgtcagtgtaggtatctagtcttactgtactggg

SEQ ID NO: 578713 - DNA, 440 bp, Homo sapiens
ctttgtactaaatttcttcctgaggggcctagagggaggcaaatccattagccaaagagctaacattttttttctgccgacccccaaattttaaaccaaaccttcttttctttaaccaattacaaatcagaaaacccttgaatctatgtatggsctgtaagcccctgcttcaaaatatcgtgacttttcaggacaaaaccaatgtgtaaactccatgtactgatttataattttgccagtaacttctgctttcctgaaatttacccctgctttaaaaaaacccttacctgcaagccactggggaagtgggaacttaagcattagctgcctcatccgccttgcttcacaatgtccagataaacacctccttttctcccactgcaaatgtcagtgtaggtatctagtcttactgtactgggtgagcagacctgagctgaatt

SEQ ID NO: 578714 - DNA, 438 bp, Homo sapiens
ctttgtactaaatttcttcctgaggggcctagagggaggcaaatccattagccaaagagctaacattttttttctgccgacccccaaattttaaaccaaaccttcttttctttaaccaattacaaatcagaaaacccttgaatctatgtatggcctgtaagcmcctgcttcaaaatatcgtgacttttcaggacaaaaccaatgtgtaaactccatgtactgatttataattttgccagtaacttctgctttcctgaaatttacccctgctttaaaaaaacccttacctgcaagccactggggaagtgggaacttaagcattagctgcctcatccgccttgcttcacaatgtccagataaacacctccttttctcccactgcaaatgtcagtgtaggtatctagtcttactgtactgggtgagcagacctgagctgaa

SEQ ID NO: 578715 - DNA, 436 bp, Homo sapiens
gaattctgactgccattctttgtactaaatttcttcctgaggggcctagagggaggcaaatccattagccaaagagctaacattttttttctgccgacccccaaattttaaaccaaaccttcttttctttaaccaattacaaatcagaaaacccttgaatctatgtatggcctgtaagcccctgcttcaaaatatcgtgacttttcaggacaaaaccaatgtgtaamctccatgtactgatttataattttgccagtaacttctgctttcctgaaatttacccctgctttaaaaaaacccttacctgcaagccactggggaagtgggaacttaagcattagctgcctcatccgccttgcttcacaatgtccagataaacacctccttttctcccactgcaaatgtcagtgtaggtatctagtcttactgtactggg

SEQ ID NO: 578716 - DNA, 438 bp, Homo sapiens
ctttgtactaaatttcttcctgaggggcctagagggaggcaaatccattagccaaagagctaacattttttttctgccgacccccaaattttaaaccaaaccttcttttctttaaccaattacaaatcagaaaacccttgaatctatgtatggcctgtaagcccctgcttcaaaatatcgtgacttttcaggacaaaaccaatgtgtaaactccatgtactgatttayaattttgccagtaacttctgctttcctgaaatttacccctgctttaaaaaaacccttacctgcaagccactggggaagtgggaacttaagcattagctgcctcatccgccttgcttcacaatgtccagataaacacctccttttctcccactgcaaatgtcagtgtaggtatctagtcttactgtactgggtgagcagacctgagctgaa

SEQ ID NO: 578717 - DNA, 440 bp, Homo sapiens
ctttgtactaaatttcttcctgaggggcctagagggaggcaaatccattagccaaagagctaacattttttttctgccgacccccaaattttaaaccaaaccttcttttctttaaccaattacaaatcagaaaacccttgaatctatgtatggcctgtaagcccctgcttcaaaatatcgtgacttttcaggacaaaaccaatgtgtaaactccatgtactgatttataattttgccagtaacttctgctttcctgaaatttacccctgctttaaaaaaacccttacctgcaagccactggggaagtgggaacttaagcattagctgmctcatccgccttgcttcacaatgtccagataaacacctccttttctcccactgcaaatgtcagtgtaggtatctagtcttactgtactgggtgagcagacctgagctgaatt

SEQ ID NO: 578718 - DNA, 476 bp, Homo sapiens
tgcatccctccacattctcagctttggcctcagactgagaattacactgtcagctttcctcattctcatactttcagccttggaatgagccatgctactggtactccatggtttacagcttacagaagacctgtcttggcttccatcataatgtgacccaatttatctaattaatgccccccccatctgtctacctatatatgtatcctattggtcctgtatctctgaagaatgctaaaacaggttttattttttaaaccatgaatgattgcagagaactggaattttaggaacgagtttctttcattggttttggggtttctaaacttaggtctctaaactgatgatacstaaaaatgctaaagactccatttctaatagtccagaaaacattgctagtccatgtcataaacagcttaagagatatgcaaacatctagctttgacactcctaatcaacactgataaaagacaggg

SEQ ID NO: 578719 - DNA, 476 bp, Homo sapiens
tgcatccctccacattctcagctttggcctcagactgagaattacactgtcagctttcctcattctcatactttcagccttggaatgagccatgctactggtactccatggtttacagcttacagaagacctgtcttggcttccatcataatgtgacccaatttatctaattaatgccccccccatctgtctacctatatatgtatcctattggtcctgtatctctgaagaatgctaaaacaggttttattttttaaaccatgaatgattgcagagaactggaattttaggaacgagtttctttcattggttttggggtttctaaacttaggtctctaaactgatgatacctaaaaatgctaaagactccatttctaatagtccagaaaacattgctagtccatgtcataaacwgcttaagagatatgcaaacatctagctttgacactcctaatcaacactgataaaagacaggg

SEQ ID NO: 578720 - DNA, 366 bp, Homo sapiens
ccctgcaccaacttatgagaaatattttttgtactctgcttacctgctatcttgatggctttagggttggccaaaggcaatataattccaccatgtgagtatcaacagagtgcacagtcctgcacagttcctgatggagcctgtagaaagaagcaaagtaaattagaacaggttttctgaaaggtttgaaggtaaagttgwccttgggttacttgaagaagaaatccccgtaccaagaaaacatgatcctgaatgcagaaatatgatttctgttccctgtcactgaaatttcttattcttgccttatatcatctggaagtcatgtcttccaaaaaggttagtgggatcctgaatatactctgctaa

SEQ ID NO: 578721 - DNA, 366 bp, Homo sapiens
ccctgcaccaacttatgagaaatattttttgtactctgcttacctgctatcttgatggctttagggttggccaaaggcaatataattccaccatgtgagtatcaacagagtgcacagtcctgcacagttcctgatggagcctgtagaaagaagcaaagtaaattagaacaggttttctgaaaggtttgaaggtaaagttgaccttggrttacttgaagaagaaatccccgtaccaagaaaacatgatcctgaatgcagaaatatgatttctgttccctgtcactgaaatttcttattcttgccttatatcatctggaagtcatgtcttccaaaaaggttagtgggatcctgaatatactctgctaa

SEQ ID NO: 578722 - DNA, 585 bp, Homo sapiens
atacaataataataaagaagtagaaaatagattacttcccattgtatactatgaattcgtttaccctgattgaacaactacacaaatatatttcaaataaggagaatgaagaccaatatgccttataaatacagagacaaaaatcaccagggagacattatcaaatgaaatcagcaacatgtagaaagtattataaactatggcaaaaggtatttacctcaggaatgcaagtttggttcaacatatgatacaattaatgtcatacactatattaataaagaataaaaactacacaatcatctcagaaggtgtgcaacaagcacttgaaaattcccagattcagtattakaaaaacatgcagcaaattaggcagataagagaactttcttcatttcaaagggcatctatgaaaagctcacatatcatcataagtaatctgaaaggttcactaatttctctgatattagaaacaagtcacctatttccactgttcacacttgtttgcaacattgtactggagaatgtagacagggcaaatcatttagaaaaatataatatttctaatatggaaaggaagtcaaactc

SEQ ID NO: 578723 - DNA, 585 bp, Homo sapiens
atacaataataataaagaagtagaaaatagattacttcccattgtatactatgaattcgtttaccctgattgaacaactacacaaatatatttcaaataaggagaatgaagaccaatatgccttataaatacagagacaaaaatcaccagggagacattatcaaatgaaatcagcaacatgtagaaagtattataaactatggcaaaaggtatttacctcaggaatgcaagtttggttcaacatatgatacaattaatgtcatacactatattaataaagaataaaaactacacaatcatctcagaaggtgtgcaacaagcacttgaaaattcccagattcagtattataaaaacatgcagcaaattaggcagataagagaactttcttcatttcaaagggcatctatgaaaagctcacatatcatcataagtaatctgaaaggttcactaatttctctgatattagaaacaagtcacctatttccactgttcacacttgtttgcaacattgtactggagaatgtagacagggcaawtcatttagaaaaatataatatttctaatatggaaaggaagtcaaactc

SEQ ID NO: 578724 - DNA, 611 bp, Homo sapiens
tttctctgtgactgccccctctcagtataaaattttgtcggctcatcatatgtattctggtctattattgcgaaaacatgcttatctatagtttcaaattagttgaacaacttatttacctgctacctcaggattagagagagagttattattgggctactagaattcctattttaaatgttgctatgaattgttttaattttatataacctgggtattcattttgtacatagttttgacattctcataccagaaatagggtttagaaatccgtgacagtttccagtttgtggcctcctccacattcctcaaggtggtcattgaacatagacccttataaaacctgctcaaggtgactactccatataagacagatgaataccacctttatctcacctcactgtcccctgtgggaactgcacagatattcggcagtaaccacctctcagtcaaactctgactctgggaaatcatggttgcttcaccttaacccagcaatttgaactcctcatgagaaacctgcttgggtaacactccaaaacccaatgtgatgtttacttttaggagtcaactaactgtattaasgaacacctagaacactggcaaagctt

SEQ ID NO: 578725 - DNA, 425 bp, Homo sapiens
cctaaacaacagccaaggtagttacagtcagaagatgtttgctttgttctaaagatcgcatcttaacatacattcctgagtcatttttcataaacctagacccccaccaaaggcatctgctgacaagtacacctcagataaggggggcctgaaaactgaattctgactgccattctttgtgctaaatttcttcctgaggggctagagggaggcaaatccattagccaaagagctaacatttttttctgccaacccccaaattttaaaacaactcttcttttctttaaccaattacaaatcagaaaacccttgaatctatgtatgggctgtaagcccctgcttcaaaatatcacgacttttcaggacaaaaccaatgtgtaacctccactactgatttayaattttgccagtaacttctgctttcc

SEQ ID NO: 578726 - DNA, 552 bp, Homo sapiens
cacacacagaaacacacacacacacaaatattttctcatatatctgtatctttaagttaaacatgaattcctaataatcctccagcaccccatgatctaatccagtaccacatgaatcagcgcacctattcccgcttacttgtatgtagcctaccacactaacagtgataaagatgcttctgttatttaatcacataatccgraagacttgtgtaagtggtttcagaattagaaatgtatatggccatgagaaagaactttaccaactaaagtttttagggataaatctttaccctttagactcagaatatccacttacttgctacgttccttgggtcagctgcttttcccccactccattcagtgaggttatttcactgatgtgttatttcattccattatgtgtatagccccatgctatctgctacctactgtagaaagtttttaatttgtatattttaagttcaccttttgtattataaaattatttaggatttggaaaatataatcatgtatttatcattacagtatatgataccagaataatttcac

SEQ ID NO: 578727 - DNA, 607 bp, Homo sapiens
gtaaaatattttatatattgtggctaatatattcttttctgctatgtgattgtgaagattttcttctattctttgcattatctttttacctttaatcatgtactttgaatctcagaagattttaattcttataaagttaaatatattcatgttttttatttccttttcttgggctttaagtatcctatcttagaaattataggagttattgtttaacctaagacccaaattatgtatttctatattatcttctaagggtttggtctatttagatcttacatttgggtatatgattattttgagccaattatgtatatggtgtgagtgagaagttcaacttccttgtggatattcaattgtcctagcaacatttgttacaaatatatttttccatattgaattggcttggcaactttataaaatcatttgactataaaggtaaagattaatttttgkacattcaattctactatattcctttgatctgtatgtccaagtttatactattattgagcctttaaattaaattatgatgatactaattttttcatggatgccctttaaaataaagaaacttttcttataggcttaatttgttgtatactgt

SEQ ID NO: 578728 - DNA, 547 bp, Homo sapiens
agagtctcactacattgcccaggctgttctctaagtcttggccccaagtgatcctctcacctcaggctcccaaagtgctgggattataggtgtgagccagtgtgcccagctgctttgccatcgttaatgttatttgatcacatggatgaggcagtttagctcagttttgtccactataatatcgggcgaaattcacccccaatatttcacataggttcttttctattttccctaagtgtcagctggtctgagaaataaagggacagagtacaaaagagagaaattttaaagctgggtgtctgggggagacgtcacatgtcagcaggttccatgatkccccctgagccataaaaccagcaaatttttattagtgattttcaaaaggggagggagtgtacgaatagggtgtgggtcacagagatcatatgcttcacaaggtaataagatatcacaaggtaaatggaggcagggcgagatcacaggaccacaggactggggcgaaattaaaattgctaatgaagttttggacatgcattgtcattgataa

SEQ ID NO: 578729 - DNA, 547 bp, Homo sapiens
agagtctcactacattgcccaggctgttctctaagtcttggccccaagtgatcctctcacctcaggctcccaaagtgctgggattataggtgtgagccagtgtgcccagctgctttgccatcgttaatgttatttgatcacatggatgaggcagtttagctcagttttgtccactataatatcgggcgaaattcacccccaatatttcacataggttcttttctattttccctaagtgtcagctggtctgagaaataaagggacagagtacaaaagagagaaattttaaagctgggtgtctgggggagacgtcacatgtcagcaggttccatgatgccccctgagccataaaaccagcaaatttttattagtgattttcaaaaggggagggagtgtacgaatagggtgtgggtcacagagatcatatgcttcacaaggtaataagatatcacaaggtaaatggaggcagggcgagatcacaggaccacaggactggggcgaaattaaaattgctaaygaagttttggacatgcattgtcattgataa

SEQ ID NO: 578730 - DNA, 579 bp, Homo sapiens
ccatctgaatctgtgtcttctctctcccctacatttttcagtttatttaaaagacaaataaaaatattttattatccctcagtattatacaaaaatcttgtttaaagagaaaccaaattttacctttgccttagtgttttattaatgtcaaacccaatttttacataaaaccttataaacaratctgtccaatctaaatcagtttgagcatactgtttacaattttctactaaacaactgattaatgctccatgaaaactctgttgatcatacctaagggggcagattctgggcctgtatcactgtgatttttacattaatgatcattctgtagaaaaactaagtaacctgcttcaagttttggcaagttgctcacactcacacacagaactttctttactagaccaatcttttacaaaccttttataacctgcttaaaccttctgttttctcctattattttttaacttaagacaatttttaaaacctctaatttagacgagattacttttctaaacaaagacaatatcttaggtcttttttataactttttacaaaagcacattttataatttttat

SEQ ID NO: 578731 - DNA, 181 bp, Homo sapiens
tgtatgattctttccaacatagctcrggggcgtggctaactcaacatgtccccaggctttacctagaagctgctggctcttatgcaggcaggttggacacttacaaaaagtcatagatatttataaccttaaaacagcaaagagaatatctgacctgcctaatttagaccaaatgtctaaa

SEQ ID NO: 578732 - DNA, 181 bp, Homo sapiens
tgtatgattctttccaacatagctcaggggcgtggctaactcarcatgtccccaggctttacctagaagctgctggctcttatgcaggcaggttggacacttacaaaaagtcatagatatttataaccttaaaacagcaaagagaatatctgacctgcctaatttagaccaaatgtctaaa

SEQ ID NO: 578733 - DNA, 181 bp, Homo sapiens
tgtatgattctttccaacatagctcaggggcgtggctaactcaacatgtccccaggctttacctagaagctgctggctctwatgcaggcaggttggacacttacaaaaagtcatagatatttataaccttaaaacagcaaagagaatatctgacctgcctaatttagaccaaatgtctaaa

SEQ ID NO: 578734 - DNA, 399 bp, Homo sapiens
gataggaggtcagcacaaggtacaggtcataaagaccttgctgataaaacaggttgcagtaaagacactggctaaaacctaccataaccaagatggcaatgagagtgacctctggtcgtcctcactgctacactcccaacagcaccatgacagtttacaaatgccatggcaacatcaggaatttaccctatatggtataacaagsggaggaaccctcagttccaggaattgccatccccttcccagaaaactcatgaaaaatgcaccccttgtttagcatataatcaagaaataaccaaaaaaaaaaaggcaatcagcagcccatgctactgttctgcctatggagtagccattctttcattcctttactttcttaacaaacttgctttcactttatgg

SEQ ID NO: 578735 - DNA, 399 bp, Homo sapiens
gataggaggtcagcacaaggtacaggtcataaagaccttgctgataaaacaggttgcagtaaagacactggctaaaacctaccataaccaagatggcaatgagagtgacctctggtcgtcctcactgctacactcccaacagcaccatgacagtttacaaatgccatggcaacatcaggaatttaccctatatggtataacaagcggaggaaccctcagttccaggaattgccatccccttcccagaaaactcatgaaaaatgcaccccttgtttagcatataatcaagaaataaccaaaaaaaaaaaggcaaycagcagcccatgctactgttctgcctatggagtagccattctttcattcctttactttcttaacaaacttgctttcactttatgg

SEQ ID NO: 578736 - DNA, 607 bp, Homo sapiens
tcacaggtcacatgagtgagtcccatgtcagtggggcagaaatgtgtactcctctcatggtgggcactaacagtccaatggcaatgactggagatgtgtaattctctcacaggaaggaaaagtgaagcactgggaagcataataaaaatctacagcacactccttatcttagcgtaaaacacagctggcctcgtctcccaccattccttatcttgtctgtgctctggccacattgaatggtctcctttctccctaaacacatgatgccacactttcatgtctgtttcctatgctggaaatgaaattcccttcattttctgccaaacagagtggctctctgcctgcaaggtccagttcacattctgcctactttataaagcctttcccaactctccagttgaaattaagcactcctcctttggagcaaatgrggcagactggctgtacatccagctctaattcaatcttacttggtcagtctggtaacttccttggtaagttctttattggtaagtctggataaaaagctactgaaggttgggaggccaaggcgggtggatcacttgaggtcaggagttcaaaaccagcctggtgaacatggtgaaac

SEQ ID NO: 578737 - DNA, 597 bp, Homo sapiens
atgtggcctccaagggctccatgggcattgagatcccagtcagttggaaagggagctgagaatggaaagcatgtatgggaatcttttataggccaggcctgcaagtggctcgcatcccatctgcataaacacaggggagaagtggggaaccctggtgtggcttctcctgagccagtaatcttgcaaggctaggtaaagtatatwagtctccgtatgttattctaaaatagcatctttgtgtcctattggtgccataccagccactttaccaagtggtgagaaaaaaagaagaagaagaagtaaaagaggagacaggaaggaggcaggaagagatggtgaagcagcttaagaagcccaggtatccagtaacaggtagtgagattgaatcagtaataaagtctcccaacaaagaaaagtcccaaactggatggctcccctactaaattctaccaaatgtataaagaactaacactaattttcttcaaactatttaaacaaattaaagggaagggaattctccctaactcattctatgaggccagcattatccttattccgaaaacagacaaggatgcaacaacaaaaaaacaaattaca

SEQ ID NO: 578738 - DNA, 594 bp, Homo sapiens
aaacttctataagcccagcatctaaatcaktttttgactgaaatgagtacaggcaagctctgaggcagctctatccagggctatgacaagaatgaagtgaacacattttaccctacatggaaatgtccattccaacaagtgctaatttgacaatggtaatgattactatgggttgaattggattatcccaaaagatatgttaaagtcctaacccctggttcctgtaaatgtgattgtatttggaaataggatggatgcagatatcattagttaacatactggagtagggtggatctttaattaaataaaactgatgtctttataagaagagaagagacacagacacagagggaagatgaccatgtgaagatggaggcagagattgaaattatgctgccacaagccaaggaactcttggggctaccagaagctggacgagggcaagggagaattgcctgtagagcttcgaaggggacatagctcttctatcagcttgatttcagaattcctgcctccagaactgcgagacaaaaaagctctgttgttttaagccacctagtttgtgttactttgttatggcagcccttggaaatt

SEQ ID NO: 578739 - DNA, 657 bp, Homo sapiens
tgctgtaaatgccatcatgttagtcttgtttatggctgaatagtattccattgtgtatatatatatattctttaaccattcatccatgatggatacttacgttgattccttatctttgcaattgtgaatggtgctgcaataaacatgggctgcakgtattcctttgatatattaatttcctttcctttggataaatactagttagattactggactgtatggtagctgtttttagttttttgagaaatctccatactgttttccaaaatggctgtactagtttacattcccaccaactcccaccaacaagaattcccttttttctgcatcctcaccagcatctatatttcgtcttcatcttctccttctccttctttgacagggtcttgctctgttgcctgtttcccaggctgaagaacagtggtgattcacaggtgcaatcaggatgcactgcagccttgaactcctagccttaagcaatactcctgcctcagcctcatgcgtagctgagactacaggcatcagacttttgtctttttagtaatagtcattttaactggagtatgatgctatctcattgtgattttaatttgcagtttcccgatgattactgatgttgagcattttttaatatgcccatttgtctttttttgagaa

SEQ ID NO: 578740 - DNA, 657 bp, Homo sapiens
tgctgtaaatgccatcatgttagtcttgtttatggctgaatagtattccattgtgtatatatatatattctttaaccattcatccatgatggatacttacgttgattccttatctttgcaattgtgaatggtgctgcaataaacatgggctgcaggtattcctttgatatattaatttcctttcctttggataaatactagttagattactggactgtatggtagctgtttttagttttttgagaaatctccatactgttttccaaaatggctgtactagtttacattcccaccaactcccaccaacaagaattcccttttttctgcatcctcaccakcatctatatttcgtcttcatcttctccttctccttctttgacagggtcttgctctgttgcctgtttcccaggctgaagaacagtggtgattcacaggtgcaatcaggatgcactgcagccttgaactcctagccttaagcaatactcctgcctcagcctcatgcgtagctgagactacaggcatcagacttttgtctttttagtaatagtcattttaactggagtatgatgctatctcattgtgattttaatttgcagtttcccgatgattactgatgttgagcattttttaatatgcccatttgtctttttttgagaa

SEQ ID NO: 578741 - DNA, 564 bp, Homo sapiens
tggccatcttggaacctcccccagctatacctactttattggatttttgtgtctccatcagctgacatggtacttacagcctagaatgagcatacaaaggatactcattygctattcgatgatgactgacaaacagtctcccaggatcaccatgaaataactaaactgagtttgatttatttaaaaatcaggtccaggtaacaaactgcacctgtccccttgaattgatacaaataaaaataaaacaaaaaaggacaatattttactttatggaactttttattacaaagaattaaaaaaaaataaaataataatacttaaaagaatactttgactattattttatcacctaaaggcttctcttattattttatttttggagacagaatctctgtcaccccggctggagtgcagtggcgcgatctcagctcactgcaacttctgcctcccgggctcaagcaattctcctgcctcagcctcccgagtagctgggattacatgagtgcaccaccacaccctgctaattttttgtatttttagtagagacagggtttcaccatattg

SEQ ID NO: 578742 - DNA, 564 bp, Homo sapiens
tggccatcttggaacctcccccagctatacctactttattggatttttgtgtctccatcagctgacatggtacttacagcctagaatgagcatacaaaggatactcattcgctattcgatgatgactgacaaacagtctcccaggatcaccatgaaataactaaactgagtttgatttatttaaaaatcaggtccaggtaacaaactgcacctgtccccttgaattgatacaaataaaaataaaacaaaaaaggacaatattttactttatggaactttttattacaaagaattaaaaaaaaataaaataataatacttaaaagaatactttgactattattttatcacctaaaggcttytcttattattttatttttggagacagaatctctgtcaccccggctggagtgcagtggcgcgatctcagctcactgcaacttctgcctcccgggctcaagcaattctcctgcctcagcctcccgagtagctgggattacatgagtgcaccaccacaccctgctaattttttgtatttttagtagagacagggtttcaccatattg

SEQ ID NO: 578743 - DNA, 564 bp, Homo sapiens
tggccatcttggaacctcccccagctatacctactttattggatttttgtgtctccatcagctgacatggtacttacagcctagaatgagcatacaaaggatactcattcgctattcgatgatgactgacaaacagtctcccaggatcaccatgaaataactaaactgagtttgatttatttaaaaatcaggtccaggtaacaaactgcacctgtccccttgaattgatacaaataaaaataaaacaaaaaaggacaatattttactttatggaactttttattacaaagaattaaaaaaaaataaaataataatacttaaaagaatactttgactattattttatcacctaaaggcttctcttattattttatttttggagacagaatctctgtcaccccggctggagtgcagtggcgcgatctcagctcactgcaacttctgcctcccgggctcaagcaattctcctgcctcagcctcccgagtagctgggattacatgagtgcaccacmacaccctgctaattttttgtatttttagtagagacagggtttcaccatattg

SEQ ID NO: 578744 - DNA, 544 bp, Homo sapiens
attctccaaaaaggcataacaatacttaatttatatgtgcctgaaaatagagcatcaaaatacatgaggaaaawaatgaactgaattgcaagaagtaaataaatccactgtgatagttagaggcttcaacatccttctattagaaatagaacagcagttagaaaattaataaggacacagttgaactcaatgatatcaatcaattcaatagaattgatcactatagaatactttatccaacaacagcacaatacaattatcaaattcatgtggaatattcaccaaagtagactacattctgagacataaaacacaccttaacaaattttaaaaggatagaaatcagagcctcaagtggtggtgatgtctgtagtcccagctacttgggtatctgaggcgggagaatcctttgagcccaggtgttagaggcttcagtgagctatgattacactcactgcacatgcacccagggtgacagaataatacccaatctcaaaataaaatagtaaaataaatcataccatatatattagtccattttcac

SEQ ID NO: 578745 - DNA, 330 bp, Homo sapiens
gtgtatgggtttttatcaggggtaggatacaaattcctcagttctgaagtgaatgagtagagagggacctagagaatttaaaaagatatctaaagataaattataagatttcctatctgatacactgtaaaacttctgtcccttcaagaaacactgaagtaagcttcaaattactctcagagacttttgaagttgaattgacatttctttgactgattgtgttccaaggactcattttaaagaaagaacaggtagtcttatgttgtgtcaattatacaaagatgagttttcccaagaacctgataygttcctgaagagttcacaataaaa

SEQ ID NO: 578746 - DNA, 606 bp, Homo sapiens
ttcacttgtttatctcctgacmttccctccactgttgtcccatgaccctgccaaatccccctctgtgagaaacacccaagaattatcaataaaaaaataaattaaaaaaaaaaaaaaaaaaaaaaagaactgctgttgctggccaggcgcggcggctcacgcctgtaatcccagcactttgcgaggctgaggcgggcggatcacgaggtcaggagatcgagaccatcctggctaacatggtgaaaccccgtctctactaaacatacaaaaattagcttggcgtggtggcacgtgcctgtaatcccagctacttgggaggctgaggcagaaggatcgcttgaaccagggagttggaggttgcagtgagctgagatcatgccactgcattccagactgggcgacagagtgagactccatctcaaaaaaaaaaaaaaaaaaaaacaagaaaaaaaaaaaaacttgctgtcaccgagagtctgagccctaagagagatttgagggagagaagggaacctgtcgtgaggctaaggtgtcattaggttggatttaacagactctcctgttagcatccttcctgcacactgcctagcactgttagtgacaggg

SEQ ID NO: 578747 - DNA, 584 bp, Homo sapiens
gttcacttgtttatctcctgaccttccctccactrttgtcccatgaccctgccaaatccccctctgtgagaaacacccaagaattatcaataaaaaaataaattaaaaaaaaaaaaaaaaaaaaaaagaactgctgttgctggccaggcgcggcggctcacgcctgtaatcccagcactttgcgaggctgaggcgggcggatcacgaggtcaggagatcgagaccatcctggctaacatggtgaaaccccgtctctactaaacatacaaaaattagcttggcgtggtggcacgtgcctgtaatcccagctacttgggaggctgaggcagaaggatcgcttgaaccagggagttggaggttgcagtgagctgagatcatgccactgcattccagactgggcgacagagtgagactccatctcaaaaaaaaaaaaaaaaaaaaacaagaaaaaaaaaaaaacttgctgtcaccgagagtctgagccctaagagagatttgagggagagaagggaacctgtcgtgaggctaaggtgtcattaggttggatttaacagactctcctgttagcatccttcctgcacact

SEQ ID NO: 578748 - DNA, 584 bp, Homo sapiens
gttcacttgtttatctcctgaccttccctccactgttgtcccatgaccctgccaaatccccctctgtgagaaacacccaagaattatcaataaaaaaataaattaaaaaaaaaaaaaaaaaaaaaaagaacygctgttgctggccaggcgcggcggctcacgcctgtaatcccagcactttgcgaggctgaggcgggcggatcacgaggtcaggagatcgagaccatcctggctaacatggtgaaaccccgtctctactaaacatacaaaaattagcttggcgtggtggcacgtgcctgtaatcccagctacttgggaggctgaggcagaaggatcgcttgaaccagggagttggaggttgcagtgagctgagatcatgccactgcattccagactgggcgacagagtgagactccatctcaaaaaaaaaaaaaaaaaaaaacaagaaaaaaaaaaaaacttgctgtcaccgagagtctgagccctaagagagatttgagggagagaagggaacctgtcgtgaggctaaggtgtcattaggttggatttaacagactctcctgttagcatccttcctgcacact

SEQ ID NO: 578749 - DNA, 557 bp, Homo sapiens
gccagaaatattggccactatactgtrgccaaaattgggtaataaggcatttaaaggattttcttaaagagcactcagcttaattaaaagtggacatctaagttatagatacacttaaaaggcctttatgtttttctcttcttggatcttgttttgctggaaaaagtttttttctcagtcaactgaattactcttctccaccttgtcttgccactcttaatgcatgcatgagatgccctaagataacttgtgatgccctgggactctttgggaaaaacagaaaatgtagcaaggattccattttggcagaaacctctgttttcctcatggaaccccaggaattgaaggtggataaatacctctcaaaatctctttttgtcttcctgctatacctgtttatcaggccccagaaacagcatgttttcctagccctgttcttaaagggccccatccaaaggacaataatccaattagaacattggcaaatgaaaaatcttataactactagatcttctcctgtttgtctgtgtagctatatatgtgttgtgtgtgatgtc

SEQ ID NO: 578750 - DNA, 629 bp, Homo sapiens
atttataaataaagaggtttcatggattcacagttccatgtggctggagaggcctcacaatcatggtggaaggtgaaagggacatcttatatggtagcaggcaagagaatgagaaccaagtgaaagggggttccccttataaaaccatcagatctcatgagacttattcactaccatgagaacagtatgggggaaactgcctccatgattcaattatctcccactgagtctctcccrtaacacttgggaattataggatctacaatttgaaatgagatttgggtgaggacacagccaagccatatcaccagttgttttaccaaggctttgactgaaagggtatgctttactccaaagaatcaagctcgacttgcagagccaataaaagccccttaggaaaaccgacctcataccttgtctacacagtccctgtacagggtccctaacctgtggtgagtaaataatgtcactttctaacaggcccaggaacctcatattcttgggacctcaagaagagaggaattcacccaactcataggtgtttgaggacacaaacccatggctgggctcagctttaaaaagtcctatgtgagattccttgtgggacaaagttccatcaaagccaattt

SEQ ID NO: 578751 - DNA, 465 bp, Homo sapiens
atttctctttttctacaaaagtatgtacaattttatgatcagaaaaaaataaattcactaagtcttaaaagtttatgartaattccaatgtgcaaagggctttgaaaaatgtggtgagggatacaaatatgtctccaattgtctcaaaagtccactggctcagggaaagtgtaaggctagttgagaacacgcagagtgccaagttaaacctaccagatgccaccatggaaaccctagtaagagggaaagccctcatctggttgaggaggatgaagcaggggtagaaagaccctgctttgtagaaatttaagcgtgtagatttataagtggagaaaacatgctttaatccattctgtgttgtggacatctaggcctgtgtgtgtgcacacatgcacgtaggtgggcttctatttaaacagacaatgaggtttcctggaaaaagtaaataattatactaaagcattc

SEQ ID NO: 578752 - DNA, 543 bp, Homo sapiens
tgcttaagacagagcccactgtgaaatgctctcttggcagcgtgcgaaagcacctgcacctgttctaacttgagggctcttcaggtgcacaatgagatgttccatatttatctacttttgcctttttttgtattttttataccttctatttcccaaaaaggatctgttgcttaaatacgcttttaaagaattttgaaaatctatatattcccctcacatatatttaaatagacatttacatttcttcatcataaattttgaaattactcaaatattgatgatttcagataaaacatattgttcctttaagtgtatccagtgaatctaaatatacacattatgcatttaaagatacctgaacaagctttttaaaaatcagaaattttatatcattctttttttaaaaaaaactactatctccattttatttacttcatataattttatcactccatcatgtayctttgtaagaaaaatgtgtaagcatagaaattaacttttttattttctataataattatgaatggaataaaacaatttgtt

SEQ ID NO: 578753 - DNA, 539 bp, Homo sapiens
taaaattgtcaaaagttaaggacaaagagacttttaagggaagcaactcatcctatgtaaagaaaaccctgtgataccactagtggatttctcagcagaaaccttgcaggcctggagagagtgagatgacatatttgtagtactgaaagaaaaaaaaacatactggttagcaaaaataccattcccagaaaaattattctataaaaatgaaggaragataaaatctttccttgagaaaaaaaatgagagaatttatcaccattagacctgccatataagaaatactaatgagtattcttaattaaaatgaaaacacatatatacaaccaatgaagactaaatctgaaaattataaagaactgatgaatggaattaaagaagaaacagataaatgaaaagacatcctttgaccttggatgggaagaatttatattgtgaaaatgcacatattttccaaagaattctacagattcagtgcaatccctatcaaaatctcagtggcattctttacagaaatagaaaagcattttaaaattcat

SEQ ID NO: 578754 - DNA, 638 bp, Homo sapiens
gctaggcacagtggcacacacctgcagtcccagctactcacgaggctgaggaaggaggatcacttgtgcccaggagtttgagtccaacctaggccacataaggagactccatatttaaacaaaagaacttaattgtggcagcattgtttgtggtattaaatatagaagttacctagtattcaccagagaggaatagatgagtaaaatgtgataagttaatagtctggaattctaagccatggtcagagcaaattaacatgtagtcacatggacagacctaaaagcacagtaytgaatgaaaatgtctagcacagtacatttaagtaaataaaaatccatagataaagcagcattttcatacttaaggacatagcaaatacagtagaataagtgtctaagggggagaaagggctgggaatgacaattatgagtggagaaaaaatgtacaataataaaacatgaaagagtctcagtatgcattaatgatgatagtattctatgaaccaaagtaattaaataaactttgcgaacgtggggttaaaaagtagaacagaaaaaacagagagatgttgttgaagagatgatgtgatatagagaaaattaacctgtcctgcaggcaggagacctgggttttcatc

SEQ ID NO: 578755 - DNA, 419 bp, Homo sapiens
ccattggatgcataacaacgtaaatgtaagttatsaagtttggggatgtcatttcctattatgtgatgtgataaacatcacttaaaagctttccatctctgtgggcttttgtgagtatatagttcagagacagcagaagggagggagaggcttgaggggtgagctgtactaaatagctctcactaaagacagttcaagatgctgactggaaaaatagcaagcctactctaaatggtaatgagtgaccataaaaagctaaggagtcttaaaacaccttccaagttgtcttggaaatgaatttatgttatggaagaatatgaatcactaaactgtgggcaatttgagagcagggactttattcttatattcctactagcattattgagcatagaacatctagggcttaaaaaatatttgtt

SEQ ID NO: 578756 - DNA, 555 bp, Homo sapiens
gaattctaggcataatagtcaaattccaaactactacacgggaataataaaatctgtattttcaatgaaaaaaaaaaacagatatagacaagaaatctccaggagaagaaaacaaactgattttattgggatttatttttagcataacacttacagattaaaagatgtgatgtccaaaatatttcatgcaaaaataagaaacagatgaaaaaaactttatatctattttaaatggtcttttagtgagagtacaaaaatgatacattgcaaaatgaaatatccagcctttaatattcaaataggatatatgaaaatataaatacaccattttaaatggggttccataaatagcctgtttaactaaagttacaacatttaaaaatatatattcttggccgggcgcagtggctcaggcctgtaatcccaggactttgggaggctgaagcrggcagatcacgtggtcaggagattgagaccatcatggctaacatggtgaaaccccatctctactaaaaatacaaaaaaaattagctgggcatggtggcggacgcctgt

SEQ ID NO: 578757 - DNA, 576 bp, Homo sapiens
tgcttttttttttttttttttttttttactgccaagctagagagtagaggttctctgattagtccctgaagtgaagattcagggkgcattcttctcagttaactggaagagattctgtcagtattatttaaaaggccctttaaaaattctaaatgttagtctatttgtgtttttaatgtttagttatttatacttatgcagttgatgacacatatatgctgtgattgaatttgattttttttttttttgcatttgaaagatagaggtaggatggaaatattatctgccttttaaagaaaatataagtacagttactggaaactcgaaaccaagggagaaaagactctacaatttgtagtgactatattttcacataaagtgttttaagaatactttttctaaaaagtcccagtgaaatgcgacttttcttaaaagtcatatagtttttcttcacattttaaaaatcaatttccctgatgtcttgtggatttttgactgtttcatgactcttagcatttgaaaagatattattaactagactagcttaagatttacctgaatgccaggtacggaaat

SEQ ID NO: 578758 - DNA, 403 bp, Homo sapiens
agggaaaacatttgggagattttctcatggagtttatttttaacttcccttcagcaccctagaattttgctttcttttcatgtctaacttgcaaagccctctattaccttagctctctttcatatagctgtgaaggttttactaaattagttaaaaaaagcaaaaatgctagtactttatcttctccttggaaacttgagcttataaggtatcagtgttattaatatttagtartagtgtgtgaacaattgataggaaagcattgccagcaaggttgaccacactgacattggtggaggacccagtgatgacagaaataagctaaaccttgaaaataagtaactctaactgaagaagcaatgctgttgatggtgactgttggtaaggctgacaacaaaaatta

SEQ ID NO: 578759 - DNA, 486 bp, Homo sapiens
gtcttttaagaaaccttgaagtaaaagactcaacaggcaaattccccgatttctgatctgtaggaatggtgagagaataaatgtgtgttgtttttagtattaatgtctagggtactgttttgcacattaatagataactaatataacttgtatgaacrtcaacataaacatcagattgttttcttatgagtgagtgctacagggctatttatttataatgctagtataactcttggcatataatattatgttcccagagtactcatgttgaagtcctggagtcaaagattaacatcccagcagcacagccctaaatctagcaaaagttttattcaaattttggttccattttcctctttatttgtgagaggagatacatatgaatcagtctgggttctatgtgtaaatatgattgctataacttagactagtacccagtttaaatatctattatgccatatttcctttcatacatttataatatga

SEQ ID NO: 578760 - DNA, 515 bp, Homo sapiens
tattttcattccaatattttaggcaawatattactcatttatcctataatctttaccatctttataagcagtagttactacctctcatgtatctatggctacatgtgctattattattgtgaaatgcttatctaccttgatttcacagccccctgtgtttcatttaatgggcaaaactattaataacaagtaaactgtttttaacctaagtttctcccccatttgctctggaaacaagacgagaaaagagctatccatgtgcttctccaaaataatcttttgttcagcaactattaatgagcacccccgtatattaggtacagtgttaggcactagggtaaagtaatgaactataaataaaacacgcaaacaaagaaaaaaaattcagcctttacagaacagttaatattctagtttattttaaactaccaaacagcttatagaatgatgtggtttaactctgtgtccccacccaaatctcatgttgaattgtaattcccaatgttgggggaggg

SEQ ID NO: 578761 - DNA, 482 bp, Homo sapiens
ccaatatggtgaaaccccatctctacttaaaatacaaaaattagccaggcatggtgcatgtgcctgtaatcccagctactcaggaagctgaggcaggacaatcacatgaacccgggtggcagaggttgcaatgagctgagatagtgccactgcattccagcctgagcgacagaatgaggcactgtctcaaaaaaaaacaaaaacaaaaacaaaacaaaaactactaaatacacaaaatacagagagaaagaaataaattataccactacaagattaaaacaaatcataaacaaatacagccagagtgaaataaaggaacaaaataatttcaaaacrtttagtctaaatgtaaatggattaaattctcaatttaaaagccacagagaagatgaatggattaaaaaaaattaaaaaatgaaaaaccaaagatctatcaaaacactgcctacaacagactcacgttagccattagaacaaacata

SEQ ID NO: 578762 - DNA, 648 bp, Homo sapiens
ttagaatagcatgaatatactggagagatttatatatgataagtttagcacactatgtttacaacatacccaaaaaaagcacacttgttagcacttcaatttaacatgaatggaatttgcatgaatagatcgggggaagcattgagtccctagtagcagagaaataccaggaaaaatactagtgattttgagcagcaaaagggctttgcctgaattaataaataagctatctggtgatggtaattatagcattgctctctacctttgtatgacacaaatatatctgggaagagcaaatagacatgagttggggaaacagactattaatataaagtatcatgtaacagatcttagttgaagcattgcattcactttaaatagggcaagtagaaaattatgaattttataactctaaaaccttttactttgcccatttgccaagtcccagttttcacataaaacatttttcttcttgttgaatttactttcttcactttgytacgcttaaaccagctttgatgaaaactatttcctatgatgtgacataggagctctagcagaagcttgttcacttgtatgtaatatgagcattgcgccgagcaaacaccatttagatactaccattattataagctcatttagtactac

SEQ ID NO: 578763 - DNA, 450 bp, Homo sapiens
taattaaaatgcccaaaatcacagttaatctctactaaagaattttatgatcatgcactatagttttaaaaggacattggttaagatgttaaatcatacatgaaaatataagttgttccagataatacttacataaaaagattgaatgccctcttgtgtatacatgacatgaaatatttgtagtamaataacatatatgtgatatctttggaattttttatgtatgtgtggagtgtgtatgtatgtgcatgtagatcctttgacctaaaatgtatcctttattaacagattccaaataaaaatatttagagattcaggatttcatgcagggataaaaatattaaccacagtactattataataaaatcaaattagaaaccaaataatgtttcttgccaatagactgtaagggaaattatgatatattcataggaagcccctgggaaaaat

SEQ ID NO: 578764 - DNA, 458 bp, Homo sapiens
atcacagttaatctctactaaagaattttatgatcatgcactatagttttaaaaggacattggttaagatgttaaatcatacatgaaaatataagttgttccagataatacttacataaaaagattgaatgccctcttgtgtatacatgacatgaaatatttgtagtaaaataacatatatgtgatatctttggaattttttatgtatgtgtggagtgtgtatgtatgtgcatgtagatcctttgacctaaaatgtatcctttattaacagattccaaataaaaatatttagagattcaggatttcatgcagggataaaaatattaaccacagtactattataataaaatcaaattagaarccaaataatgtttcttgccaatagactgtaagggaaattatgatatattcataggaagcccctgggaaaaattttgcaaggatttttaatgatattg

SEQ ID NO: 578765 - DNA, 571 bp, Homo sapiens
tgcccaagggttggggacccctgctctgttaagtgtgtaataacattatgtctaaaaaagaatgtacgtaccttaattaaaaatactttgttgctaaaaatgctaacaatcttctatrccttcagtatgttatcatcttgttgctagtaaagtgtcttgcctccaagtggatggctgctgactggttgctgaagatttgggtggatatggcaatttctgaaaataagaacgatgatgaagtttgccacaccaattgactcttcctttcacaaaagacttctctttaaaacttgatgctgtttggcagcattttacccactataaaactactttcaaaattgaagtcaatcctttaaagccttgctgctgcttgatacactaagtttatgtaatattctaaatcccttgttgtcctttcaacaacgttcacagtatctgtaccaggagtagattctatctcaagaaaccacttttttggtccctcgtaagaaacaactccttatccattcaaattttatcatgagattatagcagtcgtatcttcagattccacttctaaatctagtcctta

SEQ ID NO: 578766 - DNA, 615 bp, Homo sapiens
cgctcttataaaaaaaaaaaaagacatccagccttcatcattaagtatgatgttagctacagattttttgtatctgcctttttccatgttgagaaaagtctcttctatgctaagttttttcatgaaagagtatttgattttatcaagtactttttctamatttgttgagaaaatcttgtgggtattttttttgttttttaatctgttgatatgatatgttacattactcgattgctagataagccaaccttgcatttctcagataaatccaacttagtcattgtgaaaggaaaacaaatctcaagaccctaaaatcactaagccaaagggacctgcatcaggcaaatctgcctcccattttatttctaaatgagacagctataaaaattaaaaagctaccatacctccttcacaatttgtgaagaaggaaattctttagggggcctcaaaaatctttgccctaaaacagatctgttgaatttcaccttggcaatgtaatttgatagcttatcttcacaggtgcaggacaaaggacagaactcaaagtcatccctctgctcacccagacaaataatatatgcctgtttgcttcctctgtcctcttgtttatttaag

SEQ ID NO: 578767 - DNA, 615 bp, Homo sapiens
cgctcttataaaaaaaaaaaaagacatccagccttcatcattaagtatgatgttagctacagattttttgtatctgcctttttccatgttgagaaaagtctcttctatgctaagttttttcatgaaagagtatttgattttatcaagtactttttctaaatttgttgagaaaatcttgtgggtattttttttgttttttaatctgttgatatgatatgttacattactcgattgctagataagccaaccttgcatttctcagataaatccaacttagtcattgtgaaaggaaaacaaatctcaagaccctaaaatcactaagccaaagggacctgcatcaggcaaatctgcctcccattttatttctaaatgagacagctataaaaattaaaaagctaccatacctccttcacaatttgtgaagaaggaaattctttagggggcctcaaaaatctttgccctaaaacagatctgttgaatttcaccttggcaatgtaatttgatagmttatcttcacaggtgcaggacaaaggacagaactcaaagtcatccctctgctcacccagacaaataatatatgcctgtttgcttcctctgtcctcttgtttatttaag

SEQ ID NO: 578768 - DNA, 545 bp, Homo sapiens
caatcagagactatattttccatacttgcatctagggcacattccattgcaatatagttgaaagtcatttatatcacttctgagctgaagttcaagaagaaaatgtgtcccttccacatttcctttatttattttctggatgaatttagagaacttcaaggctgtagtggggaatacagctaaaagatgaaacagctcatttctctgaattaccatgtggaagaaagccattcacccaccagcaacatctaagcagttatttaacctgagtgtaaaatagtaatctgtggtatatagtccataaaacagttgagtttattatagcagctaacaatgcccttaatgtcataatcacaaatgtttattttaaatacaaaattccatgttctacactcatktcaaatcagtaatttttttcagacattaaacataatttcccagataaaaggcagaaaacaatagtaatgtactaattattttccattttcagggccataaccctaattctattcctagttagctaacacttttaatggccatatcat

SEQ ID NO: 578769 - DNA, 625 bp, Homo sapiens
tgctgctattgctgtgtcaaccatactttaaggaacaaagtcataaagaagtgcttcaaattatccttccttgcccctatatacaacccttgyggatctcactgtttctctggtaaattttaggttttaaaaagcttactcaagttcaaagcaatttcttacttgattaagaagttttcctcccaaagcccagttctgattcagtctcagaaacttgaagtggaagggttgaggatgacttccatgtcagcttcttcagtcaggttcagcagtcacagacaacagtgtggggaagcaacagaagaatcccttcaagaaaacagacggggagaaaaggaaatagaaaaaaatgcttacttgacataacgtatgatatcagtgcccatttgtgtgtcagctgtctaaatattaattctactgaaggcttttcagaaaacctaatcattgaggattttcatttctagtttcttgatgaggcaacttgcatcccttggttatttactaactgacttgtttttcgagccatagtttaagcattctattgtggccactttggtcttacaggaagtgtctttcaagataacctaggactgacacccatctgcaaagtccacaccatctatgg

SEQ ID NO: 578770 - DNA, 625 bp, Homo sapiens
tgctgctattgctgtgtcaaccatactttaaggaacaaagtcataaagaagtgcttcaaattatccttccttgcccctatatacaacccttgcggatctcactgtttctctggtaaattttaggttttaaaaagcttactcaagttcaaagcaatttcttacttgattaagaagttttcctcccaaagcccagttctgattcagtctcagaaacttgaagtggaagggttgaggatgacttccatgtcagcttcttcagtcaggttcagcagtcacagacaacagtgtggggaagcaacagaagaatcccttcaagaaaacagacggggagaaaaggaaatagaaaaaaatgcttacttgacataacgtatgatatcagtgcccatttgtgtgtcagctgtctaaatattaattctactgaaggcttttcagaaaacctaatyattgaggattttcatttctagtttcttgatgaggcaacttgcatcccttggttatttactaactgacttgtttttcgagccatagtttaagcattctattgtggccactttggtcttacaggaagtgtctttcaagataacctaggactgacacccatctgcaaagtccacaccatctatgg

SEQ ID NO: 578771 - DNA, 575 bp, Homo sapiens
gaggttggtggacattcactgaatgagaaatcttactatgtgattattgcagatttctttcacagcatttgtttttgaaaatatatacacagatactatatatatttacctactttgccagttcttgagttttctccttaatctacactaaactttttcccagccttataattgtacagtttctaaggtatttgtcatccgcataaattattaatcaacacatctgattgttagtatggatgaattaaggttcaaatgaattattggaacctctgggcaatttgtttctcaaatgaagtgaacaaacagatgccatactcaaggttctgcccccaaggggacttcgctgttatattttatgtttatgatggccaattttatgtgtgaacttgactggacagcaggatgccaaactatttggcctaaccttattctgagcatgtctttartggtgttttgaatgagactaacatttgaattggtagaataagtaaagcagattgtcctccttaatgtaggtggccctcatctaatcagttgaaggccagaagagaacaaaaaggctcatcctccca

SEQ ID NO: 578772 - DNA, 575 bp, Homo sapiens
gaggttggtggacattcactgaatgagaaatcttactatgtgattattgcagatttctttcacagcatttgtttttgaaaatatatacacagatactatatatatttacctactttgccagttcttgagttttctccttaatctacactaaactttttcccagccttataattgtacagtttctaaggtatttgtcatccgcataaattattaatcaacacatctgattgttagtatggatgaattaaggttcaaatgaattattggaacctctgggcaatttgtttctcaaatgaagtgaacaaacagatgccatactcaaggttctgcccccaaggggacttcgctgttatattttatgtttatgatggccaattttatgtgtgaacttgactggacagcaggatgccaaactatttggcctaaccttattctgagcatgtctttaatggtgttttgaatgagactaacatttgaattggtagaataagtaaagcagattgtcctccttaatgtaggtggccctcatctaatcagtygaaggccagaagagaacaaaaaggctcatcctccca

SEQ ID NO: 578773 - DNA, 489 bp, Homo sapiens
attacggactgaaacagcaaaacaaaacgtatttcatagaaatcttcttcttcttcttcttcttcttcttcttcttcttcttcttcttcttcttcttcttcttcttcttcttcttctyctccttctccttctccttctccttctccttcttcttccccttcctcttcttcttcttcctcttcttcatcttctttcttcttcctttttcgagatactttgtttaacattccataggttactatagtaaaaaatgaacatgatacaaattgctgtggcagaaaattccataaaacagagtaatccagcaatgtggttttgggcacatggccccagccaaaactataataccaagtgaatatggagctgaagttagttgaggagactagagttctttttgagaaacagagtgattctaaaattcctacaggatatcctggtggtttcatgggaatttcaggataagacaaaacagaatgaattatagcccat

SEQ ID NO: 578774 - DNA, 519 bp, Homo sapiens
aatatctggtataaaatagtggatttattgaattatttccttcaataattcacaaacatatttccaattactgccttcttatgacacacaagkatgaaaatatatcatgtttgaatttcctagcagaggaagagtaggtatttccatccacagatattggcttggtcatgtgatttgctttgaccaatctaatgtaagttagtcagaagctattcaagaaatatgaaccacaccagctgtttgaacagagatattttcatataaactaatcttaataattagatattggtgacaacttaattaaaaagcaaaaggaaacactacattttcatggagttgctgtggaaagcacttaccatccctaaggctggaggttaaaaagggaagaggctgaaactgttaataatagaagtttggaggagagacctcattaaaatggaacgtggactcctgataaggttggtactcgtacctgaagtcctgtgaagaaagatactgtagaacttggttgcaggcctt

SEQ ID NO: 578775 - DNA, 519 bp, Homo sapiens
aatatctggtataaaatagtggatttattgaattatttccttcaataattcacaaacatatttccaattactgccttcttatgacacacaaggmtgaaaatatatcatgtttgaatttcctagcagaggaagagtaggtatttccatccacagatattggcttggtcatgtgatttgctttgaccaatctaatgtaagttagtcagaagctattcaagaaatatgaaccacaccagctgtttgaacagagatattttcatataaactaatcttaataattagatattggtgacaacttaattaaaaagcaaaaggaaacactacattttcatggagttgctgtggaaagcacttaccatccctaaggctggaggttaaaaagggaagaggctgaaactgttaataatagaagtttggaggagagacctcattaaaatggaacgtggactcctgataaggttggtactcgtacctgaagtcctgtgaagaaagatactgtagaacttggttgcaggcctt

SEQ ID NO: 578776 - DNA, 555 bp, Homo sapiens
atggtgaaaccctgtctctactaaaaataccaaaattagccaggtgtggtggtatgtacctataatcccagctcctcaggaggctgaggcaggagaattgcttgaacccaggaggcagaggttgcagtgagccgagatggtgccactgcactccagtctggatgatggagtgaggctctgacttcgtttttttttttttttaaaaagaaactggctggtaaatataagaggaaataaattataaatcaagagtaatttctaatgtttggcaaatttcttcaggtataggcaaaataaaagttcctatgaagtttattgacatttcctctcagtgacaccataacaaggcagtatttctttcaataaaataatcttaagaagttagaaaaaaaaggccattaggttatggcttctttcttacatttcctcaaatttgtttgatgcaactatttttgcataatttgatagagtcrtctaaaattatggataagcaatgtatgtgacaaaaaccaatacaaaactattcattattataaacataaaacataaatttca

SEQ ID NO: 578777 - DNA, 647 bp, Homo sapiens
aaacttttatttactttattctacaacacataaaataacatttaaayaaccatagtggtgtcctaactagagcaataaagctgaataaaggtttgccttaggtttcctttgtacctatcccctttaaggatgtactgccacaatactatgttctgaatcatgttgaaattattaatttttgcctgtgtggttaatcaccaacttgatatgttcatttgttttagtttgatctgaatttttaagacttgcacttttatgtaatttatttttaatatatacaaatcttgcgtgtcttaagtcagaattaataacaacatatgctcagaaacatctcactttcattcttatcctctccctctgttccctgccacctgtataaacaaacgtttttattagttttcattttggccttccagttttgttttgttttgttttgttttttacaaatataagcacaaatgttactatactatatttaatactttgcttcctatttttgtttcccctgtgggcaccagacatagctgtatatttatttatttgtgaaatttctttactgtcctctttcagaagaaggaataattaatggttaaaattctaaaataaaagtaaatgataagttgaacagagaagttactttgttgtta

SEQ ID NO: 578778 - DNA, 647 bp, Homo sapiens
aaacttttatttactttattctacaacacataaaataacatttaaataaccatagtggtgtcctaactagagcaataaagctgaataaaggtttgccttaggtttcctttgtacctatcccctttaaggatgtactgccacaatactatgttctgaatcatgttgaaattattaatttttgcctgtgtggttaatcaccaacttgatatgttcatttgttttagtttgatctgaatttttaagacttgcacttttatgtaatttatttttaatatatacaaatcttgcgtgtcttaagtcagaattaataacaacatatgctcagaaacatctcactttcattcttatcctctccctctgttccctgccacctgtataaacaaacgtttttattagttttcattttggccttccagttttgttttgttttgttttgttttttacaaatataagcacaaatgttactatactatatttaatactttgcttcctatttttgtttcccctgtgggcaccagacatagctgtatatttatttattygtgaaatttctttactgtcctctttcagaagaaggaataattaatggttaaaattctaaaataaaagtaaatgataagttgaacagagaagttactttgttgtta

SEQ ID NO: 578779 - DNA, 578 bp, Homo sapiens
caagcaggagaaaggacttctgaatttgaaataactcagcagaaaaacaaagaaacaaacaaaagcattcaggaaaaaaataataacaaaagcctatgtgacttgtgagacaccataaaatgaccaaatatttgaatttagggaattccagaaggagaagagattggcaaaagcatagcaaacctatttcataaaataatagctgaaaacttcctaaatcttttaagagattrtagacatccagctatagaattaaaaacagcaaaatgtcaagtcacctataagaaaatcactaataaagtaccaacagatttatcagcagaaaacttacagtgcaggagaaaatggaatgctgtatttcaaagtgctgaaagaaaaaaaaaattgtcaatcaagaataccatacacagaaaagctatccttcaaaatataaggagaaataaaatctttaccagacaataataaaaaagaggaattcatcacctctcaaaacaaccatacaagaaattcataaggaattcctacatctggaagccaaaccacaaatctaccatcatgaaaaaaggagaaaatataaa

SEQ ID NO: 578780 - DNA, 603 bp, Homo sapiens
gccagtaagcttcaggtgtttgcttgtgtcacaccagtaaatatttatttgattaaagcaagtgacatgacaaagcctaaaatttcagagatttaatctactcaccataacataaaataaagttacatggccaaaatcagcacctgttgggaggagaaatgtagttctactctcaatcacgtggaggaggaaatgattagtatcctaagcaatcattcaccatatttatgactgcattacctattcaaaatatatgtaaaggagaatccacaagaaaacaaaacaaaaggggtggaaaagtgtkcatctataggttaagcacaagaaagataatacacctaatgacagcagtatcagaataaagattcattatgtagtttttccagagatgaggaaagcatattatttaacaaactcaccatatatggacattatccaagtatcgaggataatctaaagagaaaattaaaaaagaagggatgttaactttgaagatccactgttttcttcctctgatcttacagagaaaattaactctcactaatacacagctacagaatgatttttgtccttatttctttagcatatcatttatcatgtaaa

SEQ ID NO: 578781 - DNA, 584 bp, Homo sapiens
atgatttttgtccttatttctttagcatatcatttatcatgtaaaccattttcagcctgttttttgtacggagttcatttatttatttcatgtttctatagttggacatgttctaatgtccaaatttgcatttgtttattcctgttctgtttgcaattaaaaacaaagtaagagcaatagagacctctgtagttttcagacaattttgtgttatttttcttccactgtgtatttattagtctttattaaagattaaacaaatgatggattcatttcaaaagtaccttgattttcagtattttaaagtttatatattagaattaaaaaatcagtcaattacatcaatgccgttatagtatttaccatcagtctgggaaatttgtttttcctgaagggagtttraacaaattttctcctgaaagcatgttatgctgaaggagctctctcctctgtagcaactctatcagaggggacagaaaattactttgtttaaagatccagaataggacacatgatgctaatctttgctctaccttgaccaagtctcttaggttatctttactgcagcctcgtctgctaaatga

SEQ ID NO: 578782 - DNA, 425 bp, Homo sapiens
ctctcctcactcagagggcacctgtgggtgccagcagtcaccagtagggaagacctatcttcagggtcctacagtggtatacacagcaccagaggcagtgatatagggtagtttgatccccaggctcctggacaacacacacaggcactggcaggggttgcactaggcaaaattgagcctgtcctcagttactctggtcatgtgcatgggtacaggctgaatctggtaggatgggtcaatccccagacccccagacagtgcatttttgcctggggatagtggcgggtggggcagacctctccttagacccccagacaatcagcacgggtaactgtgggggcaggtatggtgggtcrttccccaggcccccagatggtgcaagtaggtgcactgatggcagtgggcagggccaccctgtcctcagg

SEQ ID NO: 578783 - DNA, 482 bp, Homo sapiens
ggcaggcacctgtagtcccagctactaaggaggctgagacaggagaatctcttgaacccaggaggcggaggttgcagtgagccgagattgcgccactgcactccagcctgggcaacagagcgagattccgcctcaaaaaaaaaaaaaawtttttttttttttaactttttagcttaccatatcagtgtcttcctgacgggccctctgaatatcctcagcttcccccatctggtctcctcgcaccccctcatccttagccataataaacagtttgtggtttacaaaaagcacccagttgctacataccacgattccttctcacatgccttttccaccccctgcaatgacctaacctcctcttgtctgacaaacatcccttgtccttcagtattcagtttgttaaggctattttgcatgcactttattgttcttaaagactgcagtgtaaccagtaagtagcacagtgctcatagtatggaaat

SEQ ID NO: 578784 - DNA, 597 bp, Homo sapiens
gcacattgtgcacatgtaccctagaacttaaagtataataaaaaaaaattgccagtgttttttccctactcccttgtgccctcccccattataaaaatcaaataaaataaaaccacagccctttgcaattcacgccacatacactaataacagcctcaggcaagcagtatctgtgggactcatttaaattttattttcgtggaagaataaaggaaaattcaacaccaaatctttaagacacaccacttaatgattttggtgaacagtctgaaatagacagttattggagcctttgattaagacaatacaatgtctacaatgacctatcaagcaggtgtccataccctgtaagaaccttgtccacacttcagccyctgatgaagcatgtatgggtacaccttgtgtgtgacagccccaatagctggaatggtgtgggatcccaatgaaggacacccagccttggcatggcaatctacctatgactttgtggcttggctgaaagatttcagctgggtcaagcagaagatctctttcaagactctaaaccaagaaatacaggagggtcttgccaactaactatgggaactaaaccaagag

SEQ ID NO: 578785 - DNA, 531 bp, Homo sapiens
  misc_feature 386: n = A,T,C or G
cctattggcatcacattgggggttagcattttaatatgcaaattttkgggggacattcagttcattcagaccaacctttttaatggttagagggtagtttgtcatatggttttatcataatttatttaattaaatctattggtgggtaattgtttcccattgtttaatcaatatcagtaataagtgaagaacaaccttttggttaggagtgtgaattatggaaccctactgccttgaatcaacccctgactctgctacttagtagcttacccttttgtgccttagttttttcaactttatgatgaaaatattattaggtatctcacagggctggtgtgaagattaaaagagttaataacatgtacaaagtttagaaatgcctggcncagatcaagcattcaaccaatgttagcagcacacaacaacaattgaaatgagtagaccaaagagtgagcaaatttttaaggtccttgttgtatattatgaaaaactcatggagaacagttttatttaatatgcatagtaggacac

SEQ ID NO: 578786 - DNA, 234 bp, Homo sapiens
aaggggggggagagagagagagagagagagagagagagagagagagagagmgcgccagtgccagcgccctccatggatcaaaatataaaggatagagtaaaaacagctacttcctaaaattttagcatcaccgagcttctagtgccatgttctcttttctccgtgagtgaattggccagttatgacacgttgctatcattgccagtgttgcctttttctgggcctaggaatcta

SEQ ID NO: 578787 - DNA, 639 bp, Homo sapiens
ttgaactcctgggcataagcagtccacccaccatggcctcccaaagtgttgggtttacaagcgtgagccattgtgcccggccatttccttctttttaaggttgaataatattctgttgtgtatgtatacaatgtgtatacatacacacattttctttgtccattcattcatccattgatggatgcacaggttaattccatatcttgactatcatttgtgtgttatagatttaatttttctcaccagaagatctgttgaaatcttaacccctggtacctctgattgtggccctatttggaaatggagtctttgtagatttaattaagatgtaaattacaatgaagtcatactggagtaggttgggcccttaacccattatgactggtgtctttataagaagaggaaaagagacacagatacaaaggaaagatggtcaagtgacaacagaggcaaagattggagtgatacagccacaagccaaggaatgctaggggttgccagcaaccagyagaaactggaagaggctggcgatgaccccccattggagccttcagagggaacttggctcttctgacatctagattttggactgctggcctcccaaactgtgagagaataaattttcattgttttgaagcc

SEQ ID NO: 578788 - DNA, 622 bp, Homo sapiens
tgaagtgttcaggacttttatgtctattctactttggcttagtttacatgattcgtagtttgttagcctagaaatggccaagaaaacttaaggttcaataattagttataaatatgaaatatccccgatttttaagataaaaacaacttataaatgtatttgtctgtaaaaattgtgtatatttttacagaacatctatttctttttttatttttttatatttatttattatgctttaaattctagggtacacatgcacagtgtgcaggtttgttgcatatgtatccatgtgccatgttggtgtgctgcacccattwactcatcatttatattaggcatatctcctaatgctatccctcccccctccccccaccccacaacaggccctggtgtgtgatgttccccttcctgtgtccaagtgttctcattgttcaattcccacctatgagtgagaacatgtggtgtttggttttttgtccttgcgatagtttgctgagaatgatggtttccagcttcatccgtgcccctacaaaggacatgaactcatcattttttatggatgcctagtattccatggtgtatatgtgccacatgttcttcatccagtctatcattgttggac

SEQ ID NO: 578789 - DNA, 321 bp, Homo sapiens
gccccggtgccgcggttatttgcccgycgcggctttttgcacccccgtcgccgcggctttttgccccctgctgccggctttttgctcgaaccggctttttgcccccccccccccccaccgccacggctttttcacccccgccgccgcggctttttgccctcccggtgccgcggttatttgcccccccccggtgccgcggttatttgcccgtcgcggctttttgcatccccgtcgccgcggctttttgcccccctgccgccgcggctttttgcctccgcagctttttgcatcccccccccccccgtggttttttgtttccgc

SEQ ID NO: 578790 - DNA, 502 bp, Homo sapiens
tccctgctttccattcttttgggtatatactcagaagtgaaaatgccagatcatgccataatrgtattttcaattttttgaaggccctccctactgttttcagtagtagctgtaccaatttacattcctaccaacagagcactatttctctatatcctcaccaatgctggttattttctattattttctttttttttttttttttttgatagtagccatcctgatagtgtgaaagtattttgtagttttgatttgcatctctctaataattagtgatggtgaacatcttttcatgtacttgctggccatctttatgtcttctttggagatatgtttattcaagtcctttgccaatttttaaattggcttttgtcattgttgattgatcgatttttggagacagagtttcgctcttgttgcccaggagtgccatggcatgatctcggctcactgcaacctctgcctccctggttcaagggattctcctgcctcagcatcccaa

SEQ ID NO: 578791 - DNA, 565 bp, Homo sapiens
ctccaatttctgccctcaagttattcaccctcctcggcctcccaaagtgctgggattacaggtgcgagccactgtgcccagcccattgctgtcaatgtataagaattctctataaattctctcatagcagcattattttcagtatccaaaaggtggaagcgacccagcatccatcaacagatagatggataaacacagtgaggtatagacatacaacaaaatattattcggcttaaaaaggaaggaaattctgacacacgatacagtatggatgagccataaggacattatgctaagtaaaataaactcaaccaccaaaggacagtactgtacgatttcattatatgaggtatttaatgtaaacaaatctgtatattgtggatattaatgacttattaggtatataatttgctaatgttttctccrgttctgtgggctgtctttccacttcgttggtagcatcctgtgatgtgcaaaaatttttcattttcatgtagttcgtcttatttattttaatttttgttgcttgcatttttggtgtcatagccaagaaattattgccaaa

SEQ ID NO: 578792 - DNA, 447 bp, Homo sapiens
gtcattaccatcatcctgggatgccttaaaattagatacttcattggattttcagaatgtttatcagccactgaaggagttttccctgtcacccattcagtgcatactttgttgcaggtaaaccactgatgtttattcatgttgtctcattcctgtgragtgtatcccaggttgtgtagaaacttgtaacatcgagacatgtggcaagtggagacagtgtgcacagctgtgaactgcagtgaactgaggtgaactgaagtctatctttgaggcttaattcttcagctgcctccattgcaaaataaaactctgtgtccccatggccatttttgcagggatcctatgaggcagaacttctaatgatgaagagtcaggaaattctgccaagccagggtctacagtaaaagcttgagggagttttattttctgggtatgtaacaggtttat

SEQ ID NO: 578793 - DNA, 447 bp, Homo sapiens
gtcattaccatcatcctgggatgccttaaaattagatacttcattggattttcagaatgtttatcagccactgaaggagttttccctgtcacccattcagtgcatactttgttgcaggtaaaccactgatgtttattcatgttgtctcattcctgtggagtgtatcccaggttgtgtagaaacttgtaacatcragacatgtggcaagtggagacagtgtgcacagctgtgaactgcagtgaactgaggtgaactgaagtctatctttgaggcttaattcttcagctgcctccattgcaaaataaaactctgtgtccccatggccatttttgcagggatcctatgaggcagaacttctaatgatgaagagtcaggaaattctgccaagccagggtctacagtaaaagcttgagggagttttattttctgggtatgtaacaggtttat

SEQ ID NO: 578794 - DNA, 447 bp, Homo sapiens
gtcattaccatcatcctgggatgccttaaaattagatacttcattggattttcagaatgtttatcagccactgaaggagttttccctgtcacccattcagtgcatactttgttgcaggtaaaccactgatgtttattcatgttgtctcattcctgtggagtgtatcccaggttgtgtagaaacttgtaacatcgagacatgtggcaagtggagacagtgtgcacagctgtgaactgcartgaactgaggtgaactgaagtctatctttgaggcttaattcttcagctgcctccattgcaaaataaaactctgtgtccccatggccatttttgcagggatcctatgaggcagaacttctaatgatgaagagtcaggaaattctgccaagccagggtctacagtaaaagcttgagggagttttattttctgggtatgtaacaggtttat

SEQ ID NO: 578795 - DNA, 564 bp, Homo sapiens
gctgcccgtggatcccctgaatctataataataataattaataataataataataataaataaaaagtgactttgtcattcgcagggaaatgtgaatgacattcactctgcctctcaggcccttggattcccaaagtttgttttcgtcacgcccaggggacactcagaatgtcgtttgcmgaacacgggttgtttttcttagaaacgccttgcaaaacaaaataggaagcaaaatctttctcactccttccactccataatagacaaaataaaatgagggggcaggaatccagagactttgaccacagttggcagatttattgtggtacagacatgaaggcaagcagtgttctctctgattctacgaaccgtacagcccgggccagctgccttctgctttctggatggtgcaggcgtgagctccaagcccaaatttcactggagctccaagaatcgagcctggcccaggcactcactgcacgggggccaagcgtgaaaccagtgatctctccagcaaggtaacaggacagcttggtgatccttcttgccggccacaaaaggtta

SEQ ID NO: 578796 - DNA, 599 bp, Homo sapiens
ctctccagcaaggtaacaggacagcttggtgatccttcttgccggccacaaaaggttatagccagaattccaccgaatgtggtctttctgtgtctctccccagatagtgaagctgcacaaacctgggggtggggggtggggggtgctgacctcagtggggtgtcctggagaggcaggaaccagggtttacagggtgcagatcctactgaagcaaatggacgtggcatccgtgggcagagctggctgtggctggccttccagcctggatgtctcmcccccccccgcctggggtgtcaccagatgcacccagagaccccttctaaacctggggggatgtgctgacctcagtggggtttcctggagaggcaggaagctgggtttccagggtacatatcctactgaagcaaatggacgtggcatccttgggcagagctggctgtggctggccttctagcctagcctggacgtctcccccactgcctggggtgtcaccaaatgcacccagagacctctcttctgaaagcccattcatgggaagcctccaggtctcctcagcaggcagcatcacgtctgatttcactgcgttatcaggtaatgca

SEQ ID NO: 578797 - DNA, 487 bp, Homo sapiens
aatgaggaattcaaactcgtagctgcctcaatattgaactttctaaagtttaattctttttaattaaaaaatattcatttgggttcaatatgtatggatctccagggcagaaatgtctctccaaaaagtgaaccactctgaaaatcaccgtcatttgggaaagggtgatgccccagctgtcttctgaaaaatagcagaggcttccggccagtggggtgtctctctctttccctgaggccgaaatgtcagggaatttttcttccccacccctaggagcccagtaaayggagaatatttcagaaggatttgcacagggtcccggcttctgctatttatgagctccatggattcttggctcaggcttgtgatcagctcacctgctccagaatcacttcccatcttagcttctgggctaagacacctcaaaaccagcaaaggaaagtcctcactggtcaacgcgtccatcccaactcccccatctcccctt

SEQ ID NO: 578798 - DNA, 495 bp, Homo sapiens
tagccaagccagccaagccagccaaccagccaagccagccagctagccaagctacccagccagccagctagccaaaccagccaagccacccagccagccaagccacccagccagccaagccagccaagacaatcagccagccaggcagccagccacccaagccagccaagccagcctagccagccaagccagccagccacccagccagccaagcctcccagacagccaagccagccaagcctcccagccagccaagccagccaagccacccagccagccaagccwgccaagccacctagccagccaggcccgccagccagccagccagctagccaagccagccaagccagccaggcagccaagccagccaagccagtcaagcccgccagccaggcaagacaggcatgccagccaagccagccaggcagccaagccagccaagccaggcagcaagcaaagccaggcaggccagccaagccagccaggcagccaagc

SEQ ID NO: 578799 - DNA, 495 bp, Homo sapiens
tagccaagccagccaagccagccaaccagccaagccagccagctagccaagctacccagccagccagctagccaaaccagccaagccacccagccagccaagccacccagccagccaagccagccaagacaatcagccagccaggcagccagccacccaagccagccaagccagcctagccagccaagccagccagccacccagccagccaagcctcccagacagccaagccagccaagcctcccagccagccaagccagccaagccacccagccagccaagcctgccaagccacctagccagccaggcccgccagccagccagccagctagccaagccagccaagccagccaggcagccaagccagccaagccagtcaagcccgccagccagscaagacaggcatgccagccaagccagccaggcagccaagccagccaagccaggcagcaagcaaagccaggcaggccagccaagccagccaggcagccaagc

SEQ ID NO: 578800 - DNA, 561 bp, Homo sapiens
cccaccacagccctgcactgtgtgctccaggcatgtgctgagtgcctggtcaatcaccagtgccctrttgatcccagtctccagagagagcatttagtgtcactccacagagggggaaactcggcccagagaagtaaggtgactctctccagtcacagagctggtcagcagtaggatgggaggctagtcccttgctgtctgactccctgagcccacccatatcccaaggcagccaacctctgcccgccctggttcaggccccgactggcccctgtggtgggtgatgtctatcttcctggcctttgtgctcccagccaactgggatggagcctccagctggcatgacatgttgtagctacggacagaagagtggctgtgaggctgccaggaatctcaccagggccccctcccagggcctgtccagagtgaggtctgggtaccccaggcattgccagaccacaggatctgatgttggccaagaggccatggccacaggctttctgaggctggcccccagggagagttcaatcctactatcccaattcctgtcctggccttacc

SEQ ID NO: 578801 - DNA, 593 bp, Homo sapiens
tcatttttcaataagagctttttgcttaattatgaagtactagttactataaccattattttgagcttcatgtaaatcaagaacacatggactccacttgcaaaacattgaaaatgtagttagggattggggcctaaagcaacattttaaaatgtgtaaagacaatgagtaagcaacaaagtgtccaattttttagggcaaatttgcatacgtcaggaaaaggcaggattaagtaacagagaatttgaatgataactggccaattggtgtcgtttacaattgcaagtcatacaaatgaagtttgcttttttaaagagaaaaggagttagttagaatgggtcaacctattggggaagcaatgtagttagagacaatgcccaaaaccatgtgagcaaatgctctgtagagcgcacccctgcaatgctgccattgtgaggccaagtctctccttgtcttggtactgagccctccattctgcctccatcattgccactgtagctgccacaaartgaaccctcaaccaccgctgcccaggaacaaagaaagaattatgtccttccgcgctctcagatcaatttccaacatcaggtgag

SEQ ID NO: 578802 - DNA, 593 bp, Homo sapiens
tcatttttcaataagagctttttgcttaattatgaagtactagttactataaccattattttgagcttcatgtaaatcaagaacacatggactccacttgcaaaacattgaaaatgtagttagggattggggcctaaagcaacattttaaaatgtgtaaagacaatgagtaagcaacaaagtgtccaattttttagggcaaatttgcatacgtcaggaaaaggcaggattaagtaacagagaatttgaatgataactggccaattggtgtcgtttacaattgcaagtcatacaaatgaagtttgcttttttaaagagaaaaggagttagttagaatgggtcaacctattggggaagcaatgtagttagagacaatgcccaaaaccatgtgagcaaatgctctgtagagcgcacccctgcaatgctgccattgtgaggccaagtctctccttgtcttggtactgagccctccattctgcctccatcattgccactgtagctgccacaaagtgawccctcaaccaccgctgcccaggaacaaagaaagaattatgtccttccgcgctctcagatcaatttccaacatcaggtgag

SEQ ID NO: 578803 - DNA, 479 bp, Homo sapiens
gggcactattcagttcccatatccctgaaatagatgcagtaaaaacatagaaattgcctatgtgtttcccaataagacacatatggaagcctgttttcccacaacaggaagggttttccatgatgggtgttcaaaggaacaatattccctgcaaaccatactttgcccatgtraagaaaagcaatgaggattatttagtaaatagacatagaaactcatccagggttggctgatgagaatctggttagcaagggggtctgccttcagttaggacaaggtctgtgctccccacaggttctctccacagcatgagggatgcaaacttccctttcctcccctgcacctaccctcaaatggcccagaggtcttcaggtgctagaatttctcaattaatgctgcacaaaataacagacagccttggctgtcacagtctgttctcatgaagctagtctctgctcactacataaaacaggagagta

SEQ ID NO: 578804 - DNA, 479 bp, Homo sapiens
gggcactattcagttcccatatccctgaaatagatgcagtaaaaacatagaaattgcctatgtgtttcccaataagacacatatggaagcctgttttcccacaacaggaagggttttccatgatgggtgttcaaaggaacaatattccctgcaaaccatactttgcccatgtgaagaaaagcaatgaggattatttagtaaatagacatagaaactcatccagggttggctgatgagaatctggttagcaagggggtctgccttcagttaggacaaggtctgtgctccccacrggttctctccacagcatgagggatgcaaacttccctttcctcccctgcacctaccctcaaatggcccagaggtcttcaggtgctagaatttctcaattaatgctgcacaaaataacagacagccttggctgtcacagtctgttctcatgaagctagtctctgctcactacataaaacaggagagta

SEQ ID NO: 578805 - DNA, 537 bp, Homo sapiens
tgctactcaccgtatgactcttgtgaggttgatcagtctcccctggaaggccaacagctgaagtccatcagaaagggtcctctggcccagagccagcccctgcccacccctgtcwtgctgcacccagggtgcaagacccagatcaggtctgggtgacaggaggggtatagaggggctgaggctcaggggccttctagcctaacttgtctggagacagttggggaaactgagaccccaagcagggaggtatggctccgagagattattctcattaatctggaacatttttgcaagctgttaggtataggaagtctgtcacaggtaagagaaatgctttttaagagcatgagagacagcagggttgtcacaatattgaaacaccaccgtgcagattcaccaattgccaccaccgggagtcccctgagagtcattgcagatgcacagccctcccctgcaacccctggacctccccgtggtctggcacctaaagggttatgcctcatggcgggaatcagggccctcagggtgccctgccca

SEQ ID NO: 578806 - DNA, 537 bp, Homo sapiens
tgctactcaccgtatgactcttgtgaggttgatcagtctcccctggaaggccaacagctgaagtccatcagaaagggtcctctggcccagagccagcccctgcccacccctgtcatgctgcacccagggtgcaagacccagatcaggtctgggtgacaggaggggtatagaggggctgaggctcaggggccttctagcctaacttgtctggagacagttggggaaactgagaccccaagcagggaggtatggctccgagagattattctcattaatctggaacatttttgcaagctgttaggtataggaagtctgtcacaggtaagagaaatgctttttaagagcatgagagacagcagggttgtcacaatattgaaacaccaccgtgcagattcaccaattgccaccaccgggagycccctgagagtcattgcagatgcacagccctcccctgcaacccctggacctccccgtggtctggcacctaaagggttatgcctcatggcgggaatcagggccctcagggtgccctgccca

SEQ ID NO: 578807 - DNA, 578 bp, Homo sapiens
tagagaagaatcccagagacagcagacattgtcattgcactgaggaaccagataaaaatcaaaaaaggttaagtagctggaatgtgtagtagaagagaacgtttacagaaaaaggaamcaagaatcagcctaaggattctcccaagtccctaagccaaatgtacataggatgaaattctaaggagctcagcaaaagactctaccagggagttggaagaagaacacttccctggcatcacatgacaggaagacacgttagttgtgaccagccagagatgggaatcccctctgtacctccaggatattcagtaaagaccactggaggttcatgccctagtgacagtgctcatttagctccaatttacagatggctctagactaactcaacaaattttaaagaggagatttaaagcaaccacagaaaaatactcatcctgaagttactgacctgcctgccacaacattgttcaaaggtagccaatcaaatctagatattcaatagcataacaccaaaatacccccccccaaaaaaaactctgacatgcaaagaagccgtaagatatatataattaagatat

SEQ ID NO: 578808 - DNA, 578 bp, Homo sapiens
tagagaagaatcccagagacagcagacattgtcattgcactgaggaaccagataaaaatcaaaaaaggttaagtagctggaatgtgtagtagaagagaacgtttacagaaaaaggaaccaagaatcagcctaaggattctcccaagtccctaagccaaatgtacataggatgaaattctaaggagctcagcaaaagactctaccagggagttggaagaagaacacttccctggcatcacatgacagsaagacacgttagttgtgaccagccagagatgggaatcccctctgtacctccaggatattcagtaaagaccactggaggttcatgccctagtgacagtgctcatttagctccaatttacagatggctctagactaactcaacaaattttaaagaggagatttaaagcaaccacagaaaaatactcatcctgaagttactgacctgcctgccacaacattgttcaaaggtagccaatcaaatctagatattcaatagcataacaccaaaatacccccccccaaaaaaaactctgacatgcaaagaagccgtaagatatatataattaagatat

SEQ ID NO: 578809 - DNA, 578 bp, Homo sapiens
tagagaagaatcccagagacagcagacattgtcattgcactgaggaaccagataaaaatcaaaaaaggttaagtagctggaatgtgtagtagaagagaacgtttacagaaaaaggaaccaagaatcagcctaaggattctcccaagtccctaagccaaatgtacataggatgaaattctaaggagctcagcaaaagactctaccagggagttggaagaagaacacttccctggcatcacatgacaggaagacacgttagttgtgaccagccagagawgggaatcccctctgtacctccaggatattcagtaaagaccactggaggttcatgccctagtgacagtgctcatttagctccaatttacagatggctctagactaactcaacaaattttaaagaggagatttaaagcaaccacagaaaaatactcatcctgaagttactgacctgcctgccacaacattgttcaaaggtagccaatcaaatctagatattcaatagcataacaccaaaatacccccccccaaaaaaaactctgacatgcaaagaagccgtaagatatatataattaagatat

SEQ ID NO: 578810 - DNA, 578 bp, Homo sapiens
tagagaagaatcccagagacagcagacattgtcattgcactgaggaaccagataaaaatcaaaaaaggttaagtagctggaatgtgtagtagaagagaacgtttacagaaaaaggaaccaagaatcagcctaaggattctcccaagtccctaagccaaatgtacataggatgaaattctaaggagctcagcaaaagactctaccagggagttggaagaagaacacttccctggcatcacatgacaggaagacacgttagttgtgaccagccagagatgggaatcccctctgtacctccaggatattcagtaaagaccactggaggttcatgccctagtgacagtgctcatttagctccaatttacagatggctctagactaactcaacaaattttaaagaggagatttaaagcaaccacagaaaaatactcatcctgaagttactgacctgcctgccacaacattgttcaaaggtagccaatcaaatctagatattcaatagcataacaccaaaatacccccccccaaaaaaaactctgacatgcaaagawgccgtaagatatatataattaagatat

SEQ ID NO: 578811 - DNA, 587 bp, Homo sapiens
ttctgtcttatagttctggttgccaaaagtcctaagaggatctcactgggctaaagtcaaggtgctggyggggctatgtcccttctggaggctcaagggatgaatcgggtccctgccttttctagcttctaggggctccagcttctaggtttgtggcctccttcctccatcctcaaagccagcaacagcaggtgaagtcctcgcccatcatgcatcactctcccttcttcctccttcaacttttttttttatatttagggggaacgagtaccggattcttacatagtcaaaaagctccttatagagaagcttggaactttcaatacaactttgccttttttgccattttaattttccatttaatttaaatgtattctctcatttgaccttcatactctgtggagaaatattcctatttcggcttgtattgacaagctgttttcacacagcccccacatcacccaaccaaccagcaagaaacagataaagaaactgaggcccagggaggctgagtcctgccaggatcattcacctttcaaggtagggagccagttccagacctgggtttgtgcagctccaagctcccc

SEQ ID NO: 578812 - DNA, 335 bp, Homo sapiens
acacgccagagcgacctgctcggttgcagcgggagtcaagaaatgtgcctgctggcactcaccccaccgactagtgccccgtggaaaacttatttgggtaatgttctgggcccaatgaagtctggagtcccacagacccttttctctctccwgctccccactcatcttccccattttgttcagccttgtaaggtgtgctactgtattagtccattttcacaccgccagtaaagacatgcccaagactgggtaatttccagaagaaagaggtttaatagacgcacagttccacatagctgggtaggcctcacaatcatggtgcaaggtgaaaggca

SEQ ID NO: 578813 - DNA, 335 bp, Homo sapiens
acacgccagagcgacctgctcggttgcagcgggagtcaagaaatgtgcctgctggcactcaccccaccgactagtgccccgtggaaaacttatttgggtaatgttctgggcccaatgaagtctggagtcccacagacccttttctctctccagctccccactcatcttccccattttgttcagccttgtaaggtgtgctactgtattagtccrttttcacaccgccagtaaagacatgcccaagactgggtaatttccagaagaaagaggtttaatagacgcacagttccacatagctgggtaggcctcacaatcatggtgcaaggtgaaaggca

SEQ ID NO: 578814 - DNA, 335 bp, Homo sapiens
acacgccagagcgacctgctcggttgcagcgggagtcaagaaatgtgcctgctggcactcaccccaccgactagtgccccgtggaaaacttatttgggtaatgttctgggcccaatgaagtctggagtcccacagacccttttctctctccagctccccactcatcttccccattttgttcagccttgtaaggtgtgctactgtattagtccattttcacaccgccagtaaagacatgcccaagactgggtaatttccagaagaaagaggtttaatagaygcacagttccacatagctgggtaggcctcacaatcatggtgcaaggtgaaaggca

SEQ ID NO: 578815 - DNA, 335 bp, Homo sapiens
acacgccagagcgacctgctcggttgcagcgggagtcaagaaatgtgcctgctggcactcaccccaccgactagtgccccgtggaaaacttatttgggtaatgttctgggcccaatgaagtctggagtcccacagacccttttctctctccagctccccactcatcttccccattttgttcagccttgtaaggtgtgctactgtattagtccattttcacaccgccagtaaagacatgcccaagactgggtaatttccagaagaaagaggtttaatagacgcacagttccacatrgctgggtaggcctcacaatcatggtgcaaggtgaaaggca

SEQ ID NO: 578816 - DNA, 586 bp, Homo sapiens
gaaaggaagtgagggaggaaggaagaaaaggagggcaggaggaagggagaaaaaagggaagaaagcaagaacgtgagaaagaaagaaagaatatgagaaaagaaggaagaaaagggagggagaaaggaagggagggaggagggaaggaagaataagaggaaagaaagaaagaagaaaagaaggaaggaaggagaaaaaagaaaagaaaggaaaagcaaaaaggaaagaaaaggaagaggaaaagaagaaaggaaggaagaagcaagggaakggaagagaaaggaagacggaaagaaggaagcaagaacgcaaatattagaaattctgcgtttgttaaagaatatgccatactgttttttttttttttcacttgaaagagtatctgccattgaagattggatgtcttgttggtgatattgttgttcttatcttccacatgattactgagtttgtgcctagtctttccattactaagacaaaagtgttgaagtctgtaaatataattttggatttttctagttcacctttgatttctttcatgttttacctcatgtatttggaggttctgttgttagctgcataccct

SEQ ID NO: 578817 - DNA, 586 bp, Homo sapiens
gaaaggaagtgagggaggaaggaagaaaaggagggcaggaggaagggagaaaaaagggaagaaagcaagaacgtgagaaagaaagaaagaatatgagaaaagaaggaagaaaagggagggagaaaggaagggagggaggagggaaggaagaataagaggaaagaaagaaagaagaaaagaaggaaggaaggagaaaaaagaaaagaaaggaaaagcaaaaaggaaagaaaaggaagaggaaaagaagaaaggaaggaagaagcaagggaagggaagagaaaggaagacggaaagaaggaagcaagaacgcaaatattagaaattctgcgtttgttaaagaatatgccatactgttttttttttttttcacttgaaagagtatctgccattgaagattggatgtcttgttggtgatattgttgttcttatcttccacatgattactgagtttgtgcctagtctttccattactaagacaaaagtgttgaagtctgyaaatataattttggatttttctagttcacctttgatttctttcatgttttacctcatgtatttggaggttctgttgttagctgcataccct

SEQ ID NO: 578818 - DNA, 238 bp, Homo sapiens
tttcaagatgtaattcttatttctttttgttctatttgacattctctgagtttcctatatttgaagtttgattttctgtcacttcttttagaatatttttggcagttattttgaaaaatatttcttttgctccattayttttccctcttttctttttgggatttcaatcataactagagtaggtaatttcatctcagtcttatgcaggtactttttctcagggtctcaggaatgtagc

SEQ ID NO: 578819 - DNA, 282 bp, Homo sapiens
gagccaatttcctggttcatagatggtgccttctttctatgtcctcacatattggaaggcacacaagaactccattgagcttcttttataaaggcactaatcccattcataagggctcggcccccaagacctggtcacctccyaagtgttctgctctccctgatctgtgtcatatacagactctcttggattccttaccaattgcttgagagatcgcagtgggtttgtggggaaaaagttttcaagatgatggatctttcccaacttctgcagctgtcagcg

SEQ ID NO: 578820 - DNA, 466 bp, Homo sapiens
tgctgaaattctaaccactgaatatgacctcattaggaaataggttatttgcagctgatcaagttaagatamaatcagatgagcctgaattcaatatgactgatgtccttattaaaagaagaaatttgagtagagggagacatacacacagggagagtaccatgtgattatgagggcagagattagccaaggaatgccaaagactgccactaaaccaccagaagcgagaaacaaggcacagaacaggctttctctcatagcccttgaagggaccatccctgctgacacctcaatctcagacttttagcttccaggactataagactataaatgtatgctgttcaaggcactcagtttgtgttagttggttatggcagccctagaaaactaatacatgaactaataacaaagcataataacatgaagcaaaaattgacaaaagaggagcatcagcaaaatggcagtg

SEQ ID NO: 578821 - DNA, 466 bp, Homo sapiens
tgctgaaattctaaccactgaatatgacctcattaggaaataggttatttgcagctgatcaagttaagatacaatcagatgagcctgaattcaatatgactgatgtccttatwaaaagaagaaatttgagtagagggagacatacacacagggagagtaccatgtgattatgagggcagagattagccaaggaatgccaaagactgccactaaaccaccagaagcgagaaacaaggcacagaacaggctttctctcatagcccttgaagggaccatccctgctgacacctcaatctcagacttttagcttccaggactataagactataaatgtatgctgttcaaggcactcagtttgtgttagttggttatggcagccctagaaaactaatacatgaactaataacaaagcataataacatgaagcaaaaattgacaaaagaggagcatcagcaaaatggcagtg

SEQ ID NO: 578822 - DNA, 499 bp, Homo sapiens
caggctagggcagggcaatggcaagaccmggccatggcagggccagcccaggatagaacagggcacaggcagggcagggccagggccacggctggggcaggacaaggaccaggactggggtccaggccagggccagggtatggccagggcagaggtagggccagagccagggtctgggcaggaccaaggcaggtctattgcagggccagggttcagaccagggccagagcagggctgggacagggccagggccagaaccaggaaagggcaatgtcaggacaagggccgtggcaggaccagcaatggggctggggccaggacagggacagggacagggtcagggctagggccagaatagcatgccagggtagagccaggccaaattagggccaggacagggtcaggaccagggctgggccagggtatggccttaagtagcgaagggccagggccagggtccatgccagtgccagcgctggtccagggcagacgcagggcc

SEQ ID NO: 578823 - DNA, 499 bp, Homo sapiens
caggctagggcagggcaatggcaagacccggccatggcagggccagcccaggatagaacagggcacaggcagggcagggccagggccacggctggggcaggacaaggaccaggactggrgtccaggccagggccagggtatggccagggcagaggtagggccagagccagggtctgggcaggaccaaggcaggtctattgcagggccagggttcagaccagggccagagcagggctgggacagggccagggccagaaccaggaaagggcaatgtcaggacaagggccgtggcaggaccagcaatggggctggggccaggacagggacagggacagggtcagggctagggccagaatagcatgccagggtagagccaggccaaattagggccaggacagggtcaggaccagggctgggccagggtatggccttaagtagcgaagggccagggccagggtccatgccagtgccagcgctggtccagggcagacgcagggcc

SEQ ID NO: 578824 - DNA, 472 bp, Homo sapiens
gatctagggcacaagcagggcaggctagggcagggcaatggcaagacccggccatggcagggccagcccaggatagaacagggcacaggcagggcagggccagggccacggctggggcaggacaaggaccaggactggggtccaggccagggcmagggtatggccagggcagaggtagggccagagccagggtctgggcaggaccaaggcaggtctattgcagggccagggttcagaccagggccagagcagggctgggacagggccagggccagaaccaggaaagggcaatgtcaggacaagggccgtggcaggaccagcaatggggctggggccaggacagggacagggacagggtcagggctagggccagaatagcatgccagggtagagccaggccaaattagggccaggacagggtcaggaccagggctgggccagggtatggccttaagtagcgaagggccagggc

SEQ ID NO: 578825 - DNA, 500 bp, Homo sapiens
caggctagggcagggcaatggcaagacccggccatggcagggccagcccaggatagaacagggcacaggcagggcagggccagggccacggctggggcaggacaaggaccaggactggggtccaggccagggccagggtatggccagggcagaggtagggccagagccagggtctgggcaggaccaaggcaggtctattgcagggccagggttcagaccagggccagagcagggctgggacagggccagggccagaaccaggaaagggcaatstcaggacaagggccgtggcaggaccagcaatggggctggggccaggacagggacagggacagggtcagggctagggccagaatagcatgccagggtagagccaggccaaattagggccaggacagggtcaggaccagggctgggccagggtatggccttaagtagcgaagggccagggccagggtccatgccagtgccagcgctggtccagggcagacgcagggcca

SEQ ID NO: 578826 - DNA, 500 bp, Homo sapiens
caggctagggcagggcaatggcaagacccggccatggcagggccagcccaggatagaacagggcacaggcagggcagggccagggccacggctggggcaggacaaggaccaggactggggtccaggccagggccagggtatggccagggcagaggtagggccagagccagggtctgggcaggaccaaggcaggtctattgcagggccagggttcagaccagggccagagcagggctgggacagggccagggccagaaccaggaaagggcaatgtcaggacaagggccgtggcaggaccagcaatggggctggggccagracagggacagggacagggtcagggctagggccagaatagcatgccagggtagagccaggccaaattagggccaggacagggtcaggaccagggctgggccagggtatggccttaagtagcgaagggccagggccagggtccatgccagtgccagcgctggtccagggcagacgcagggcca

SEQ ID NO: 578827 - DNA, 497 bp, Homo sapiens
gcaggctagggcagggcaatggcaagacccggccatggcagggccagcccaggatagaacagggcacaggcagggcagggccagggccacggctggggcaggacaaggaccaggactggggtccaggccagggccagggtatggccagggcagaggtagggccagagccagggtctgggcaggaccaaggcaggtctattgcagggccagggttcagaccagggccagagcagggctgggacagggccagggccagaaccaggaaagggcaatgtcaggacaagggccgtggcaggaccagcaatggggctggggccaggacagggacagggacagggtcagggctagggccagaatagcatgccagggtagagccaggccaaattagggccaggacagggtcaggaccagggctgggccagggtatggccttaagtagcgaagggycagggccagggtccatgccagtgccagcgctggtccagggcagacgcagg

SEQ ID NO: 578828 - DNA, 576 bp, Homo sapiens
ggacaaagccaggcccagagctgggccaggacaggtacctggcagggctagggtctgagacagggccacggcaggaccagggccacaaccaggtctgtgctatggccaggtccaacacagtgcccaggtaaggctagggtgaaggccaaggtagggccagggcagggtcaaagccaggctagggccaaggcagggccagggccggcaaggcagggccagraaagcatagggccagggcagggcggggccaggacagtgccaagacctgggcagggccagggccagggccatggccacggcctggggaagaccaggttcggggcaggagcaaaacaatggcaaggacagtgcaggttcttggcacagccagggtccaggacagtgtcagggcagggccaaggcagggtctgggccatggtaagaccagcaacagggctggggctaggccagtgacaggaccagagtcagggcaagggccagagcagtgcaaggccagggtagggccaggcatttcagggtcagggccaggggagaaccagggcaagttctcaagcagggaagggccagggccaggac

SEQ ID NO: 578829 - DNA, 493 bp, Homo sapiens
ggcgagccatggtgtcgcaggctctaggtgtctcctcctcttcctggcacagagcagctgggcgggcaaagctagaaaagcctagagaaagatgtgaggggtggaagggttagagcctcaacttgtcatgccggccactgggtggcaggggccagtttcagcaaaggcactcacacccaccctccaaagtccagcctctccttttggcccaagctgggcaggaactggggtctggggtgggtgctggagacaccacagcacccagctccccactccacaggaaccactgggcccactggggctgcactcctyggggagcaggagaagcagaaaaattcagacccagccagccctccacacccaggtgccaattcctgttccggacgcctccacgcacagggccctgtcccccgtggtgtccccaggggtgcctggcagcctctgaggcacagacccacagtacacaggcccaggaaccacggtgggtgtgggg

SEQ ID NO: 578830 - DNA, 353 bp, Homo sapiens
atgaataactttcttcataagttaattaaatactcgatgaaaaatacagggtttttttcggtttataaaagtaatacttgctcactgaggaaaaaaaatctgtaaattacagaaaaacacaaaggaaatatatcctmtgatccaaccagaaagaaaactacttttcctatgttgtgcgtagctctctagttttttctttctttatatcaattggattttttttttttttttttttttttgagacagggtctcactgtgtcacccaggccggagtgcagtggcatgatcacagctcactgaagcctcgacttcccaggcttaagtgatcctcctacctcactcagcctcccgag

SEQ ID NO: 578831 - DNA, 621 bp, Homo sapiens
agtctagatttcatgctcatcttcctctttgaactgatatatcagctatatgtcctcacagtcacaggaatcttcattacctggtcttcaccttgaatgaatactggacatccaagaaagaaagagaaatattcagaagacttggagagagtttcagaaattgatttttcattcagaaatggaaaatgggaaagcaaaactaatgaatgagtctgcaaatttcttcacccacatggtgatatagcataggtataggctgctctggccagaggaagggacatacacctagtgacaatcatccttgcctttgataatagaacttggaacataggtagtcagcaagtactgattggactcaatgtctgaaggcttacacagttataagccactttgctttgtgccacatggctacaattccttcaagcctatttcctcatttgcaaaactggaattatttccacctcctagggttgtttagaggatcaaaatgaaataatccaactgctgttarcagtgtcaagcacatagtatgtggtcaataaatttgagctgcattccttctgtatgtggtccacgggaactggaagagcttatctcttcttactttgatgcctcaagctt

SEQ ID NO: 578832 - DNA, 486 bp, Homo sapiens
agtacaatctggaatcaaatcctgttgttgtaggtaaaattttattggaggacagccacactcattcatttacataktgttcctcgctgctgttgcactacagttgcggaattgagtagttgctcatgaagctgaaaatatttactatgtcaccctttacaaaacagtttgcagattcctgatctaaaagatagttgtattttcttgtttgttgttttgttttatttttggctgcccagtgtctgagtacacttcccttgggtattcttaagcattttgagaaaagtttaaaagcagacaaggccactcactttcctggccttccttgcatctacggctcaaccattctgaagctctcaccatagttgtggacctgacgactagtgacacaaagaagcagggacagaagataatctgttttggtccctgtagtacctggggctacagcaaaccaatttccaggctgtggcaccatctgcaccagca

SEQ ID NO: 578833 - DNA, 486 bp, Homo sapiens
agtacaatctggaatcaaatcctgttgttgtaggtaaaattttattggaggacagccacactcattcatttacatattgytcctcgctgctgttgcactacagttgcggaattgagtagttgctcatgaagctgaaaatatttactatgtcaccctttacaaaacagtttgcagattcctgatctaaaagatagttgtattttcttgtttgttgttttgttttatttttggctgcccagtgtctgagtacacttcccttgggtattcttaagcattttgagaaaagtttaaaagcagacaaggccactcactttcctggccttccttgcatctacggctcaaccattctgaagctctcaccatagttgtggacctgacgactagtgacacaaagaagcagggacagaagataatctgttttggtccctgtagtacctggggctacagcaaaccaatttccaggctgtggcaccatctgcaccagca

SEQ ID NO: 578834 - DNA, 486 bp, Homo sapiens
agtacaatctggaatcaaatcctgttgttgtaggtaaaattttattggaggacagccacactcattcatttacatattgttcctcgctgctgttgcactacagttgcggaattgagtagktgctcatgaagctgaaaatatttactatgtcaccctttacaaaacagtttgcagattcctgatctaaaagatagttgtattttcttgtttgttgttttgttttatttttggctgcccagtgtctgagtacacttcccttgggtattcttaagcattttgagaaaagtttaaaagcagacaaggccactcactttcctggccttccttgcatctacggctcaaccattctgaagctctcaccatagttgtggacctgacgactagtgacacaaagaagcagggacagaagataatctgttttggtccctgtagtacctggggctacagcaaaccaatttccaggctgtggcaccatctgcaccagca

SEQ ID NO: 578835 - DNA, 517 bp, Homo sapiens
ttacaaaacagtttgcagattcytgatctaaaagatagttgtattttcttgtttgttgttttgttttatttttggctgcccagtgtctgagtacacttcccttgggtattcttaagcattttgagaaaagtttaaaagcagacaaggccactcactttcctggccttccttgcatctacggctcaaccattctgaagctctcaccatagttgtggacctgacgactagtgacacaaagaagcagggacagaagataatctgttttggtccctgtagtacctggggctacagcaaaccaatttccaggctgtggcaccatctgcaccagcagtacatccaatgtctagacctggggatggcgtcagtacaaacagtgggaaccagagatcagaagcagtggtggttgcagccttatccaactattctgggaaatggttttaatgatggttttggctgcttctcagccgtacattttctagtccatgttctgattctggaattagcctttttagtaatt

SEQ ID NO: 578836 - DNA, 595 bp, Homo sapiens
agttttctgaattttaatcaaatttatgtcccatcctctggcatgcaaatgtgtcaccaataagtccaatgtatttgctacttcttgctcactggatccaatcagcataatgtcatcagtgtaatggaccagtgtgatatcttgcggaggcgaaaagcgatcaaggtctctccgaataagattatgacacaaagctagagagttgatatacccctgaggcaggacagtaatggtatattgctggccttgctagctgaaggcaaattgcttctggtgggccttatggacaagaatggagaaaaaggcattcgccaagtcactggctgcataccggtaccaggagatgtgttcattggctcaagcaatgaaaccacatctggtacagcagctgcaattggagtcaccacttggttaagcttacaataattcactgtcattctccaagatccatttgtcttctgcacaggccaaatgggagagttgaacrgggatgtggtgggaatcaccacccctgcgtctttcgagtccttgatggtagcattaatttccacaatccctccagggatgcgatttttttttatttactatttttcta

SEQ ID NO: 578837 - DNA, 511 bp, Homo sapiens
atacctgacacatggagtggttcaatacttttgactaccaatctatctagtggaataggctgatcgagtactgtacacgaaccaccctcttttattactgcttgcaactcargagtaagagaaggacacattaaaccagggtctgagcctccaagtttctgaaattaacaagaaaaataatgcaataaacaagaaataaatattggcacacttatctaaagtgcatctgtaagcaaatagattctgagaaacaattgcctaaaaactattattgcctaaaatcttactactctttctggatcttgaaaagcatttccccaaagcatagtgatttatagcaaagtgtttattttattattattaataaaattttttttcttgagacagggtctcactctgtcacccaggctggagtacagtggtgcgatctcagctcactgcagtgtcaacctcctacactcaagtgatcctcccatcatctcagcctctcaagtagctgggactacaggca

SEQ ID NO: 578838 - DNA, 577 bp, Homo sapiens
atttatttatttatttatttttttgaggcaaggtctcactctgtcacccaggctggagtgcagtggcacaatctcagctcactgccacttccacctcccgggctcaaccaatcccctcgccccagcctcccaagtagctggctctacaggtgcatgccaccaggcccagctaatttttttatatttgtagagacggtcccgctgtgttgctcaggcgggtctcaaactcttagttaggctcaagcagtcctcccaccttggcctcccaaaatgtgctgggattacaagcgtgaagccaccatgccctgcccttagttttaactgccatcccctcactacagtagccagccatatatggcatttttaaaggaagaaatgtgtgtacatgtgtgtatgtgtgtgtgtgtgttttcatagagaaaaggctggaaggctttrtactaaaatcttgtcagtggttatctttgattgctttttattttctttattttcttttatattattattattattattattattattattattattatttgagatggagtctcactttgtcacccaggctggagtacag

SEQ ID NO: 578839 - DNA, 541 bp, Homo sapiens
gccaatatggtgaaaccctgtctctactaaaaatacaaaatagctgggcgtggtggtatgtgcctgtaatccagctactcgggaagctgagtcagaagaattgcctgaacccaggaggcagagggtgcagtgagctgagatcgtgccactgcactccagcctgggcgaaaaagtgagactctgtctcaaaaaaaaaawtttttttttctttctgggagttcaattagtatattagacattactgtgttctctatatctcttattcttcttttccatattttattatcttttgtttttgatgctgcgtttttattatttcttctgatttgtctgctttcatgatttattttttagctctacctgatgttaaactcacccactgctttcttaattttggttatttctcagtgctagaattcctatgtagctcattttcaaatctgttattttagtgcttatgatttcctgatgaaatctaagcttggcttttaaaaacctccttgaacattgtaaatagttcttttgtcatttatttctgata

SEQ ID NO: 578840 - DNA, 229 bp, Homo sapiens
aacacctggcccgcccaagtcggaaaactgcttaaaggcattcttaagccacaaacaatagcatgagcratctgtgccttaaggacatgctcctgctgcagttaactagcccaacctattcctttaattcggcccatcccttcgtttcccataagggatacttttagttaatcgaatatctatagaaacaatgctaatgactggcttgctgttaataaatatgtgggta

SEQ ID NO: 578841 - DNA, 212 bp, Homo sapiens
atttacccacgtatttattaacagcaagccagtcattagcattgtttctatagatattaaattaactaaaagtatcccttatgggaaaygaagggatgggccgaattaaaggaataggttgggctagttaactgcagcaggagcatgtccttaaggcacagattgctcatgctattgtttgtggcttaagaatgcctttaagcggttttcca

SEQ ID NO: 578842 - DNA, 212 bp, Homo sapiens
atttacccacgtatttattaacagcaagccagtcattagcattgtttctatagatattaaattaactaaaagyatcccttatgggaaacgaagggatgggccgaattaaaggaataggttgggctagttaactgcagcaggagcatgtccttaaggcacagattgctcatgctattgtttgtggcttaagaatgcctttaagcggttttcca

SEQ ID NO: 578843 - DNA, 212 bp, Homo sapiens
atttacccacgtatttattaacagcaagccagtcattagcattgtttctatagatattwaattaactaaaagtatcccttatgggaaacgaagggatgggccgaattaaaggaataggttgggctagttaactgcagcaggagcatgtccttaaggcacagattgctcatgctattgtttgtggcttaagaatgcctttaagcggttttcca

SEQ ID NO: 578844 - DNA, 547 bp, Homo sapiens
agtgtatgaattcaataggagaaatgatcagctaaagagagtactagtggactggaagatagaagtgaagaaatcataaattgtaggacagagagagaatgagatggaaaacagcagagactagcaaaaagagcagtcagagtgataaggttcaacttaaatcttgcaagagttccaaaataagaaaataaagaaaataggaaagaggcagtattaaaatagataatggctaagaaatatccttagttaatgaaagaaatcaattttcaggttaaagaagtgtaataaatctcaagtacaatgaataaaagagaaaaaacaaaaatccccaatccaaaagtctaaagtcaaataaaaaaaacaatgaaaatggaaaaatcaagagaaatagaaaatccaaagtggaaaataaaaagatagagataaatccaaatatgtccattattatagacagtacaaactagttaagaggcaaagattgtcaaactgagaaagtccagttatacattatttaaaagagayacatctaaaacattaagacgtgaga

SEQ ID NO: 578845 - DNA, 563 bp, Homo sapiens
gttaatagaaccttggactcctggctacagtcagttgattcagggacttgttacaggccaggttgggttcattctgcccatgcatggtaaataaatcttcatgacacaggttttgcaagagagaaaagattcgttcgcaaggccactgagtgaggaggcaggagaacagctctcaaatctgcctccttgaagataatgcttggggatatttacgggttagggaaatggggtggtctaaatatggggaaagatgattggcagtaaggaaaaatgaagtaacagatccatcctgcrcaggcatagtcagaattcatggcatttcatagaatatatatacagaaaatgaaaccttagcatgatctgagggtgagttttgggccccccaatgtcaaaaggccacctgcacagaccccgttgagggacagtagtctcaaccagtttgaactggacaagagctggcccaggttcctgaaaaacaactaaagtgactattaccatggtgacctatgaatgctatcaaatagtcagtaaaggttaagattcagcatccagcaacagccttc

SEQ ID NO: 578846 - DNA, 564 bp, Homo sapiens
tcttgtggaactgagcccttaaattgggggaaactgatgctagctccaggtagtgtcagaattgacctgaattgtaggatatccagttgatgtccagagagttggcacactggttggtgtgaggaagatccattcacatttttggtgtcagaaatgtgagtaaaaagttcgtgaagccctctcagaacatatgagagttgcgtgcttaatttctttatgagcacttggtagtggtagagattagaatttttgttaaatttattatgcttttaatttgatttgtacttcctgataattctggaagttgagcattggtttgcrtatctattgattatttaagtttctttctctgtttattaccagctaataccctttgctctttgtacattctgcatagtctccttgctggttgtgtgtattgcaaatatcttctcataggctatgggttgtcttttcactcagtttaaaagcatttttttgttctatggaaacttaaatcttaacaacatcaaattaatcagtcttttattttatggtgtgcactttgtgtaacttttttgtttg

SEQ ID NO: 578847 - DNA, 465 bp, Homo sapiens
atctcaccatggtatcatctttggggtaatatctattagcattttgtagaactaatttttttcttgggtaaatactccttggattgttgcaagactttgattacgttccagagatcttaaaactactgattttaacaattttgacagtattctcattgcttttataaagaaggagatttttggattcccaccattctggaagtcttgcctcatagcaataatatatatttttattattattttttaaaacttttcctttaggttcaggggtacwtgtacaggtttgttatataggtaaactgaagtcacaggtgtttgtcgtacagattgttttgtcaccaggtactgagcctagcactcagcagttattttttctgctcctctccctcctcccaccctccaccctcaagtaggccccagtgtctgttgttccctccttttgctcatttgttctcatcatttagc

SEQ ID NO: 578848 - DNA, 558 bp, Homo sapiens
caatctgtcactgagggacatttaggttgattctatgtctttgctattgtaaacagtgccacaatgaacatatgcaggcatgtgtccttagggtagaatgacttatatttctttgggtatatacccagtaatgggattgctgggtccattggtaattgtgtttttagctytttaaggaatcaccacactgctttccacaaaggttgaactcccaccaatggtgcataagcattccctttgcttggcaacctcgtcagtatctgttttttcattttttttaactttttaataagccattctgacttgtgtgagatggtatctcattgtggttttgatttgcatttctctaatgatcagtgatattgagctttttgcataggcacgttggtcacatatatgtcttcttttgagaagtgactgttcttgtcctttctaggaataatattttaagacacactttgactaatgttgatttctccttttctgtgaaaccatgcatcaaagctgtattccttactcttttcttcttcaaatctctttatttatttatttattttt

SEQ ID NO: 578849 - DNA, 558 bp, Homo sapiens
caatctgtcactgagggacatttaggttgattctatgtctttgctattgtaaacagtgccacaatgaacatatgcaggcatgtgtccttagggtagaatgacttatatttctttgggtatatacccagtaatgggattgctgggtccattggtaattgtgtttttagctctttaaggaatcaccacactgctttccacaaaggttgaactcccaccaatggtgcataagcattccctttgcttggcaacctcrtcagtatctgttttttcattttttttaactttttaataagccattctgacttgtgtgagatggtatctcattgtggttttgatttgcatttctctaatgatcagtgatattgagctttttgcataggcacgttggtcacatatatgtcttcttttgagaagtgactgttcttgtcctttctaggaataatattttaagacacactttgactaatgttgatttctccttttctgtgaaaccatgcatcaaagctgtattccttactcttttcttcttcaaatctctttatttatttatttattttt

SEQ ID NO: 578850 - DNA, 558 bp, Homo sapiens
caatctgtcactgagggacatttaggttgattctatgtctttgctattgtaaacagtgccacaatgaacatatgcaggcatgtgtccttagggtagaatgacttatatttctttgggtatatacccagtaatgggattgctgggtccattggtaattgtgtttttagctctttaaggaatcaccacactgctttccacaaaggttgaactcccaccaatggtgcataagcattccctttgcttggcaacctcgtcagtatctgttttttcattttttttaactttttaataagccattctgacttgtgtgagatggtatctcattgtggttttgatttgcatttctctaatgatcagtgatattgagctttttgcataggcacgttggtcacatatatgtcttcttttgagaagtgactgttcttgtcctttctaggaataatattttaagacacactttgactaatgttgwtttctccttttctgtgaaaccatgcatcaaagctgtattccttactcttttcttcttcaaatctctttatttatttatttattttt

SEQ ID NO: 578851 - DNA, 541 bp, Homo sapiens
tgtgtgctctttattacttactgagggaaagcacactgcttttaggagtgatctttttctttgctttcttcatagagtggcatagagggctgtgtattctataaagcctcactgagagtagagaagcatttttcatacatcctgtagtaaaaacaaaaggtataacatcaaaatgagactcaggggagatgtttttgacaccagataaactatgtgatgaaggaatgcagatttcttgtcattaatactacagatagagaactttgaactttaaataccaaagattatcaatgcaaccttagaccacaaggactaacctttgactacctaaagttatgagtgcaacactagatcacatgaacaccgtcagagatacttggggccacttgtttttgttttgttttgtttttttgagacagaccctcattctgtcacccaagytggagtgctgtggcgtgatctcagctcattgcaacctctgcctcctgggtttaagcaattctcctgcctcagcctcccaagtagctgggattacaggtgc

SEQ ID NO: 578852 - DNA, 352 bp, Homo sapiens
tgctggttccaggaggatgatgagaaacacatatagcagagtcacctctactaacccacagactgcagtgagaagcaaagcctccacagccaaccctcagatrcgtgagaataaataactgctgttttaaggctctgagttttggggtggtttgttatagtacaatagctaactgatacatcctcattttacaaataaagacttggagatcttagtaatggttttcccaaagcacagaactgttagctgactgaatcaagattcaaacctaagctgagtacctgtaatcccagcactttgggaggccaaggcagacagatcaattgaggccaggagttcaagaccagcctgt

SEQ ID NO: 578853 - DNA, 485 bp, Homo sapiens
ttgacatttttaagtgattagaaaaaaggtcaaaaacagaacaatattttgcgatatgtgagaattataagcrattcaaattcagtgtccatgaataaaaattggctgagaaatcagccatgctcattcatttacatgtttcctacagtgactttgcagactcaaggacagacttgaagggatgtaagacagaccctgcagtctgtaaagcctagaatattcactatctgatcctttgacagaaagtttgccaatccctgttcttattgggcatttcatgacttagacaatgtggcagctgtggcagtcttattttctaaactttatttattggtgacatctttttaagcaaatctcattcgtcaggctgggcaattttgtgtctgtgcatggtaaaatggtacaatacacgtaatataaagtttactattttaagcatttttaagtgtaaaattcagtggcagtaagtacatttacaaagttgt

SEQ ID NO: 578854 - DNA, 603 bp, Homo sapiens
  misc_feature 556: n = A,T,C or G
atgtataatcatggcagaaggcaaagaggaagcaaggcacgtcttwccatggaagagcaagagagagagagagagagcaaagggggaagtgacacacttttaaaccataggatctcatgagaatcacttactatcacgagaacagcaagggggaaatccgcccccatgatccaatcacctcccaccaagcccctcctctgacaggcaagaattacaacttgacatgagatttgagtgggggcacagagctaaaccatatcagggagcaagcaagtaatggaactttttaagcattttcctaagtttagagaaaatctaggaatcctagagataaaagctttcttcacagagaaatatctataagacatttcaaatagagatgactccatcaatttcctccacctaagctctttgagtgtatgtaagaaaatatattcctctgcattggtagtgactatatatacattggatatatgttatcaaattgtggtactgtgattaaagtaatctaaactagaaaagtgttaaccaaaagcaacgttctttaaacaatgtntattgagtacattagtcccatgctaggctaatgtacagaaaatatgg

SEQ ID NO: 578855 - DNA, 603 bp, Homo sapiens
  misc_feature 556: n = A,T,C or G
atgtataatcatggcagaaggcaaagaggaagcaaggcacgtcttaccatggaagagcaagagagagagagagagagcaaagggggaagtgacacacttttaaaccataggatctcatgagaatcacttactatcacragaacagcaagggggaaatccgcccccatgatccaatcacctcccaccaagcccctcctctgacaggcaagaattacaacttgacatgagatttgagtgggggcacagagctaaaccatatcagggagcaagcaagtaatggaactttttaagcattttcctaagtttagagaaaatctaggaatcctagagataaaagctttcttcacagagaaatatctataagacatttcaaatagagatgactccatcaatttcctccacctaagctctttgagtgtatgtaagaaaatatattcctctgcattggtagtgactatatatacattggatatatgttatcaaattgtggtactgtgattaaagtaatctaaactagaaaagtgttaaccaaaagcaacgttctttaaacaatgtntattgagtacattagtcccatgctaggctaatgtacagaaaatatgg

SEQ ID NO: 578856 - DNA, 605 bp, Homo sapiens
ctgccataagtctaccctaagtgaactggcagccacgggggatggcagagcatcccagggccacagggagcaggtgggttaacgcgtcaagctaaaagaataattgctggccccacacaacaggtggaaagacaattcacgttggtattctccttggtttgggtagctggcgtgaggaaagaagaaagactctgatcagtagaagggctgcccagaagccgatagaactccagttaccctaggactgtgtgcaatctcttttcctcatcccatctggcagcatggggattcttttctttcttggcactgtctggcttgtcatatatattattttcccttctctccagatgcccttccttccctactttttctactttccatctstaagccaccttttctaagtagctgaaggtcattactcagcatccacggtggttaagaggcaatctctggagatccaaagccctttaaatggtttgggtctgtgttcccatccaattctcatcccaaataataatccccatgtgtcagaggagaggccggatgggagaccattggatcactggggctaatttcccttttgctgttctcatgatagtgagttc

SEQ ID NO: 578857 - DNA, 605 bp, Homo sapiens
ctgccataagtctaccctaagtgaactggcagccacgggggatggcagagcatcccagggccacagggagcaggtgggttaacgcgtcaagctaaaagaataattgctggccccacacaacaggtggaaagacaattcacgttggtattctccttggtttgggtagctggcgtgaggaaagaagaaagactctgatcagtagaagggctgcccagaagccgatagaactccagttaccctaggactgtgtgcaatctcttttcctcatcccatctggcagcatggggattcttttctttcttggcactgtctggcttgtcatatatattattttcccttctctccagatgcccttccttccctactttttctactttccatctctaagccaccttttctaagtagmtgaaggtcattactcagcatccacggtggttaagaggcaatctctggagatccaaagccctttaaatggtttgggtctgtgttcccatccaattctcatcccaaataataatccccatgtgtcagaggagaggccggatgggagaccattggatcactggggctaatttcccttttgctgttctcatgatagtgagttc

SEQ ID NO: 578858 - DNA, 590 bp, Homo sapiens
caacaaatatcaatatgcttgtttctgatttgagtgaataccagtcaatgtttttgacaaactaaataggagatcgaggttgcaaaattcaaaggcctatgtagtccagaccaataacaaataaagtggagaagtttaagtaagttcacattgtgcatacatgtggtgaggattacaggaaaatayaggacctatgccctgtctaaaaaaaaagttcctaccattctctagcctttcattactatgcagaaaggctggtccaaggctactagatattccagaggttttttaaagaataggtgactatctggctaattaaaaaaaaaaatctggtccaaacaaaccatgtttgtggacatagcccatgaaccaccagtttgtagacccttgctattcaaaggttctataaaaataaattcagcagaaaatgcttttcaagtaagaaaaaatgcttcattccaactccaggagggttaaaaatgcttcaggcaaacaagctaaatgacaataaaatatatttactgctatagtcgctggcttaccagggactatataatctagggaccagcagcatcagcatcacctgggaa

SEQ ID NO: 578859 - DNA, 428 bp, Homo sapiens
gtattagaattctcagaagaaacataaccaaaagaaatactgtgtatatacagtcatgtgtcacttagtaatggggatacattctgaaaaatgtattattaggtgattttgaggctgtgcaaacatcctagagtgcacttacccacacttagatrgtgtcgcccacgacacacctaggctctatggtatggcctattactcccaggctacgaacctgtcacagcatgggactgtactgaatactgtaggcagttataacacaatggtaagtgtttgtgtgtctaaacatatctaaacatggaaaatgtacagtaaagatagaatcgtataatcttatgagaccaccattgtacatgcaatacatcattaaccaaaacttcattaggcagcctatgactatccacggcttactctattatggaggcgaa

SEQ ID NO: 578860 - DNA, 652 bp, Homo sapiens
cactctcttctggcttgtagggtttctgcagagagatccgctgttagtctgatgggcttccctttgtgggtcttatccaaaaattatttgcccataccaatgtcatgaagcacatttccaatgtttccttctagtagttttaccatttggggtcttccatttaaatctttaatccattatgagttgatttttgtgtatggtgaaagatagatgtcttgctttattcttctgcatgtggatatctagttttttcagcaccatttattatctgacttttaattagaaactttaatccattaaaatgtaattactgatawgataggattttcaggtgccattttgtcatttgttttctatatgtctttcttttttgttcatcagttcctccactgttgtctccatttgtgttaaatagtttctagtgtgccatttaaagtttcttgttttcttcactacatgtttttgaattattttcttggcaattgtcctgaatattaccatcaatatcttaatttataaaaaaaaattgatttgttttattaccaactaaatttaaatagaatattaaaacttgctcatatatggcttcattcctctcctcctattttgctgttattttcataagttaaatctttatatagtatgtgccctt

SEQ ID NO: 578861 - DNA, 603 bp, Homo sapiens
ctggtggtaggatcttggcacttttgatgagttttcctcttagtataaccgattaaagctgcaatgacaaaagcatgccacccatagtgtgcaaacatgttctcttctgtccctgcacatacaccacaaaataaatggatgaggttgcatgttattagacatataaatgttacttttccagtcttttatatcttgcttcaatttgctccatgatctgttcatccagtaaatctgttttgttggaaacttcaggaagaaagaaagtaataaagacagagccccctgataaatcatggacttattttaggtagtgcaataagctattaccccctccccaccctaccctccatcatttatgtcgatccctcctgatcgtaattgctcttaaattggaggtcttgttgctttacactayttggcaggtacttaggctgtaccattgcaataattctctatctggactcttttcatacaattatttctgcttccgagccagcctatacattgtacattctggcccgggtagtattcctgatgcacaagtctgttttactctcctgctaaattttcagaatgaagtcaaactctctgtcttgctataca

SEQ ID NO: 578862 - DNA, 374 bp, Homo sapiens
gttgaaataatccacactctaaatctgtttgacatttaccccttaagtattttggatcaataaatcatttctgtatcatctagcatcttaaaatgttcgtaagtaactacttaataccctacatatccaggtcctgtcccattaktttgagggaaaaaatatattatagtaattaagacataattatgttgtcttgaaaagctaagggtcatttggacttgattacccaaggagttatcagtgccaaggaaaattaggcaactacaggcttgggcctgtaattaaacatctaggactgacattttgttcatcagaggtggcaccttctgaatgaattacaccatttcattttagacaagctacggtacatacaa

SEQ ID NO: 578863 - DNA, 577 bp, Homo sapiens
gatgtcctgtttttcgtatctcaatactaagcacagtgctggtgaatgaaagagcaaatattcattcccatgaatagggatttacttcttaaattctgaattttggatatsatgggctcctaaaaatgaggtttgtgctttaaatgcgatagatattggaagttatcatataagcagaagagatactgcagtatttggaagatatttagcttcacaaataaattagctgtagacatttggctaaatgagatctagccaaataatatgtctgaaataaaatgggctattaatatggggaatttggttaaagaaactgctttttgggctatggagaaaatgatcatagtcaataagagagtttaagattgtgtgagtgtttttaaaaagaaaggggatgataaaagtgttctgaatacagggtgttgtcaacctggaaagagtgcttggaaaatatcacctgatggagagtaagagtagtgtttctatgtgggtttctgcaatgaaccatgctgggcaggaggctaggatggggtagtaggagctgtggtccccaaatatgtccacatcctaatctgaa

SEQ ID NO: 578864 - DNA, 604 bp, Homo sapiens
  misc_feature 447: n = A,T,C or G
atgattctgctcttctcactacagttttacaagctgtcatatacaaatatatttgtttccaaagtaacttcaggctgggtgcggtggttcatgcccccaatcccagcactttgggaggcagaggcaggcggatcacctgaggtcaggagtttgagaccagtctggccaacacggtgaaaccccttctctactaaaaatacaaaaattagctgggtatggtggcacatgcctgtaatcccagctacctgggaggctgaggcaggagaatctctggaaccctgggggggcggaggctgcagtgagctgagatggtgctattattgcactccagcctgggcgatcaatygagactccatctcaaaaaacaaacaagtaacaaaacagcagggtgtggtgaatgcctactcaggaggctactgcgggagaatcgcttgaacccagaagcanaggttgcagtgagctgagatcgcaccattgcacttccaggctgggcgacaagagcaaaactctgtccaaaacaaaaaaaaccccacccccaaacagaaaaataataaagtaacttcagaattttaatgctagaaattaaaggtagcatccacacata

SEQ ID NO: 578865 - DNA, 476 bp, Homo sapiens
ggaatggagtggaaaagaatcgaaaagaatggaatgcaaaggaatcaacacgaatggacaggaatggaawgtcatggaatggaatggaatggaatggaatggaatggcatggaaaggaatggaatggaatggaatggaatgctacggaatcaacctgagtggaatggaaataaatggactggaacggtatggaatggaatggattagaatggaatcaaccacagtggaatggaatggaatggaatggaatcaacctgagtggaatgtaaataaatggactggaacggtatggaatggaatggaatagaatggaatcaaccacagtggaatggaatggaatggaatggaatgaaccaaagtggaatggaattgaacggaatgcaaaggaatcaaaccgagtggaatggaatggaatcaaccaaagtgtaatggaatagaatggatgcaacggaatcaaaccagtggaatggaatgga

SEQ ID NO: 578866 - DNA, 476 bp, Homo sapiens
ggaatggagtggaaaagaatcgaaaagaatggaatgcaaaggaatcaacacgaatggacaggaatggaaagtcatggaatggaatggaatggaatggaatggaatggcatggmaaggaatggaatggaatggaatggaatgctacggaatcaacctgagtggaatggaaataaatggactggaacggtatggaatggaatggattagaatggaatcaaccacagtggaatggaatggaatggaatggaatcaacctgagtggaatgtaaataaatggactggaacggtatggaatggaatggaatagaatggaatcaaccacagtggaatggaatggaatggaatggaatgaaccaaagtggaatggaattgaacggaatgcaaaggaatcaaaccgagtggaatggaatggaatcaaccaaagtgtaatggaatagaatggatgcaacggaatcaaaccagtggaatggaatgga

SEQ ID NO: 578867 - DNA, 476 bp, Homo sapiens
ggaatggagtggaaaagaatcgaaaagaatggaatgcaaaggaatcaacacgaatggacaggaatggaaagtcatggaatggaatggaatggaatggaatggaatggcatggaawggaatggaatggaatggaatggaatgctacggaatcaacctgagtggaatggaaataaatggactggaacggtatggaatggaatggattagaatggaatcaaccacagtggaatggaatggaatggaatggaatcaacctgagtggaatgtaaataaatggactggaacggtatggaatggaatggaatagaatggaatcaaccacagtggaatggaatggaatggaatggaatgaaccaaagtggaatggaattgaacggaatgcaaaggaatcaaaccgagtggaatggaatggaatcaaccaaagtgtaatggaatagaatggatgcaacggaatcaaaccagtggaatggaatgga

SEQ ID NO: 578868 - DNA, 514 bp, Homo sapiens
ttccattgcattccattgcattccattccactcgggttgtttcttttccattacattccattagtatccattccattccattccattcattccattccattccattccattacactgaggttgattccgttcgattccattccaatccattccattctattccattctagttgattccattgcattccatgccgttccattccattccattccattccaatccattccagtcgggatgattccattccattccattccattccattgcattccactcgagttgattccattccattccattccattccattccattccatttcattcctttccagttgattccattacattccgttggtttccactccattgcaatcgggttgatttcattccattccattccattcctgtccattccattccattccactcckttccattccactccattccattgcattccattgcactggtgtttattccattcctctccattccattgcattccattcta

SEQ ID NO: 578869 - DNA, 514 bp, Homo sapiens
ttccattgcattccattgcattccattccactcgggttgtttcttttccattacattccattagtatccattccattccattccattcattccattccattccattccattacactgaggttgattccgttcgattccattccaatccattccattctattccattctagttgattccattgcattccatgccgttccattccattccattccattccaatccattccagtcgggatgattccattccattccattccattccattgcattccactcgagttgattccattccattccattccattccattccattccatttcattcctttccagttgattccattacattccgttggtttccactccattgcaatcgggttgatttcattccattccattccattcctgtccattccattccattccactcctttccattccactccattccattgcattccattgcactggtgtttattccattcctctccattccattgcwttccattcta

SEQ ID NO: 578870 - DNA, 514 bp, Homo sapiens
ttccattgcattccattgcattccattccactcgggttgtttcttttccattacattccattagtatccattccattccattccattcattccattccattccattccattacactgaggttgattccgttcgattccattccaatccattccattctattccattctagttgattccattgcattccatgccgttccattccattccattccattccaatccattccagtcgggatgattccattccattccattccattccattgcattccactcgagttgattccattccattccattccattccattccattccatttcattcctttccagttgattccattacattccgttggtttccactccattgcaatcgggttgatttcattccattccattccattcctgtccattccattccattccactcctttccattccactccattccattgcattccattgcactggtgtttattccattcctctccattccattgcattycattcta

SEQ ID NO: 578871 - DNA, 624 bp, Homo sapiens
atggaatcatcatcaaatggaatcgaatagaattatggaatgaaatccaatgtgatcatcattgaatggactcgaatggaaccatcatccaatggaaactaatggaatcaacatcgaatggaatcgaatggaaacaccatcgaattgaaatgaatggaattatcatgaaattgaaatggatggattcatcaccgaatggattcgaatggaatcatcgaatgaaattgattgaaatcatcatcaaattgaatcgaatggaatcattgaatggaatcgaaaggaatcctcatcagatggaaatgaatggaatcatcatataatggaatcgaatggattcattgaatggaatcagatggaatcatcgaatggacttgaatggaatcattgaatggactcgaatggaatcattattgaatggaatagaatggaatcatcgaatggtattgaatggaatcattatccaatggaatcgaatggaatcaccgaatagaatcgaatggaacaatcatcgaatggactcaaaaggaattatcctcaactggaatcaaatggaattatcaaatgcaatcgaatggaattatcgaatgcaatcgartagaatcatcgaatggactcgaatggtat

SEQ ID NO: 578872 - DNA, 526 bp, Homo sapiens
atgtgatcatcatcgaatggactcgaatggaatcatcatccaatggaaactaatggaatcaacatcgaatggaatcgaatggaaacaccatcgaattgaaacgaatggaattatcatgaaattgaaatggatggactcatcatcgaatggattcgaaatgtaatcatcgaatgaaattgattgaaatcatcatcaaattgaatcgaatggaatcattgaatggaatcgaatggaatcatcatcagatggaaacgaatggaatcatcatagaatggaatcgaatggattcattgaatggaatcagatggaatcatcaagaggacttgaatgcaatcactgaatggactcgaatgaaatcattattgaatggaattgaatggaatcatcgaatggtctcgawaggaatccttatcaaatggaatcgaatggaatcaccgaatagaatcgaatggaacaatcatcgaatggactcaaatggaattatcctcaaatggaatcgaatggaattatcgaatgcaatcgaatg

SEQ ID NO: 578873 - DNA, 526 bp, Homo sapiens
atgtgatcatcatcgaatggactcgaatggaatcatcatccaatggaaactaatggaatcaacatcgaatggaatcgaatggaaacaccatcgaattgaaacgaatggaattatcatgaaattgaaatggatggactcatcatcgaatggattcgaaatgtaatcatcgaatgaaattgattgaaatcatcatcaaattgaatcgaatggaatcattgaatggaatcgaatggaatcatcatcagatggaaacgaatggaatcatcatagaatggaatcgaatggattcattgaatggaatcagatggaatcatcaagaggacttgaatgcaatcactgaatggactcgaatgaaatcattattgaatggaattgaatggaatcatcgaatggtctcgaaaggaatcmttatcaaatggaatcgaatggaatcaccgaatagaatcgaatggaacaatcatcgaatggactcaaatggaattatcctcaaatggaatcgaatggaattatcgaatgcaatcgaatg

SEQ ID NO: 578874 - DNA, 588 bp, Homo sapiens
aaaatagattttaatttttagaaatttatagaaaaagtgccaattttctataaacataagtccctttaaaaattagacccccttttcataattctaggattatttcatcaaaaatgcattattttctttaaaaatgaataaaacagggaaacaaaagtcccatgaactcatcagggttttcctggcaactccagacgtgaatagaagagctcttccagtttgattgtggccttcacacagttttcttatgcctgtttcagtttaggtattctgttgactttctctaacacctttttctcttagtatcaagaaattatacaacttgaaggaatttagaaaacttttggtctgagggttacaagttcaaatgcttaggtcaggcaacaactcatgtgcagagggtcagatgtatgtcaatagggaatagtggcgactacggcaattggagagcaygtgccctgtctacaggtgcccccacccccactcagtaacaatctattgttgagacaacagtgttgccagaattgcttttcaagagaggccagaaatgtggatttttatgaatatctcttgattataaaatgttga

SEQ ID NO: 578875 - DNA, 531 bp, Homo sapiens
ctgtaaaatgataacagttactagtatcctggttgttggaggactaaatgcactacatccagtcaaacacttagcccagcacatcagtactcaatacaatgttacatgcgattattgtcataaaaggaatggtcattgtattaaaaccaggaaagagaaaaaaacaaaaattgtccatactcctacaggatcatatacaatcactgtaaaataatattggcatatgtttttttgagaccttcttctaaagcttatacacacacatattttgcataattggatcatactgtacattctgtggtgggtctctttttaatggcartaaagtataacatcttataggctcagaataatttatttacccagccctattgttggtcatttatattttttccaatattttttcattttaagtaaccccgggatgaatactttttttaacagcttcattgggatatactttacacctcataaaattcacccacttaaagtgtacaattcaatggtttttagtgtattcagagttgtgca

SEQ ID NO: 578876 - DNA, 586 bp, Homo sapiens
aaatgactaggtactacttatgcatcatcctaaatgtctcttaactctgatgccatgcccacatcactccacttggggcagaggcatagcaagaggcagagtagtgggatggtaactccccctctacttgctgccccaaagctgtgttctttcgttgaaggtttattcaagtggtcrtctgaataacctttcaacttaccatgtaagatggtaagtttgaagaccagatgaaaagtcacaaggagggggatgggaaagcaaaacttggacactacggaggaggccctcatatgcaaaatcctttgtcatgaatccactccttcaccaatccaagtcaccatcctcaatccattctccaccccgcattcagagtcatcttttgaaaatgcgaaaccagtcacaacagacttttcccctcacaccacaagtccacgaaaaacatctttaacaagttagcagggccttctccaatcgggttcctcctaactgcgttgatcattgtgctccctgttactctgtattcctcatcttgcaattcctagatttcatcatgctttctctcacttccaagatttagaaaatagta

SEQ ID NO: 578877 - DNA, 215 bp, Homo sapiens
taggaaagaagccctaacaaatttcaaaatatactagtttgaaaatgaaattatgtttttaataggaggacaaccaacatttaacattttgttcggtatggtatctttggatagttatgtgtaatgcaagagtaaagaaatgttaatattgtaaactaaycacatctatgtagcacttcatatgtgccaggctcagttctcactgcttcatgtgt

SEQ ID NO: 578878 - DNA, 450 bp, Homo sapiens
cagggtcttactctcttgccccaggctggagtgcagtgatggtatcatagctcactgaagcctcaaasttttgggctcaagcaatcctcctgactcatcctctcaagtatctagaactacaagcaagcaccaccacgctcagctaatttttattttttttattttttgtagagatggggtctccctatgttgcccaggctggtcttgaatttctgagctcaagcagtcctcctgcctctgcctcccaaagtgctgggattataggggtgagccaccatgcctggctggcattgcctattaatgaaaaggaccatcagcaggaagctaatcaatttaggtttggagagttaaaaaaaaaacaaaataaaacaaacaaacaaaaaaacaaaagaaagtaatccaaagagtagaaaccaaatttcccaagttatacagtagagtcattgttaa

SEQ ID NO: 578879 - DNA, 593 bp, Homo sapiens
acttcagtaatggcactacatagattcagcagagtctctaatgcaaataatatttagagtggaggtgtccaaagactggctccttcccagtaagtctatatgttatttcctagtattaattcatttgccacttgtcataagtttctggaatgtgcaagtaatcctattacaagagatgcttgccactttcaatgaaggcatctggctttacttaaggatggcgaatgatttcatatttcaatggttaggaacatggcatattacaacctttacacagattgaggaatctctgaatattataatatacctgtcacaggtgaagaaatactctaaattttcaactaatacacataaggcacacgaatataatgaaatgggaaaaaactctggacttggaatcagaagacctagctctgccacatacttgctctgtacgtttagcctacttaatcattaatatctctgggcctctgttttcatctgtaatgacatatatgtctaataaaaaattcatataacctaggtcaatgaggtaataagtcaaataatgtatacaaaagtactttwtaaatagaaaatgccacacagtttag

SEQ ID NO: 578880 - DNA, 610 bp, Homo sapiens
tgattgccatgtgtaggctatgtgcaaaaaagagagggagaaaagaggggtacacatctgttttattaaaatggtgtctttgtttaaaacaagtatttttagacttcacaggatggttgggtacaaatccatgacctatayattttgtctacacggactagatttcctgcattttttcttttttatctctcatgtcaggggctaattcagacttactgaagttatttagctcaaggagcacgaccacatccttgttatcatttcattgataatttaagagagattctgtttgctctacattgggttacgttcccattccaggctctcttcaatccctaatgctaagtaaaaagttaaaaataaaaggcttacttcagttacattcaacaaacgtgtagatcatacatgtgccaagtagtctgctatgggttggaatacagaaacgatagataatcagacaatgcccatgaccaagtagctctcaattaaacaaattaaacagttaagaatgatcctgctatgtatatcctgtgtgcaactggtaagtaaatcattcgaacaccctgggaagagcaaagcttcccaacaggataactaaccttttgttaag

SEQ ID NO: 578881 - DNA, 573 bp, Homo sapiens
attaagaatgaacaatgggccagagatgggagaattgaacaaaaacacagaattacccagtgacgcaaggcaaagaaagcygcccaaaggaaaagtaaaaataagtgttgacaatttatttgagattcacttttaaacactgaacataaggagaacagtattctcccaaccgttcataatgattagtttccactatctagtttttaagtaataatccagggattaaaaaaagtacctttcctctgtatttttaaaaatacattcacttatttgtaaaagttaaaatctgtcctggactgaaagaaaacagccttgccatgaatcaggctgcaaagacagacacagaaaaagccaaatgcaaacaaaacaaactaacaaaacagaaaacactgtttctcccaaggccatgcaggaattacaaaatgccattaaggactccctcatttttattgatgtcactctaccccagacctgctccgctattttcatttcttcctgggaatacccatttgctgctaaaccaccctagcctaaattatgacagtatccaatcacaagttaattcccacttcc

SEQ ID NO: 578882 - DNA, 598 bp, Homo sapiens
aagaaagctgcccaaaggaaaagtaaaaataagtgttgacaatttatttgagattcacttttaaacactgaacataaggagaacagtattctcccaaccgttcataatgattagtttccactatctagtttttaagtaataatccagggattaaaaaaagtacctttcctctgtatttttaaaaatacattcacttatttgtaaaagttaaaatctgtcctggactgaaagaaaacagccttgccatgaatcaggctgcaaagacagacacagaaaaagccaaatgcaaacaaaacaaactaacaaaacagaaaacactgtttctcccaaggccatgcaggaattacaaaatgccattaaggactccctcatttttattgatgtcactctaccccagacctgctccgctattttcatttcttcctgggaatacccatttgctgctaaaccaccctagcctaaattatgacagyatccaatcacaagttaattcccacttccaatcccgcctcagatatagcaaccaatccaaaacggatccctccttcccttagaccctcctctgaatccttcagtaagaagccaacctaacacaagt

SEQ ID NO: 578883 - DNA, 475 bp, Homo sapiens
aactgaaaagcaaaactttaaaaatcttactgtcaaaaataggagtatttttatgacctcaggttaaggaaggatttcataaaggaaacaatgagtaaatctggcattttgtaaatgatattttctacacatcaaaagacccctttaaataaatccaaaaaaaaaaaaaaaagccactaatagtggagaggtattggaaaagccaccaaaaaataagcatttagaactttacaattttgcagcaggtaaaagacaacataatagcaaaacagacaaaggtaataaacagacattttatggaatatgaaacataaatgttcmataaagtgatatgcaactttagctatgacagaaattcaaattaaaatgatatacaatttcgctgggtgtggtggctcatgcctgtaatcccagcagtttggtaggccgaggtgggtggatcatctgaggtcagaagttcaagaccagcctggtc

SEQ ID NO: 578884 - DNA, 437 bp, Homo sapiens
tgtttattttttttcttaactgagcattaaaagaatgacaaatagaattaataaaaaatgaagtttggaaattctgcttatgtaataaagaaaacaaaagcattttatcatttcatctcttcatccctaagagttcacacttcagatgttttttttttcttaagaagaaaaaagaacaactttttattgattcaggatcctaacagatgtctgaaaagtaartaatctggccccattactttcataggcattgagaacaatttttaaaattatttttatacaaacatgaagttttatccattgctgtttttgtttattttatgatgaaatagcagtaaagatttttggaatatgtataactctttctttagaatatttttacagcaacagattcttatcactagccttttgtgatgtaattataggattttatgatg

SEQ ID NO: 578885 - DNA, 632 bp, Homo sapiens
cagaaggctaggttacaacacaggtgaacatgactatcccygatgactaggcctttctgcttcatgggtggagaacttgtttgcattcatggcatagatgaggtctgtggaacccaaaggttactgacagcagaaggctaggatacagcataggtaagtacgactatccctactaactaggccttcccaattcatgggtggaggttgcactcacatccatgagtggcttcttgctggctgccaggacttgaggaaggaaaagagggtaagaaaaaaatgacaccctttgttctccccctcacataccccaggtttttgctgaaagagagacaggaactaaaggatgccttttccgctctctttcagatgggtaacagaccatcttcagcctgcactcctcttgagtgaatcttgaatcactgggactcctttgaccctcagactctggaaaaaaaaaccctttaaatttctttgcatgagggtttggccagattgtgatttgcaggaaggacaagcctggcctctagagggaagcattaatttcaatactatcctgtagttggaccttttctttaaatgccagggcaaatggtctgaggtcccatatgtgcaggctttctttgccttgcagg

SEQ ID NO: 578886 - DNA, 585 bp, Homo sapiens
ctcttgcattcacaacttggctatttggcacaagaaatctagctttcagcctattttagcttttaataagccttcctcactaaacttatttctagcttttgatttaaagcaagagatatgcaattcttcctttcacttgaacactgacaggccattgtagggttattaattggtctaatttcaatattgttgtatctcagaaaatatagaggcctgacaagagggagatacatggaaaaatgtttgtcaatggagcagttagaacacacgcaacatttataaattagttcaccatcttacatgagcacagttcatggtgccccaaaacaattacaatagtagcaacaaagatcattgatcacagatcaccaccacaggtttaccaacaatgaaaaagtttgaaatattatgagaattaccagcatggaataaagagacacaaagtgagaacatgctgttgaagaaatgagatagatttgctcrattcaggattgccacaaactttcaatttgtaaaaagtaaagcaaagcaaataaaataagatatgcctgtacaaagaaagaaccttaaaagcaccaaaagaga

SEQ ID NO: 578887 - DNA, 623 bp, Homo sapiens
catcatgcattttatatatattgtgggtatataatatggggtatatgtgagcctcccccactcgactttgagttccttgaggacagaagtcttgtacctgacacacagcatatttccagtgagtgataattgagatgaatcttagttcaggtgtcctttgttggctttcacagagcagcatatcccaaaatgggttccaagaaacattaatcccataagtatgtttcttaaaaaggggttcttggtcaaataagtttgaggaaagcctctgattccatcttttgcataagagttcaaactgcccatcagaatattaaagaatcaggagtttgtggcygggtgcggtggctcatgcctgtaatcccagcactttgggagactgaggcaggtggatcacttgaggtcaggagttcgagaccagcctggccaacatggtgaagccccatctctacacacaaaaaaattagctggacatggtggtggatgcctgtaatcccagctactcaggatgctgaggcaggagaatgcttgagcctgggaggaaaaggttgcagtgagccagagatcatgccactgcacttcagccccagtgacagagccagactccatctcaacaacaacaa

SEQ ID NO: 578888 - DNA, 495 bp, Homo sapiens
taaattagtgaatgatccattgagataatgataggaagccactttctaagctgacatttgatatgcaaagataacatagtgrtgccttaacagactagaattatttttccaattagtcaaaagtttgttgagtggcacatggcacatgtatacatatgtaacaaacctgcacgctgtgaacatgtaccctagaacttaaagtataataaaaaaaagtttgttgagtggctacaatatgcaagacatgtacgatgtctaagaagacacctgtgattactgtcaagctgattaaaatatggttgaggagcaattatctacatatatgttgtacacacagacgtatacatttgaaaaacaattactattgaattaaacattaaactatatcctaaccacattgacctttctgtcccagaagatgtcacatccctttccaacatagagtcttcataaatgctaatctttattcatttattcaatttttattgcttgatt

SEQ ID NO: 578889 - DNA, 465 bp, Homo sapiens
cctgcaaatatgaaaagtataccctctgcatctgtggattctgcatctgctgaatactctattttcaatccatggttgttgaatctgtggatgtaaaacccatgggtagggagggctaattgtattttggaagcatgtaacttgataattcacaggcttatagctggaattaatttgcctgggataaatagtgcctcgaatctcacccatatgtgattcagatgaggctctggactttggacttttgagttgatgctggaccaaattgagactttaggtgctattgggataaaatgaatgtrtttttcatgtgaaaaggacatgaactggagagagtagggtggaatgctgtgatttgaatgtatcctcctcagttcatttgttagaaatttactccccagtgcagccatgttgagaagtggaaactttaagaggtaattaggtcactagagctttgccctcatg

SEQ ID NO: 578890 - DNA, 322 bp, Homo sapiens
aaataatgccctaaatgtatttctaaactaatcatgacatgatatgatcaaagtaaaggggcatttgaatcagcaggacaacatactcttttccttgttaaggaagtaaaccatattagaaatgactgtrtattccaagataatgcattctgtggtgagggaagttaaaattcaatttttgaggagagaaatccagaaaaaaatggattatggcaagacgtttgtaacataggcaaagaatgacaatccttcaaagtatttttctgcacatattcaaaagtggagacacacatgcagtcaaaattttaatcattacatactc

SEQ ID NO: 578891 - DNA, 322 bp, Homo sapiens
aaataatgccctaaatgtatttctaaactaatcatgacatgatatgatcaaagtaaaggggcatttgaatcagcaggacaacatactcttttccttgttaaggaagtaaaccatattagaaatgactgtgtattccaagataatgcattctgtggtgagggaagttaaaatycaatttttgaggagagaaatccagaaaaaaatggattatggcaagacgtttgtaacataggcaaagaatgacaatccttcaaagtatttttctgcacatattcaaaagtggagacacacatgcagtcaaaattttaatcattacatactc

SEQ ID NO: 578892 - DNA, 526 bp, Homo sapiens
tatgatgaacgtgatttgatttaattaagtgtaaattattgtctcaaaaattgtaaattgattgatcctcaggtgaaagaagcaacactccttccattttagaccaaaatgtgtgagaatttcctgaccagagaaagaacacagagcactgggcaagaaaaggaggctgagtgatgaggtggcagcctgggaccctcgaayccacgtgaagccctaaattccgcaggcttcagtgccttgtgtggaaccagagagcaaagccattttcaaaagcattgctccgcctgtaatcccagcaatttgggaggctgaggcaggagaatagcttgaaccccagaggcggaggttgcagactgtcaagacgatgccattgcagtctagccattagcatgggcaacaagagggaaactctgtttcaaaaaaaaaaaaaaaaagaagcattgctcctcgccttcagacacagcttccaatacagttttgaaaaataatttaaatcattccataaatactggaatgcaaatatttc

SEQ ID NO: 578893 - DNA, 526 bp, Homo sapiens
tatgatgaacgtgatttgatttaattaagtgtaaattattgtctcaaaaattgtaaattgattgatcctcaggtgaaagaagcaacactccttccattttagaccaaaatgtgtgagaatttcctgaccagagaaagaacacagagcactgggcaagaaaaggaggctgagtgatgaggtggcagcctgggaccctcgaatccacgtgaagccctaaattccgcaggcttcagtgccttgtgtggaaccagagagcaaagccattttcaaaagcattgctccgcctgtaatcccagcaatttgggaggctgaggcaggagaatagcttgaaccccagaggcggaggttgcagactgtcaagacgatgccattgcagtctagccattagcatgggcaacaagagggaaackctgtttcaaaaaaaaaaaaaaaaagaagcattgctcctcgccttcagacacagcttccaatacagttttgaaaaataatttaaatcattccataaatactggaatgcaaatatttc

SEQ ID NO: 578894 - DNA, 519 bp, Homo sapiens
ctgaaactcattctgtccctagagactgctggttgggtctggagatgtcacaagcactgacatgctgagcagaaggcccagcagggtctacaccagcagggggcgcagtggggatggagaccagtgtccatgattcagacatgtattcgggatacatgtatctgtgtagccttggggattgggggagcatgctgaatctgtggaagttttatgtccttgtagcccagcacctccatccctgcctgctgactcagacctcaacatgtgtcccatggaaagcacgggccacttatagaggctgccctgtgcaacccccaaggctcagctggattctcctttcccaggagagctcctctgcctgtaccaagtcagagcttgtttccacaggcaaacttggcggctatggcagaaggacaaaaagtcaggtgagcatcagctcaacaatgaaaggttctttttactatggaattttagatcrttcattccttattccttccactactttctaaagtcatttaa

SEQ ID NO: 578895 - DNA, 511 bp, Homo sapiens
taaatgtcttcttgcatcccacaacttttgatatgtgttttctttcacttcagattgctttgaaatgtccatctcttggtttcatctttgtcccaggctttrtttagtagtatgttacatagttttaaaatattgagatttttttctgatagctttctgtcattgattcctaataaatttcccttggcttctgaaactttattttatatgatttaaatccatttaatttctttgaaataacttgtggcccaaagcatgatctctcttagctaatgttttaaaatggctatggagtctgctgttgtggcagagtgttctctcagtgtcaatcctacccacatggttgatggctttggcaagtcatctgtatctgcatgggcccaagagacactgttgcctacagtgcaggctggagctgctgcagagcccttttctgccctgggtctccactaaaggctgggaagacttccatgtcacctggatggtgacatgaccagtattccacggtgta

SEQ ID NO: 578896 - DNA, 511 bp, Homo sapiens
taaatgtcttcttgcatcccacaacttttgatatgtgttttctttcacttcagattgctttgaaatgtccatctcttggtttcatctttgtcccaggctttatttagtagtatgttacatagttttaaaatattgagatttttttctgatagctttctgtcattgattcctaataaatttcccttggcttctgaaactttattttatatgatttaaatccatttaatttctttgaaatarcttgtggcccaaagcatgatctctcttagctaatgttttaaaatggctatggagtctgctgttgtggcagagtgttctctcagtgtcaatcctacccacatggttgatggctttggcaagtcatctgtatctgcatgggcccaagagacactgttgcctacagtgcaggctggagctgctgcagagcccttttctgccctgggtctccactaaaggctgggaagacttccatgtcacctggatggtgacatgaccagtattccacggtgta

SEQ ID NO: 578897 - DNA, 511 bp, Homo sapiens
taaatgtcttcttgcatcccacaacttttgatatgtgttttctttcacttcagattgctttgaaatgtccatctcttggtttcatctttgtcccaggctttatttagtagtatgttacatagttttaaaatattgagatttttttctgatagctttctgtcattgattcctaataaatttcccttggcttctgaaactttattttatatgatttaaatccatttaatttctttgaaataacttgtggcycaaagcatgatctctcttagctaatgttttaaaatggctatggagtctgctgttgtggcagagtgttctctcagtgtcaatcctacccacatggttgatggctttggcaagtcatctgtatctgcatgggcccaagagacactgttgcctacagtgcaggctggagctgctgcagagcccttttctgccctgggtctccactaaaggctgggaagacttccatgtcacctggatggtgacatgaccagtattccacggtgta

SEQ ID NO: 578898 - DNA, 511 bp, Homo sapiens
taaatgtcttcttgcatcccacaacttttgatatgtgttttctttcacttcagattgctttgaaatgtccatctcttggtttcatctttgtcccaggctttatttagtagtatgttacatagttttaaaatattgagatttttttctgatagctttctgtcattgattcctaataaatttcccttggcttctgaaactttattttatatgatttaaatccatttaatttctttgaaataacttgtggcccaaagcatgatctctcttagctaatgttttaaaatggctatggagtctgctgttgtggcagagtgttctctcagtgtcaatcctacccacatggttgayggctttggcaagtcatctgtatctgcatgggcccaagagacactgttgcctacagtgcaggctggagctgctgcagagcccttttctgccctgggtctccactaaaggctgggaagacttccatgtcacctggatggtgacatgaccagtattccacggtgta

SEQ ID NO: 578899 - DNA, 611 bp, Homo sapiens
ctataacagaatacctgagactgggtaatcagtaaagaacattctgtcacatttctggaggatgggaagtcaaagattgagtaactagcagcttgggatccaatttctgtgctttcaagatggaatttgaatgctgagtccttcagagagaaggaaggccatgccctggcctgacaatagcagaagtgagagactgggagctcgctctcataattgagatagttcagggatctgaccccttcttaggggtctttgaagcttccccagacatggaaataaaggaaaatcttgggtcttttcaagggaaatgttaggtgtccagctaagccttgagaagtaaacaagcaacatgagaagcaaggagacgataatagactaaaacaatagtcaaagaagctaaaaatcacagtatgttttattcctctacagaaactaaagagaacatctcagcatatgtctctgagttgtttttcagaaacccagatctccaacaaatggatcygccagcacatagacttcacataaggggaaacaggggactgaaatttgaccatggttctttgttctgaatttccacctgaggggcctggagaaagtcacacccacaggcc

SEQ ID NO: 578900 - DNA, 613 bp, Homo sapiens
gttcttttttgttagtatgttaagtttagtttgcatttattattttttctttccacctaccaatatttctgaatcctttcactagcatgattaattaagagtctgaaattttcaagactaagaacctgcattgaattggtcaacatcatgggataaaaaagttaaatacacaaaacttacaaaattaaataaaagaaaataataaatattttaaagactggaatataagacttttattgtactcctacctcctcatgataatttgtggtcatcaactcagaatattaacatggagttcgacatttaagatcatttttactcaattactttttccaatcttgttaaaaagtcttattttggtagatttcccaaaagatatgcagaccaagctttcttgtgggatcatacttagaactgcatttgtttgtgttttttaccaagtaagcatgactttgggttaaattacccgagattacatagtactgcaatctattacgttggctctccccagatgttttctctccaggacagtgmgtgtccttgtgaagggatctgatgtaggcacaatctttcaagagctgttcaactcaatcttgagcatatcattgacaaa

SEQ ID NO: 578901 - DNA, 641 bp, Homo sapiens
tttttaaaagtgagatatatttcaacaccagaattaacaaaagaaaacaatcatcaggactgaactaaagccaattatctttccatttgtttttgtgttgaaacttttgagcagcttggaataactggcctgaattgcaggttgttatactggaattttgtttttccttctgctttttgacagtatgaacttgggctaacgtctttatcttttttgactttaaactttgaaatgaataaattagtttaaatactctgtatgtttccttcaaatgtagagaaatgcattttagatatatgctgaatgttcagtcccattcagtcatatgacacttagccaagtatcttactactggcacatcactcatcatccaggcatttgttattttagtccagcactgtatctgtaccaaaccaacaaacatcacaaattattgaccatcgagatagaaccttagaattgtctttggctaagaagatacatagatgatccaggaaattattgacatgggagctcttatttacatttccttttcgtgacgggacagttaagaaacagaaataacaaggtgtccctaggtgcagagttgagctcttcctatactatayattgaaattctttcttgcagaggcatttagtca

SEQ ID NO: 578902 - DNA, 553 bp, Homo sapiens
gaggcaggagaatcgcttgaacctgggaggcggaggttacagtgagctgagattgcgccactgcactccagcctggcaacagagcgagacttggtctcaaaaaaaaaaaaaaaaaaagatmcagattaaagtgtgtttcttatagacaacatttggttagatttttgtttttaatcccatgtgacagtttctcacttttaattaaaatgtttagactattacagttaatataactgaataaaattattgacatttttgggttcaaatcttacatgctgttatttttcctctatctatctactcctcttttctttttcatttttttctacattcttttattattctgcttacctacactattggtttagtaagtaaacaccattgtttaatttttaacagtttttctaaggttcacctataaatctttaaactataacagtctaaattcatatagtataattccagcatatgtatagtataaaatcttataaaagtatacttttaatcttctatcttttttgtgaactttagtaaacattttacttctacaaca

SEQ ID NO: 578903 - DNA, 553 bp, Homo sapiens
gaggcaggagaatcgcttgaacctgggaggcggaggttacagtgagctgagattgcgccactgcactccagcctggcaacagagcgagacttggtctcaaaaaaaaaaaaaaaaaaagatccagattaaagtgtgtttcttatagacaacatttggttagatttttgtttttaatcccatgtgacagtttctcacttttaattaaaatgtttagactattacagttaatataactgaataaaattattgacatttttgggttcaaatcttacatgctgttatttttcctctatctatctactcctcttttctttttcatttttttctacattcttttattattctgcttacctacactattggtttagtaagtaaacaccattgtttaatttttaacagtttttctaaggttcacctataaatctttaarctataacagtctaaattcatatagtataattccagcatatgtatagtataaaatcttataaaagtatacttttaatcttctatcttttttgtgaactttagtaaacattttacttctacaaca

SEQ ID NO: 578904 - DNA, 498 bp, Homo sapiens
tgttttctaatttggatgtcttttatttccttattttacctgattgctctggttaggacttccagtactatgttgaataggagtggtgaaagttgacatccttgtcttgttccagttcctagggggatttctttaaacttttccccattcagtatgatgttggctgtaggtctgtcatatatggcctttattattttagggcwtgttccctctatgcctaccttgttgagggtttttattatgaggggatgctgactattgtcaaatgctatactattattacttatataatttggtcaaattattttttatccattctgccaatctatatcttttacatggagcatttaatctatttacattcaagattaatatttatatgtgaggtttcattcctatcataaggttaattttaatctagttgtttcataggttctttattcttttttttcttctatatgtttgtctttctggtttcatggagttctgtcatgctgc

SEQ ID NO: 578905 - DNA, 587 bp, Homo sapiens
cccattttctttggggaaattcaagctggctgcagaaatttgcataagtaatgaggagccaaatgttaatcaccaagacaatggggaaaatgtctccagggcatctcagagacctttggggcaaacactcccatcacaggcagagaggtttaggagacaaaaatggatttgtgggctgggccaaggttctctctgctctgtgcagyctaggaacttggtgcctgtgtcccagccactccagctgtggctgaaagaggctaatgtagagcttgggctgtggcttcagagggttcaagccccaagccttgacagcctccaagtggtattgaacctgctagtgcaagaagtcaagaattggggttttggaacctctgcctatatttcagaggatgtatggaagtgcctggatgtccaggaagaaatttgctgcagggttggggctctcatggaggacctccactagggcaatgcagaaggaaaatgtgggttggatcctcacacagagtccctaatgggacactgcctaatagagctgtgagaagagggccaccatcctccagaccccagaatggtagatccaccaacag

SEQ ID NO: 578906 - DNA, 587 bp, Homo sapiens
cccattttctttggggaaattcaagctggctgcagaaatttgcataagtaatgaggagccaaatgttaatcaccaagacaatggggaaaatgtctccagggcatctcagagacctttggggcaaacactcccatcacaggcagagaggtttaggagacaaaaatggatttgtgggctgggccaaggttctctctgctctgtgcagcctaggaacttggtgcctgtgtcccagccactccagctgtggctgaaagaggctaatgtagagcttgggctgtggcttcagagggttcaagccccaagccttgacagcctccaagtggtattgaacctgctagtgcaagaagtcaagaattggggttttggaacctctgcctatatttcagaggatgtatggaagtscctggatgtccaggaagaaatttgctgcagggttggggctctcatggaggacctccactagggcaatgcagaaggaaaatgtgggttggatcctcacacagagtccctaatgggacactgcctaatagagctgtgagaagagggccaccatcctccagaccccagaatggtagatccaccaacag

SEQ ID NO: 578907 - DNA, 587 bp, Homo sapiens
cccattttctttggggaaattcaagctggctgcagaaatttgcataagtaatgaggagccaaatgttaatcaccaagacaatggggaaaatgtctccagggcatctcagagacctttggggcaaacactcccatcacaggcagagaggtttaggagacaaaaatggatttgtgggctgggccaaggttctctctgctctgtgcagcctaggaacttggtgcctgtgtcccagccactccagctgtggctgaaagaggctaatgtagagcttgggctgtggcttcagagggttcaagccccaagccttgacagcctccaagtggtattgaacctgctagtgcaagaagtcaagaattggggttttggaacctctgcctatatttcagaggatgtatggaagtgcctggatgtccaggaagaaatttgctgcagggttggggctctcatggaggacctccactagggcaatgcagaaggaaaatgygggttggatcctcacacagagtccctaatgggacactgcctaatagagctgtgagaagagggccaccatcctccagaccccagaatggtagatccaccaacag

SEQ ID NO: 578908 - DNA, 642 bp, Homo sapiens
tttatcctaacttctcttaagtgtatgaatttagaattttatatgttaggattttggcagtgtgcccagctgaagctgcattatttwaaaaaaaaattaataggcctaatttttagaatagttttagacttacagaactattgaacagatagtatagagagttctcatgtcctcccccaccaaccctcacaccatttcccctgtttttaacattttgcctcagtatggtacatttgttacaactaatgaatcaatatcgatacattattcttaactaaggtccatcatttatttcaatttccactggatcaattatttagacctttgccatggccttggcatgcacatgtgggtctagctaatgttctgttactgtccaggatcccatctaggatactctattacatttatttatccttaggttcctctccactgtgataggtttgcagactttcctagttttgagaaatgattctcaagtctattgtagtatgttcctctattagaattttttttaattagactgaggttatggggtttgggaggaagactgcaggggtgaactaccattttcatcacatcatattaaaggtacctgctatcagcatgatttatgactgttgatgctgacctcagccatac

SEQ ID NO: 578909 - DNA, 473 bp, Homo sapiens
catttccaccatccatgtataagggttccaatttctccacatcctcaccaacacttgttattctctgtcttttttattatagttgtcctatggrgtgtaaagttatatctcattgtggctttgtgacacacttccgttagaactaatgaggttgagcatcttttcatgcactattgaccttttgtatatgttctttggagaaatgtctattcaaatcctttgcccctttaaaatatgggttgtctctttattgttgaattataagaactctatatattctggatactagaactctcttagctacattatttactttccccccgattctgtgaattcattgtatttatagtatcatttgaagcacaagttttaaattttgatgaagttcaatttatttatattttctttgtttgtttgtttttaagtgtagatttccttagtttctaacctaatgacatcttctggtccaggat

SEQ ID NO: 578910 - DNA, 594 bp, Homo sapiens
tgcaatgagctatgattgcaccactacattccaacctgggtgacagagtgagacwtgtctcaaaaaaaaaaagtatgcttttttttcctattaatctgtcttttgttagtttaattcacagtccccaggtacagattttagaagaatagagaaacaggattttttcctccccatataatattcatacagagttagggagctggctatattcacagtatgtactgaaacaacaaaaattacataaggcttgatataactggttaacaggaagttaacaattagtatgttaccatggaccaaagtctgtgaccaacttaaattcaataggcaatagtctctcaaatatacaattatttacctgctgtttgcaactgtgaagagaatcttaatgtatgcatttgaagggctacaaataaagggaagcaactgcagcaaaaggcactgcctaataatgcctgtttgcaaataagttacttaagccaatagtgccagtttctcactctttcgaaggtagaactcaaacatgccataataaaattcattttcatttttctaataatgcatgctatccttaagaaaggtagattacattgc

SEQ ID NO: 578911 - DNA, 583 bp, Homo sapiens
gttataattataaaatgccacaatgaatatgcattacttagcagagccctgatagagaagtgtttattaaattgtatctattattattaaatgaatttctggctttaaatttagaattagaagtaggatgtcaaataattcacttaaaattaattcaatttaatagtctcttcaagttttgtgcctggaataacaattaattttattaatactttccatttttagccagttccttgagaaaaatgtacatagccaatatcagagtataattatagaattggaggtcagcttgtgcagttggtctctgggaggtccccaaaatgccaaatgccacattaagagtatacttacttttaatakggcattaaagagtaaggattgcacgttttgaaacaatcataatgaaccaaacattttcttaaggcagccataaaccaatctttgagtttcataatgttgataactacaaatttatttttgtttcaaactatcactccctgtaattcattcaaaaggagacttaacactatgtattgaatgcctacggtgtacaggctcccttctaggctctggagacactgca

SEQ ID NO: 578912 - DNA, 583 bp, Homo sapiens
gttataattataaaatgccacaatgaatatgcattacttagcagagccctgatagagaagtgtttattaaattgtatctattattattaaatgaatttctggctttaaatttagaattagaagtaggatgtcaaataattcacttaaaattaattcaatttaatagtctcttcaagttttgtgcctggaataacaattaattttattaatactttccatttttagccagttccttgagaaaaatgtacatagccaatatcagagtataattatagaattggaggtcagcttgtgcagttggtctctgggaggtccccaaaatgccaaatgccacattaagagtatacttacttttaatagggcattaaagagtaaggattgcacgttttgaaacaatcataatgaaccaaacattttcttaaggcagccataaaccaatctttgagtttcataatgttgataactacaaatttatttttgtttcaaactatcmctccctgtaattcattcaaaaggagacttaacactatgtattgaatgcctacggtgtacaggctcccttctaggctctggagacactgca

SEQ ID NO: 578913 - DNA, 561 bp, Homo sapiens
ctgggtaatttttgtattttttagtagagacaggatttcaccatgttagccagactgctctcaaactcgtgacctcaaataatctgcccatctcagcctcccaaagtgctgggattataggagtgagccactgtgcctggcctagtcatcattttcaatacattttcttcatcactgccataatatctaaaacactttattattccaaattattttacccacagtttgatgtaaatatrctacagagttttagaaatctactttcatttttatgtaaaggattgtatctattgaacatgtgtcggggcaaaacacatttgaagcaagaataaacagagaatgcgataatgacaacaaatgtgaagtaaataaattagcagctgtgaaatgaaaccaaagcatggtttttcataggaaagaatcattttagaattgatcatcaacacaaagctgatcaaactcattgctaaaaatgacgatatcaaggcaaatgcatttctatggtaattgttacattttctccttcaagaaaatgcttcttaatttgctttatattttgga

SEQ ID NO: 578914 - DNA, 581 bp, Homo sapiens
ttctgtgtgactcagatttcaccttcatacatacttgtactttgcaattttttttccgatgaagataggtaaatataagtatcaaaaacgcagcaaaatgtaaatagtgcctgcttctgaatggtaatggtgtgaaattctccccttttcttcatattgttctgtgctttccaaagtttctctgtgaactggtaatacttcagaagggaaacaaaaagcagcacagatgtggaatcagaagacctgtgatccaggtggacacctgcccccaatagctaatagcctaatcacatgtgttctacagccactgtgacctccttcaacctctccttgctcatgtgtagacagacacagtcacagaccctagcagctgcagagatagtgtatgcggaggacttcgtgaactggtaaatactacacaaatgttaatgctaaggctggcttggtgagccatgaggtccattccttggagctcttccaactcctcccttggtccatccaccctgtgggaggtcagtagagggtgtctacctcagactggcttcagggaaagcatcasaaggggtctttcttttctacaa

SEQ ID NO: 578915 - DNA, 464 bp, Homo sapiens
ccagaccctgtttgcctgggtatcaccagtggaggctgcagaacaccaaagattgctgcctgttccttcctctggaagcttcatcccagaggggagcctgcctgatgccagccagagctctcctgtatgaggtgtctgttgacatctgctaggaggtgtctcccagttaggaggcatgggtttcatggacccatttgatgaggcagtctgtgccttagcagagctcgagcgctgtgctgggagatccactgctctcttcagaactggcaggcaaraagctttgtctgctgaagctgcgcccataggcaccccttcctttaggtgctctgtcccagggagataaagttttatctctaagcccctgactggggctggtgcctttctttcagagatggccttcccagtgagaaggaatctagagaggcagcctggctacagccactttactgcactgtggtgaattc

SEQ ID NO: 578916 - DNA, 573 bp, Homo sapiens
cataggcaccccttcctttaggtgctctgtcccagggagataaagttttatctctaagcccctgactggggctggtgcctttctttcagagatggccttcccagtgagaaggaatctagagaggcagcctggctacagccactttactgcactgtggtgaattccgcagaaattcccaagggcttaacactgtgaggggaaaaccrcctactgaagcctcagtaatggcagatgcccctcccctcaccaagctcgatcatcccaggtcaacttcagactgctgtgctggcagtgagaatttcaagccagttgtccttagcttgctgcacgatgtgggaatgggacccgctgaatgagaccacttggctccctggcttcagccccttttccagcggagtgaatggttctgttttgctatggttccaggtgccactggggaaccaaccaaacatacaaacaaacaaactcctgcagcttcctcagtgtctgcccaaacagccaaccagttttgtgcttgaaacccagggccctggtgttaggcacacgagggaatgtccttgggtggtctgaggc

SEQ ID NO: 578917 - DNA, 573 bp, Homo sapiens
cataggcaccccttcctttaggtgctctgtcccagggagataaagttttatctctaagcccctgactggggctggtgcctttctttcagagatggccttcccagtgagaaggaatctagagaggcagcctggctacagccactttactgcactgtggtgaattccgcagaaattcccaagggcttaacactgtgaggggaaaaccgcctactgaagcctcagtaatggcagatgcccctcccctcaccaagctcgatcatcccaggtcaacttcagactgctgtgctggcagtgagaatttcaagccagttgtccttagcttgctgcacgatgtgggaatgrgacccgctgaatgagaccacttggctccctggcttcagccccttttccagcggagtgaatggttctgttttgctatggttccaggtgccactggggaaccaaccaaacatacaaacaaacaaactcctgcagcttcctcagtgtctgcccaaacagccaaccagttttgtgcttgaaacccagggccctggtgttaggcacacgagggaatgtccttgggtggtctgaggc

SEQ ID NO: 578918 - DNA, 573 bp, Homo sapiens
cataggcaccccttcctttaggtgctctgtcccagggagataaagttttatctctaagcccctgactggggctggtgcctttctttcagagatggccttcccagtgagaaggaatctagagaggcagcctggctacagccactttactgcactgtggtgaattccgcagaaattcccaagggcttaacactgtgaggggaaaaccgcctactgaagcctcagtaatggcagatgcccctcccctcaccaagctcgatcatcccaggtcaacttcagactgctgtgctggcagtgagaatttcaagccagttgtccttagcttgctgcacgatgtgggaatgggacccgctgaatgagaccacttggctccctggcttcagccccttttccagcggagtgaayggttctgttttgctatggttccaggtgccactggggaaccaaccaaacatacaaacaaacaaactcctgcagcttcctcagtgtctgcccaaacagccaaccagttttgtgcttgaaacccagggccctggtgttaggcacacgagggaatgtccttgggtggtctgaggc

SEQ ID NO: 578919 - DNA, 594 bp, Homo sapiens
ggtttggtccaggaagcagagttggccaaatgcaatgtggaggtttcaaagattttttaaaagagagaaaaattcctttgtgaatgataatgaaatccaagctgtcaggctgtgtttggtgtcaaacagagatttgagatggtcctcagtatgagtgtgggcagtgaaaaaaggggtgcagtggagtgtcctctcatccatgctgagagaatattgaagaggagtcagaaatgagaatcaaattatcatgactgaaaattttcataccttattctggggaactatatatcaaagggggagaacaaaaaaagtcacaaaatgcattactaattagaaattgtcttcaaggtttgcttactgcctgatgcattccagcaaattattacttttgaacttgttaaataattatctgcaatggttaatatttgtaatatgcaaacaygcattagttttagatatatggccaatgcaatgggttggatttctgggtaatcatcagttgcttcgtctggatattatcaaaacaggtagatgcctttcagccctaatataattgactaaattctaaaatcaatctctcagcttaataacccc

SEQ ID NO: 578920 - DNA, 329 bp, Homo sapiens
ccagctaattttttgtatttttgayagagatcaggtttttttcatgtttcccaacctgggcttgaactcctggccttaagggatcctcctgccttggcctcccaaagtgctgggattacaggtgtgagccacaatgcctggcctttttccatgtatttctattgtatttaggataaacataaaaataaataaatgctcccccaccccgaattctacatgagcaagccactgcctgcttctccagtctaaacttgcctctctcccttcctatacttaagtcatacaaatctctcttaatttccaaaatgtattaagttcttccagatgca

SEQ ID NO: 578921 - DNA, 586 bp, Homo sapiens
ttagtttgtgttttataagattattctgatagacagctaactagctagttagctggataaatagaatcattctatttttctcttttactgagctccatgtctgtggatctaagctatttcactctcagctactgtatgggtttttattacttcattggtcatgtcatacattcttttttaatattctttgctattcttatacatgaatttcttttttagaaattaacttgaaattgaatttgccaaattttcctctatataatcttattgagattttgaccaaaagatcatttaatttataaataaatttgaaaagtaatgacatctctacaatattaaaactgctgttttggattattttatgactataaacaattacttattttttgcttcatattgttttgactattttgtgatttagtcctgtatattttgaagttctttttggtatttgaatcatagttttttctaatacatcaactttcatattttactgttgctctatagaaaagataytacttttttggggtggcgggggacggagtttcgctcttgttgcccaggctggagtgcaatggcacaatct

SEQ ID NO: 578922 - DNA, 642 bp, Homo sapiens
acaaaacagaacaaattttaaagatataatgtctcattttttcaaaatttgaaggaaactagaaataaacagatctgaaaattcatatacatcccaagcacagatacataaaaaaactacattaagccacattgaaatcaaatttctggaagcagctgataaagacactatgctaacmgcagtcagaaaaagaaaaaagacacattacatactgaggagtaagataagaatggcagaagagttctcataagaaacaaagtgagccagaagacagcggaatagcatctccaaactacagaaagaataatctgtcaacctagtattcatagcggctatatctttcactaatgaagacaaataaagactcttcaagcataatcattcaagaagcatttatcaccaggagactacccttgaggcaatgttcaagtaactcgtacaggcagaagggagaagattccatatgaaaatctagatcttcaccaaggcatggaataccatgcaaacaggaaattggtgtataaatatatgaggatttttttccctatttttacagtctattaaaaattcgactatgtaaaacaaatataataacaatgtatatgctagtttatgacacatgtagaaataaaatataaaaat

SEQ ID NO: 578923 - DNA, 642 bp, Homo sapiens
acaaaacagaacaaattttaaagatataatgtctcattttttcaaaatttgaaggaaactagaaataaacagatctgaaaattcatatacatcccaagcacagatacataaaaaaactacattaagccacattgaaatcaaatttctggaagcagctgataaagacactatgctaaccgcagtcagaaaaagaaaaaagacacattacatactgaggagtaagataagaatggcagaagagttctcataagaaacaaagtgagccagaagacagcggaatagcatctccaaactacagaaagaataatctgtcaacctagtattcatagcggctatatctttcactaatgaagacaaataaagactcttcaagcataatcattcaagaagcatttatcaccaggagactacccttgaggcaatgttcaagtaactcgtacaggcagaagggagaagattccatatgaaaatctagatcttcaccaaggcatggaataccatgcaaacaggaaattggtgtataaatatatgaggatttttttccctatttttacagtctattaaaaattcgactatgtaaaacaaatataataacaatgtatatgctagtttatracacatgtagaaataaaatataaaaat

SEQ ID NO: 578924 - DNA, 565 bp, Homo sapiens
tctcagagataaaaatcatgaattaagagagaatataaaatattggttttaattttttcaatttaaaaaaattggcaaataataattatacagattcatggggtccatagtgatgttttgatacatgtaatatataattgtcagatcagggtaattggcatatccatcatcccaaacatgtatcatttatctgcgtgagaagattgaatattctcctcctagatatttgaaactgaaaatatattatcattaactacagtcttcctacaatggtatatgtattagttcattctcacgctgctgataaagacatacctgagactrggtaatttataaaggaaagaggtttaactgactcacaattccatatgactggggaggcctcataatcatggtggaaagcgaataagaagcaaagtcatatcttacatggcagcaggcaagagagcttgtgaggggaattcccatttataaaaccatcagatcttttgagacttattcactaccatgaggacagtatgaagaaaattgcccctaggattcaattatctccacctggccccac

SEQ ID NO: 578925 - DNA, 500 bp, Homo sapiens
tttaagcccattgtatacattgctaaacagtatagtacatttgttgacttagtgtaaatgcaatcagactgtatgcacgttttgctttgcatctcttggtcaacactttgtttcagtatgaagcatcattcctatgaatgcattccattagaattcattcattgtcattgctggtagttttcaagatacgaatataccacaatatctttaaccattctgtcactgatgaaatattaggttactgttaatatttggcttctgccaacaagaatgctragaatgtctttattcatgtcttgcaatgcatttgtgtacacatggaagagtattctcaaaatatgttaaagttactacttatttttctatattccactttgccaagtacatataatttaatttatacaagttaaatctattgctttgatacttctgtatttaaaaatccacatagaggggccgggtgcagtggctcacacctgtaatcccagcactttcggagg

SEQ ID NO: 578926 - DNA, 635 bp, Homo sapiens
tttcttctatccgattaaaagacaactacataaatcaagaattataataccacgttaatgggcttacacagtataaaagtaatttgtatgacaataacagccaaggaggaaagaagtaacaggtacatattagagcaaagtttctgtatactattaagttaatttttatctgatctagattattttagtaaaatgctaattgtattccccagaacagatactaagaaaatagttttaaagmtacaacaaaagaaacaaggtaataaaatggcatgccagacaatatttatttaatgaaaaacaaggcagatatgaaggaataaaaaagcaaagacatagaaacaccaggcatcaattctaccttatcagtaattatataagacataaatgaattaaacactaacaaaaagtaaggattagcagaatagtttttgaaatgatatgattatgtcgtatctagaagagataaactgtatattcaaaggtatttacaaagcaaaagcaaaaatataggaaaaagaaataggctgggcatggtggctcacgcctgtaatcccagcactttgggaggccaaggcaagcagatcacttgaggccaggagttcatgaccagcctggccaacatggtgaaaccc

SEQ ID NO: 578927 - DNA, 635 bp, Homo sapiens
tttcttctatccgattaaaagacaactacataaatcaagaattataataccacgttaatgggcttacacagtataaaagtaatttgtatgacaataacagccaaggaggaaagaagtaacaggtacatattagagcaaagtttctgtatactattaagttaatttttatctgatctagattattttagtaaaatgctaattgtattccccagaacagatactaagaaaatagttttaaagctacaacaaaagaaacaaggtaataaaatggcatgccagacaatatttatttaatgaaaaacaaggcagatatgaaggaataaaaaagcaaagacatagaaacaccaggcatcaattctaccttatcagtaattatataagacataaatgaattaaacactaacaaaaagtaaggattagcagaatagtttttgaaatgatatgattatgtcrtatctagaagagataaactgtatattcaaaggtatttacaaagcaaaagcaaaaatataggaaaaagaaataggctgggcatggtggctcacgcctgtaatcccagcactttgggaggccaaggcaagcagatcacttgaggccaggagttcatgaccagcctggccaacatggtgaaaccc

SEQ ID NO: 578928 - DNA, 463 bp, Homo sapiens
gaaccaacaccatttcagggtttggtagtggtcactgtatcatgtctatcatgccatcaagcctgaaggtagcaccactgcaccagctaaacaatcaggggccaaagtgcaggtaggaggggagagactaggtctcaggcttcagtcttactaactacaaaagggttactaataacaaaaaaagaattagaagacttactaataacaaaaacagtccactatcacatattttacatgttatatacagtatatactgtattcttacaataaagtaagataaagacaatgttattaagaaaatcataaggaagagaaaatatatttactattcattaagtggaagtagatcatcaaaaaggtkttcatccttgttgtctttaggttgagcaggccgaggaggaggaggaagaggagaggttgatcttgctgtctcaggtagaagaggtggaggaggtagaagggg

SEQ ID NO: 578929 - DNA, 563 bp, Homo sapiens
tgtaagcatttaattcccaaagtgaacaaaaaaatgaactattaccaacatcccccaaacccacttctatctcctcccagagactatccttatccacagggtaagcttatcctgacttctaatgttatagattggtttgcctatgctgcaactttatataactagaaatatgcagtaattcaattgtgcctggcttgacttaatattatgttcatgagatttattcataaaagtatcaggagtttgtttacattgttccatagtatttcaatgtayatctttatttatccattcaatgtttgaaagatagttgaggccgggctcagtggctcacacctgtaatccctgcaatttgggtggctgaggcgagttgatcacctgaggtcaggagttcgagaccagcctggccaacatgatgaaagcctgtctctactacaaataaaaaaaaattagctgggtgtggtagcgcgcacctataatcccagccactcaggaggctgaggcaggagaatcgctggaatctgggagatggaggttgcagtgagccgagatcatgctactgt

SEQ ID NO: 578930 - DNA, 601 bp, Homo sapiens
atttcatctccaggtctgacttctgttatgagctcctgggccagtatgtctcactacctgcagcagatgtccacatggatgcctcacaggcagctcacagttaacccgaatcacatgtttctacctctcatttttaatctattcctcctccaatcaytcctgtctcagtaaagggcactgcaatcaactcagttgctcaagagagaaacctgggtgtcacctggaattcctcctcctctctcatgtcccacacccagagcaccagctagtcctgttgactccgcctctaacttgtaccctagacctgctcccttctctccctctcctctgcctagcctaagctgccatgccatcatcctttgcctggacaattgaaaagctctcttaactgctttcctcattcctcctttgctcattgtagcccgttttccaaatagaagccccacgagtttgtcatgcaaataactgagatagcactccctatgtaaaatgtgttcatgctttcccaccatactcgggttaaaatctaaacgctttcttgaggcctagaaaacctgtatgagtctcaccctctcttctcccctctaccccttgctcatcc

SEQ ID NO: 578931 - DNA, 324 bp, Homo sapiens
ttggcagtattctttcctcctctatttttctgaatagtttgagtaggactggtattagttcttgtttggtaaaattcaggattgaagccctgatgtcctgggcttttctttactatgagactttttattaatattatggctttgacctcattacttgttatyggtctgttctggttttggatttcttcttgactcaattttggtaggctgtatgtggctaggaatttgtgcatttcttctagattttccaatttattggcatatagttgctcaccgtagctactaatgatcctttgaatttctgcagtatcagctagaatgtct

SEQ ID NO: 578932 - DNA, 611 bp, Homo sapiens
tagttgctcaccgtagctactaatgatcctttgaatttctgcagtatcagctagaatgtctccttcttcatttctgattttatttaattggatcttctcttttttttcttagtctagctaaaggtttatcaattttgtttaacttttcaaagaaacaactttttgttccattcatcttttgtattctctctctcaattcaatttcatttatttctgctctgatctttattatttcctttcttctactaattttgggtttggtttsctctggcttttctggttctttaagatgcatcgttagattgtctatttgaaattttcccttttttgatatagacacttatagccataaaattctatcttactattgcttttgctatattccataggttttgctatgttgtgtttcattatcatttgtttcaagaaaatttttaatttccttattaatttcttcattgacccacgggtcattcgggagcacatattttaacttccatctatttctatattttccaaaattcctcttgttatttatttctagttttattccattgtggtcagagaagatacttgatattatttcaattttttgaatgttttaagacttg

SEQ ID NO: 578933 - DNA, 611 bp, Homo sapiens
tagttgctcaccgtagctactaatgatcctttgaatttctgcagtatcagctagaatgtctccttcttcatttctgattttatttaattggatcttctcttttttttcttagtctagctaaaggtttatcaattttgtttaacttttcaaagaaacaactttttgttccattcatcttttgtattctctctctcaattcaatttcatttatttctgctctgatctttattatttcctttcttctactaattttgggtttggtttcctctggcttttctggttctttaagatgcatcrttagattgtctatttgaaattttcccttttttgatatagacacttatagccataaaattctatcttactattgcttttgctatattccataggttttgctatgttgtgtttcattatcatttgtttcaagaaaatttttaatttccttattaatttcttcattgacccacgggtcattcgggagcacatattttaacttccatctatttctatattttccaaaattcctcttgttatttatttctagttttattccattgtggtcagagaagatacttgatattatttcaattttttgaatgttttaagacttg

SEQ ID NO: 578934 - DNA, 611 bp, Homo sapiens
tagttgctcaccgtagctactaatgatcctttgaatttctgcagtatcagctagaatgtctccttcttcatttctgattttatttaattggatcttctcttttttttcttagtctagctaaaggtttatcaattttgtttaacttttcaaagaaacaactttttgttccattcatcttttgtattctctctctcaattcaatttcatttatttctgctctgatctttattatttcctttcttctactaattttgggtttggtttcctctggcttttctggttctttaagatgcatcgttagattgtctatttgaaattttcccttttttgatatagacacttatagccataaaattctatcttactattgcttttgctatattccataggttttgctatgttgtgtttcattatcatttgtttcaagaaaatktttaatttccttattaatttcttcattgacccacgggtcattcgggagcacatattttaacttccatctatttctatattttccaaaattcctcttgttatttatttctagttttattccattgtggtcagagaagatacttgatattatttcaattttttgaatgttttaagacttg

SEQ ID NO: 578935 - DNA, 611 bp, Homo sapiens
tagttgctcaccgtagctactaatgatcctttgaatttctgcagtatcagctagaatgtctccttcttcatttctgattttatttaattggatcttctcttttttttcttagtctagctaaaggtttatcaattttgtttaacttttcaaagaaacaactttttgttccattcatcttttgtattctctctctcaattcaatttcatttatttctgctctgatctttattatttcctttcttctactaattttgggtttggtttcctctggcttttctggttctttaagatgcatcgttagattgtctatttgaaattttcccttttttgatatagacacttatagccataaaattctatcttactattgcttttgctatattccataggttttgctatgttgtgtttcattatcatttgtttcaagaaaatttttaatttccttattaatttcttcattgacccacgggtcattygggagcacatattttaacttccatctatttctatattttccaaaattcctcttgttatttatttctagttttattccattgtggtcagagaagatacttgatattatttcaattttttgaatgttttaagacttg

SEQ ID NO: 578936 - DNA, 518 bp, Homo sapiens
attgacccacgggtcattcgggagcacatattttaacttccatctatttctatattttccaaaattcctcttgttatttatttctagttttattccattgtggtcagagaagatacttgatattatttcaattttttgaatgttttaagacttgttttgtgatgtaacatatggtctgtccttgagaataactcaygtgctgaggaaaagaatgtgtattctgcagctgttggatgaaatattctataaatatctattagatccatttggtgtatagtgcagattaagtctgctgtctgtttgttgatttcctgtctggaacactggtctaatgctgaaagtggggtgttgaagtctctagctattattgtattggggcctatctctctctttacctctaataatatttccttcatatatctgggtgcatcagtgttgggtgcatatatatttaaaattgttatatccctgtgatggttaatattgtcaacttgattggcttgaaggctgcaaagtat

SEQ ID NO: 578937 - DNA, 531 bp, Homo sapiens
ctttctttatccttgacctttgggagtttcattataaaatgcctcgatgtactcttgtttgggttaaatctgcttggtgtttaaccttcttgtaccgggatactgatattttcctctaagtttcgaaagttctcattattatccttttgaataaactttctacccctatctttttctctaactcctctttaaggccaataactgttagattttcccttttgaggctattttctagatcctgtaggtgtgcttcattgttttttattcttttgttttgtcttttctgactgtgtatttcaattagtctgtcttcaagctcactaattttcttctgcttgattaactccactattcaaggactctgatgcattcctcagtatgccaattgcattcttcaactccagaatttctgcttgattcctttaaattatttcaatatctttgttaaatttatctgatagaattctgaagtccttctctgtgttatcttgaatttctctgagttyctttaacatgggtattttgaattct

SEQ ID NO: 578938 - DNA, 564 bp, Homo sapiens
tccttgtttgcagatgacatgatcttatatttagaaaatttagggactccaccaaaaaaaagggctttcagatttccccattcaggtatgatgtcagctattggatttgttatatatggcttttaccatgttgaggcttctactcacccaatttgttgagagtttttattataaaatgaagwtgaattttaccgaatgttttttggcatctattgaaccataaatttagtaaagttgcagcataaaaaaccaacaaacaaaaatcaatagcatttctatatgccaacaacaagcaatctgaaaataaaccaagagaaagccatcccatttataatagctactaataaaataaaataaccagaaataaacttaactaaggaaatgaataacctctacaatgaaaactatcaaacattgataaaaaaattaaaggtgatagaaaaactgaaaatatattttttgtttatggatggaagaataaatattgttaaagtgttcatattggccaggtgcggtggctcacggctgtaattccagcactttgggaggctgaggcaggtggat

SEQ ID NO: 578939 - DNA, 564 bp, Homo sapiens
tccttgtttgcagatgacatgatcttatatttagaaaatttagggactccaccaaaaaaaagggctttcagatttccccattcaggtatgatgtcagctattggatttgttatatatggcttttaccatgttgaggcttctactcacccaatttgttgagagtttttattataaaatgaagatgaattttaccgaatgttttttggcatctattsaaccataaatttagtaaagttgcagcataaaaaaccaacaaacaaaaatcaatagcatttctatatgccaacaacaagcaatctgaaaataaaccaagagaaagccatcccatttataatagctactaataaaataaaataaccagaaataaacttaactaaggaaatgaataacctctacaatgaaaactatcaaacattgataaaaaaattaaaggtgatagaaaaactgaaaatatattttttgtttatggatggaagaataaatattgttaaagtgttcatattggccaggtgcggtggctcacggctgtaattccagcactttgggaggctgaggcaggtggat

SEQ ID NO: 578940 - DNA, 564 bp, Homo sapiens
tccttgtttgcagatgacatgatcttatatttagaaaatttagggactccaccaaaaaaaagggctttcagatttccccattcaggtatgatgtcagctattggatttgttatatatggcttttaccatgttgaggcttctactcacccaatttgttgagagtttttattataaaatgaagatgaattttaccgaatgttttttggcatctattgaaccataaatttagtaaagttgcagcataaaaaaycaacaaacaaaaatcaatagcatttctatatgccaacaacaagcaatctgaaaataaaccaagagaaagccatcccatttataatagctactaataaaataaaataaccagaaataaacttaactaaggaaatgaataacctctacaatgaaaactatcaaacattgataaaaaaattaaaggtgatagaaaaactgaaaatatattttttgtttatggatggaagaataaatattgttaaagtgttcatattggccaggtgcggtggctcacggctgtaattccagcactttgggaggctgaggcaggtggat

SEQ ID NO: 578941 - DNA, 402 bp, Homo sapiens
gaattcaggtgatcctcccacctcagcttcccaagtagctgggacttcaggtgtgcactaccacatccagctaatttttgtatttttttgtagagatggggtttggccatgttggccaggctggtctcaaactccaggactcaagcgatccacccaccttggcctcccagagtgctgggattacaggtgtgaaccatcatacctggcccagaaactgccaattctttttttggagatggagttttgctcttgtygcccaggctggagtgcaatggcatgatgtcggctcactgcaacctccacctcctgggttcaagtgattttcctgcctcagcctcctgagcagctgggattacaggtgcctgccaccaggccctgctaattttttgtatttttagtgga

SEQ ID NO: 578942 - DNA, 472 bp, Homo sapiens
agagagataagtaggggcctggctatgtaggacactgcaggatatggcaagcagagactatttgaagtgaatgggaagtcactggaagggctgattagttgtctatttttgagcaaaacaatatcactgagccttagtttattttacctttttaaaaatggtctaatacataaccccttatcaaaaactctcagggaaagttgtgttttggcattcaggattttgaatattaaaaaacaccatagtatatttattttatataacatcccaagaaaagtctggtgtatgtagtatctcacaacccaatatattattatttctgtgattyaacatggggtaaataaagacaaagtctatcaatagcctcagtttggttttgccaccaaatgagtttgctccaaacctgccagaaataaacaaatagattaacaagagaagaaaaaagacagaaaaatatttttttgttttcaga

SEQ ID NO: 578943 - DNA, 612 bp, Homo sapiens
tcctcttcttcactttcacaccctcgagtcactttcccctgagaccctctgctagggtgaccaactgtccccattttcctgggattggggagtttcccaggatgcgggattttgaatgctaaactcaagacatcatgttcaaactgggatggttagccatcctrttctgcttattgttttttaggcatagagaaaggagactaagagacttgagaaagtaaaaagaaattagtttgaccataaaaaggacatttgcagctttagggggaaaaaacctttcataaacattttgtaagtggctaggtttggaaggaagtaggtttcaagaagaatgaacttgagaatatatatgttgagcatgagaagaagttttacagttatattttgaacgtgtttttataaatgttgttgcttttcatgtttatccctaaatagcaacacaaaacagagaaaacttgattttaggttcttcatattatattttaataagtcaaaataattttatatatattgtgagttgaatagcataatcccgaattcatgtccacctggaatccatttggattgtgaccttatttgaaaattgggtctttgcagatataatccgttatg

SEQ ID NO: 578944 - DNA, 559 bp, Homo sapiens
catgtaccactgaattttatcactattagagtaatacattgcattatttactactatagcagcaatcactctgcacttagctaaaattgcaaagtaaaacaaaattaaagcacatgtttaacatagacctagactcatccactagcttagtgactcatttccacctatcactcttacagtgggcaaaagtcataatgtagaccagcagcatctcatcatctcatcaagtttttatggtataatctttgaggaccatccaaatatgttaaatcattatgctgtgataatcaattgcatgcgctccttatagagcattaaaactwtttttttttacaaaaaaatacctatttatttatcttaaaatgacaaacattaattgcatatatttatggggcacaatgtgatgttttgatatatgcatacattgtagaaagagtaaatgaagctaattaacatatcctttaccttactgacttatcctttattttttgtggtgagaacattagaaatcaattctttagcaattttgaaatctactatatgttattattaactgtgg

SEQ ID NO: 578945 - DNA, 560 bp, Homo sapiens
atcacacctagctagtttttttatttttagtagaaatggggtttcaccatgttggccaggctggtcttaaactcctgacctgaagtgatacacccaccttggcctcccaaagtgctgggattactggcatgagccaccgtgcctggcctgaatcagtattatattttacattatagtttcctataaggaaaggtacataatcaatgtttatataatgtgattgggttggacatctggcattaaaggctttaagaagttttcacagaaattaaaacctcttgaaggtttaggtggtatagtaaatcacttggctattaaatkattttccatagtaggtagattgaagttttacatcttcagtttttaaaataaataatgaaattgtattttgaggcaaaatttcatgttatgtatattttttaaattgtcatttatagttagaaatgtactgaagtacatttgtaggttaaaatggtttggctttgatttgtgttcatctaatttaagggaagctaaacatatttaatttaaaaatacaagattcaaacatataaaaacaa

SEQ ID NO: 578946 - DNA, 607 bp, Homo sapiens
gtgtgtcatcaggatataatagctgagaatacatagtatattggactttcttagacactcatctcctcaacgagattcagtggattcctatagctttctgcaagtcaaaggtatggcaaatgtaaacactgttggttaataattaaaagaggaaaagttccaattagaaaagcatggcttcgaatgtcaaatgaggcaaaggagtcaagaattttgatatgtgagacaaaactattgaatttgccaatctggaagttctggtgacctcacagcgaagtttttagcagtgtcgagagtatatagaccaaacttgtacgagtgatggaaaaatgcagacagtagagagaattctatttattagtcacatttagtcaaaaattaaagattctttattccaacactcattttggaaattctaattctcttatattttatattattcttttgttagtggaaaagttcaatgccatcttcaagttttcatagagtagacacatttagattccaccccacaggataaaatgtttcaggaactattatggatctccatataatacttctttcaggccaaggtttataatcaatwcacctactttttaataatcaa

SEQ ID NO: 578947 - DNA, 564 bp, Homo sapiens
ttttatgagaactgcatattgcctctttggtttggtttgttttaaaggcaggttatctgtggaaaccttatttatatattaatttgtttctcttactggagctgaaaaactttttaaggagggatactgtactatttaaatacctttctgaagtcccctaactcccagcttcaaacacagctggtttaccaaaaaaaaaaaaaaaaaaaaaaaaaaacccatggtacctactatagaattcaraaattttactaatgatgactgtaatttaaaaatcaaagttctcaatggatttttctatagaaggatttctaattataatgaaatttaagtggaataatcataatacttttattgagttgccacttgtgtctttataaaacatatgcttcagaggatttaatcttggtttgtatttttttcctttctgcacattgagttgtggttcagtagatggaagatctaaaacataacaattatatatttaaactgatttaaactagagcctaaaaaataggataaaacaagaatgggatgtacctcattttataatatatataaatt

SEQ ID NO: 578948 - DNA, 659 bp, Homo sapiens
acaattgctgtgttttccctctctaaattcccagagatgctctctgtcactgccagggtgaggaaggggtggtgtcagtgattcaggtctgtttattaaaatctcttattctagtttctatttgtgtgaaatatatttttcatcccttccttgcagtgggagagggaagatctttgtagctttctatttgccatcttcttctgcctccctyacaatttatatatttttaaatattgcctatctcttaataataatagctaatatataaaaatataaaggtcttgaaggagaaataattgcagcctcaccttaagttataatgaatttatcttttagaaggctcactttaataaaatgtaaaatttaaatgattactaatttgcatcacttctttgtattataatttttagatgattgaatttatcttattacactgtgttagtgccttgtttcctgcatcttaatatgcttcttccttggtgattaattttatatttcattactctgtgcatttatgataatatgatatcttctgaaacatgtagctttcattagtctcacaaaaatttccaggaataccttaacaatgcttaataatgttaatttgttcctctctgtccatctcattttgtttctcactaaaaatgtaggttattccg

SEQ ID NO: 578949 - DNA, 570 bp, Homo sapiens
aagcttccagaggaaggatcaggcagcaatatttgctgttctgcaatattctctgttctgcagcctccactggtgatacccaggcaaatggggtatggagtgaaactccagcaaactccaactgacctgcagctgagggacctgactgttagaaggaaaactaacaaacacaaagaaatagcatcaacatcaacaaaaaggtaatctacaccaaaccccatctgtaggtcaccaacatcaaagaccaaaggtagataaaaccacaaagatggggagaaactggagcagaaaagctgaaaattctaaaaatcagagtgccccttctccaaaggattgcagctccttgccagcaatggaacaaagctggacatagaatgactttgacgatttgacagaagtaggctgcagaaggttggtaataacaaatttctccaagctaaagaaggatgctgaacccactgcaaggaagctaaaaaccttgaaaaaagataagatgaatggctagctagaataaacagcatagagaaraccttaaatgacctgatggagctggaaaccatggcatgagaa

SEQ ID NO: 578950 - DNA, 610 bp, Homo sapiens
actactgatttgtatagagcccctctttctaggaagttatccctgacatagaggaagtatatgcagaatacttatgtttacaacagtttacaccctggtctacacactggaattaagtatagaattttttaaattacgtttgcttggactccaaaccagaccagctgaatcaaagattctactgttgggcctgagcatccatgtttttagcttcccaggtgattcagatatgctgtcagggttaagaatatctactctatacgattgtgcaatttcatcrctcatatatccattttacagccctggacgagctatccaaggagtaccagaaacatgagagacaaggtccccttaatttgagcatatctatctatctatctatctatctatccatccatccacacacacatattcttatatatatacatatattcacatatatacacatgtatattcttatatatacaaatatattcacatatatacacagatattctcatctatacattcttttgtgtatatatacacatatatatgtgtgtatatatatgtaaaaatgtgtgtgtatgtacatatatatatatatatatatatatatatcagaattact

SEQ ID NO: 578951 - DNA, 418 bp, Homo sapiens
agtcgttccgtgccttttaaactggagtttacattactaaaattgagcatgctttttcaaactacaaaagaccctcagagtttctaacccgtctctrcactccattgagaatcactggtgtattgcagtggttcccaagggcaggactataatgaagttttcactgttcagtgaaaaaaataagaaaaacatgtagagtttggtgagctattcataatgaataatttgtgaaatatggctttcctgcactgtgaaatgctcattctttggggaaacaaagttgagaatggatcacagtttgttttacctgctctgttttaaaataatttacttgggaaaagagtagattactttatatcaagttcaattatttttattattaaaaatgtttatcttctaaggaaaatgaaaagttgaa

SEQ ID NO: 578952 - DNA, 521 bp, Homo sapiens
tgtctcattttgttttagaaaatgaataatgagttccagaggcgatggaccttatctttgcatttccccttgcatccatcacacccagaagagtacctgacatccagtagttgctcaacacatatgttttcaatgaatatacaaacaaaagaaagtgttgagtgtgcattacttaataaaatctcattgccactcctggaaaagtggcaaagctaacctaaagaattttgtcttttgtaaagctttcatattaaaatattatattgtttttgccttattatttttaataatttatcatgggggatttaacacacttttaaacatttttatcatcttgttattattgctcttttttggggtgtctttacttgggggcttttattaattttattttattttattttactttaagttctgggatacatgtgctgaacgtgcaggtttgttacataggtatacaygtgccatggtggtttgctgcacccatcaacccatcatctaggtttcaagccccgcatgca

SEQ ID NO: 578953 - DNA, 659 bp, Homo sapiens
gaattagtgtaggaatagctcttaaaatcatgcctgacacaaaatacatgcttataaaggtctgctaaattaaataaacaaaataccctatgcctcaaagtagtttatgcttaatgagtcttacataaattaaataatacatgtgtacatatgcatgtatatatatgtatgtgtgtgtgtgtatatatatatakagagagagagagagagaaagagagagagagagagacagagatggtctggctctgttgcccaggctggagtgcagtggtgtgatcacagctctctgcactgcaacctctaacctcccaggcacaagcaatcctcccgcctcagcctcctgagtagctgggactacaggcatgtgccaccatgctcggctaatcatttctttttaattttttgtagagacgagatctccctatattgcccaggctagtctcgaactcctggcctcaagcgatactcccatgtcagcctcccaaagtgctaggattacaggtttcttaatacatgtataaaaccaagataaaaatctcaaatacagcttctcccttctataagatttgccatattgtaagtcagtaatatctttaatgtaggcaatattaaaattaagcatttttattttcttttaaacaatgagctatttatttgtc

SEQ ID NO: 578954 - DNA, 609 bp, Homo sapiens
atccaaaataggcaaatccatacagacagaaagtagattagtggttgccaggggctggaagaggaagtggaaatcattgctaatgaataggggattttttcttttttctttcagatgtgatgaagatgttcagaaattagatagtggtgatggctgcagagaaaattgcagttgcaaaaaccactaacttgtacatttgaaatgagtgaattctgtggtatgtaaattatatctcagtcaatctgctacagaggctggctgcaatggctcacacctgtaatcccagcactttggaaggckgaggtgggaggattgcttgaggccaggagtttgacaccagcctgggcaatagaacaaaactctgtttgtacaaaaaaaaaaaaaaaagaaagaaaaaagaaaaagaaaagccaacattagccagcacatgcctatagtcccagctacttgggggactgaggctggaggagagcttgagcctaggagtttgagacagtaagatatgaccacaccactgtactccagcctaggtaatagagcaagatcctgtcacaaaacaaaacaaaacaaaacaaacaaaatctgttaaataaatagtataccctttac

SEQ ID NO: 578955 - DNA, 616 bp, Homo sapiens
gggtagcacacactgattaatgagaacattatcatgtaatattcactgactatttacatatccttggatatatctactgatcttatagaaaatactctttgcagtcctattaggtttttgaataatggctggcaccatggagcagttttgtgaccaacattcaaaaaagacagcaaaacagtcatgaagatcttatcgtctttctttacaaaaagtttmtttagccattgttgcctattgtacattaaatatacacatttcatttttattttagatcttttgttatttttgctcatgaaccaaatattgccaatttgttatttaactatgcccttagggtatattagaacatgaaatgcatatataaataaatcttggggaaatttttaattgtcattatgagcaaacagcatgttattacattaacagtcctggattatggcagccacccattattcaaatacattaggcatattctactacttttataattattgatggactttttaagaatattattggcttggatttgattatatactaaaataagtgttctcaaattgtctatttcacatgtatttttaatttgaaatgatggcttacctttattttcaat

SEQ ID NO: 578956 - DNA, 616 bp, Homo sapiens
gggtagcacacactgattaatgagaacattatcatgtaatattcactgactatttacatatccttggatatatctactgatcttatagaaaatactctttgcagtcctattaggtttttgaataatggctggcaccatggagcagttttgtgaccaacattcaaaaaagacagcaaaacagtcatgaagatcttatcgtctttctttacaaaaagtttctttagccattgttgcctattgtacattaaatatacacatttcatttttattttagatcttttgttatttttgctcatgaaccaaatattgccaatttgttatttaactatgcccttagggtatattagaacatgaaatgcatatataaataaatcttggggaaatttttaattgtcattatgagcaaacagcatgttattacattaacagtcctggattatggcagccacccattattcaaatacattaggcatattctactacttttataattattgatggactttttaagaatattattggcttggatttgattatatactaaaataagygttctcaaattgtctatttcacatgtatttttaatttgaaatgatggcttacctttattttcaat

SEQ ID NO: 578957 - DNA, 519 bp, Homo sapiens
ttcgtgtcttcatcatttcgattctatttcctttaatagggatgaagaagattatgaaaaagtaggccattttctggcawaacaccaatttaaatgtcaaatggttaaaagttaaatgtaaccttaaccaaacaaaagaactatatccttaaatatctcacagagttattgatggatttctttttgtggatttgaaaaactaaataaataagaaagagaaaaatagcatggtgtgatcaatttctaagaatgggtttagaaactgttcacacttaaatgcataaacaaattaaaagcaaacagcaaaccagaaataatgtttgaataaattaatgataatattaatatttaaagacatttttaaaaaaacaaaaagtacctacatattaaagccagaggaaaatgtgtgatttataaatcatataagtgacactaatgaaaacaaaaatttaattcttttggtttattaagtaaaactaattcaagaattcttaggtttggtttttttttgttttgttt

SEQ ID NO: 578958 - DNA, 575 bp, Homo sapiens
attagaatgtttaggaaaattataaacacctaaaataaaatagcctataaytgagaggcatctttaattgattttgatttactttaatttaaaagttgtgttaaattctggatttcttaacactttccatctttatagattccttattatgaaagctaacaaaaaaaataagaagcctggaattacctgtggcttctgagctgtgggttgggatgagaaagagaagggaaagttccttgaaacagataatatctgcatctcattgtgattttaacttataaaaccaaagtatgaggatcagtttaaaatttctcctgataaccactcttaaatgtgtcacagcaaagaccaagatgccatctcacccagaccaccacagcccagtttctgggaggtttggaagcaatgatggtttctttcattgcttttagggctactaaattatttgaccagtgtttaggggccatgatgaatagttaattcatattttttaagcactaacatggcacccaaaacagcaatgtgtttacaatataaggagcatttttgaagtgctctaagtaagggaacaacag

SEQ ID NO: 578959 - DNA, 570 bp, Homo sapiens
cccttagcaggaggagaaatttaaattatttcctaatactaaattttaaagtgatttttttctttatatttttgaacatttcagttgagcaggtgaagagaatatattaggaattaagaatctaaaccaaattggaaaatgtgaacttatagttatatcctgcctaatgtcttctatatcatgatattgataaatggtcttcaataataattcctaattattcaacatcccatccattcttaaaaagaagtgaggaatattagatatctaaaattcatattcgtacaagccatagggtttgactataatgaatgtagagaacaggaggaaaaaacaaaattggcaaggccaagaattaatccacagccaatttcagggctagaggaactaatggcataayagcactgtttccacaaaaatactgacttctatttcaaaaacagtgtaaaatagaatatgtgtttatgtaacaagagctgatttatatatcaaaaggatcatatctgatagctcatacagcatactataccaatatttttaatcacaacagtggtccaaacctggttccta

SEQ ID NO: 578960 - DNA, 494 bp, Homo sapiens
aaaatggccttgaaaacattccatggcctagtcatggctcagcacacattttcaggcagatgcatttctgtagtcacaaaaaatttcagcctgagctattgcagctcggcaaataagcattactgaggaaatgtcagtgtttgtcagggtagtgatgaattgaagggaactggattatttcaaactytaaaagctagccaaggctgggcacggtggctcacgcctgtaatcccagcactttgggaggccaaggcgggcgaatcacctgaggtcaggagttcaagatcagcctggccaacataatgaaacctcgtctctataaaaatacaaaaattagctgggcatgatgacgggtgcctgtaatctcagctactcgagaggctggggcggaagaatagcttgaacctaggatcctgccattgcactgcagcttgggtgacagagcaagactcttgtctcaaaaaaaaaaaaaaaagctagctaatacaggataa

SEQ ID NO: 578961 - DNA, 368 bp, Homo sapiens
ggaaaaagttgactaatgcccttttctgtatcacaaagacagaactggtcagttgatcacttattgtatttgagatcaccccgtgcttcagataggcacatactctgtggttcaataattgttccagttgctgtcaataatgaaaatatcttccctaattaaaatgagccaaattgcctaaaagataagccgacttgtcatattaagatgctcattttcattaaaagcatgcttttttwaaaaagtaaaaatacattttataataacacaactacatactttattcatctttgtttttctcttatggcaacttctcttgcagttatcttgtttatttaaggttagaattgataaacaaatatgaaatt

SEQ ID NO: 578962 - DNA, 457 bp, Homo sapiens
gtaaataaataatcaaataaataaacgtataagctttgggaaataaaattcaatttcaaaaagatagtgtagaaaaacagaagagtttgaaaaggcctagataaaaatgttatgtcagtattttttaaattctgaggtattatagagtatcagtaaaattatgataagataatggctaatacttgttgagcgtatgctttatttttttctcatactaattatatgaggtaaatgttatcatgtgtattttacgaaggaggagtcaatggttacagacaatgaacaatttgcccgaagctataatagccaaaggctggactcaaagcttaattactactcatactgccttaacagaatacaaggcaaacataccaacaacattaaatttaaaaatgtgcaatcaaaygttatatgtagcatgagcctaccataaatatgacgttctttctggttacct

SEQ ID NO: 578963 - DNA, 563 bp, Homo sapiens
agaataaaataatgcacaaaaagcacttagatgaaagtactcagtgaatataacttattatcatttctaccgtatttctaccattgattctaaaatttggataaatcttagtgcagtgaggaagcattaaatcttatattattcatcaaggttcttcagagaaaccatgtgtgtatttgtgtgtgtgtgtacatatatgcatggctgtatgtgtatgcacataagagcaataaatttattttaagaaattactgtttcttcctcagggtacttcagtctttttctcttaaatacttcaaccrattgggtaaagtccacccatattatggagggtaattagctttactgaaagtctattgatttaaatgttagtcacatctaaaaactatatcttcacagcaacgtctacactggcgtatggccaaggactggctaatgcagcccagccaagatgacacataaaataaaccatcacacctaatttgtgtgtgtgtgtgtgtgtgtgtgtgtgtgtgtgtttagtggttttagtatagaagaaatatggtattattgaatctgga

SEQ ID NO: 578964 - DNA, 545 bp, Homo sapiens
gctatcttaccataaaaatacatatttaatcaatggaaagcagttttaattccaaaagcrtatacatattttgttagtttttatttctacctcaacataccactccttgtataaaaactataaaattgcataaaggaaatgataatattacactcaaaagagggattaatgtcattttaaaatttaggttagttatattaaatattaaatccaaatgagacactttaattgctttacttcagacattatatttttagaagaactattaaaataatgtgctacctatattttaatataaacataaaattttcagatatttcagtatgtgttaactgtagatgttaaagttttagcaagaaccgaattgctttcctgggactttgtttttacatatgcatgtaaacaagaagatatatcttttgtaatgatgtactgattgaataccttcactattgctcttgctgggtaccatgagttatttatcttagagcaacagtacaatatttggtaacctagggcaacagaccaaatgaggaatgcgaaat

SEQ ID NO: 578965 - DNA, 578 bp, Homo sapiens
ttgctttacttcagacattatatttttagaagaactattaaaataatgtgctacctatattttaatataaacataaaattttcagatatttcagtatgtgttaactgtagatgttaaagttttagcaagaaccgaattgctttcctgggactttgtttttacatatgcatgtaaacaagaagatatatcttttgtaatgatgtactgattgaataccttcactattgctcttgctgggtaccatgagttatttatcttagagcaacagtacaatatttggtaacctagggcaacagaccaaatgaggaatgcgaaataatttttctgctgttaaaaagctgcctctcttacctacattgcctgttataagagccacctaaatagcagattcaaacaaacraaaacaaaatgcaaacacagtagtcttcaggagaactccaattttccctagaattataacctcccattctccacttataagaaagggccacaggacacttttaagagtccaagaaaatgcttagaaatgcttaatgatgggagaaaatacaaagaaaactctattcagtctaagggaa

SEQ ID NO: 578966 - DNA, 624 bp, Homo sapiens
taaaattgtatcaatatgttgtatcagactattttaaaataacacaatttgctaggcataaaagtcagccattctgatggactggttaaatcccaacgattttgtagaggccgacttcattgtagtcaccacttattaaatacaagcaccaagagtaaggtaaattgaccttaaatctcatttttaaagcagcaggttattcttaatacaattattgttagtaataattatgaattattgcttaactctggaacttacataaatttggtgtataaggaatggattcatccaactctcaaatgatctgctaatggcagcattaggcagtcagtttgattaattttttaaatgaatatacttaaatataaactaatgtttcttgtgaccactagctgacacttaggccctcaaasagtggaaaagctgttgggagtcatttaatccccaaatctctgatgtaactaatttaggaagaaggaaatgatctaactctacattaccaatgctctttgacaagcatcataggaaacagaaacatgaaaaattttcaataacatcttcctttacttcaaaatctaggcctttctgagacagactttaaaagagttatgatatttaccatag

SEQ ID NO: 578967 - DNA, 624 bp, Homo sapiens
taaaattgtatcaatatgttgtatcagactattttaaaataacacaatttgctaggcataaaagtcagccattctgatggactggttaaatcccaacgattttgtagaggccgacttcattgtagtcaccacttattaaatacaagcaccaagagtaaggtaaattgaccttaaatctcatttttaaagcagcaggttattcttaatacaattattgttagtaataattatgaattattgcttaactctggaacttacataaatttggtgtataaggaatggattcatccaactctcaaatgatctgctaatggcagcattaggcagtcagtttgattaattttttaaatgaatatacttaaatataaactaatgtttcttgtgaccactagctgacacttaggccctcaaagagtggaaaagctgttgkgagtcatttaatccccaaatctctgatgtaactaatttaggaagaaggaaatgatctaactctacattaccaatgctctttgacaagcatcataggaaacagaaacatgaaaaattttcaataacatcttcctttacttcaaaatctaggcctttctgagacagactttaaaagagttatgatatttaccatag

SEQ ID NO: 578968 - DNA, 637 bp, Homo sapiens
tattaccttcttccttcttttataacattataatatttatcaatgctttaagttaaatcctattattctcttaaacttattataaatactagattctctctgatcatgcccaaaaaaggtctcaattttttgcattatcactactggtatgtggcttaattttcccataatatgactttcttaaaagcaagttgtgacatcaacaacctaacatccaaattaaagattgattacttttaacttgttacaatgagattaacatatagaccaaatatattaaataaaaggctgtcgagatcttacatttttcttctttccaatgttctgcmgtttctaatgatctgatttgtagcacctaggcagagtgaagaaaggactgtttgttctgatatgaagggccataaactagtgatttcatttccggtttttgttgttagggaaaattttggccatttctgcagacatgaaaggttgatactcaaaacatcagcttacttttcttttcttgtcattctatactgtaagacaattgctgttgaataagaaagatcggaaaatgtttggaagtcacctgccatggcagctttgatatgcaacaccagtagcatgacaggaaattgggagatagcattaaagc

SEQ ID NO: 578969 - DNA, 545 bp, Homo sapiens
gctctgagaacagatagactgcctcctcaagtgggtccctgaccgccgtgtagcctgactgggagacaactcccattaggtgctgacaaacacctcatacaggtgggtgcccctctgggatgaagcttccagagaaaggatcaggcagcaatatttgctgttctgcagcctctgctggtgatacccaggcaaacagtktctggagtggacctccaacaaactccaaaagatctgcagctgagaggcctgactgttagagggaaaactaacaaacagcaaggaatagcatcaacaacaacaaaaagaacatccattccaaaaccccatctgtaggtcaccaacatcaaagaccaaaggtagataaaactacaaagatggggagaaaccagagcaaaaaagctgaaacttccaaaaaccagagtgccttttctccttcaaaggatcccagctcctcaccagcaatggaacaaaactgaacaaagaatgagtttgacaagttgacagaactaggcttcagaaggtcagtaataacaaacttctctgag

SEQ ID NO: 578970 - DNA, 555 bp, Homo sapiens
gcttccagagaaaggatcaggcagcaatatttgctgttctgcagcctctgctggtgatacccaggcaaacagtgtctggagtggacctccaacaaactccaaaagatctgcagctgagaggcctgactgttagagggaaaactaacaaacagcaaggaatagcatcaacaacaacaaaaagaacatccattccaaaaccccatctgtaggtcaccaacatcaaagaccaaaggtagataaaactacamagatggggagaaaccagagcaaaaaagctgaaacttccaaaaaccagagtgccttttctccttcaaaggatcccagctcctcaccagcaatggaacaaaactgaacaaagaatgagtttgacaagttgacagaactaggcttcagaaggtcagtaataacaaacttctctgagctaaagaagcatgttctaatgcattgcaaggaagctaaaaaccttgaaaaaaggtaagatgaatggctaacaagaataaacagtgtagagaagaccttaaataacctgatggagctgaaaaccacagcaggaga

SEQ ID NO: 578971 - DNA, 545 bp, Homo sapiens
gctctgagaacagatagactgcctcctcaagtgggtccctgaccgccgtgtagcctgactgggagacaactcccattaggtgctgacaaacacctcatacaggtgggtgcccctctgggatgaagcttccagagaaaggatcaggcagcaatatttgctgttctgcagcctctgctggtgatacccaggcaaacagtgtctggagtggacctccaacaaactccaaaagatctgcagctgagaggcctgactgttagagggaaaactaacaaacagcaaggaatagcatcaacaacaacaaaaagaacatccattccaaaaccccatctgtaggtcaccaacatcaaagaccaaaggtagataaaactacaaagatggggagaaaccagagcaaaaaagctgaaacttccaaaaaccagagtgccttttctccttcaaaggatcccakctcctcaccagcaatggaacaaaactgaacaaagaatgagtttgacaagttgacagaactaggcttcagaaggtcagtaataacaaacttctctgag

SEQ ID NO: 578972 - DNA, 564 bp, Homo sapiens
aaaaaaagtcttaaaaggaatacatgtttttgatggcacctattgttttctaaattaaatacagatttgcacatttggcattaatagcatttcatrccataacatcaacctacttaattttcccttatgagctcccaaatcatccctatttatgccactaatgagttcaaattgaatttttgtattttctaaatacactctttgcattccaaactcagtgcctttgcttatgttgtattctctgcttgaaacatcactacttatgaataaaaattatattggtctttaaaggttcaaacccatgtctgtcaccttctttgagactttctaatctcactgcccttttcacaattgtaatggtgctttgcttgaatctatatgccaaggtatatttttgcaaagtaaaaacatttgtaaggtatacaccactatataaataccagttcttttcctttttttctcatttcttaaaatctcatatatttgataagtgttttctgtaagttaacaattctaatgacagagacagaaacattaaccagaatttgcaagagagtgacataa

SEQ ID NO: 578973 - DNA, 564 bp, Homo sapiens
aaaaaaagtcttaaaaggaatacatgtttttgatggcacctattgttttctaaattaaatacagatttgcacatttggcattaatagcatttcataccataacatcaacctacttaattttcccttatgagctcccaaatcatccctatttatgccactaatgagttcaaattgaatttttgtattttctaaatacactctttgcattccaaactcagtgcctttgcttatgytgtattctctgcttgaaacatcactacttatgaataaaaattatattggtctttaaaggttcaaacccatgtctgtcaccttctttgagactttctaatctcactgcccttttcacaattgtaatggtgctttgcttgaatctatatgccaaggtatatttttgcaaagtaaaaacatttgtaaggtatacaccactatataaataccagttcttttcctttttttctcatttcttaaaatctcatatatttgataagtgttttctgtaagttaacaattctaatgacagagacagaaacattaaccagaatttgcaagagagtgacataa

SEQ ID NO: 578974 - DNA, 564 bp, Homo sapiens
aaaaaaagtcttaaaaggaatacatgtttttgatggcacctattgttttctaaattaaatacagatttgcacatttggcattaatagcatttcataccataacatcaacctacttaattttcccttatgagctcccaaatcatccctatttatgccactaatgagttcaaattgaatttttgtattttctaaatacactctttgcattccaaactcagtgcctttgcttatgttgtatwctctgcttgaaacatcactacttatgaataaaaattatattggtctttaaaggttcaaacccatgtctgtcaccttctttgagactttctaatctcactgcccttttcacaattgtaatggtgctttgcttgaatctatatgccaaggtatatttttgcaaagtaaaaacatttgtaaggtatacaccactatataaataccagttcttttcctttttttctcatttcttaaaatctcatatatttgataagtgttttctgtaagttaacaattctaatgacagagacagaaacattaaccagaatttgcaagagagtgacataa

SEQ ID NO: 578975 - DNA, 564 bp, Homo sapiens
aaaaaaagtcttaaaaggaatacatgtttttgatggcacctattgttttctaaattaaatacagatttgcacatttggcattaatagcatttcataccataacatcaacctacttaattttcccttatgagctcccaaatcatccctatttatgccactaatgagttcaaattgaatttttgtattttctaaatacactctttgcattccaaactcagtgcctttgcttatgttgtattctctgcttgaaacatcactacttatgaataaaaattatattggtctttaaagkttcaaacccatgtctgtcaccttctttgagactttctaatctcactgcccttttcacaattgtaatggtgctttgcttgaatctatatgccaaggtatatttttgcaaagtaaaaacatttgtaaggtatacaccactatataaataccagttcttttcctttttttctcatttcttaaaatctcatatatttgataagtgttttctgtaagttaacaattctaatgacagagacagaaacattaaccagaatttgcaagagagtgacataa

SEQ ID NO: 578976 - DNA, 639 bp, Homo sapiens
atatgtagatcatgggaatgaaaagttgggcagctgtgcttcatattaaggaagtggaatttttgaattttgttagtggcttcataggaggtattgagagttagaggaaaaaaataggatgagtgtcaaatttctggtttcataacccaagttgccacttgttgggcgtggtttgatgaggatgagcatgtttgatggggaaaattgctatttctggcttgtggtatggtgaatataggaggcctgtgggactctcaagcgaatacacagttggacacacatatctgaggccaggtgaattccaacagaagggccagtggcgtctgaaatccagcctgtgcccctagcactgaggccttcaccagggcccagagctkcctctatccagaggaagggatgtcacgtactacagcatccctccagagaagaggactttttaacatacttaaaagtccaatttatgctagaggtgggcatgtgcatcagagtgactgtggatggagataaatacagaagccatacaggtagtcatttttaatggaatattttttgaaactgtgagtaaggacacaggtaagcagtatagcccttgtgttcaaattctttttcctgtttttaccctcaggcaaaacaagttac

SEQ ID NO: 578977 - DNA, 549 bp, Homo sapiens
aactccatctaaaaaaaaagtttaaaaataaataaataaataaagccctatttctacataacaagcatgccgtccaatctccttaacaaatacatttagtaaaaagacaaaatcaattatgtattatttaaaatcccaaaaggtcaatcagcttaatagtgcatatattttcagatgtggcttctcaaaactacctttgatttttggaaaaattagtaagtcaacatatattgaaataatgtttgaaaatggccaacattagtgtacacctgtgaagttaaagyattatgatttgtagtctgattattagtacacagaatttctatttcagttatgtttctattcttctaatttttcgacacaatcagcatttcaacattcatctcatcaaggttcaatagtgtccaggtcccactgccccgatggcatttaataagtgaaattacttcctcccttcatgtgtaataaatattctactaacttcagaattcatttaggaagacgtcaacatgtgcttctgccacttacctactgtcttttcctaagtga

SEQ ID NO: 578978 - DNA, 549 bp, Homo sapiens
aactccatctaaaaaaaaagtttaaaaataaataaataaataaagccctatttctacataacaagcatgccgtccaatctccttaacaaatacatttagtaaaaagacaaaatcaattatgtattatttaaaatcccaaaaggtcaatcagcttaatagtgcatatattttcagatgtggcttctcaaaactacctttgatttttggaaaaattagtaagtcaacatatattgaaataatgtttgaaaatggccaacattagtgtacacctgtgaagttaaagcattatgatttgtagtctgattattagtacacagaatttctatttcagttatgtttctattcttctaatttttcgacacaatcagcatttcaacattcatctcatcaaggttcaatagtgtccakgtcccactgccccgatggcatttaataagtgaaattacttcctcccttcatgtgtaataaatattctactaacttcagaattcatttaggaagacgtcaacatgtgcttctgccacttacctactgtcttttcctaagtga

SEQ ID NO: 578979 - DNA, 591 bp, Homo sapiens
ctattattatgatactcctttctattatctctaacacagatgacagctcttcactgaaaatttttcagatcattttggctggaaggtctgaatgttattttttcagctagattttctgtcctttattatctggtcttttcttatggcactcatcagtttatgccatgccataaagagcaactgcttttataggctttgtgccatttaccatagcacaaagtccttcagagtaaactctacaggttatttgcaccccaggttttctatttttaaatagtgaatttgctactgaacacacactgtatattaggcaaagtccaattctgtgctcagaaaataaatgtattgttcctcatagagatgaaaggaccaaagaaatgayttcaccatttcaatctatcagaaaaatatagtctgcagagaggacaccctttcaaagttattgctgtttatacagcgaatgtatgcttcaatcattttgtctactttctctacatttattgaatttaatatatgcatgtgggatggaaccatctttaaactaatattggtttaacaaaaatgaagatctatatgtcatcagctagatat

SEQ ID NO: 578980 - DNA, 591 bp, Homo sapiens
ctattattatgatactcctttctattatctctaacacagatgacagctcttcactgaaaatttttcagatcattttggctggaaggtctgaatgttattttttcagctagattttctgtcctttattatctggtcttttcttatggcactcatcagtttatgccatgccataaagagcaactgcttttataggctttgtgccatttaccatagcacaaagtccttcagagtaaactctacaggttatttgcaccccaggttttctatttttaaatagtgaatttgctactgaacacacactgtatattaggcaaagtccaattctgtgctcagaaaataaatgtattgttcctcatagagatgaaaggaccaaagaaatgatttcaccatttcaatctatcagaaaaatatagtctgcagagaggacaccctttcaaagttattgctgtttatacagygaatgtatgcttcaatcattttgtctactttctctacatttattgaatttaatatatgcatgtgggatggaaccatctttaaactaatattggtttaacaaaaatgaagatctatatgtcatcagctagatat

SEQ ID NO: 578981 - DNA, 621 bp, Homo sapiens
caaagggagttggtcagtcagtggtgcgaaacctgtaaggcgggtaagcaagcttacagaagcagaacaaaggcagtttatcaaacagtgacaggttttacaactcaagccaggtgttgcaactcaggcatgtcttgtgacctttgctgtgctgcacagaagggaaaaacaggagcttacaaaacttgcaaagataattgtgagactagtaaggggggaaaggagaagctgaaagagaaaaacttgtttttcccaaccttgctccaggatgggarggagagactctggagcccatcccttctgggccccggctctgcagataatgctatcaaagcctcaacagagcgctgctcttcctgggtcttggagtgagtcagtctagtacaggaaaatttgtttttctttttacatcttctgtttcactaacactggagccaacttcatttagatcaaaatctacgtctctgatttagtctacaagaccaaataggatctgttccttcctattcctccaatctcatttttcctgaatgtactttgctccgtttgaaatagtgccagtcactattcttttatgtctctgcttaaataactatgattatgttatctaaatagaacctt

SEQ ID NO: 578982 - DNA, 621 bp, Homo sapiens
caaagggagttggtcagtcagtggtgcgaaacctgtaaggcgggtaagcaagcttacagaagcagaacaaaggcagtttatcaaacagtgacaggttttacaactcaagccaggtgttgcaactcaggcatgtcttgtgacctttgctgtgctgcacagaagggaaaaacaggagcttacaaaacttgcaaagataattgtgagactagtaaggggggaaaggagaagctgaaagagaaaaacttgtttttcccaaccttgctccaggatgggagggagagactctggagcccatcccttctgggccccggmtctgcagataatgctatcaaagcctcaacagagcgctgctcttcctgggtcttggagtgagtcagtctagtacaggaaaatttgtttttctttttacatcttctgtttcactaacactggagccaacttcatttagatcaaaatctacgtctctgatttagtctacaagaccaaataggatctgttccttcctattcctccaatctcatttttcctgaatgtactttgctccgtttgaaatagtgccagtcactattcttttatgtctctgcttaaataactatgattatgttatctaaatagaacctt

SEQ ID NO: 578983 - DNA, 577 bp, Homo sapiens
gtcttggagtgagtcagtctagtacaggaaaatttgtttttctttttacatcttctgtttcactaacactggagccaacttcatttagatcaaaatctacgtctctgatttagtctacaagaccaaataggatctgttccttcctattcctccaatctcatttttcctgaatgtactttgctccgtttgaaatagtgccagtcactattcttttatgtctctgcttaaataactatgattatgttatctaaatagaacctttatgcactcttttctctatattgtattcrttttctaaacattacttacattatattgcatatttattcttaaattatcagcctctctctgtagtgtaagctccattacactacaggaaagtagtataactccctacattactagggaaagtatgtttcatctacaacaatacctgccatgtgatcctcttcaacacatttgtttaataactgaatggaagctgatgaccttgttgtaaatggtcccttgactgtatgccagagtgattttatttcatgaaaacccagcatgaaatcaattcaggaagtcagtgatt

SEQ ID NO: 578984 - DNA, 597 bp, Homo sapiens
tcaacagagcgctgctcttcctgggtcttggagtgagtcagtctagtacaggaaaatttgtttttctttttacatcttctgtttcactaacactggagccaacttcatttagatcaaaatctacgtctctgatttagtctacaagaccaaataggatctgttccttcctattcctccaatctcatttttcctgaatgtactttgctccgtttgaaatagtgccagtcactattcttttatgtctctgcttaaataactatgattatgttatctaaatagaacctttatgcactcttttctctatattgtattcattttctaaacaytacttacattatattgcatatttattcttaaattatcagcctctctctgtagtgtaagctccattacactacaggaaagtagtataactccctacattactagggaaagtatgtttcatctacaacaatacctgccatgtgatcctcttcaacacatttgtttaataactgaatggaagctgatgaccttgttgtaaatggtcccttgactgtatgccagagtgattttatttcatgaaaacccagcatgaaatcaattcaggaagtcagt

SEQ ID NO: 578985 - DNA, 553 bp, Homo sapiens
aagcttccaggtataagaaattctcaaaaactagaggtctagttaaagtcttatgttaaagacagacgaggatttgggacaggaagaatatatatcacagtggaaaataaggaaatactgaggtgtaagtctaacaaaatgtgcaagatttgtatgctaaaacctgtacattactaatgaacrtaatcaaagatgacttaagtaaatgaagagacataccctattcatggactgtattcatggatgacaattcttcccaaattgatacacaggtttaatctttatcgcaatcccatcatgatgtctaattggtgcaacaccatttgctgaaaaaaatattcttctttttccatttaattatgttttttccattgtcaaaaataagttaggtatatttgggtgagtctgttttggggttgcctcttttgttccattgatctacatatctattcctctgctaatagtgcacagtattgactactgtaccttttaagttgcacaataaaatgaatctcaacctcagtctcacattataccaaagctaacacaaaat

SEQ ID NO: 578986 - DNA, 553 bp, Homo sapiens
aagcttccaggtataagaaattctcaaaaactagaggtctagttaaagtcttatgttaaagacagacgaggatttgggacaggaagaatatatatcacagtggaaaataaggaaatactgaggtgtaagtctaacaaaatgtgcaagatttgtatgctaaaacctgtacattactaatgaacataatcaaagatgacttaagtaaatgaagagacataccctattcatggactgtattcatggatgacarttcttcccaaattgatacacaggtttaatctttatcgcaatcccatcatgatgtctaattggtgcaacaccatttgctgaaaaaaatattcttctttttccatttaattatgttttttccattgtcaaaaataagttaggtatatttgggtgagtctgttttggggttgcctcttttgttccattgatctacatatctattcctctgctaatagtgcacagtattgactactgtaccttttaagttgcacaataaaatgaatctcaacctcagtctcacattataccaaagctaacacaaaat

SEQ ID NO: 578987 - DNA, 558 bp, Homo sapiens
cagacatttgtacacatgtggcctgggagcatcagcagaacgccagggtgtgacccagagaactgccaatcaaccagacgcggaacacgacatcaccaggcagacacaggacaaagctaaatttaagtccagtggatgtgattagctgcaatgttcarttgaattatttggtaaactcagttaataaattttataaattcaatatattttatagtgtgcaattaaagtattttaaaagtgatcaactattttagagcagttttcggtttacagaaaagttgagcagaaagtacagagacttcccatacatgccgcctccttgtacacagtttgtcctactattaacatcttgcatccatgtgcgcattgattacgactgatgaagcagtattgatgcattattattggctctatttacatctgggttactctgcgtggtgcggctctgagaattgcgacaagtgcatctccccgccgtggctgctacagagcgctgctacagagcgctgccactcccgaaacgccctccgtgctccgcctgctcatccctccctcccc

SEQ ID NO: 578988 - DNA, 557 bp, Homo sapiens
gattttttaaagtttttcctaaggaagagggaaagactttcaagacccttatacactgagctgaaaatcaaaagtcctatcattcaaacagaaaatcaatattgtttgctctgttaccagggatccaatcctaattctaatttctgaaaacaaaggggttttaaaataataaccacctatgatttttctgtttcacatgggcggagagagcagaaaaccctgtgatcaacaaatgaagcaagacgtccactgtccatgaytgaaacaagctgaagccacctggttggaaaggaaatgaaatgaagcttggtaaaagaggtttcactttaattttggtagaaaactggataaaacatttctaaacaagattatcagatagagcttcttaaatgacttgcttagtgttagatgagaaacgcttcatggccccagaggccatgaacagcaaggggttcccactctgcttcccatacagtggctcagccacagagaattaagtcatcagccttcaacatgcacattcatttgaagaggagcctctgcggctatgaaagctt

SEQ ID NO: 578989 - DNA, 558 bp, Homo sapiens
cagacatttgtacacatgtggcctgggagcatcagcagaacgccagggtgtgacccagagaactgccaatcaaccagacgcggaacacgacatcaccaggcagacacaggacaaagctaaatttaagtccagtggatgtgattagctgcaatgttcaattgaattatttggtaaactcagttaataaattttataaattcaatatattttatagtgtgcaattaaagtattttaaaagtgatcaactattttagagcagttttcggtttacagaaaagttgagcagaaagtacagagacttcccatacatgccgcctccttgtacacagtttgtcctactattaacatcttgcatccatgtgcgcattgattacgaytgatgaagcagtattgatgcattattattggctctatttacatctgggttactctgcgtggtgcggctctgagaattgcgacaagtgcatctccccgccgtggctgctacagagcgctgctacagagcgctgccactcccgaaacgccctccgtgctccgcctgctcatccctccctcccc

SEQ ID NO: 578990 - DNA, 610 bp, Homo sapiens
ccaaacttgagctggagatgcaggtttgtcaaattaatctcttcctgcatttccttcaagcgagtgctggccttgytttcagttatgttaactgtattcttcctcataaagttccacaattgaattcccatttttgaaatcatcttcatccgagcagtgggaagatgcacattcaaagcggctttgtgcagggagaggaggtgggtgcctttgctttctgaaaaccttccagacagaagcactgcagcgagccagtggcgccaggacatcgggcacacacgttaataaacgtcttttataccagctcctcttctttttccatatgatattagttgctgcccccaaatttgccttgagtgagcttcctgctcctccaaatgttttgccacagggtttccacgtgtccaggggcccagaggcccccgcatgctcctgcagtgtgggccaaagtagaaataatgtcccatttcaccccatcatccatgagacaataccgattactctgctaaatattcaaataaagactgcccctagatttctcttttggcaattttttttgccatctacaagttaacctatttttttccacttttattttagattcagggga

SEQ ID NO: 578991 - DNA, 553 bp, Homo sapiens
caaagtgaatttgagcacacagctgattctgtacattctctgctctctgataaaagcaagtcaacatttgatgctgctcacattaccgtcattcactgcagctccactaatcacagctaatggctggtaaagcattcatgtgtactagaacctcagctaaagaacaaaaaacaagaagataaaatggtaaacataaatttaaaataaggcattaaaccactgtaattcaccgtgaagtgttttgtcactttctgatcctagaatagctagggaagcaatacttaagagaaaaaaaaaatcaatcaaagcaaaattygatctccaaattcaaataacttcccaagtatacctctcattgtccctgtgagtcattatccacagaggcggacggcagctatccctggaaccctcagagcagcacaatattgagaggcctcacacgcttctttgtaagaacagctttaggtggagacagtaaaatcatctgatggtgaatgatgggaataaatagattgcttcaccttaattgccgcaccctgcatttcaggacagt

SEQ ID NO: 578992 - DNA, 609 bp, Homo sapiens
ctgtacattctctgctctctgataaaagcaagtcaacatttgatgctgctcacattaccgtcattcactgcagctccactaatcacagctaatggctggtaaagcattcatgtgtactagaacctcagctaaagaacaaaaaacaagaagataaaatggtaaacataaatttaaaataaggcattaaaccactgtaattcaccgtgaagtgttttgtcactttctgatcctagaatagctagggaagcaatacttaagagaaaaaaaaaatcaatcaaagcaaaatttgatctccaaattcaaataacttcccaagtatacctctcattgtccctgtgagtcattatccacagaggcggacggcagctatccctggaaccctcagagcagcacaatattgagaggcctcrcacgcttctttgtaagaacagctttaggtggagacagtaaaatcatctgatggtgaatgatgggaataaatagattgcttcaccttaattgccgcaccctgcatttcaggacagttatgtctgaaattttcagattaagcttgttctctacaaaactgtctgtaaacaatctccattgcattctgttcattaacccccg

SEQ ID NO: 578993 - DNA, 423 bp, Homo sapiens
taaacaatctccattgcattctgttcattaacccccgctcagctgcctgcctaacatcctgagaacctacctggccttgcagcccttctcaccccatctgccgcctctcctcctgctgctgccctggggctccggtgacactgtgaycaagtgacccagtccgtcctctccggtcccccaggacccctggtgccatccacgtcagctgccttgtccatcataccggccactcttccagaccacactaccctccccagccacaaaaccggcatagagtgggcagaggcaccatgtagaatgcagcccctgcaaccctgccaagcacagccgccttggcccatccacctgtgtcctcaaagtgtcaaagtggtttcgtcattagatcaagaggactttagggtctaagccattctgaggctacag

SEQ ID NO: 578994 - DNA, 423 bp, Homo sapiens
taaacaatctccattgcattctgttcattaacccccgctcagctgcctgcctaacatcctgagaacctacctggccttgcagcccttctcaccccatctgccgcctctcctcctgctgctgccctggggctccggtgacactgtgatcaagtgacccagtccgtcctctccggtcccccaggaccccyggtgccatccacgtcagctgccttgtccatcataccggccactcttccagaccacactaccctccccagccacaaaaccggcatagagtgggcagaggcaccatgtagaatgcagcccctgcaaccctgccaagcacagccgccttggcccatccacctgtgtcctcaaagtgtcaaagtggtttcgtcattagatcaagaggactttagggtctaagccattctgaggctacag

SEQ ID NO: 578995 - DNA, 566 bp, Homo sapiens
agtttttctttctcaccaagtttcttctcaccgtcttgtgcatcgatgcctccagtgatggggcaggtttgagccacgtgttctctrtgtctgtctcgctcagtgttcagtcaatgttcacactactgacttgctggcatctgaaaactgagcaacaaggaagacaagaggggagaagacctggaacatgttgctttcaaggaaatctcatcagtttccctggattttgtttgattttcctttcggaagagaggctgaccctcttgccacagggctgtggggaatgtgtgtgtttaggtgtgtgggtgggcaaataaccagacccacagcagtgttcgcacacagaggcccgagcagcccccacccagatgagcagggaggtggattcaagagaagaaacagaaatgaaaacctttagatcaggggtgtccaatcttttggcttccctgggccacatcagaagaagaactgtcttgggccacacataaaatacactaacattaacgatagctaataagctaaaaaaaaaaaatcacaaaataatctcatcatgttttaagaaagct

SEQ ID NO: 578996 - DNA, 396 bp, Homo sapiens
tgagggttcatgaattaatgcttrcatccatgggcaactaattcctccaaaggtactaagaaatttcaatggggaaaggatactcttttcaagaaatggttctggttctactgtatactcacattcaaagaaatgaatatacaccattaccttacactatacacaaaacgcacaatgaaccacagacctaaagaccctagctaaaattttaaaactcctagaagaaaacaggaaaaaatctttattagcttgaatttggcaaataattcttagacacaacataaaaggcacaattcattaaggaaatatcaaaaagttggacttcatcaacttttaaaactttgagcttcaaaacacatctttaatgaaaaaataaatcttatacaggttgaaaat

SEQ ID NO: 578997 - DNA, 396 bp, Homo sapiens
tgagggttcatgaattaatgcttacatccatgggcaactaattcctccaaaggtactaaraaatttcaatggggaaaggatactcttttcaagaaatggttctggttctactgtatactcacattcaaagaaatgaatatacaccattaccttacactatacacaaaacgcacaatgaaccacagacctaaagaccctagctaaaattttaaaactcctagaagaaaacaggaaaaaatctttattagcttgaatttggcaaataattcttagacacaacataaaaggcacaattcattaaggaaatatcaaaaagttggacttcatcaacttttaaaactttgagcttcaaaacacatctttaatgaaaaaataaatcttatacaggttgaaaat

SEQ ID NO: 578998 - DNA, 411 bp, Homo sapiens
ttgagggttcatgaattaatgcttacatccatgggcaactaattcctccaaaggtactaagaaatttcaatggggaaaggatactcttttcaagaaatggttctggttctactgtatactcacattcaaagaaatgaatatacaccattaccttacactatacacaaaacgcacaatgaaccacagacctaaagaccctagctaaaattttaaaactcctagaagaaaacaggaaaaaatctttattagcttgaatttggcaaataattcttagacacaacataaaaggcacaawtcattaaggaaatatcaaaaagttggacttcatcaacttttaaaactttgagcttcaaaacacatctttaatgaaaaaataaatcttatacaggttgaaaatatttgcaagttata

SEQ ID NO: 578999 - DNA, 380 bp, Homo sapiens
atggtaatttgtaaaaacaatgtgagaattttatcagattattgtagttattctggaaatgtatagtgtcatagaaattctaaacaacaacttttctctctgttaaaattctcaccttcttcttctgaaactgctacccagaggtgtrgataagcgtgatcttagagaggagcttgccatgcactgccttaggagaatgtgtccgctcttcacagggaaaaacaacatggcagtgggaggactgagacattttaataaaatgctgttgattttcaaaggtatacatcttagaaacatccttgtttttagctaatatttaagctgttcctagggccataaaataatctaaactggataaattcatcattatactaaatatc

SEQ ID NO: 579000 - DNA, 490 bp, Homo sapiens
accaagggtggatctcattatattatttagcacccgatataaaataattcaataaaaagtctctgggcatttaaatctgaatctagcattgacaaagcatggattagctccaaaagggtctaaaagctgataagctccaatcaaagcaacagcacgaagtggtgtgtttccactttgacctgccacgtgctgacctatcataactgaagtcagctgctttattataatttcataaaaacaaatgatgtgaacaacccaatatcaggtctaaaaaccacataggctgttgtttaaaccacagcattttttgaaggaaataaaaggtctgtatttatttctagaacacagaagctactggrgttttagccagaaactcatctgtagttaaaagagcagcagaaagctgattctttaaggtcttagggagcacctgtttcactgcgtctttgctgcgagagtgtggctgggagactctggcccctcctccatc

SEQ ID NO: 579001 - DNA, 615 bp, Homo sapiens
catatattctgccaaacttggaacaaattcataacttggagaatctgtgtttcaaattagactcttacattttgggtatttaatttcatttatacttaactataggaaacgtttgactcttctgtgaaatagagctgaaaatagattctctgggcatctgatagttctaaattaactctaaatataatattttgatgagtaaaacagagaaaaaccagaaatttcccataaaatacacaataagtagaaaactcaagtaagtgggtatagaacaacaaagaaccacatggcttttcttttttttttcttttttttttgacagtctygctctgtcatccaggctggaaggcactggcatgatctcagctcactgcaacttctgcctcctgggttcaagcaattctcatgcctcagtctcccgagtagctgtgattacagtcatatggcaccaaacccggctaatttttgtatttaaacgagacaaggtttcgctatgttggccaggctggtctcaaactcctggcctcaagtaatccacctgcctcagcctcccaaaattctgggattacaggtgtgagtcactgtggctggccccacacgacattttttagcaga

SEQ ID NO: 579002 - DNA, 473 bp, Homo sapiens
gggagtggactggctgcctcaggtgtatattctgctccagactgtgattcctgtaggaaacttcaagatgattttgctgactctgctttacaaggaaggactgcaaagcagaatgtagtggaaacttggccatcatttggcaaactcaagctaggtasacaatcaatctgaattattctgaaccacttcccttaacatcaaaagttttccacagttgcttgaaatattctttgaattttggtctcacatcaccctaatagtctaggacttcttttaaagaaagatacttaatttgtctaaactatatgagagataaattccttttactattcttattaatattcaaatcaaataatttatatctttaattctgaaatccagtcattttgcatttttgtttaagaacctattcatgtataattactttgaagtaaattgttttggtaaaagttagctaatctttctagggttaa

SEQ ID NO: 579003 - DNA, 376 bp, Homo sapiens
gtgtttgtttaacagtgcagttgtaaaatataattttaatatctaaatggaggaagggggtccatgatggcaaaagcacctaagaactatggagttagcatgcagccccaactggtaatgttgatgtttagaacaaactcagggatgtgattgcttgctttatttttggtaaaaataaagtgaattttcatagctatatttgtgatagatcaaaaytgaaaacaacccaaatgtccatcttttggggaactgataagtaaatgtggttcatcctaacaatgaaatactactctgtaatgaaaaggagtgtatcattgatacataggaaagctagacaaatctcaaaatagttatgctgagagaaagagttcaaaca

SEQ ID NO: 579004 - DNA, 534 bp, Homo sapiens
ttggaagctgagccaaggtgtatacattacctaaaaattacccattagatctgtgacacgggccctgcctcttctctcctttggtgtacattataagatacatgacatcatagtctctctctgactgggccactgactcyagttctccactaggctccttgtggcttcatattctgtaatgaagttactgtgggactggctgtgtcctgaatgtttcccctgctcatgtcatctggtatcattacctgatatcgtcagggaaggagttctcactgtgaggcctttgggtgtgacctttgtagtgttcctgattctctaggtctctttatttatgtttacttttactttctttctctgctaccttcctctccatcctttattctttaccacttgcattcccaggaacatagtacttctcactacagagatgaggtttccttttctcatcctgcaatgtttgcagtttctggctttttgtttccactacggttcttgctggtttagctacaggaatggtggagagctcttgactca

SEQ ID NO: 579005 - DNA, 484 bp, Homo sapiens
agctggaatgacccaaccctagccctctatgtctctgtttcttcaccttaaaaacaggaccaatactgcccctcttagggataggatcagtaaacacatcccagccttgtgctcagggatggatatcactccctagaagtagccattagtatttattagtttttctaatgcaataccagaatactttttccatgaaataagatgctatttgggcaatgctaaattgttgacatcgttttccaacccaagaaatcttaatagcttcacaaccttkgcctgcccatggtttatcatgcccaatctgctaattcctttactcaatgtttgccagtaagtgagtattagtcagactagtgactgccccagggttgtgctttctcattagctgactagtctgcagcctttcacctcagcccttcccctaaaggttgtttgagcaggaatccaaccagcaattactatatttccatttgcgattagaaaa

SEQ ID NO: 579006 - DNA, 606 bp, Homo sapiens
accctggcttaaccttggttttgattccttaaaagggataaaatttggcctagctcccagttatatttggccttttgcaagttgagtcttccttagaacttccttcctcccaatccatgccaattaattcatcaatcttttcttaactaacatttctgtaatctctgtgcatttttgtcaactacttctgaggcacccatgtgagtcagccactgtgctagcactgaaaatatagcagtaagaaaggaaaaaacagccrtctgacactgggttgaggtttacagaagagtcacagtgcaaccttttgtggcttgaatttttgtgctgtcttctctttgctgcaaactgctatgattactttagtgatgaaccaattcaggcttgagtatgtatcacctacttactgacacagaagatcctgaaattctgagtatataaagctaatgaataaaaggtatgggatcaaaaatttcttccaggctaatatccccactactccagcaacctaagccacccacttctcttctttttaattattaaaaacgtttttgtttttatacatgtacagagtttaagaaatcagatagagataaaagtgccctgtta

SEQ ID NO: 579007 - DNA, 555 bp, Homo sapiens
tgatcttccatctaatattctccacatcagcaacaaggttgttttgctttcttatcatttgtgtgttcactggagtagtgcttttattttccttcaagaacttcacctttgcattcacaacttggctaactgacaagaggcctagcttttggcccatctcgactttcgatatgccttcctcactaagctaaatcatttccagcttttgatttaaaatggggaacatgcaactcttctttcacttgaccactcaggggctattgtagggttattaatttgcctaaattgaatattattgtgtttcaaggaaaagaaaggtccaaggaaaaggagacagataggggaatggctagttgatggagcagtgagaacacacacaacatttattgatcaactttgccatcttaggcacaatttgtggtgccccaaaacgattatgacagtgacatcaaagatcactgatcacagactgggcatggtggctcatacctgtaatcccagcaccctgggaggctgaggtgggagratcacttgagcccatgagtttgagaccag

SEQ ID NO: 579008 - DNA, 561 bp, Homo sapiens
gtttgggtatcctctgtagtatccctgacaactcatcgtgtaaattctaactggaaatgtcctgcaacacaagacttattcctgtggagtaattggttccatgtgtgcatagttctcaaaccatcttatgcacttggttaggtaggtagatctttgccttctcagcttcagctctactgtaattttgagctggatcattctttattgcggggggtgccctgtgcattgtaggatgcmtagtagcatccttggcttctacccactagatgttaggggcacactcccagttgtaaccaccaaaaatgtctccagacattgacaaatgtcctttatgggcaaaaccattctcagttgagaatcaccattcttattaaatatcttcagattttcccactgttccccatggaccatagttttggccaacttcaacaacctgagctctctcacctggttgcattttagtttgtcagtggtttgctaatgatgcacaaagaccactataactgactgcagttgggcacattccaggcatgatctgaggagcagggtgaaacaagacat

SEQ ID NO: 579009 - DNA, 532 bp, Homo sapiens
agctgccccttccccctggtgctctgtcccagggagataggaattttatctrtaagtccctgactcgggctgctgcctttttttcagagatgccctgcccagagaggagaaatctggcagtctggccccagcagccttgctgagctgccatgggctccacccagttcaaacttccctgcagctttatttacactgtgaggggaaaaccgcgaactaaagcctcagcaatggcggacacccctccccccaccaagctcctgcagctagttcggtgtctacccaaaaggctgcccagttttgtgctggaaacccagggccctggtggtgtaggcactggaggggatctcctggtctgtgagttgagaaaaccatgggaaaagcccagttatcttggctggagtgcacagtactgtccctaatggcttcccttggctgggagagggagttcccaaccccttgtgcttcctgggtgaggtgatgccccaccctgcttcggctctccctccttgggctgcacccactgtccaaccag

SEQ ID NO: 579010 - DNA, 532 bp, Homo sapiens
agctgccccttccccctggtgctctgtcccagggagataggaattttatctgtaagtccctgactcgggctgctgcctttttttcagagatgccctgcccagagaggagaaatctggcagtctggccccagcagccttgctgagctgccatgggctccacccagttcaaacttccctgcagctttatttacactgtgaggggaaaaccgcgaactaaagcctcagcaatggcggacacccctccccccaccaagctcctgcagctagttcggtgtctacccaaaaggctgcccagttttgtgctggaaacccagggccctggtggtgtaggcactggaggggatctcctggtctgtgagttgagaaaaccatgggaaaagcccagttatcttggctggagtgcacagtactgtccctaatggcttcccttggctgggagagggagttcccaaccccttgtgcttcctsggtgaggtgatgccccaccctgcttcggctctccctccttgggctgcacccactgtccaaccag

SEQ ID NO: 579011 - DNA, 249 bp, Homo sapiens
gcatcacacataaaggagattagtctacgtgaccatagagaaygtcttgaatgttgggtcaaggataaaactcagggaacatcagaagaacaactcagtaagaagattgaaagagtcagtcagaggagtatgagaaaatcaaaatttatgtttaccatgagagtgcaggagtttccaacctatatttctatcttctttttcctgttccatatatataaatatatgtatatattccaatgttttagtcag

SEQ ID NO: 579012 - DNA, 509 bp, Homo sapiens
ttgacttaatgaagcaccagaatagttttttcaacatgtccagttgaaaatctatattaatataaaagtcttatgctattgatatctccattaattaaatttagaaaaacatgcacttttaaaattacrtgaaagattatttaaattgatataatttccccaaagtgggggaaacctttggtatctatctaattatctgctactaagagaaattataaaattaaaacaaataaaacattttattatctaaatatttggaaggaatattctcattttatttgaagcaacattttgtttttcttccaatgaactacagagttgctgggtttgcaagctgtgcaaattcggaggtttaaagaagtatcatttccactaattccccccctatatagatggaaaatagacactgatgtctaagattctatacttagaagtgtattcatggccaagtgtggtggcccacgtctgtaatcccaacactctgggaggctgaggcaggtggatcacct

SEQ ID NO: 579013 - DNA, 249 bp, Homo sapiens
gcatcacacataaaggagattagtctacgtgaccatagagaatgtcttgaatgttgggtcaaggataaaactcagggaacatcagaagaacaactcagtaagaagattgaaagagtcagtcagaggagtatgagaaaatcaaaatttatgtttaccatgagagtgcaggagtttccaacctatmtttctatcttctttttcctgttccatatatataaatatatgtatatattccaatgttttagtcag

SEQ ID NO: 579014 - DNA, 195 bp, Homo sapiens
ctggcaactctgcaatccttagcacatgacttttgaggtaacttccaagatcactctgctcatttccttcctggctaagagaaacagggaattgaatatggagaaagcatgctgctatctggaagacccaccctcaagtggtacataccagtgccattcacattctrctgcctaaattactcactttgcctcacc

SEQ ID NO: 579015 - DNA, 564 bp, Homo sapiens
ggctctccgcctccattttatttattayttttatttatttatttatttatttttgtgacagaatctcactataacactcaggttggagtgcagtgtcatgatcttggttcactgcaacctctgtttcccaggttcaagttattctcgttgctcagcctcctatgtagctagaattacaggcatgtgccaccacacccagctaatttttgtattctttagtagagatggggttttgccatattggtcaggctggcctcaaactcctggccttaagtgagctgcccacctcggcctcccaaagtgctggaattatgtgtgagccgccacacctggcccttggcctccattttaaaatcaaatcagaccatatattgtgtgtctgatggccatctagatgcctctagggtgagctgtggttctcaagtctcatgacaggctttttggagagaacatggcgaatcccccagtgcgctcagattgctgggcattttgtctatgtttcaaaccggtttctcttcatggaagacctagccatactcttggggctggaagaggtcctggagc

SEQ ID NO: 579016 - DNA, 564 bp, Homo sapiens
ggctctccgcctccattttatttattatttttatttatttatttatttatttttgtgacagaatctcactataacactcaggttggagtgcagtgtcatgatcttggttcactgcaacctctgtttcccaggttcaagttattctcgttgctcagcctcctatgtagctagaattacaggcatgtgccaccacacccagctaatttttgtattctttagtagagatggggttttgccatattggtcaggctggcctcaaactcctggccttaagtgagctgcccacctcggcctcccaaagtgctggaattatgtgtgagccgccacacctggcccttggcctccattttaaaatcaaatcagaccatatattgtgtgtctgatggccatctagatgcctctagggtgagctgtggttctcaagtctcatgacaggctttttggagagaacatggygaatcccccagtgcgctcagattgctgggcattttgtctatgtttcaaaccggtttctcttcatggaagacctagccatactcttggggctggaagaggtcctggagc

SEQ ID NO: 579017 - DNA, 462 bp, Homo sapiens
aataaaaactcttgctcctcaaacttatcatttttctttttttaaacttactttttcttaaaagtagaattttttcttgcatttttaagataacttctcattttgtccttgaatattctttaagtttattgaaactttagctttgatgataaattttgctatagatggtaatatggtttgggggtatccccacccaaatctcatcttgaattgaaactcccacaattcccatgtgtcatgggaggaacctggttagaggtgattgaattatgggggcaggtctttcctgcactattcttrtggtattgaatgagtctcacgagatctcatagttttaaaaatgggagtttccgtgcacaatctctctttgctgctgccatccacgtaagatgtgacttgctcctccttgccttctgcaatgaatgtgaggcctccccagccatgtggagctgtaagtccaaa

SEQ ID NO: 579018 - DNA, 458 bp, Homo sapiens
aattctaaattttgttttatgtgcattaaaataaataactaaaatgtaaacaaaaatagtgtttattccttgtgacattctgaaggaattattgttgtaaagtacttataacaatacaattgttcaaatatatttataggtatccacaatgattaaattaggggccawttcattatttatagaattatttcaaaaattattttattaattattttaaaaataatttcccaatgttgtatgttcacataaacaacccaaggatatacaaatacacacatatatacatgtacaaaacatacttatctgtaactttaacagatgagtctgatagactcagtgtttttatatttatttacaaaataatcaaatatgaagattcacacatctttgccactatcttaaatgggtttcatatatgtaacaatactgttatcctaagcaaatgagaattctaagtt

SEQ ID NO: 579019 - DNA, 557 bp, Homo sapiens
gtacaaaacatacttatctgtaactttaacagatgagtctgatagactcagtgtttttatatttatttacaaaataatcaaatatgaagattcacacatctttgccactatcttaaatgggtttcatatatgtaacaatactgttatcctaagcaaatgagaattctaagttcaataggtcatttaatgcccttgctcttcataaaaaccgtaataaagtgaacaattttaattattcatcactatgcgtaagtatgtattgaaataggcccttargactttgttctgatactgcaaaatgattccaattagaatagaagtccaattacaagaaaaatcaagaataaaatttgaattcccataatgtttaacattattttattaaaaatgtttaaacattaaaaacttgtataatgacaataagatagttcaattgtatctaataaattactaatattcctagtatactagattataaaacaataatttccttataaatcattatgcccagctgaaaattctttcaaaactataattcaaagggagagaaaaaacaa

SEQ ID NO: 579020 - DNA, 529 bp, Homo sapiens
tcttatttttcctttgcttataaggcttagtttagccagttatgaaattatgggttggaatttcttttttgttttttttaagaatgttgaatattggcccccatctcttctgacttgtagcatttctgctgaggagtttgctgttagtctgatgagcttccctttgtaggtgacctgacctttctctctagctgactttaacatttgttatttcatttcgacccaggagaatctgatgttgatgtgtcttcgggattaccttcttgtgaagtatgttactggggttctatacatttgctgaatttgaatgtcrgcctctctacctaggttgggaaaattcttgtagatgatatccaaaaatatgttttacaaattggttcaacatatgcaaatcaagaaatgtgattcatcacataaacagaattaaagacaaaaccacatgattacttcaatagatgcagaaaaggcttttgataaaattcaacaccctttcatgttaaaaactcttaacaaactagatattgaagga

SEQ ID NO: 579021 - DNA, 507 bp, Homo sapiens
gagaaatgaaattattttaaaaagcagcaagtaaagagggataaattcaattaaagtttactagctataatattttaatctsaaaacaaaacaatgtccaataaggaaaatatatcaactcttttttttttttttacttttgcctaataagtcaaaattgcactattcttggaagccagatagcttttcataaatcttataatcttagggttggataataaggactcttgaattgtaataataaggagatctattttatcttttgctgttcttctaaatgaatgaacactccacagtccaaagattctctgttaattaatagaaaattcatagttttatggtcactttaagttgtaaaatatagttactaagttatacttagaatatctaggttttataatatccaaagcttccagtttgtttcaaagttataggtatccccttccctgccaccaccagtcccagagaaatatcagatatgtgaagagaaatgtggtcaacttttca

SEQ ID NO: 579022 - DNA, 560 bp, Homo sapiens
acttcagcttggacttcattgttcatatcactatcagcattttggtcaaaatccttcaacaaattctaggaggttccaaactttccctcagcttcctgtcatcttgtgagccctccaaactgtttcaacctctgcctgttactcagtttcaaagytgcttccacattttcagatatctttatagtaatacctcacttttctggtaccaattttctatattattctgttttcacactgctataaagaacttcccaagactgagtaatttataaagaaaagaagtttaattgactcagttccacaggtttagtaggaaggatgactgggacgcctcaggcaacttacaatcatggcagaaggtgaaggggaagcaagtgccttcttcatatggtggcgagagagagagagagagagaatgaatggggaattgccccacacttttaaaccatcagatattgtgagaactcactcaccatcatgagaacagcaaggggagagggaaatccacctccatgatccaatcacctccaaccaggtccctctcccaacactgaggatta

SEQ ID NO: 579023 - DNA, 597 bp, Homo sapiens
tttgcatcccgtgtgtcacaaacccattctggcccagctagggacctgatcttgagatagctgatctacgtaatttgatagagtaactttctttgaaactctgctactctaataacttacaagtcctcagctttttcttccttctggctacagaatttgagtctttttctatactaaacaagaaggcctctgacttttatgtaaggagttgtttgttaatcactctcattcttttatgttttaaagcataaattatgattaggaacatcaactcaattccaaattcctcatagttactaattctctcttattctaaaaaacaaacaaacaaacaaaaaaacaaaaaaaaamccacaagattttatattttgtacctactagttaatttccttctactggcatatcactccagtgtaccaccacagaaaatgttaaaatggcaccattacctattgccaggagcttcctttgcttttccttgtactagtgattgtactagtgccttgtactagtgatcatttccagctaaatagcagtttatccaaaaacttatgttagtgtctgctttctcacaccaatactgataatagatgccat

SEQ ID NO: 579024 - DNA, 587 bp, Homo sapiens
attctaacatcagaaactttgaattttctcttatcttcatttagaatacttttgcctaggatagttagataactccgatatccccatagcttctacattttatttatgtttctacttaaaagtcaccctttcagaaatgtctttcctcaccatcctatagaaaattacattctttatttcatattgtgtgctgtataactccttttactatttgattttttcattatctctttatgtgtttattgccaatcttccttatgataaaataaacttggcaagggcagaaactgtttctcttattcactgctgtatctgcagctggataaagagtgactggcatacgtttagcactcagtaaatgctatgcctagcccttgyaacctaactgaaccttacaaaatgaaaaaaagaatggataattaaataagctaaaattaagaatagcaggctgcaaaattacctaagcatcaaaatcaaattactatatagaaaaaacatttatttacttaaacatagaatgatatagaaaaatattttttaccaaaatgttgccagtattttatcatggtcatgaaattacagatttt

SEQ ID NO: 579025 - DNA, 634 bp, Homo sapiens
atatttaagaatctctcagtggcagcatgcaaagattataacatcttcttattatctccaatgcatgttaaattatttttgataaattaaaattaggcattttgattaattccccttttcctggcaacatatatcatactttattcaggattaaattasacttttagagtttaattaattcattttaaatgcacataacttctagtagcatataataaaaattatatacatatataagaaacaatagatccctctggcctttagaatttaaataactcagttgagtaagaactgcttattacttgtgtggtacaaatacatatatctcttccacttagaaaatcaaacataattatactaaatacagtttggtactataataaatcaaacattttattataaataaccaaaatgttagatttttgaattatacacattcatctttaagtaattgtttgaaaaatgaatattgttaagtatgtctgaacagatactgttctgatgggtggcatatttcttttaattaaaaaagtttagtaacatagtgattactaatggatctttaaaaagaatataaaactcatatttttaattttattcagaagcagtaaataattattaatagcattttgaa

SEQ ID NO: 579026 - DNA, 398 bp, Homo sapiens
gtgtaccatgtgggtttggtgtacagattattttgttaccaggtaaatgagcatagtaccctacaggttgtttttcctcattctcctctaccctccaccctcaagtaggccctggtgtctattgtcatcttctttgtgtccatgtgtactcaatatttatctttcaattgtaagtgcttataagtgcttaggataatggcctccagctgcatgcatgctgctggaaagggcagggcttcattcttttggatgtctgcatcgtattccatggtttatatgtatcacattttctttatccagccaccattgatgagcttctagatttagtccccatttttgttgttgtgaatagtaatgccacggacatacacrtacatgtgtccttatggtagaacaat

SEQ ID NO: 579027 - DNA, 466 bp, Homo sapiens
atattaagaggatagtataattttaaacatcatgtaggaaactagaagaaaggcatcttagggcagaataaatactatgaataaaggcatttaaattttaaaatttccaaatgatcagctagatataaaaagttatttatggttagagtttagaaacatgaaaggcaaatgaatttggatatgtggtttggtgattgtgaaggcatgatatgtttagatttaattaatttatcctattggtagtgggaaatcagcagattttttaagtctaaagctcaactgtgtgtgtgaatatactagctaatcatgttgtaagaaagagtgtgagtaagaatatatcttggtaatcagaaatctagactgtatatggtggaaaagcagatcttgcatcttgttayacaggagaatgacaaaaatactattttcaagcctgagaagtaattcaacgttttttaaaaaatagttc

SEQ ID NO: 579028 - DNA, 552 bp, Homo sapiens
tggaatctttagtgttacctaggctagcctcaaattgcttggctyaagtgattctcctgcctcagcctcttgagtataagccctgtttttgttatttgaagattgacataccagtcgacagtatacacgcaatggtgtttgagatattgtacatttttcataaatgtgtgttaaattaatatgacatcatgtcaccttgatgttatatgaatgaggtatgctgataaaaactttattccttctgctttttcaattttaaaaatgtagaataaatttcttttggttataccctgaatgagaaccacatttcaattttatctatattctctaagtaagcagtgaattcactgttttacaaacaccctaactattcacagatttaaatttaaacaactaccaaacaaaaccactgaagcattatgcaaaagacctcgccgaggatgttattaacccatgtcatggtcttacttttcatgaactttatagtgttatttaagtttctgaggatatgtacaagttactgttaaacaagcaaaatcatagattcagtca

SEQ ID NO: 579029 - DNA, 581 bp, Homo sapiens
atataaatatgtgtatatctgtacacatgcagaaggatatgtgtatacacatctatatacatgcacatatacaaatatrtacatcaactccctggcttgttcactggaaagttcctaaagggaatggcacccaaacaggaaggagcacagatgggacccaaataaagctctcacttttctggcagaaacctgaaaataaggaagtactcaagcaatgaatgaaaaatgtcagtagagcaaaaaggccagcttgaaggagatctaccatcgaaatctgaaacaatgtgagcaacaaaataaataacaacattaaaagacaaagcatctctttagaaagaatccaaaagcctgcattgttataaataaataattaaataaatagaaaagaaggacaaatttacattagaatttcaccaaatacatttaaaagaagttattaaattaggaaccatcattttgcaactatcaaacttatggatggatgctacactggtacgtaaatacttgaagaatcataagaactatttctccagaagatattggatgataaatgaaagatactggatgacaaaagaaaaaat

SEQ ID NO: 579030 - DNA, 631 bp, Homo sapiens
tttctactactcagtttttaaagctgcttcttacctccctaacttatgaaaataggagagccgtattagtcagtgttcttcagagaaacagaactaagatgtatatggacatataagaagggatttattatgagaattggctcatgatgatatggagggggaaaagtcctatgacatgccatctccagtctgaagagccaagaaagccagtggtgtaattcagtctgagtctgaagaattgagaaccagaatagccactggtataagtcccagagtctgaaggctcaayaactaggatctaaaatatctgagggcaggaaaagatgaatgacctgactcaagaagagatagtaaactcacccttcctctactttttggttgtgtcaagccctcagcagatgatgacgtctgcccacatttgtgagtgtggatcttctttaatcagtctacctgaaatcaaatgctaatatttttatatataattatatatagtcaatgtctaaaatttgtcttctcttatactgtcttgtactctcatggatactctcatggatatacccagaaaaaaatgtcttagcatctatctgggcatccttaacccagtcaaatggacacatcacagaaacccaag

SEQ ID NO: 579031 - DNA, 580 bp, Homo sapiens
aagctttggttgcctgaaatcggctgcggtgggatttcaccattgaaattgacaaacctacaattcagggtttttgtttctcctcttgagaagtttaacagtgcaccactacatttgcataaattaccaaactgacarcagggattatctcaagaaggggcgggatgggtttcaagcttgtgttggttactttcccgtctttatattattaatttttaagattggtgcaattatagcaatttttaattttttccattatctcccagatgtaaaaaattaacataaaacaaaaccaccaggctgtaattcctcattttcagagttcttttccttggaggcagcagcagcatcctgggcaccgtggctgccttcagctggtccagacgcagtggctctgacgttctctggcaggtgggaaacgctgcctgatggtcagcggctgctcattgctgatgcactgctaagaactgggcagcccagaccagctagacagctgaggtctttccgggaagctggacacacctccccagggaagagccttccttagctgcagactgagccacaaacctcgcggctcatc

SEQ ID NO: 579032 - DNA, 580 bp, Homo sapiens
aagctttggttgcctgaaatcggctgcggtgggatttcaccattgaaattgacaaacctacaattcagggtttttgtttctcctcttgagaagtttaacagtgcaccactacatttgcataaattaccaaactgacaacagggattatctcaagaaggggcgggatgggtttcaagcttgtgttggttactttcccgtctttatattattaatttttaagattggtgcaattatagcaatttttaattttttccattatctcccagatgtaaaaaattaacataaaacaaaaccaccaggctgtaattcctcattttcagagttcttttccttggaggcagcagcagcatcctgggcaccgtggctgccttcagctggtccagacgcagtggctctgacgttctctggcaggygggaaacgctgcctgatggtcagcggctgctcattgctgatgcactgctaagaactgggcagcccagaccagctagacagctgaggtctttccgggaagctggacacacctccccagggaagagccttccttagctgcagactgagccacaaacctcgcggctcatc

SEQ ID NO: 579033 - DNA, 650 bp, Homo sapiens
caggtgggcagatcagaaggaataaaacactcacttttgcaagaaaacttcacctcttttttcaaggtaaaatgtcatatttactgtagcattatgtttcctggccttttgacatgcataaaactgtgctaactttttatattggttcttttcttatgtgtcagtgacaaastttttgagtgaaaagaccctaaaggcattttcccataaactctttgggtttatagtgtgattttacatagcatggtatattttaggagtgtatatatcacgttacagcaaaactgacctatacagatctaaacagaattcaaattatttcatacattccctacatttccatgcctctgtgtctttgtattcatttcatttgctgaaccctgaatgacttcaacctgtacacatagaagctgaatctaatctctagacttatctcttcttccaagaagcctgttattatcttcaaatgtaaatcatttttctctcctttaaacaccattgaactttgtttttttcttccttatttttcctgtcactatttgttcttgctcatattttttctggtaaaatatcaaaatgcttgtggacagaacctgcttcttttatcaattgtatcataaagcattctgcctcatatgtgttaagtttta

SEQ ID NO: 579034 - DNA, 569 bp, Homo sapiens
ttataacactgtcatctttttttctcaaggatgtttttgctactggggattttttgtggttccatagtaatgttaggattgtttttttctatatctgtgaaaaatgcctttggaattttgataagaactgcattgaatttgcagataatttacagacttttggtttacaaagtaatattatttccaactgtctcttctgtcacaatttaattctacttattgtgaagaccaaataagatgtcacactatccagtaagtctttgttataactccaataagaaatattattctctctctctctctctgtctctccctcaaaattttttgtctctactctttgacatttaccatattcgacccaataaaacaattatcaagcaaacttctttataagaagaagcatgtaaggattttctttgaattacacatattatctaaaatttgatattttatattataagacctcaaaagtattattgtggtattttaaatcagctgtatatytatttaggctggcatggtctggatgcattttgcagagaaacagattaaataaaaagtatagaaag

SEQ ID NO: 579035 - DNA, 542 bp, Homo sapiens
aacactttcaaactcattttatggtcccatcattaccctgatttcaagaccagatactataaagaaagtaaatgacaggctaaggtatctgatgaacacaaataaaaaattcctgaatcaaatattagaaaaccaaattcaaaagcacattaaaagagtcatagaccatgcttaagtggtattttttcctggggtgcaaatatggttcaacatacacatatcaatcaatgtaatacatcacattgaaaaaaataaaagaaaatacatgatcatttcagtatatgcagaaaaaacacccgacaaagttcaacatcaatttatgttaaaatcttcaacaaataagtatagaaggaatttaactcaacagaataatggtcagatagaagaagcccacagtcaaaatgataataagtggaaaaaatgaaaattttctccctaagattcagcacaaatcaaaaatgcccattttcacygcatctattcaataaagtactggaagtcctagtcagtggaattaggcaattaaaataaatgaaaaacat

SEQ ID NO: 579036 - DNA, 542 bp, Homo sapiens
tcattaatgataaaaaggtcaattcaggaagaggatataataattgttaatatatattcaaccaatgctggaagactcaaatttataatttatacattattcatgctaaagatagagataaaaccaataaaataatagctggagatctcaacaccccagttgcagcattgggaagatcatccaaaaaatgaaaaaaaaatctatattggatttaatctataaatcaaatggacctaacagatatttataggacatttcatccaatagctgcagaatacacattcttctcctcagaaaatagattattctcaagaataggccatgtgttargccacaatacaagtcgtgaaaaattctaaagtattgaaatcatatatactctcatcacaatagaacatgtgaaaattatataatatgctcctgaatgaccagtgggtcaacgaagaaattaagcacatttaaaaattttttgaaacaaatgaaaataaaacatgatataccaaaaacctatggcatcagcaaaagcaatgctaaaagtttat

SEQ ID NO: 579037 - DNA, 542 bp, Homo sapiens
tcattaatgataaaaaggtcaattcaggaagaggatataataattgttaatatatattcaaccaatgctggaagactcaaatttataatttatacattattcatgctaaagatagagataaaaccaataaaataatagctggagatctcaacaccccagttgcagcattgggaagatcatccaaaaaatgaaaaaaaaatctatattggatttaatctataaatcaaatggacctaacagatatttataggacatttcatccaatagctgcagaatacacattcttctcctcagaaaatagattattctcaagaataggccatgtgttaggccacaatacaagtcgtgaaaaattctaaagtattgaaatcatatatactctcatcacaatagaacatrtgaaaattatataatatgctcctgaatgaccagtgggtcaacgaagaaattaagcacatttaaaaattttttgaaacaaatgaaaataaaacatgatataccaaaaacctatggcatcagcaaaagcaatgctaaaagtttat

SEQ ID NO: 579038 - DNA, 341 bp, Homo sapiens
catgctcttgttttttgttttttgstttttttagggctgcttagtataccatggtgtatattatttccacagttatcttggaagtcccactgaaactcagtctgtactagcggtctctgggagccctagctttggaccagatgtattgcccacaggaggcctcttgtgccttgctgctctcagcttgcagagtaagtgacagtgtggtaatttggaatcctgctctctttaccttagaattctccactatttactatttggtttggtacaagggttttgttgttggttcccacttgtttgccctccttgatgaaatcaggccattctttctcatagtagtt

SEQ ID NO: 579039 - DNA, 588 bp, Homo sapiens
gaggacaagtgtctctccgagtccctacctggcagcagcgcctgcaaagcaacccctgtcaccctccagaggaggctcgtgggagcccatcagccgtgtcgggaccttgggaccctccactcagacacctgttctaagagcttcccccgagaggggccgagggagggtactacacgcaaggccaatatgtcaatgaagtaccctgtgctgttcattaaaacctgaaaatgaagcttgggaatttcattaacaatccaagtgcaaagaagagaggtttttggggatatttttaacacatctataatctttcattaacagctagaaatttagattgcygtacataagtgatagacaatgaaacagagaaggcatttctgagagtctctcggctgtcagcattgtgagcagctgggagggtcactccgtagtcatctgtcacacctccctggagaaggccttgtgagccaggggcacctcaggaggccagggtgctgcagcaccagaagcaggggccctggctcaccagggctagaaggagcagccagccccaaacaagcagcagggtttacaaaaggacaataaattgat

SEQ ID NO: 579040 - DNA, 588 bp, Homo sapiens
gaggacaagtgtctctccgagtccctacctggcagcagcgcctgcaaagcaacccctgtcaccctccagaggaggctcgtgggagcccatcagccgtgtcgggaccttgggaccctccactcagacacctgttctaagagcttcccccgagaggggccgagggagggtactacacgcaaggccaatatgtcaatgaagtaccctgtgctgttcattaaaacctgaaaatgaagcttgggaatttcattaacaatccaagtgcaaagaagagaggtttttggggatatttttaacacatctataatctttcattaacagctagaaatttagattgccgtacataagtgatagacaatgaaacagaraaggcatttctgagagtctctcggctgtcagcattgtgagcagctgggagggtcactccgtagtcatctgtcacacctccctggagaaggccttgtgagccaggggcacctcaggaggccagggtgctgcagcaccagaagcaggggccctggctcaccagggctagaaggagcagccagccccaaacaagcagcagggtttacaaaaggacaataaattgat

SEQ ID NO: 579041 - DNA, 588 bp, Homo sapiens
gaggacaagtgtctctccgagtccctacctggcagcagcgcctgcaaagcaacccctgtcaccctccagaggaggctcgtgggagcccatcagccgtgtcgggaccttgggaccctccactcagacacctgttctaagagcttcccccgagaggggccgagggagggtactacacgcaaggccaatatgtcaatgaagtaccctgtgctgttcattaaaacctgaaaatgaagcttgggaatttcattaacaatccaagtgcaaagaagagaggtttttggggatatttttaacacatctataatctttcattaacagctagaaatttagattgccgtacataagtgatagacaatgaaacagagaaggsatttctgagagtctctcggctgtcagcattgtgagcagctgggagggtcactccgtagtcatctgtcacacctccctggagaaggccttgtgagccaggggcacctcaggaggccagggtgctgcagcaccagaagcaggggccctggctcaccagggctagaaggagcagccagccccaaacaagcagcagggtttacaaaaggacaataaattgat

SEQ ID NO: 579042 - DNA, 639 bp, Homo sapiens
gcacattgtgcacatgtatcctagaacttaaagtataataataatttaaaattttttttaaatagatatacatgtaagagctactcctcctcctcaccaacatttggtatgatcagtcctttacattttaaccagtctggtagatgtatagtggtatttcatagcaattttagttttcctttttgtgtctaatgatgttgaacatcttctcatgcatttgttattggaataacatctttcaraaagtgctgttcaaatcttttgcccatttgtattgagttgttcattactactgagttgtaataactcagcctagtgcagtggcacatgcatgtaatcccagcactttaggaggctgaggcaggcagatcacctgaggtcagcaatttgagaccaaactggccaacatggtgaaaccctgtctctaccaaaaatacaaaaattagccaggcatggtggtacttgcctgtaatcccagctactcaggaggctgaggcaggagaattgctggaacccaggaggtggaggttgcattgagtcaagattgcatcactgcactccaacctgagcaacagagcaagactccatctcaaaaaaaaaaaaatcattatatattctcggtgtacaatctttagcaga

SEQ ID NO: 579043 - DNA, 433 bp, Homo sapiens
ataatctggcaagaaaagacagaatatctataaaaaatgtctatagatatctggaagcatctctgtggcaatagccagagctaaaagataatggatccttttctatggagctgaaaaagaacagatactgttataaataaatctttaacagagccaaataactctttatatattcataacaccaggagaacatccttaggtatattaggtattgaacagcataccatgtataaacattcaggaagttatacaacaacacataaacactaaaaaggcaaattcatcaaaattaggaatttttccattgagaaaytgtagtagcataattgacagtagccataataaagaatttttaaattgaggaattctagtacaataattgacagtagccataaagtgtttttgatgtgtttacttatcccctctccattgg

SEQ ID NO: 579044 - DNA, 535 bp, Homo sapiens
atgttatccactcattcttctgtgtgcaaatccaggtctgcagcttgatcaccagaacagtttctgtaggaatccaaatctccctcaaaaatataaaagacagatgcatttgggagatttcttcaggttattttgatggtctatctttagtcaacatagcaggaattaagagaaaaagtaagaatccatagcatgcactgagctccatcttccaagcacctgggggttttgatrgtggtagcattctaaactttatggagacaaagataccaatctttttcattagtctcatactttaatctaccttgtaaatgtcagttatatattcactcatatttctaaaagaatttttttcctttttaatgtatttatctaatttacctggaattattgataagatgtggttctgattagattttttccctcaaatatctgtcagagctcctagtattattttaatcttctttctcccaatccttttttttttttttttttttttttttttttttttttgagatggagcttctctcttgtt

SEQ ID NO: 579045 - DNA, 535 bp, Homo sapiens
atgttatccactcattcttctgtgtgcaaatccaggtctgcagcttgatcaccagaacagtttctgtaggaatccaaatctccctcaaaaatataaaagacagatgcatttgggagatttcttcaggttattttgatggtctatctttagtcaacatagcaggaattaagagaaaaagtaagaatccatagcatgcactgagctccatcttccaagcacctgggggttttgatggtggtagcattctaaactttatggagacaaagataccaatctttttcattagtctcatactttaatctaccttgtaaatgtcagttatatattcactcatatttctaaaagaatttttttcctttttaatgtatttatctaatttacctggaattattgataagatgtggttctgattagattttttccctcaaatatctgtcagagctcctagtattattttawtcttctttctcccaatccttttttttttttttttttttttttttttttttttttgagatggagcttctctcttgtt

SEQ ID NO: 579046 - DNA, 535 bp, Homo sapiens
atgttatccactcattcttctgtgtgcaaatccaggtctgcagcttgatcaccagaacagtttctgtaggaatccaaatctccctcaaaaatataaaagacagatgcatttgggagatttcttcaggttattttgatggtctatctttagtcaacatagcaggaattaagagaaaaagtaagaatccatagcatgcactgagctccatcttccaagcacctgggggttttgatggtggtagcattctaaactttatggagacaaagataccaatctttttcattagtctcatactttaatctaccttgtaaatgtcagttatatattcactcatatttctaaaagaatttttttcctttttaatgtatttatctaatttacctggaattattgataagatgtggttctgattagattttttccctcaaatatctgtcagagctcctagtattattttaatcttctttctcycaatccttttttttttttttttttttttttttttttttttttgagatggagcttctctcttgtt

SEQ ID NO: 579047 - DNA, 535 bp, Homo sapiens
atgttatccactcattcttctgtgtgcaaatccaggtctgcagcttgatcaccagaacagtttctgtaggaatccaaatctccctcaaaaatataaaagacagatgcatttgggagatttcttcaggttattttgatggtctatctttagtcaacatagcaggaattaagagaaaaagtaagaatccatagcatgcactgagctccatcttccaagcacctgggggttttgatggtggtagcattctaaactttatggagacaaagataccaatctttttcattagtctcatactttaatctaccttgtaaatgtcagttatatattcactcatatttctaaaagaatttttttcctttttaatgtatttatctaatttacctggaattattgataagatgtggttctgattagattttttccctcaaatatctgtcagagctcctagtattattttaatcttctttctcccaatcyttttttttttttttttttttttttttttttttttttgagatggagcttctctcttgtt

SEQ ID NO: 579048 - DNA, 257 bp, Homo sapiens
ctcaagcaatctgcctgcctcaacctaccaaagtgctgggcttataggcatgagccatcatgcctggcctkttatttattgtttcaattgtacatatacttaatgttatttcacagctttttgccaaccctctattttctatgagattttgatctttcagttttgcagttagctaggattactatatataaaaatagtatttaacacatatatagtactctgtgtcaggccctgttgtaaatactaatcctcaaaac

SEQ ID NO: 579049 - DNA, 607 bp, Homo sapiens
catatgtctttaaataaattaaaaataaaataatcttatatagttaccaggatatttaccattttctatacttttcattcctttccgaaaattttcacgtggtatcatttcccttctgcctgaagaactccctttggcatgtcttatgatgcaggactgcagatgataaattctcttcactttttcccctctaatgtctttatttgattttcattcctgaaggaatgattatttcactggatatagaattttatatggaaataytgaatttcattcatcattttaaaatgttgttccactatcttctgaccccatagtttttgaatgaaaagtcagcagtcaagcaaattactagtgctacctaggtagtgtgttgttttacactgtcttcttttctttctttctttctttctttttttctttctttcttttgagacagagttttgctctgtcaccaagacacctccagggttcaagccattgtcctacctcagcctcctgagtagctgagattacaggcatgcaccaccacacccggctaattttgtatttttagtagagacagggtttcaccatgttggtcaggctggtctcaaactcctggcct

SEQ ID NO: 579050 - DNA, 607 bp, Homo sapiens
catatgtctttaaataaattaaaaataaaataatcttatatagttaccaggatatttaccattttctatacttttcattcctttccgaaaattttcacgtggtatcatttcccttctgcctgaagaactccctttggcatgtcttatgatgcaggactgcagatgataaattctcttcactttttcccctctaatgtctttatttgattttcattcctgaaggaatgattatttcactggatatagaattttatatggaaatattgaatttcattcatcattttaaaatgttgttccactatcttctgaccccatagtttttgaatgaaaagtcagcagtcaagcaaattactagtgctacctakgtagtgtgttgttttacactgtcttcttttctttctttctttctttctttttttctttctttcttttgagacagagttttgctctgtcaccaagacacctccagggttcaagccattgtcctacctcagcctcctgagtagctgagattacaggcatgcaccaccacacccggctaattttgtatttttagtagagacagggtttcaccatgttggtcaggctggtctcaaactcctggcct

SEQ ID NO: 579051 - DNA, 489 bp, Homo sapiens
cttacttgcagaaagattgatttagaaccttacctcactccatacagaaaaaagaaaatggattacagacctaacatgagagctaaaactgtaagagttgtatagattttatttcttaaaaattaaagattttgaaccccaaagacactattaagaaaatgaggrccgggtgcagtggctcttgcaggtaatcccagcattttgggaggccaaaccaggtggattgcttgaaccaggagttcaagaccagcctggggaacatggcaaaacctgtctctacaaagaaaatgcaaaaagtagccaggtgtggtgtcacgtgcctatagtcccagctactcaggaggctgaggagggaggatcacctgagcccagggaggttgagggggcagtgagctgtgatcacgccacagcactccagcctggatgacagagtaagaccctgtctcaagaaaaaaaaaaaaaaaaaaaaaaaggccaggcccagtggct

SEQ ID NO: 579052 - DNA, 489 bp, Homo sapiens
cttacttgcagaaagattgatttagaaccttacctcactccatacagaaaaaagaaaatggattacagacctaacatgagagctaaaactgtaagagttgtatagattttatttcttaaaaattaaagattttgaaccccaaagacactattaagaaaatgaggaccgggtgcagtggctcttgcaggtaatcccagcattttgggaggccaaaccaggtggattgcttgaaccaggagttcaagaccagcctggggaacatggcaaaaccygtctctacaaagaaaatgcaaaaagtagccaggtgtggtgtcacgtgcctatagtcccagctactcaggaggctgaggagggaggatcacctgagcccagggaggttgagggggcagtgagctgtgatcacgccacagcactccagcctggatgacagagtaagaccctgtctcaagaaaaaaaaaaaaaaaaaaaaaaaggccaggcccagtggct

SEQ ID NO: 579053 - DNA, 580 bp, Homo sapiens
gtagttacttgggtttagacatatgcttaaaaatcgtcaagttatgtgtttaaaacatgtgcaccttacagtatataagccacacttcaatttttttaaaggtccccacaacattgttgttttcaaggaagtacaggaaatatcttttactctgtgttaattcagggaagttatctccataagtgctttacaaaataatcttcataatatagtagcaccattaagtaggcattattatctctgtatcacaaatgcacaatatgagagtcagagaggttaagttattttccaaagtcacacagctaatcaatggcaaagytaggattttttttttcttttttgagacagagtcttgctctgtcacccaggctggagtgcagtggtgtgatttcagctcactgcaaccttcgcctcccagcttcaagcgattctcatgcctcagcctcccaggtagctgggatttcaggtgtgcaaccaccacacccagttaatttttgtatttttggtagagatagggtttcacatgttggccaagctggtcttgaactcttgacctcaagtgatccacctgtctcagcct

SEQ ID NO: 579054 - DNA, 563 bp, Homo sapiens
tctcattataactttatttgcattctttgatgcataatgatgttgaacatttcttcttgtgtgtattgactatttgaatatgatgtaaaatttaatttacatatttttgaagtgttctttgttagatatctcaatatagtttgtaaatattctttctcagtctgcagcttccctcctcattgtctaaatagtgtcttttaaagaggaggatttaattttcataaagttttaatttgttggtcatcttcttctatggtgagtgatttttgttatcaaagaaatcttgcctgcccaaagattacaaagatttttatcttctatgttttcttttagaaataatgtagttttctatttttaaatttagatgtaatcaattttgagttattttttgtctatagtttgaagtaaaaatcgcgggtcactcttttttatatwgtgattcggttactcccacccccactcgttgaaaggagtattctttttcagataaattatctgaaactctctccacaatcgattttcttttctactcatctatattactctgctcgtgtccctaccac

SEQ ID NO: 579055 - DNA, 323 bp, Homo sapiens
tcatcttcttctatggtgagtgatttttgttatcaaagaaatcttgcctgcccaaagattacaaagatttttatcttctatgttttcttttagaaataatgtagttttctatttttaaatttagatgtaatcaattttgagttattttttgtctatagtttgaagtaaaaatcgcgggtcactcttttttatatagtgattcggttactcccacccccactcgttgaaaggagtattctttttcagataaattatctgaaactytctccacaatcgattttcttttctactcatctatattactctgctcgtgtccctaccac

SEQ ID NO: 579056 - DNA, 585 bp, Homo sapiens
atcaaaatttctgggatgtagcaaaagccactgtytttttaagaggaaagtttatagtgctaaatgcctatctcaaaaagttagaaagatctcaaattaacaatctaacatcatacctagaggaactagaaaaataagaaccaactaaccccaaaggtagcagaagaaagtaacaaaaatctgagaagaactgaataaaattgaggccccaaaatctatataaaggatcaataaaactaaaagttgattacttgaaaggataaacaagattgaaggaccactagcattagcaaagaaaaagagagaagatccaaataagcacaatcagaaaccacaaaggtggcatttataatcgatcccacagaaatacaaaagttcctcagagacagttaggaacacctctaagcaaacaaactaaaaatcaagaggaaatggataaattcctggaaacacaccatattccaggactgaatcaggaataaattgaaacactgaaaagaccaatattgagttctgaaattgaatcagcaataaaaaacatatcaatgaataaaagccctagaccacatggattcacagccaaat

SEQ ID NO: 579057 - DNA, 569 bp, Homo sapiens
gactttgtgtgcaaatgatcccatcaccaaggtagtgatcatagtacctagtatgaagctttccaacccgtgtccctttctcacctcccctctcaagcagtctccagttctattgtkctcatctttgcatacttgtgtattcaatatgtaatgccctggctgggcgccgtggctcacgcctgtaatcccagcactgtgggaggctgaggcaggtggatcacctgaggttaggagttcaagatcagcctgggcaacatggagaaaccctgcctctactaaaaatacaaaaattagctgggtgtggtggcacatgcctataatcccagcgactcaggaagctgaggcaggagaatagcttgaatccaggagtcagaggttgcaatgagctgagatcatgccactgcactccagcctgggtgacagagcaagactctgtttcaaaatatatctgtttatatatatatatatatggcacccagttataagtgagaacatgcagtatttggttttctggtcccacattagtgcacttaggataatggcctccagctacatccatgttgttgtaa

SEQ ID NO: 579058 - DNA, 562 bp, Homo sapiens
gtattcaatatgtaatgccctggctgggcgccgtggctcacgcctgtaatcccagcactgtgggaggctgaggcaggtggatcacctgaggttaggagttcaagatcagcctgggcaacatggagaaaccctgcctctactaaaaatacaaaaattagctgggtgtggtggcacatgcctataatcccagcgactcaggaagctgaggcaggagaatagcttgaatccaggagtcagaggttgcaatgagctgagatcatgccactgcactccagcctgggtgacagagcaagactctgtttcaaaatatatctgtttatatatatatatatatggcacccagttataagtgagaacatgcagtatttggttttctggtcccmcattagtgcacttaggataatggcctccagctacatccatgttgttgtaaaggacatgagttcattctttgttaaatggctgtatagtatttcatggtgtatatgtaccacattttctttatccagtccaccattgggcatcttggttggttctatgtctttgctattatgaatagtgc

SEQ ID NO: 579059 - DNA, 534 bp, Homo sapiens
ctggtttctttctcaagattgtcgtgagaatttgaaaccagtgagaagtaagctaaagaggtaggccaaaaatttctatgaagcaaaacttcgaaagcgaggttgcagaaatctgctaggccattaataaaagttcaggagcatatcacttgaagaatagaatgaatgagaagtaacctcactttgatcatctatgtcctctgtggttctattatatacttgtctggcatgtaataaaacttattagactgttgataataatgaagagaaaaggaaaaacaaacaatacaaacaaatactgataatccaaatattggagttatcagataagaactttaaaataactgtgacaatgtggaagaaagaggaaaagaagaaaaaatagatgaaagggtggatttttaaaaacaagtaagtattctacacataaaaattatacaatattcaaaaaaaagaatttattaaaagagttatcagyggactggccacagcagaaatcaggatttgtgaacttgaagatgtatgagaataaaa

SEQ ID NO: 579060 - DNA, 566 bp, Homo sapiens
attatgcataaattgcacaagcaatgatggtggcacaggcagctcagtcagcataaaagaacacagtgagtcatgaaagtatagttataatcaaggtgtatgaggagttttactggaaggaccacagagatttggagcataaaggaaaaaatgcaaaaaaaattaaacttgraattaggaaatgcaaaggtcctagccttttgtttttcaccaggtacttattaattatttgtggttttttttttgatcttcaaatttcttatttattgaactctccaggcactgaaaatacaaatgtgaacaagacaatatggtccctggtcttttgaaacttacattctacttggagaaacaacgttaatactaataaagagactcacggtcaaaacagttatagattgtaccaacgatcatgaaggcagcatataaagtgaagacaggggtgggagaatacttctgtagaattgcagaaaggactttctgacatgggagctggaatgtattttaaatgtttattaatttcatattgctgctttagaatatacactctaaacttaatgcttcaa

SEQ ID NO: 579061 - DNA, 542 bp, Homo sapiens
gggtgaaactgaggggacattgggggaacagttattctccattcagcrttgtcagatttaagaaataaaaatgcaagatgcccagttcaaatttgaatttcagataagccacattttattaagaataagtatggcccaagtatagcatagtcagtctcagtttttattgtactccactcatcctgtttctaaattgagcaattcccattacaataacaccctaggcctccttctctctctccactcttttcactataggaacaaaaagtgattcattttacttgtggcttgggacaaggaacgggataagtgacgctcagtcctttctagtatctcttataagctcctgactgccgacgttccctattccattctaatccatgtggttatctcagcaataaagaccctgacatgattgtgaatctccactgactaggagagaatagagaagtctccacatctaggatgcagttatatggaagcctttttttgctacttcgaaggcgcattccccattggctcagttaataataaaacatgcc

SEQ ID NO: 579062 - DNA, 489 bp, Homo sapiens
tattaaaacatatagtggaataaaactgcactatctgacatactcaaggtggtctttgtttcagattattcttcmcctttggagaatttgtcagccacttactgaaaacagtattatttagatctgtatttagcatgttccttttccttcattttctttcctgatacttccatgaccatatattctttggcattctttttaattagcgacagatggatgaagaaactttagatcctaccttggattccatgctgttttggtgctttcaaactggcaaaaccacaacctagcagcaatctcttaagcaactttaactgcccctaaactctgcctaataatggtcattttgaggttgggtgttgggtttgaggctgggagtgtctttacataattaacatgcagctcttgggggagtataaactaaagctctctgaatctctgcagccacaacctttgaacacccaacttctccaagaacataaatgcttg

SEQ ID NO: 579063 - DNA, 607 bp, Homo sapiens
gttggtggatcacacctgtaatcccagcactgtgggaggctgaggcaggcagatcacctgaggtcaggagttcaaaaccagcctggccaatatggtgaaccccgtgtctactaaaactacagaaaaattagctgagcatggtggtgggcacctgtaacctcagctactcaggaggctaaggcagtagaatcgcttgaacctggraggtggacgttgcagtgagccgagattaagccattgcactccagcctggacaaaagcaaaactctgtctcaaaaaaaaaaaaaattaaaagataccctcaagatttaaaagattatattaattaggtgtattagtctgttctaacactgctataaagaactacctgagactgggtaatttatgaagaaaagagggttaattggctaacagttctgcaggctatacaggaagcatgactgggaggcctcgggaaacttacaatcatggcagaaagcaaaggggaagcaagcatgtcttcacatggccaggcaggaaagaaagagtgaagggggaagtggtacacacttttaaacaaccagatctcgtgagaactcactcactatcatgaagacaaaaagggggg

SEQ ID NO: 579064 - DNA, 607 bp, Homo sapiens
gttggtggatcacacctgtaatcccagcactgtgggaggctgaggcaggcagatcacctgaggtcaggagttcaaaaccagcctggccaatatggtgaaccccgtgtctactaaaactacagaaaaattagctgagcatggtggtgggcacctgtaacctcagctactcaggaggctaaggcagtagaatcgcttgaacctgggaggtggacgttgcagtgagccgagattaagccattgcactccagcctggacaaaagcaaaactctgtctcaaaaaaaaaaaaaattaaaagataccctcaagatttaaaagattatattaattaggtgtattagtctgttctaacactgctataaagaactacctgagactgggtaatttatgaagaaaagagggttaattggctaacagttctgcaggctatacaggaagcatgactgggaggcctcrggaaacttacaatcatggcagaaagcaaaggggaagcaagcatgtcttcacatggccaggcaggaaagaaagagtgaagggggaagtggtacacacttttaaacaaccagatctcgtgagaactcactcactatcatgaagacaaaaagggggg

SEQ ID NO: 579065 - DNA, 534 bp, Homo sapiens
ctggtttctttctcaagattgtcgtgagaatttgaaaccagtgagaagtaagctaaagaggtaggccaaaaatttctatgaagcaaaacttcgaaagcgaggttgcagaaatctgctaggccattaataaaagttcaggagcatatcacttgaagaatagaatgaatgagaagtaacctcactttgatcatctatgtcctctgtggttctattatatacttgtctggcaygtaataaaacttattagactgttgataataatgaagagaaaaggaaaaacaaacaatacaaacaaatactgataatccaaatattggagttatcagataagaactttaaaataactgtgacaatgtggaagaaagaggaaaagaagaaaaaatagatgaaagggtggatttttaaaaacaagtaagtattctacacataaaaattatacaatattcaaaaaaaagaatttattaaaagagttatcagtggactggccacagcagaaatcaggatttgtgaacttgaagatgtatgagaataaaa

SEQ ID NO: 579066 - DNA, 622 bp, Homo sapiens
tggttttaatttctcatgtataagaggaatggatcccaatccttccactaaatcaccacttcatatacctttacaacacttacaatgcttagctgtgttgtaaaggtatatgaattaaaaagacatttgtaaaaggctaagcttagattgccctttgtgggtctaaatttcagatatgcaagagctgcatttgtgagcagcagtgaaagctgcagcattgtgatgtctagagaagggaaatttggctcctccagggctcctccatgatgacagctttaaaccaaaattgacatttagcagaggccactgagaggctagaaaagaccatactctgaaattgtcctcataaataaaggttaagtatatgaatattgtgatgctgaaatccgtattaaaccctattataaaaagatggcctgatcataaaacttgtcagattaaaaatgagctccagagctaatgaaaagcatcttattagccacagcaacatttaccttctctttccttctctccttctcctttcagcrgattctaaaaagacttgcttctttacggccatcacctacagggaggaattttttcttctcctcatcaagtggtctacaggtagaggtttttttcc

SEQ ID NO: 579067 - DNA, 604 bp, Homo sapiens
aaaccataataatggtgttatgggawgctcactgttgttattatgaaatccaatctttcgtcagatttcatgtaagaaatacaactcaacttttccaattactgctcagatatttttgctttctttaaaactccttggagttgaagcttagcttttatcagttgacttaatggcctcattaaactttcattaacttctagaaggacactttcatattctttatgcagtttatgactttacctagattataagtattgttagttgtgcatgccttcaaaaggcttatgctaagataaaggctaactctgtccttcaattactattaaattctccataggtaggttggaaggattgtatctgctgcattttggataaataagacaactgtatgcaccttatatcagtttattcttttgcattttccattaagtatttccagaaatgttgaaattttattaacataaagaagcaagactcagttagaaatgtcaaaactatttttattgaagtgataatcaattcctgttggcattgctaaaaacttccaaaaagtttattaattctacaaataataggttaagattatgtgacttgccaaaaacca

SEQ ID NO: 579068 - DNA, 433 bp, Homo sapiens
caccttttctctcccttctcctgtcactcttattttcggtggtaactagattatcctattttgaagtttaaacctatgaagtgaagagtagtaaagactttgtgttgttgtcatgctcaaaaaagtagggtgagcttcattggcatgcaaactatgcagtaacacaatatgttgtcctctgaagtgctgcatgcttttctgcacttggccttgtaaattatktatccagtcttgcctgtaatagtgtgctggaatgtatagtgcctatgacagactgcctttctgaacagccaccaccctatataatgttttcaatcacttctacctcaattatattagaaggcttttgggtagtttttctagttgtacttttgccattctttacaatgctgttaacctacatttaaatccaaattcaatataacattaactg

SEQ ID NO: 579069 - DNA, 498 bp, Homo sapiens
tcagtggcaaaaattttaaggatttgattaagaaacttggaaatatatttcagattccctcatacttaacaaatatttataaaagataatatgagagtttattaacaattggttgtgttcagtactttatctgtaaaatcaacaatgatacagtatattctttttgctatcatcagaggagcatacatacagttgttttatagtaaatacatttttatttttataatcttaggcactgaaatttaagcttcttttctattattgcaatcaygttacaaataaatataaaatttaaataatgcttctatagatatcaaatataaacaataacacattttgatatgtttgaacatgctttcttaagagccaatagttaataaacgtgcattattgagttggcaaaaataaaacatccaaatagtatttctttttttttgtttgttttttgtttttgagacagtgtctcgctctgtcgcccaggctggagtgcagtggccc

SEQ ID NO: 579070 - DNA, 498 bp, Homo sapiens
tcagtggcaaaaattttaaggatttgattaagaaacttggaaatatatttcagattccctcatacttaacaaatatttataaaagataatatgagagtttattaacaattggttgtgttcagtactttatctgtaaaatcaacaatgatacagtatattctttttgctatcatcagaggagcatacatacagttgttttatagtaaatacatttttatttttataatcttaggcactgaaatttaagcttcttttctattattgcaatcatgttasaaataaatataaaatttaaataatgcttctatagatatcaaatataaacaataacacattttgatatgtttgaacatgctttcttaagagccaatagttaataaacgtgcattattgagttggcaaaaataaaacatccaaatagtatttctttttttttgtttgttttttgtttttgagacagtgtctcgctctgtcgcccaggctggagtgcagtggccc

SEQ ID NO: 579071 - DNA, 574 bp, Homo sapiens
actgcactccagcctgggcaacagagcgagactctgtctcaaaaaagtaaaaaataaataataaataaataaaaagaaataccygaggctgggtaatttataaagaaaaggcgtttaactggctcacagttccacagggtgtacaggaagcatgatgctggcatctgctgggcttctggggaggcctcaggaagtttacaatcatggtagaaggtgaagggagagcaggtacatcttacaatggcaggagtatgaggaagatagagtgtgagggtagaggtgatactcacttttaaacaatcagagcttgcgagaactcactattgagaggacaggacctagtgggatggtgctgaaccatttgtgaaccattgctgaacctgcatgatccaatcactcccacaaggcccaaactccaacactggggattacaatttgacatgagatttggtggggacacagatccaaaccatatcaccaaccaaatacaatgtgtgcacctcacttagatccttattcaaacaaagagaaaaaatattttgcaacatttggcaattagtaatttgaatactgg

SEQ ID NO: 579072 - DNA, 477 bp, Homo sapiens
tggtgtctgggaaaaagcatttcctgagagctatttaaatagcttggctttgagttacggagagacacagatcaatttcaggctggcttaatgcagagatcatgagattacctcctctcccgccgagtttttgtgggagtttgcgcaaaaagaaatagttttgtgtttatagctgcgagtgcacgctctctctctcacacacacacacacacacacacacacacacacgtaaacatacaaaagatttaaaaattctcaggaaattagattatacatgttatttataatcarctagctggtaatgactagcttaagtaaaagaacaaggggggattctttataataaagctacagggttagctcatgccacttgggcaagaatggactggtacttaggaatggacctgaaagtttatcagtttacctctctgtcttggctctgcttttcttgtttttttttttgtttgtgtatttatt

SEQ ID NO: 579073 - DNA, 410 bp, Homo sapiens
actttgggaagctgaggcgagaggatcatttgaggtcaggagttcaaaaccagcctggccaacatggtgaaaccccgtctctactaaaaatacaaaaattagcygggtgtggtggtacacacctgtaatcccagctactcgggaggctgaggcaggagaattgcttgaaccaagcaggaggaggttgcagtgagcgaagatcatgcactccaccctgggtgacagagtaagactctctcaaacgatgataataatagtagttactaataactattttaaactaatacagttttttattaaaactaatagaatagctaataatatattgttatagctagctatatagctagctataacaatataataaaagtaaaataaggattccttgaacataagcactaggatactgt

SEQ ID NO: 579074 - DNA, 487 bp, Homo sapiens
agatcccattcttttggcgtgtgtcaaaatttgtctactgtaaaatttatcattttaaccgtttgtaagtatacagttcagtagatgttaagtatgttcacattgttgtgcaaccaatctccagaacgytttcattttgcaaatctgaaactctatacccattaaaaaataactccctattctccttccccccaggccccgggcagtcatcattctacttctatcttcattaatttggtaactctaggtacctcatacagtggaatcatacagtatttaatcttttttttttttttttttgaagtggagtctcgctctgtcacccaggctggagtgcagtggcgcgatctcagcctgactgcaggctccacctcccgggttcacaccattctcctgcctcagcctccagagtagctgggactacaggcgcccaccaccacgcccagctaatttttttgtattttttagtagagacggggtttcaccg

SEQ ID NO: 579075 - DNA, 386 bp, Homo sapiens
cccaggaaaccagagcccactgaagsagtctccctgcaaatcatcccgacaacaagccctgcaccctttgtgacttggaaaatgctcgctgccttgaccttggcttgcctattgacacctgtcagttcctccttcctaagtctgctcaacaggtcctctgggcctctcccagccccaaggctaccaggtcccccagcctcagcagcctttccccctcgaagacagaacgtagcctatgtacagccgcattctgcacatggaacttcttctgtgtctgtaggagaggaaagggccgccactctgggcaagcaggcaagaggcaaaaatacttcagtcttgcttcccttttcctcaggctctaaggactcgaggattttaattttcaa

SEQ ID NO: 579076 - DNA, 606 bp, Homo sapiens
ttcttcataaattacccaggctcaggtggttctttatagcaatgtgaaaacggactaatacaacatccattctccttctactttatttgaattatcactttctcagtggctataatgtagtaggaccataggcagaggttctaccctttctagccaaagggagatcatgtaatctaagctgaactaacatgatgctcygtccctggagagtgactctttagaacagggacaaaagcattccaacccttccaagagacaggatgtcacagggctcatttttgctgtaagaccctatcaacattctctcactttccctccaagtccactcagcttggaagctcacaggcctcctgactgaaaggactcaggcttcaacaggaaaggctgagaaaatacagttaatatggaagaaaagcaacacaccccattcacagtggcaaaatctgtgtgtagtctctactgaaacagaaaagggtattagaacagaacctggcagcttccagatgtgacacacactcactctaataggagatacttcctgcaccagccaggccaggtaagatcaggcttggccattagaagagtgacctgtcacagccagatcac

SEQ ID NO: 579077 - DNA, 512 bp, Homo sapiens
agggaggcggagcttgcagtgagccgagatcatgccactgcactccagcctggatgacagagcaagactccgtctcaaaaaaaaaaaaaaaaaaaaaaaaaaaaaaagtaaatatgggggccagtcatggtggctaacgcctgtaatccagcactttgggggccaaggtgggtgggtcactcgaggttaggagttggagaccagcctgactaacacggkgaaaccctgtctctactaaaaatacaaaaattagctgcatgtggcagtatgcatctgtagtctcagctattcaggaggctgaggagagagaatcacttgaagctgggaggcggaggttgcagtgagccaaaaccacgccactgtactccagcctgggtgacaaagcaagattccatctcaatcaatcaataaaataaaataaaataaaataaagtagagggaaatttgggacacagagacaagaaatcttgggactccggggagaatgccaggtgaagacggaagcagagatt

SEQ ID NO: 579078 - DNA, 474 bp, Homo sapiens
ctgatattttagctacctctcccatccccttaaaatttaaaacaaatacaattttcaaatatttagaaacacatgtataacatgttctcagaatctgagtgaggttgccttttccctcctatccaaccccatagatcccccactgcttcttttccccctcaagtggagggggcaggcaagatgggctcagggaaagctggtggtgacccatgcaccaactccccctyctcagtctcacttcctctccaccaacctcactgccacttcctccccaccaacctcactgtcactgccaagggaggtcagatctttgcattccttcctgctgcccattcctcaaatcctgggagaaacatgaatctctagctttttctcttttccgccttcactttaacatgcacaagtctttcctatcttcagcaaaactccttcttaccatcttctctctcctttctttcagagccaaaattattg

SEQ ID NO: 579079 - DNA, 604 bp, Homo sapiens
caacaatcccctactgggtatctacccaaaggaaaagaaatcattatatcaaaaaaaaacacctgcaaacgtatgtctattgcagcacatttcacaattgcgaagatacggaatcaacctaagggtccatcaaccaatgaatggaataaataatatgtggtatatatatgtcatggagtactactcagccataagaagaatgaaataaatgtcttttgcagcaacttggaagggactggaggccattattctaagtgaactaactcaggaatggaaagccaaataaaaccacattctcrctcataatagggagttaagctatgggtgcacaaatgcagacagagtagtataatggacatcggagaatcagaagtgggagagtgtgggaggaggatgagggatgagaaactacctactgaggtacaatgtgtactactcgggtgataggcacactaaaatcccagacttcaccaccatacaattcatccatttaaccgaaaaccacttgtatacctaaagctatgaaattaaaaaaaaagttttcaaaaacaataaaactgtataaattttttgaaaattactttgggtttagaaaagtgaccag

SEQ ID NO: 579080 - DNA, 604 bp, Homo sapiens
caacaatcccctactgggtatctacccaaaggaaaagaaatcattatatcaaaaaaaaacacctgcaaacgtatgtctattgcagcacatttcacaattgcgaagatacggaatcaacctaagggtccatcaaccaatgaatggaataaataatatgtggtatatatatgtcatggagtactactcagccataagaagaatgaaataaatgtcttttgcagcaacttggaagggactggaggccattattctaagtgaactaactcaggaatggaaagccaaataaaaccacattctcactcataatagggagttaagctatrggtgcacaaatgcagacagagtagtataatggacatcggagaatcagaagtgggagagtgtgggaggaggatgagggatgagaaactacctactgaggtacaatgtgtactactcgggtgataggcacactaaaatcccagacttcaccaccatacaattcatccatttaaccgaaaaccacttgtatacctaaagctatgaaattaaaaaaaaagttttcaaaaacaataaaactgtataaattttttgaaaattactttgggtttagaaaagtgaccag

SEQ ID NO: 579081 - DNA, 604 bp, Homo sapiens
caacaatcccctactgggtatctacccaaaggaaaagaaatcattatatcaaaaaaaaacacctgcaaacgtatgtctattgcagcacatttcacaattgcgaagatacggaatcaacctaagggtccatcaaccaatgaatggaataaataatatgtggtatatatatgtcatggagtactactcagccataagaagaatgaaataaatgtcttttgcagcaacttggaagggactggaggccattattctaagtgaactaactcaggaatggaaagccaaataaaaccacattctcactcataatagggagttaagctatgggtgcacaaatgcagacasagtagtataatggacatcggagaatcagaagtgggagagtgtgggaggaggatgagggatgagaaactacctactgaggtacaatgtgtactactcgggtgataggcacactaaaatcccagacttcaccaccatacaattcatccatttaaccgaaaaccacttgtatacctaaagctatgaaattaaaaaaaaagttttcaaaaacaataaaactgtataaattttttgaaaattactttgggtttagaaaagtgaccag

SEQ ID NO: 579082 - DNA, 608 bp, Homo sapiens
ataggacatgtaaaatataataagcctgaatgcatagtgtgttgtgggagagagcaggatgtgggactgtttctgtgaagaaagcatgtatacaagttagtcaaattattgtgttatttacatcctaaaaatgaaaacttcattttcggatttttcagattggcatcctactaatttgacccttagtgatgagacttgtcagagatccaagaatctgaaagttgrtgataaaagtccatctgtatcaccatcaatgcctgaaaatcagtcagcaaccaaagaactgggacagatgaacttaacagaacgagaaaaaatggacactggagttgtacttctctcagggaatgatactctccatgacctgtgccaatcacagctaccagaaaacaaagagagcaaagaaggtaacaaagaagcatagagaattcagtcctagagtgcctctgcttggctgcatagagctatagttttgacttaaaactttttctggtaaaatgtgctttgtgtttactcaccttttgcactgaacagaataccttttggcaggatatttgtgttcttcctttaaccaaagcaacatctagataacagagaattaggggaaa

SEQ ID NO: 579083 - DNA, 608 bp, Homo sapiens
ataggacatgtaaaatataataagcctgaatgcatagtgtgttgtgggagagagcaggatgtgggactgtttctgtgaagaaagcatgtatacaagttagtcaaattattgtgttatttacatcctaaaaatgaaaacttcattttcggatttttcagattggcatcctactaatttgacccttagtgatgagacttgtcagagatccaagaatctgaaagttggtgataaawgtccatctgtatcaccatcaatgcctgaaaatcagtcagcaaccaaagaactgggacagatgaacttaacagaacgagaaaaaatggacactggagttgtacttctctcagggaatgatactctccatgacctgtgccaatcacagctaccagaaaacaaagagagcaaagaaggtaacaaagaagcatagagaattcagtcctagagtgcctctgcttggctgcatagagctatagttttgacttaaaactttttctggtaaaatgtgctttgtgtttactcaccttttgcactgaacagaataccttttggcaggatatttgtgttcttcctttaaccaaagcaacatctagataacagagaattaggggaaa

SEQ ID NO: 579084 - DNA, 608 bp, Homo sapiens
ataggacatgtaaaatataataagcctgaatgcatagtgtgttgtgggagagagcaggatgtgggactgtttctgtgaagaaagcatgtatacaagttagtcaaattattgtgttatttacatcctaaaaatgaaaacttcattttcggatttttcagattggcatcctactaatttgacccttagtgatgagacttgtcagagatccaagaatctgaaagttggtgataaaagtccatctgtatcaccatcaatgcctgaaaatcagtcagcaaccaaagaactgggacagatgaacttaacagaacgagaaaaratggacactggagttgtacttctctcagggaatgatactctccatgacctgtgccaatcacagctaccagaaaacaaagagagcaaagaaggtaacaaagaagcatagagaattcagtcctagagtgcctctgcttggctgcatagagctatagttttgacttaaaactttttctggtaaaatgtgctttgtgtttactcaccttttgcactgaacagaataccttttggcaggatatttgtgttcttcctttaaccaaagcaacatctagataacagagaattaggggaaa

SEQ ID NO: 579085 - DNA, 608 bp, Homo sapiens
ataggacatgtaaaatataataagcctgaatgcatagtgtgttgtgggagagagcaggatgtgggactgtttctgtgaagaaagcatgtatacaagttagtcaaattattgtgttatttacatcctaaaaatgaaaacttcattttcggatttttcagattggcatcctactaatttgacccttagtgatgagacttgtcagagatccaagaatctgaaagttggtgataaaagtccatctgtatcaccatcaatgcctgaaaatcagtcagcaaccaaagaactgggacagatgaacttaacagaacgagaaaaaatggacactggagttgtacttctctcagggaatgatactctccatgacctgtgccaatcacagctaccagaaaacaaagagagcaaagaaggtaacaaagaagcatagagaattcagtcctagagtgcctctgcttggctgcatagagctatagttytgacttaaaactttttctggtaaaatgtgctttgtgtttactcaccttttgcactgaacagaataccttttggcaggatatttgtgttcttcctttaaccaaagcaacatctagataacagagaattaggggaaa

SEQ ID NO: 579086 - DNA, 341 bp, Homo sapiens
catgttcttaattcaactccatttgtttgcaagagtcaagtagtgacattcacartggccttatccaaaggagaaacatttgttatttttcatagaattaatgatctttccacaatctcaaaatccttgctactaacaacagacgttctagttttcagacattatttcattttcctaatatattaatggagaggttagattattatttccacttgcagtaaggatgaaatgtatagccagttcagaggccgtacttcagatgccgtttcccttacttttgaggagagtaacagtttgctccaagtagcgtctcatttcagtgcaaagagctttgaaaacaa

SEQ ID NO: 579087 - DNA, 341 bp, Homo sapiens
catgttcttaattcaactccatttgtttgcaagagtcaagtagtgacattcacaatggccttatccaaaggagaaacatttgttatttttcatagaattaatgatctttccacaatctcaaaatccttgctactaacaacagacgttctagttttcagacattatttcatyttcctaatatattaatggagaggttagattattatttccacttgcagtaaggatgaaatgtatagccagttcagaggccgtacttcagatgccgtttcccttacttttgaggagagtaacagtttgctccaagtagcgtctcatttcagtgcaaagagctttgaaaacaa

SEQ ID NO: 579088 - DNA, 615 bp, Homo sapiens
gagaattaagagatatatctagattctaccactgaatttttaaaaacaagtttactgagagagaattctcataccatacagtttacccattgaacgtgtacaattcatggtctcttaatatattcacagagttgcataaccatcaccatcatcaattgtaggacattttcatgaccctgacaagaatcagcaatctattttgtttccatagatcagcccattctggacaccacgtatcaattggatcacacaatgtgtggtggtcttttgtgactggcttcttctacttagcataacatttttaaggttcattgtgttgtaacatgtatcagtatttaatttcatcttattgctgagtaattttccactgtatggacataccactaatttatttagccattcatcagttgatggacctttgggttgtttccatgttttggctattattaatcatgctgctgtgaacttttatttacaagtttttgtgtttgtatatgtattcctttctcttgggtatatacatatgagttgaatttctgggtcatatggtaacactatgcttaacmttttgaggaactgccagtctgctttccaaagtggttgcaccattttacg

SEQ ID NO: 579089 - DNA, 553 bp, Homo sapiens
caccatcatcaattgtaggacattttcatgaccctgacaagaatcagcaatctattttgtttccatagatcagcccattctggacaccacgtatcaattggatcacacaatgtgtggtggtcttttgtgactggcttcttctacttagcataacatttttaaggttcattgtgttgtaacatgtatcagtatttaatttcatcttattgctgagtaattttccactgtatggacataccactaatttatttagccattcatcagttgatggacctttgggttgtttccatgttttggctattattaatcatgctgctgtgaacttttatttacaagtttttgtgtttgtatatgtattcctttctcttgggtatatacatatgagttgaatttctgggtcatatggtaacactatgcttaaccttttgaggarctgccagtctgctttccaaagtggttgcaccattttacgttcccatcagcattgtatgagggttctaatttctccacatccttgccaacatttttcatatttttgattgaaaaaggattc

SEQ ID NO: 579090 - DNA, 613 bp, Homo sapiens
tttctcatttaattttttttacacccttgttgaaaatcagttgaccataaaartgtgtgtttgtttttggattctcagttctaatatattgagctatgtctatccttatgccagtagcaaatcacattttaggaaaattcattttcagtcctgttgcttattaccagttgtcttatgtaagaatagaaattcaagtagtagaatgtctttaatttcactttttgcttcttgaaggagtgtatggccagcttatgccttgctgactccatgacatgatgagagtcaggcttatgaagacagatcccattaattttttttctccagtcataccttttgtctctcacccagtgcctctctcttcattcccatttccatcaaatcttggtcacaggatatgctgactcctactatttactgcattatgtttttattaactcattgtaagtcatagagtcatgtgtagattttaactatctatgaagggcaagattaagtctaggctgtcctctttcctcattggaaattgagctaattcatcatgttgcagtttacagttagatactcttttgacccagcacctggttctcttgtacactcccggagctgaatcctc

SEQ ID NO: 579091 - DNA, 613 bp, Homo sapiens
tttctcatttaattttttttacacccttgttgaaaatcagttgaccataaaagtgtgtgtttgtttttggattctcagttmtaatatattgagctatgtctatccttatgccagtagcaaatcacattttaggaaaattcattttcagtcctgttgcttattaccagttgtcttatgtaagaatagaaattcaagtagtagaatgtctttaatttcactttttgcttcttgaaggagtgtatggccagcttatgccttgctgactccatgacatgatgagagtcaggcttatgaagacagatcccattaattttttttctccagtcataccttttgtctctcacccagtgcctctctcttcattcccatttccatcaaatcttggtcacaggatatgctgactcctactatttactgcattatgtttttattaactcattgtaagtcatagagtcatgtgtagattttaactatctatgaagggcaagattaagtctaggctgtcctctttcctcattggaaattgagctaattcatcatgttgcagtttacagttagatactcttttgacccagcacctggttctcttgtacactcccggagctgaatcctc

SEQ ID NO: 579092 - DNA, 613 bp, Homo sapiens
tttctcatttaattttttttacacccttgttgaaaatcagttgaccataaaagtgtgtgtttgtttttggattctcagttctaatatattgagctatgtctatccttatgccagtagcaaatcacattttaggaaaattcattttcagtcctgttgcttattaccagttgtcttatgtaagaatagaaattcaagtagtagaatgtctttaatttcactttttgcttcttgaaggagtgtatggccagcttatgccttgctgactccatgacatgatgagagtcaggcttaygaagacagatcccattaattttttttctccagtcataccttttgtctctcacccagtgcctctctcttcattcccatttccatcaaatcttggtcacaggatatgctgactcctactatttactgcattatgtttttattaactcattgtaagtcatagagtcatgtgtagattttaactatctatgaagggcaagattaagtctaggctgtcctctttcctcattggaaattgagctaattcatcatgttgcagtttacagttagatactcttttgacccagcacctggttctcttgtacactcccggagctgaatcctc

SEQ ID NO: 579093 - DNA, 613 bp, Homo sapiens
tttctcatttaattttttttacacccttgttgaaaatcagttgaccataaaagtgtgtgtttgtttttggattctcagttctaatatattgagctatgtctatccttatgccagtagcaaatcacattttaggaaaattcattttcagtcctgttgcttattaccagttgtcttatgtaagaatagaaattcaagtagtagaatgtctttaatttcactttttgcttcttgaaggagtgtatggccagcttatgccttgctgactccatgacatgatgagagtcaggcttatgaagacagatcccattaattttttttctccagtcataccttttgtctctcacccagtgcctctctcttcattcccatttccatcaaatcttggtcacaggatatgctgactcctactatttactgcattatgtttttattaactcattgtaagtcatagagtcatgtgtagattttaactatctatgaagggcaagattaagtctaggctgtcmtctttcctcattggaaattgagctaattcatcatgttgcagtttacagttagatactcttttgacccagcacctggttctcttgtacactcccggagctgaatcctc

SEQ ID NO: 579094 - DNA, 526 bp, Homo sapiens
gaattctagttattaaatttttgttttttgctgtccatgtgtgagtgctgaaataccagatcctcaaattaatctgaatattgccaagggatkgcacatggggattcatgttccgtgtcagcttttcaatatactgggtaaaacttactaaaatacaacagaggatcttagctctactgaaccaagaattggacagctctttttgtaaagagccagttagtaaatattttaggccttgtgaattataaagggcataagtgtggatgcatttcaaggaaatttccttatgaaaacaggcagtgggctggatttgctccacaagcaccgatttgttgatccttgtgctaaaaccaaggtgctgttatgcagtgaatcctctttttaaaggtaccctacatgcatgccattatcctttcttttaaaagataatgtatttcagtaggaaacacaccatatttttcaacagtagcttcatataatttagacaaatttgatttacaaaataagattattttctgcccttgtc

SEQ ID NO: 579095 - DNA, 518 bp, Homo sapiens
tccatgtgtgagtgctgaaataccagatcctcaaattaatctgaatattgccaagggatggcacatggggattcatgttccgtgtcagcttttcaatatactgggtaaaacttactaaaatacaacagaggatcttagctctactgaaccaagaattggacagctctttttgtaaagagccagttagtaaatattttaggccttgtgaattataaagggcataagtgtggatgcatttcaaggaaatttccttatgaaaacaggcagtgggctggatttgctccacaagcaccratttgttgatccttgtgctaaaaccaaggtgctgttatgcagtgaatcctctttttaaaggtaccctacatgcatgccattatcctttcttttaaaagataatgtatttcagtaggaaacacaccatatttttcaacagtagcttcatataatttagacaaatttgatttacaaaataagattattttctgcccttgtccccttttattcttgtcatagaattc

SEQ ID NO: 579096 - DNA, 568 bp, Homo sapiens
ctaatgatttccaaatgcgtgtctccagcctagatctctctccttaattccagacttccataccaacctgcctacttgacatctctgtttgattggtcacgaactgttgggtatcacaaacttaccaggtccaagattggggtaccgatattctttctcatacctacccctcacatggtctttcctacttgcattaatggcaactcttgcagttgctctgctagaaactaaggtgtcgtcattgactcccctctctctctgacacctcacatctaatctgtcagcagatcttgtcaggagtacctgaagaatatatccagaagccagtcatatcttccatttccaagccaccaccatctgctctctagaygcatgtaatagactgttaattggtctgtttttttttttaaagaaacctcttttcattaatccttaactcagtggccatacttaaaacataagtcagatgatgtcattcttctgctcagatccatctgattgcctcccatttcactctgagtatgtgtcagggttcctcctcatacctagaaggcaacacacaatatgc

SEQ ID NO: 579097 - DNA, 547 bp, Homo sapiens
agaagaattcgctacatagttaaaaaacaagcaaacaaacaaacaaatgaaaagcaattattaattttgtttcagtttttagtattttcagagacttctgctaaactcctaatctccagtgggawatgtttgtctctttgttaatgtatgtagttatatgatagtgatattctttttttattccttaatctttttttgttcactttctcttccatgcaatgatagtgatataatgtgtgtttacttcataaaaaagtaattacaattttctgctggcaaatccagctttttatattaagactaagtactagactaaatatgtgggaaatttaccaaattattttattttcaaacaaacatataactaatcagaatagtgctatttttgaacaatatataatgactatactgacatttaggaattttaacactaagatttttttcttcccgagacatttccttgatttctttcatgtaatatgtgcctgttatttttaaaacttggtttaatctgtttaaacattattatatttaaaaacaaaaccca

SEQ ID NO: 579098 - DNA, 515 bp, Homo sapiens
aacaagcaaacaaacaaacaaatgaaaagcaattattaattttgtttcagtttttagtattttcagagacttctgctaaactcctaatctccagtgggaaatgtttgtctctttgttaatgtatgtagttatatgatagtgatattctttttttattccttaatctttttttgttcacyttctcttccatgcaatgatagtgatataatgtgtgtttacttcataaaaaagtaattacaattttctgctggcaaatccagctttttatattaagactaagtactagactaaatatgtgggaaatttaccaaattattttattttcaaacaaacatataactaatcagaatagtgctatttttgaacaatatataatgactatactgacatttaggaattttaacactaagatttttttcttcccgagacatttccttgatttctttcatgtaatatgtgcctgttatttttaaaacttggtttaatctgtttaaacattattatatttaaaaaca

SEQ ID NO: 579099 - DNA, 515 bp, Homo sapiens
aacaagcaaacaaacaaacaaatgaaaagcaattattaattttgtttcagtttttagtattttcagagacttctgctaaactcctaatctccagtgggaaatgtttgtctctttgttaatgtatgtagttatatgatagtgatattctttttttattccttaatctttttttgttcactttctcttccatgcaatgatagtgatataatgtgtgtttacttcataaaaaagtaattacaattttctgctggcaaatccasctttttatattaagactaagtactagactaaatatgtgggaaatttaccaaattattttattttcaaacaaacatataactaatcagaatagtgctatttttgaacaatatataatgactatactgacatttaggaattttaacactaagatttttttcttcccgagacatttccttgatttctttcatgtaatatgtgcctgttatttttaaaacttggtttaatctgtttaaacattattatatttaaaaaca

SEQ ID NO: 579100 - DNA, 555 bp, Homo sapiens
tagtcttaaccagaagaattcgctacatagttaaaaaacaagcaaacaaacaaacaaatgaaaagcaattattaattttgtttcagtttttagtattttcagagacttctgctaaactcctaatctccagtgggaaatgtttgtctctttgttaatgtatgtagttatatgatagtgatattctttttttattccttaatctttttttgttcactttctcttccatgcaatgatagtgatataatgtgtgtttacttcataaaaaagtaattacaattttctgctggcaaatccagctttttatattaagactaagtactagactaaatatgtgggaaatttaccaaattattttattttcaaacaaacatataactaatcagaataktgctatttttgaacaatatataatgactatactgacatttaggaattttaacactaagatttttttcttcccgagacatttccttgatttctttcatgtaatatgtgcctgttatttttaaaacttggtttaatctgtttaaacattattatatttaaaaacaaaac

SEQ ID NO: 579101 - DNA, 555 bp, Homo sapiens
tagtcttaaccagaagaattcgctacatagttaaaaaacaagcaaacaaacaaacaaatgaaaagcaattattaattttgtttcagtttttagtattttcagagacttctgctaaactcctaatctccagtgggaaatgtttgtctctttgttaatgtatgtagttatatgatagtgatattctttttttattccttaatctttttttgttcactttctcttccatgcaatgatagtgatataatgtgtgtttacttcataaaaaagtaattacaattttctgctggcaaatccagctttttatattaagactaagtactagactaaatatgtgggaaatttaccaaattattttattttcaaacaaacatataactaatcagaatagtgctatttttgaacaatatataatgactatamtgacatttaggaattttaacactaagatttttttcttcccgagacatttccttgatttctttcatgtaatatgtgcctgttatttttaaaacttggtttaatctgtttaaacattattatatttaaaaacaaaac

SEQ ID NO: 579102 - DNA, 547 bp, Homo sapiens
agaagaattcgctacatagttaaaaaacaagcaaacaaacaaacaaatgaaaagcaattattaattttgtttcagtttttagtattttcagagacttctgctaaactcctaatctccagtgggaaatgtttgtctctttgttaatgtatgtagttatatgatagtgatattctttttttattccttaatctttttttgttcactttctcttccatgcaatgatagtgatataatgtgtgtttacttcataaaaaagtaattacaattttctgctggcaaatccagctttttatattaagactaagtactagactaaatatgtgggaaatttaccaaattattttattttcaaacaaacatataactaatcagaatagtgctatttttgaacaatatataatgactatactgayatttaggaattttaacactaagatttttttcttcccgagacatttccttgatttctttcatgtaatatgtgcctgttatttttaaaacttggtttaatctgtttaaacattattatatttaaaaacaaaaccca

SEQ ID NO: 579103 - DNA, 568 bp, Homo sapiens
cttagtcttaaccagaagaattcgctacatagttaaaaaacaagcaaacaaacaaacaaatgaaaagcaattattaattttgtttcagtttttagtattttcagagacttctgctaaactcctaatctccagtgggaaatgtttgtctctttgttaatgtatgtagttatatgatagtgatattctttttttattccttaatctttttttgttcactttctcttccatgcaatgatagtgatataatgtgtgtttacttcataaaaaagtaattacaattttctgctggcaaatccagctttttatattaagactaagtactagactaaatatgtgggaaatttaccaaattattttattttcaaacaaacatataactaatcagaatagtgctatttttgaacaatatataatgactatactgacatttaggaattttaacactaagatttttttcttcccgagacatttccttgatttctttcatgtaatatgtgcctgttatttttaaaacttggtttaatctgtttaaacattattrtatttaaaaacaaaacccaaaacatag

SEQ ID NO: 579104 - DNA, 608 bp, Homo sapiens
gaggcagaattcttgggtttgagttctgggtctgctactgaccagctgtatgggctgaggacagtcacttggcccttctgtgcctattttctttctttataaaattcttaatatgttactgacctcacagaattgttatgaggattatatgagtttgacacatggacagtgctcagaatgatgcacagtacctgcatagtaagtccagaaaaagcttactaatatcatcattaaaaaagggtttcccttatataagaatgtgagtaatattttccaaataggttttagtgcccgtaaaagcttgtttttattgaaaaggacaacaatgagaagaccctggtatatttatttttatcacrtaatgcaggtaacatgtttttttcttttggttttactatgagaaatcttgacctaaatttaattctttgtaattatattagtagtagtaaatttctttatcccttaatgttgctgtttctgtttatagtttaatgtccgttgtagaaaattactgcattttacattacctgtaaaaaaaattacctatacacttgatgaatagaagtaacacaaatgcagacattttatatgataaaacagtagtgtta

SEQ ID NO: 579105 - DNA, 286 bp, Homo sapiens
acgaaatcctcaaagctagacaaatatccacytgcagattccacaaaaagagtgtttcaaaactgctctgtcaaaaaaaagtttcaactctgttagctgagtagatacatcatgaaaaagtttctgacattgcttctatctagcttttattggaagatatttcctttttcaccgtagtcctgagagcgctccaattgtccacttccagatactacaaaaagagtgtttcaaacctgctctatgaaagggactgttcaacactgtgacttcaattgaaacatcccaa

SEQ ID NO: 579106 - DNA, 286 bp, Homo sapiens
acgaaatcctcaaagctagacaaatatccacctgcagattccacaaaaagagtgtttcaaaactgctctgtcaaaaaaaagtttcaactctgttagctgagtagatacatcatgaaaaagtttctgacattgcttctatctagcttttattggaagatatttcctttttcaccgtagtcctgagagcgctccaawtgtccacttccagatactacaaaaagagtgtttcaaacctgctctatgaaagggactgttcaacactgtgacttcaattgaaacatcccaa

SEQ ID NO: 579107 - DNA, 340 bp, Homo sapiens
tagctgagtagatacatcatgaaaaagtttctgacattgcttctatctagcttttattggaagatatttcctttttcaccgtagtcctgagagcgctccaattgtccacttccagatactacaaaaagagtgtttcaaacctgctctatgaaagggactgttcaacactgtgacttcaattgaaacatcccaatgaagcttctgagaatgctactgtctagagtttatatgaagacaatcccatttccamcgaaatcctcaaagctatccaaatatcctcttgcagattttacaaaaagagtgtttcaaaacggctctatcaaaagaaaggttcatcact

SEQ ID NO: 579108 - DNA, 225 bp, Homo sapiens
gtgacttgaatgctaatttcacaaagaastttctgggaatgctgctgtctgctttttatatgtaatcccgtttccaacgaaatcctcaaagctagacaaatatccacttgcagattccacaaaaatagtgtttcaaaactgctctctcaaaagaatggttcaactcttttagctgagtagatacatcatgaaaaagtttctgatattgcttctatctagctttta

SEQ ID NO: 579109 - DNA, 225 bp, Homo sapiens
gtgacttgaatgctaatttcacaaagaactttctgggaatgctgctgtctgctttttatatgtaatcccgtttccaacgaaatcctcaaagctagacaaatatccacttgcagattccacaaaaatagtgtttcaaaactgctctctcaaaagaawggttcaactcttttagctgagtagatacatcatgaaaaagtttctgatattgcttctatctagctttta

SEQ ID NO: 579110 - DNA, 219 bp, Homo sapiens
gtgacttgaatgcaaacatcacaaagaagtttctgggaatgctgctgcctgctttttatatgtaatcccgtttccaacgaaatcctcaaaggtagataaatatccacttgcagattccacaaaaagagtgtttcaaaactgctctctcaaaagaaaggttcaactctgttagctgagtagatacatcatgaaaaastttctgacattgcttctatctag

SEQ ID NO: 579111 - DNA, 225 bp, Homo sapiens
gtgacttgaatgctaatttcacaaagaactttctgggaatgctgctgtctgctttttatatgtaatcccgtttccaacgaaatcctcaaagctagacaaatatccacttgcagattccacaaaaatagtgtttcaaaactgctctctcaaaagaatggttcaactcttttagctgagtagatacatcatgaaaaagtttctsatattgcttctatctagctttta

SEQ ID NO: 579112 - DNA, 545 bp, Homo sapiens
acaaattcagtgttgatgagagcccatttcatggttcatagatggtgccttctttctatgtcctcacatagtggaaggcacacaagaactccattgagcttcttttataaaggcactaatccgattcataagggctcggcccccaagacctggtcacctcccaagtgttctgctctccctgatctgtgtcatatacagactctcttggattccttaccaattgcttgagagatcacagtgggtttgtggagaaaaagttttcaagatgatggatctttcccaacttctgcagctgtcagccgtctcccaatctgaccagccccactttgtctttaggaatttattgattattccagctttacttgtcatagtggtgtctatttgcatctgtcctatgtaagtgcatctgtcctctttctccttgcaggtgcttgttttccctcacattttkactcagttcttggcaacctcgttgctataaaaataaagtcatgactttgaggttagtttggttctttcattgttgtcaggttaggaaccctatt

SEQ ID NO: 579113 - DNA, 545 bp, Homo sapiens
acaaattcagtgttgatgagagcccatttcatggttcatagatggtgccttctttctatgtcctcacatagtggaaggcacacaagaactccattgagcttcttttataaaggcactaatccgattcataagggctcggcccccaagacctggtcacctcccaagtgttctgctctccctgatctgtgtcatatacagactctcttggattccttaccaattgcttgagagatcacagtgggtttgtggagaaaaagttttcaagatgatggatctttcccaacttctgcagctgtcagccgtctcccaatctgaccagccccactttgtctttaggaatttattgattattccagctttacttgtcatagtggtgtctatttgcatctgtcctatgtaagtgcatctgtcctctttctccttgcaggtgcttgttttccctcacattttgactcagttcttggcaacctcgttgctataaaaataaagtcatgaytttgaggttagtttggttctttcattgttgtcaggttaggaaccctatt

SEQ ID NO: 579114 - DNA, 545 bp, Homo sapiens
acaaattcagtgttgatgagagcccatttcatggttcatagatggtgccttctttctatgtcctcacatagtggaaggcacacaagaactccattgagcttcttttataaaggcactaatccgattcataagggctcggcccccaagacctggtcacctcccaagtgttctgctctccctgatctgtgtcatatacagactctcttggattccttaccaattgcttgagagatcacagtgggtttgtggagaaaaagttttcaagatgatggatctttcccaacttctgcagctgtcagccgtctcccaatctgaccagccccactttgtctttaggaatttattgattattccagctttacttgtcatagtggtgtctatttgcatctgtcctatgtaagtgcatctgtcctctttctccttgcaggtgcttgttttccctcacattttgactcagttcttggcaacctcgttgctataaaaataaagtcatgactttgargttagtttggttctttcattgttgtcaggttaggaaccctatt

SEQ ID NO: 579115 - DNA, 605 bp, Homo sapiens
atcataagaacactgaactcattatactcataacacacaatatagactattaaaaatgtgaataggattttaaaaatttatattgtagtaaaaagggggtcaacgctttaggaagacatagctattacaatcatgtatgcacagatatgagctaaattgtttcctctatatagatgctgcaattcyaaccactgaatatgacctcattaggaaataggttctttgcagctgatcaagttaagatacaatcagatgagcctgaattcagtatgactgatgtccttattaaaagaagaactttgagtagagggagacatacacacagggagagtaccatgtgattatgagggcagagattagccaaggaatgccaaagactgccactaaaccatcagaagcgagaaacaaggcatagaacaggctttctctcatagccctggaagggaccatccctgctgacacctcaatctcagacttttagcttccaggactataagactataaatgtatgttgttcatggcacccagtttgtgttacttggttatggcagccctagaaaactaatacatgaactaataacaaagcataataacatgaagcaaaa

SEQ ID NO: 579116 - DNA, 554 bp, Homo sapiens
atactcataacacacaatatagactattaaaaatgtgaataggattttaaaaatttatattgtagtaaaaagggggtcaacgctttaggaagacatagctattacaatcatgtatgcacagatatgagctaaattgtttcctctatatagatgctgcaattctaaccactgaatatgacctcattaggaaatargttctttgcagctgatcaagttaagatacaatcagatgagcctgaattcagtatgactgatgtccttattaaaagaagaactttgagtagagggagacatacacacagggagagtaccatgtgattatgagggcagagattagccaaggaatgccaaagactgccactaaaccatcagaagcgagaaacaaggcatagaacaggctttctctcatagccctggaagggaccatccctgctgacacctcaatctcagacttttagcttccaggactataagactataaatgtatgttgttcatggcacccagtttgtgttacttggttatggcagccctagaaaactaatacatgaactaa

SEQ ID NO: 579117 - DNA, 605 bp, Homo sapiens
atcataagaacactgaactcattatactcataacacacaatatagactattaaaaatgtgaataggattttaaaaatttatattgtagtaaaaagggggtcaacgctttaggaagacatagctattacaatcatgtatgcacagatatgagctaaattgtttcctctatatagatgctgcaattctaaccactgaatatgacctcattaggaaataggttctttrcagctgatcaagttaagatacaatcagatgagcctgaattcagtatgactgatgtccttattaaaagaagaactttgagtagagggagacatacacacagggagagtaccatgtgattatgagggcagagattagccaaggaatgccaaagactgccactaaaccatcagaagcgagaaacaaggcatagaacaggctttctctcatagccctggaagggaccatccctgctgacacctcaatctcagacttttagcttccaggactataagactataaatgtatgttgttcatggcacccagtttgtgttacttggttatggcagccctagaaaactaatacatgaactaataacaaagcataataacatgaagcaaaa

SEQ ID NO: 579118 - DNA, 605 bp, Homo sapiens
atcataagaacactgaactcattatactcataacacacaatatagactattaaaaatgtgaataggattttaaaaatttatattgtagtaaaaagggggtcaacgctttaggaagacatagctattacaatcatgtatgcacagatatgagctaaattgtttcctctatatagatgctgcaattctaaccactgaatatgacctcattaggaaataggttctttgcagctgatcaagttaagatacaatcagatgagcctgaattcagtatgactgatgtccttattaaaagaagaamtttgagtagagggagacatacacacagggagagtaccatgtgattatgagggcagagattagccaaggaatgccaaagactgccactaaaccatcagaagcgagaaacaaggcatagaacaggctttctctcatagccctggaagggaccatccctgctgacacctcaatctcagacttttagcttccaggactataagactataaatgtatgttgttcatggcacccagtttgtgttacttggttatggcagccctagaaaactaatacatgaactaataacaaagcataataacatgaagcaaaa

SEQ ID NO: 579119 - DNA, 605 bp, Homo sapiens
atcataagaacactgaactcattatactcataacacacaatatagactattaaaaatgtgaataggattttaaaaatttatattgtagtaaaaagggggtcaacgctttaggaagacatagctattacaatcatgtatgcacagatatgagctaaattgtttcctctatatagatgctgcaattctaaccactgaatatgacctcattaggaaataggttctttgcagctgatcaagttaagatacaatcagatgagcctgaattcagtatgactgatgtccttattaaaagaagaactttgagtagagggagacatacacacagggagagtaccatgtgattatgagggcagagattagccaaggaatgccaaagactgccactaaaccatcagaagygagaaacaaggcatagaacaggctttctctcatagccctggaagggaccatccctgctgacacctcaatctcagacttttagcttccaggactataagactataaatgtatgttgttcatggcacccagtttgtgttacttggttatggcagccctagaaaactaatacatgaactaataacaaagcataataacatgaagcaaaa

SEQ ID NO: 579120 - DNA, 600 bp, Homo sapiens
atctaggtctgtctgaccttaactatgttccttccacagagccacgttcattccatagaggaacccaccacctataaaaccaggaaagagacaaagccagaagtgcagggtggatttcttaacacaagctcactgcgacctctagtcctcatcacgctgacactaagcttaaacccagacccttctacagttttgtctacaaagcacaatttgcccaaagcctttacaaacaccaacascctttctttcagatatggcagcagggtcacatcttatacggccctgaccacattttgtctcctctgccatccccatctctctgactcagtcctcgcttgcagccataaaaaaggatgagttcatgtcctttgtagggacatggatgaagctggaaaccatcattctcagcaaactatcacaaggacaaagaaaccaatcactgcatgttctcactcacaggtgggaattgaacaatgagaacacatggacacaggaaggggaacatcacacaccagggcctgtcgtggggtggggggagcggtgagggatagcattaggaggtacacctaatgtaaatgacgagttaatgggtgcagcaca

SEQ ID NO: 579121 - DNA, 290 bp, Homo sapiens
ggaactatcatgagtatttccttcttcttttgttaaaaacatgtttgtgcatgtatgcacttgtactaagaaaatatcttcatttcatttcccttttctttatcaggtgacatagatttgctgacctcatatcagcatttaagtattgtttactttatgtaagagtatttgggttggggatgggtgcatttccagttgtaggaaggatagtttattatgttaggggtaattatgacctwactattgtctgtattttaagattatgtatgatctcaggagatgtgtgtggg

SEQ ID NO: 579122 - DNA, 572 bp, Homo sapiens
ctgatgatctatttcttttattttaggtcatttatttcccctgggttgcctacactcgcttcttcccactcccctatgaaggacaatataagcctctggacctcactaggtcagggcatgtccctgcttgcactatccatgacactttcctcttttactctttagcaatgagggaatgtcatccttacccagatgccagccacctgtctcacatccaggacagmgagtctccatctcctctccagcaaatacccatgtatgtgggcatggtggcatgcccctgtgatcccagctactccataggcttagggggcagaatcacttgtgcttgagaattcaaggttgcaaggagccatgatcacaccactgcacttcatgctgggtaactgagaccctgtgatttttcgcctacattttacagaattttttttttttgcctctttcttctattaatttatgttttgtccattcattttctgcaaacctttagagggcaaataggaagtttccctttttaacgtggtggctcacgcctgtaatcccagcactttgggaggccgaggtgagcagac

SEQ ID NO: 579123 - DNA, 572 bp, Homo sapiens
ctgatgatctatttcttttattttaggtcatttatttcccctgggttgcctacactcgcttcttcccactcccctatgaaggacaatataagcctctggacctcactaggtcagggcatgtccctgcttgcactatccatgacactttcctcttttactctttagcaatgagggaatgtcatccttacccagatgccagccacctgtctcacatccaggacagcgagtctccatctcctctccagcaaatacccatgtatgtgggcatggtggcatgcccctgtgatcccagctactccataggcttagsgggcagaatcacttgtgcttgagaattcaaggttgcaaggagccatgatcacaccactgcacttcatgctgggtaactgagaccctgtgatttttcgcctacattttacagaattttttttttttgcctctttcttctattaatttatgttttgtccattcattttctgcaaacctttagagggcaaataggaagtttccctttttaacgtggtggctcacgcctgtaatcccagcactttgggaggccgaggtgagcagac

SEQ ID NO: 579124 - DNA, 572 bp, Homo sapiens
ctgatgatctatttcttttattttaggtcatttatttcccctgggttgcctacactcgcttcttcccactcccctatgaaggacaatataagcctctggacctcactaggtcagggcatgtccctgcttgcactatccatgacactttcctcttttactctttagcaatgagggaatgtcatccttacccagatgccagccacctgtctcacatccaggacagcgagtctccatctcctctccagcaaatacccatgtatgtgggcatggtggcatgcccctgtgatcccagctactccataggcttagggggsagaatcacttgtgcttgagaattcaaggttgcaaggagccatgatcacaccactgcacttcatgctgggtaactgagaccctgtgatttttcgcctacattttacagaattttttttttttgcctctttcttctattaatttatgttttgtccattcattttctgcaaacctttagagggcaaataggaagtttccctttttaacgtggtggctcacgcctgtaatcccagcactttgggaggccgaggtgagcagac

SEQ ID NO: 579125 - DNA, 473 bp, Homo sapiens
gcagtggtgcaatctcggctcactgcaacttccacctctccagttcaagcgattatcttgcctcggcctccaaagtagctgggattacaggcacatgccatcatgcccggctaatttttgtatttttagtagagacagggtttcacaatgttgggtcagctggtctcgaactcctgacctcaagtgatctgcccgcctcggccttccaaagtgctgagattatagacatgggccaccmtgcccagcctaaatttgctttaatttggagaagtactggtctagaaaacacaaattccaaggagactcaggttcttaagttgatttcttgagtaaaagttcttcaaatgcattctccaagattaatttttttttttttttactttttaaattgacaaagattatacatattcatggctatacggggatgtttcagtacatgtagatggtgatcagatcagggtaattagcatatc

SEQ ID NO: 579126 - DNA, 473 bp, Homo sapiens
gcagtggtgcaatctcggctcactgcaacttccacctctccagttcaagcgattatcttgcctcggcctccaaagtagctgggattacaggcacatgccatcatgcccggctaatttttgtatttttagtagagacagggtttcacaatgttgggtcagctggtctcgaactcctgacctcaagtgatctgcccgcctcggccttccaaagtgctgagattatagacatgggccaccatgcccagcctaaatttgctttaatttggagaagtactggtctagaaaacacaaattccaaggagactcaggttcttaagttgatttcttgagtamaagttcttcaaatgcattctccaagattaatttttttttttttttactttttaaattgacaaagattatacatattcatggctatacggggatgtttcagtacatgtagatggtgatcagatcagggtaattagcatatc

SEQ ID NO: 579127 - DNA, 516 bp, Homo sapiens
ccgtaattcatgacatgggaaaattatcataacggaaaaagaagcaagctatatatagtgcatgatcctatacacacacatacayacatacatatttcctatccctttatatgcataagaaaacaagcgggaggaaagtcatatctttagtcaaatcttgtttactaatgtactattaatgattatcttttctttttctttatacctttttgcatttttcaatttcctaaaatagccttacatgccttttatcaccaggagaaaaattacttctaaagtaatttcagtcaacatgcatactaagaactcttcagatttatctgttagaagctgtgcatgaatgccagtccttgcatctgtcttggaactcacagagagctcttttcccatggctttaagcaatactcaaaaagactagcatacctgaatttcctagtcctatgtttttttcatccaacagccagtcttgtatttctagctgttttctaaacatttcaaccaaaccattttacagat

SEQ ID NO: 579128 - DNA, 462 bp, Homo sapiens
tatacacacacatacacacatacatatttcctatccctttatatgcataagaaaacaagcgggaggaaagtsatatctttagtcaaatcttgtttactaatgtactattaatgattatcttttctttttctttatacctttttgcatttttcaatttcctaaaatagccttacatgccttttatcaccaggagaaaaattacttctaaagtaatttcagtcaacatgcatactaagaactcttcagatttatctgttagaagctgtgcatgaatgccagtccttgcatctgtcttggaactcacagagagctcttttcccatggctttaagcaatactcaaaaagactagcatacctgaatttcctagtcctatgtttttttcatccaacagccagtcttgtatttctagctgttttctaaacatttcaaccaaaccattttacagataactcatacagtca

SEQ ID NO: 579129 - DNA, 516 bp, Homo sapiens
ccgtaattcatgacatgggaaaattatcataacggaaaaagaagcaagctatatatagtgcatgatcctatacacacacatacacacatacatatttcctatccctttatatgcataagaaaacaagcgggaggaaagtcatatctttagtcaaatcttgtttactaaygtactattaatgattatcttttctttttctttatacctttttgcatttttcaatttcctaaaatagccttacatgccttttatcaccaggagaaaaattacttctaaagtaatttcagtcaacatgcatactaagaactcttcagatttatctgttagaagctgtgcatgaatgccagtccttgcatctgtcttggaactcacagagagctcttttcccatggctttaagcaatactcaaaaagactagcatacctgaatttcctagtcctatgtttttttcatccaacagccagtcttgtatttctagctgttttctaaacatttcaaccaaaccattttacagat

SEQ ID NO: 579130 - DNA, 462 bp, Homo sapiens
tatacacacacatacacacatacatatttcctatccctttatatgcataagaaaacaagcgggaggaaagtcatatctttagtcaaatcttgtttactaatgtactattaatgattatcttttctttttctttatacctttttgcatttttcaatttcctaaaatagccttacatgccttttatcaccaggagaaaaattacttctaaagtaatttcagtcaacatgcatactaagaactcttcagatttawctgttagaagctgtgcatgaatgccagtccttgcatctgtcttggaactcacagagagctcttttcccatggctttaagcaatactcaaaaagactagcatacctgaatttcctagtcctatgtttttttcatccaacagccagtcttgtatttctagctgttttctaaacatttcaaccaaaccattttacagataactcatacagtca

SEQ ID NO: 579131 - DNA, 462 bp, Homo sapiens
tatacacacacatacacacatacatatttcctatccctttatatgcataagaaaacaagcgggaggaaagtcatatctttagtcaaatcttgtttactaatgtactattaatgattatcttttctttttctttatacctttttgcatttttcaatttcctaaaatagccttacatgccttttatcaccaggagaaaaattacttctaaagtaatttcagtcaacatgcatactaagaactcttcagatttatctgytagaagctgtgcatgaatgccagtccttgcatctgtcttggaactcacagagagctcttttcccatggctttaagcaatactcaaaaagactagcatacctgaatttcctagtcctatgtttttttcatccaacagccagtcttgtatttctagctgttttctaaacatttcaaccaaaccattttacagataactcatacagtca

SEQ ID NO: 579132 - DNA, 607 bp, Homo sapiens
actcaaatcttgttgactgatccagtgagaaatgaccaacttcagttccagcctctctttaayatgtacatagcaatttgggcaagtcaagctccatcctgaaggacataataggggactctttaagcacattattatgaaggcccttcagggataacaccagagtgatgaggtgccctataccagggataatggagacagagttcttgggattcatcactggggtcctcaaagcatcttccaagggcataataaggaaggactcaaacacctttgaatctccgtgagaccaggcatgaggtcttttgaaagagttctttaactggagtgaatgtcaaagagaagtataataaaataaaagacctgagtagggtcccccttgttcataaaatgacactacctaaatcaccaaatctcactgagccttggtttaactcaagaggttccatgccactataagaggtggtaactgccaactgataggaaatattttcatatgcatagtcacagtgccccatatttatgaacttcttaagagtcttcaaaaagctttctatatacattatcctttactttctaacttttctaaatacaaggtgagagagac

SEQ ID NO: 579133 - DNA, 428 bp, Homo sapiens
taggaacgtagagatttcaggatcgaacactgggattccctcagcactaaaggaggaaaattgcaaacagagctgaaagtgcaatgtggaaaggtcaggctgaggaaggttcttagccagcagaccaagggcagaaaggacactgcctcctcagtctcccactagggaacttgtgattcttgtcccctgacctcagaattccttgttatgtttgttttgtctccaagggaagggtttgaattacagaatttaaggctagagtgggcctcctgcagttaacattaaccctctctctccttcactggccgagstgaagtctgggaccatgtagttctgacgtccgctctctcgggggatcaccagttcacccacctcacccggcaagctgggccctagtttggcaacaggcatcttccacccacctggga

SEQ ID NO: 579134 - DNA, 428 bp, Homo sapiens
taggaacgtagagatttcaggatcgaacactgggattccctcagcactaaaggaggaaaattgcaaacagagctgaaagtgcaatgtggaaaggtcaggctgaggaaggttcttagccagcagaccaagggcagaaaggacactgcctcctcagtctcccactagggaacttgtgattcttgtcccctgacctcagaattccttgttatgtttgttttgtctccaagggaagggtttgaattacagaatttaaggctagagtgggcctcctgcagttaacattaaccctctctctccttcactggccgagctgaagtctgggaccatgtagttctgacgtccrctctctcgggggatcaccagttcacccacctcacccggcaagctgggccctagtttggcaacaggcatcttccacccacctggga

SEQ ID NO: 579135 - DNA, 428 bp, Homo sapiens
taggaacgtagagatttcaggatcgaacactgggattccctcagcactaaaggaggaaaattgcaaacagagctgaaagtgcaatgtggaaaggtcaggctgaggaaggttcttagccagcagaccaagggcagaaaggacactgcctcctcagtctcccactagggaacttgtgattcttgtcccctgacctcagaattccttgttatgtttgttttgtctccaagggaagggtttgaattacagaatttaaggctagagtgggcctcctgcagttaacattaaccctctctctccttcactggccgagctgaagtctgggaccatgtagttctgacgtccgctctctcgggggatcaccagttcacccayctcacccggcaagctgggccctagtttggcaacaggcatcttccacccacctggga

SEQ ID NO: 579136 - DNA, 630 bp, Homo sapiens
gttcactgcagcctcgagcaaacctcccaccttagcctcccaggtagctgggaccccaggtgcgcaccaccacacctggttaatattttattatttgcagagatggagtcttgctattctgcccaggctggtctcaaactcctgggctcaagcaatcctcctgcattggcaacccaaaatgctgggatgacagatatgagccacagtgcccaaactatttatttatttatttatttatttatttatttaacaaagacaaggtctcactatgttgcccaggctgatcaactcctggactcaaatgattctccaaacttggcctctcaaaatgttgggattacaggtatgagccaccatgcctggcctaaaaatagtattatatttttgtatcatataattttcaattaggtaatatgaatattctggacaggaaatacacccttaataacataggaataaacatttgttacactgagaaaaatctaatagagctaaaattaaaaattaatttggaaaggtcattagatactgatacattcttacatttatacattctttcatatattcatatatccttttaacagtatcaayggtttggagttatgtgtacaaaaccatgacctatatgta

SEQ ID NO: 579137 - DNA, 300 bp, Homo sapiens
caaggccagagaaggaccatggaaaaaacatggccagggagggtccagggcaagggcaaggccagggcagaaccagagccagagcaggccaaagccagggccagggtagggtggggccagtgtagggtgagggtagggccagggcgagttcagggccagggcaggactaagatagcacagggcyaaggcagggccagggcagggccaaaaggaggggccagggccaagcatggccagtgtcagacctggggattgtcagggccagggtcagggtcaaggctgggccagggacagggccag

SEQ ID NO: 579138 - DNA, 300 bp, Homo sapiens
caaggccagagaaggaccatggaaaaaacatggccagggagggtccagggcaagggcaaggccagggcagaaccagagccagagcaggccaaagccagggccagggtagggtggggccagtgtagggtgagggtagggccagggcgagttcagggccagggcaggactaagatagcacagggctarggcagggccagggcagggccaaaaggaggggccagggccaagcatggccagtgtcagacctggggattgtcagggccagggtcagggtcaaggctgggccagggacagggccag

SEQ ID NO: 579139 - DNA, 300 bp, Homo sapiens
caaggccagagaaggaccatggaaaaaacatggccagggagggtccagggcaagggcaaggccagggcagaaccagagccagagcaggccaaagccagggccagggtagggtggggccagtgtagggtgagggtagggccagggcgagttcagggccagggcaggactaagatagcacagggctaaggcagggccagggcagggccaaaaggaggggccagggccaagcatggccagtgtcagacctggggattgtcagggccagggtcagggtcaaggctgrgccagggacagggccag

SEQ ID NO: 579140 - DNA, 480 bp, Homo sapiens
gccaaggcagggcagggctagggtagcacagggcatggccaaaaacagagcagggccatagcagtggcaggactagcaacagggctagggcaagcgctggaccagagcatggtggggacaatacagggccaggacagaggatggcaaggcaggtccagggccatttcatggactcrgtaggcctggggtcaggccagggcagggcaaaggcaaggccagggagaaggcagggccggggccaaggcagtgccagggcagggcaggaccagtgcagggccaatgcagggtgagggcaaggccagggcacggaagggcagggcaggaccaaggaagggccaggagagggccacggcagggtcatggccagaacaagggtatggctggggtcaggaatatggtaggatgagggctgggcccaggctgaggcacgcagggcagagcatggcctgtgcgacgcatggccagagccaggccatagag

SEQ ID NO: 579141 - DNA, 480 bp, Homo sapiens
gccaaggcagggcagggctagggtagcacagggcatggccaaaaacagagcagggccatagcagtggcaggactagcaacagggctagggcaagcgctggaccagagcatggtggggacaatacagggccaggacagaggatggcaaggcaggtccagggccatttcatggactcagtaggcctggggtcaggccagggcagggcaaaggcaaggccagggagaaggcagggccggggccaaggcagtgccagggcagggcaggaccagtgcagggccaatgcagggtgagggcaaggccagggcayggaagggcagggcaggaccaaggaagggccaggagagggccacggcagggtcatggccagaacaagggtatggctggggtcaggaatatggtaggatgagggctgggcccaggctgaggcacgcagggcagagcatggcctgtgcgacgcatggccagagccaggccatagag

SEQ ID NO: 579142 - DNA, 582 bp, Homo sapiens
agggccatttcatggactcagtaggcctggggtcaggccagggcagggcaaaggcaaggccagggagaaggcagggccggggccaaggcagtgccagggcagggcaggaccagtgcagggccaatgcagggtgagggcaaggccagggcacggaagggcagggcaggaccaaggaagggccaggagagggccacggcagggtcatggccagaacaagggtatggctggggtcaggaatatggyaggatgagggctgggcccaggctgaggcacgcagggcagagcatggcctgtgcgacgcatggccagagccaggccatagagatgggagggcaacaccaaggcagagtcagggtagatccagggctgagcagagtcagggcaggtccagagtcgaggcagagctagggcccaagcagggccatggcagcaccagggcagaggagggcagggcaatgcaggactgggccatggcagtgcctggtcaactccagggcagggccagaagcaggacagggccagggccaatgctcaggccagggacagggcatgacaggacgtgccagagcagggctgggccaa

SEQ ID NO: 579143 - DNA, 480 bp, Homo sapiens
gccaaggcagggcagggctagggtagcacagggcatggccaaaaacagagcagggccatagcagtggcaggactagcaacagggctagggcaagcgctggaccagagcatggtggggacaatacagggccaggacagaggatggcaaggcaggtccagggccatttcatggactcagtaggcctggggtcaggccagggcagggcaaaggcaaggccagggagaaggcagggccggggccaaggcagtgccagggcagggcaggaccagtgcagggccaatgcagggtgagggcaaggccagggcacggaagggcagggcaggaccaaggaagggccaggagagggccacggcagggtcatggccagaacaagggtatggctggggtcaggaatatggtaggatgagggctgggcccaggctgaggcacgcagggcagagcatggcctgtgcgasgcatggccagagccaggccatagag

SEQ ID NO: 579144 - DNA, 509 bp, Homo sapiens
agatctagggcacaagcggggcaggctagggcagggcaatggcaagaccaggccatggcagggccagcccaggatagaacagggcacaggcagggcaggggcagggccagggccacggctggggcaggacaaggaccaggactggggtccaggccagggcaagggtatggccagggcagaggtagggccagagccagggtctgrgcaggaccaaggcagtctattgcagggccagggttcagaccagggccagagcagggctgggacagggccagggccagaaccaggaaagggcaatgtcaggacaagggccatggcaggaccagcaacggggctaggaccaggacagggacagggacagggtcagggctagggcagaatagcatgccagggtagagccaggccaaattagggccaggacagggtcaggaccagggctgggccagggtatggcttaagtagtgaagggccagggccagggccagggcccatgccagtgccagcgccgg

SEQ ID NO: 579145 - DNA, 495 bp, Homo sapiens
gcagggcaatggcaagaccaggccatggcagggccagcccaggatagaacagggcacaggcagggcaggggcagggccagggccacggctggggcaggacaaggaccaggactggggtccaggccagggcaagggtatggccagggcagaggtagggccagagccagggtctgagcaggaccaaggcagtctattgcagggccagggttcagaccagggccagagcagggctgggacagggccagggccagaaccaggaaagggcaatstcaggacaagggccatggcaggaccagcaacggggctaggaccaggacagggacagggacagggtcagggctagggcagaatagcatgccagggtagagccaggccaaattagggccaggacagggtcaggaccagggctgggccagggtatggcttaagtagtgaagggccagggccagggccagggcccatgccagtgccagcgccggtccagggcagacgcag

SEQ ID NO: 579146 - DNA, 450 bp, Homo sapiens
agggttcagaccagggccagagcagggctgggacagggccagggccagaaccaggaaagggcaatgtcagracaagggccatggcaggaccagcaacggggctaggaccaggacagggacagggacagggtcagggctagggcagaatagcatgccagggtagagccaggccaaattagggccaggacagggtcaggaccagggctgggccagggtatggcttaagtagtgaagggccagggccagggccagggcccatgccagtgccagcgccggtccagggcagacgcagggccatggccaggtctaggacaaggctggggcagggccaaggtctgggtcagggtcagcacaagaccaggacagagccaggggagggacagggccatggtagggccaggttaaatcagggacaagacacctgcaaatccacttcagggccagggtcag

SEQ ID NO: 579147 - DNA, 495 bp, Homo sapiens
gcagggcaatggcaagaccaggccatggcagggccagcccaggatagaacagggcacaggcagggcaggggcagggccagggccacggctggggcaggacaaggaccaggactggggtccaggccagggcaagggtatggccagggcagaggtagggccagagccagggtctgagcaggaccaaggcagtctattgcagggccagggttcagaccagggccagagcagggctgggacagggccagggccagaaccaggaaagggcaatgtcaggacaagggccrtggcaggaccagcaacggggctaggaccaggacagggacagggacagggtcagggctagggcagaatagcatgccagggtagagccaggccaaattagggccaggacagggtcaggaccagggctgggccagggtatggcttaagtagtgaagggccagggccagggccagggcccatgccagtgccagcgccggtccagggcagacgcag

SEQ ID NO: 579148 - DNA, 509 bp, Homo sapiens
agatctagggcacaagcggggcaggctagggcagggcaatggcaagaccaggccatggcagggccagcccaggatagaacagggcacaggcagggcaggggcagggccagggccacggctggggcaggacaaggaccaggactggggtccaggccagggcaagggtatggccagggcagaggtagggccagagccagggtctgagcaggaccaaggcagtctattgcagggccagggttcagaccagggccagagcagggctgggacagggccagggccagaaccaggaaagggcaatgtcaggacaagggccatggcaggaccagcaayggggctaggaccaggacagggacagggacagggtcagggctagggcagaatagcatgccagggtagagccaggccaaattagggccaggacagggtcaggaccagggctgggccagggtatggcttaagtagtgaagggccagggccagggccagggcccatgccagtgccagcgccgg

SEQ ID NO: 579149 - DNA, 487 bp, Homo sapiens
gcagggcaatggcaagaccaggccatggcagggccagcccaggatagaacagggcacaggcagggcaggggcagggccagggccacggctggggcaggacaaggaccaggactggggtccaggccagggcaagggtatggccagggcagaggtagggccagagccagggtctgagcaggaccaaggcagtctattgcagggccagggttcagaccagggccagagcagggctgggacagggccagggccagaaccaggaaagggcaatgtcaggacaagggccatggcaggaccagcaacggggctaggaccaggacagggacagggacagggtcagggctagggcagaatagcatgccagggtagagccaggccaaattagggccaggacagggtcaggaccagggctgggccagggtatggcttaagtagygaagggccagggccagggccagggcccatgccagtgccagcgccggtccagggc

SEQ ID NO: 579150 - DNA, 450 bp, Homo sapiens
agggttcagaccagggccagagcagggctgggacagggccagggccagaaccaggaaagggcaatgtcaggacaagggccatggcaggaccagcaacggggctaggaccaggacagggacagggacagggtcagggctagggcagaatagcatgccagggtagagccaggccaaattagggccaggacagggtcaggaccagggctgggccagggtatggcttaagtagtgaasggccagggccagggccagggcccatgccagtgccagcgccggtccagggcagacgcagggccatggccaggtctaggacaaggctggggcagggccaaggtctgggtcagggtcagcacaagaccaggacagagccaggggagggacagggccatggtagggccaggttaaatcagggacaagacacctgcaaatccacttcagggccagggtcag

SEQ ID NO: 579151 - DNA, 450 bp, Homo sapiens
agggttcagaccagggccagagcagggctgggacagggccagggccagaaccaggaaagggcaatgtcaggacaagggccatggcaggaccagcaacggggctaggaccaggacagggacagggacagggtcagggctagggcagaatagcatgccagggtagagccaggccaaattagggccaggacagggtcaggaccagggctgggccagggtatggcttaagtagtgaagggccagggccagggccagggcccatgccagtgccagcgccggtccagggcagacgcagggccatggccaggtctaggacaaggctggggcagggccaaggtctgggtcagggtcagcacaagaccaggacagagccaggggagggacagggccatggtagggccaggttaaatcakggacaagacacctgcaaatccacttcagggccagggtcag

SEQ ID NO: 579152 - DNA, 579 bp, Homo sapiens
ggccaggacagggtcaggaccagggctgggccagggtatggcttaagtagtgaagggccagggccagggccagggcccatgccagtgccagcgccggtccagggcagacgcagggccatggccaggtctaggacaaggctggggcagggccaaggtctgggtcagggtcagcacaagaccaggacagagccaggggagggacagggccatggtagggccaggttaaatcagggacaagacacctgcaaatccacttcagggccagggtcagggcagggccagttcagggccagggccaagacagggccagggtcagggctgccagggtcattggcagggccagggccatggcaggaccrgggtcaggagcaggggtcaatgccaggccaaggccacagataggaccaggtctgtgctagggccagtgtgagggccaaggtggggtcagggcagggccaaagggagggcagggccagggcagggtggagcaggcccagggtagcacagggttaaggtagggcacgaccaaccagggcaggtctatggctggggccggggcagggccagagccagggcacg

SEQ ID NO: 579153 - DNA, 539 bp, Homo sapiens
aggcccagggtagcacagggttaaggtagggcacgaccaaccagggcaggtctatggctggggccggggcagggccagrgccagggcacggccaagacagtggcagctccaggacagggccagggttaggaccacagacatgtccaaggccagtgccagggcaagggcaagggcaggggcagggccagggtcatctaagaattagggacaaagccaggcccagagctgggccaggaccggtacctggcagggctagggtctgagacagggccacggcagggccagggccacaaccaggtctgtgctatggccaggtccaacacagtgcccaggtaaggctagggtgaaggccaaggtagggccagggcagggtcaaagccaggctagggccaaggcagggccagggccggcaaggcagggccaggaaagcatagggccagggcagggcagggccaggccagtgccaagacctgggcaggccagggccagggccatagaaacggcctgggcaggaccagggttggggcaggagcaaaaca

SEQ ID NO: 579154 - DNA, 493 bp, Homo sapiens
tgctaatattattcctattttcaaattttggggctcctgttagcctgattttcggatagctgccacaggagttgtccttgatctggataaatccataaaaattgtgaagaaattaaagctaactggttttccatataaaattttcaagaacacttcatttattaaggtctgtatatctatatattctcatatttataaatgtccatattgtttgagaaaaggaatgaaatacctctaaaatgtgggcctcwtatttttagaaaagtgtttgaaatcttttataaacttcatattttgtttgctcctttatattctgtattacttaaatatgctcaaaaaagcagtggtaaacagctatttaggaattgaggctgttactcctgacttccatgtgagactgccacggaactcatattgaaaatatgtcattttatccactaggttttgtttcctactttttaaattggtgttaagaaagggaaaaaaatcacaa

SEQ ID NO: 579155 - DNA, 493 bp, Homo sapiens
tgctaatattattcctattttcaaattttggggctcctgttagcctgattttcggatagctgccacaggagttgtccttgatctggataaatccataaaaattgtgaagaaattaaagctaactggttttccatataaaattttcaagaacacttcatttattaaggtctgtatatctatatattctcatatttataaatgtccatattgtttgagaaaaggaatgaaatacctctaaaatgtgggcctcatatttttagaaaagtgtttgaaatcttttataaacttcatattttgtttgctcctttatattctgtattacttaaatatgctcaaaaaagcagtggtaaacagctatttaggaattgaggctgttactcctgacttccatgtgagactgccacrgaactcatattgaaaatatgtcattttatccactaggttttgtttcctactttttaaattggtgttaagaaagggaaaaaaatcacaa

SEQ ID NO: 579156 - DNA, 611 bp, Homo sapiens
ttctctcccacacagacagcagtgatgagcatgcycgtgaactcacatgattattttggggaaaatgaaagagttgtattctttttgaggtagtaattccactttcaggggcaaatacattttgattattttatcacccttcagtgagttgtttttgttctttaatcaaggatgtatgtttgaagtaagaagtaaagcataaagtatacgattttgtgtgtgtgtgtgtgtttatcttgctatacctgtagggaatgtttaattctgccttggaagtggccaaatttgaagatgctgtgattcgaactgtcagtgggataagggggcagatcaagagagcactctgagctccagaaggagctttccaggctagctttgaggataagctgtggatgagcggtgagtgtcttaagtagtgttcagggcagggcgttaccattcatgcttgacttctagccagtgtgacgagaggctggagtcaggtctccagagagttgagcagctccagccttagatctcccagtcttatgcggtgtgcccattcgcctggtgtctgcagccccctggccacacccagtaacagttctgtgatctatgagaatagtttcctt

SEQ ID NO: 579157 - DNA, 540 bp, Homo sapiens
tgctcttgcaagcactctattgaataaaagtgatgaggctggccatccctatcttgtactcaatcttagtggaaaagctttagttgttccccactaactatgattagactgtgggtttttcataaatggtstttattatgttgaggaactttccttctatacataaactattaagaggttttatcaagaaaggttgctaaactttgttaaatgcttttactgaatcaattgaggtgaccatgtcattttatctttcattttgttaatgtgatatatcacattgattgatttacatattttaaaccagccttgcatgccagggataaatcccacttaaacacgatgtataatgtttttgatgtgttgttgaattctatttgctaaaatttttttaggatgtttgcatcagtatttaatttattggagaagttgacctgtagtttttgtttggtgtgtgtgtgtgtgtgtgtgtgtgtgtgtgtgtgtgtgtgtgtgtgttttggtttggcttaggtattaaggtgatactggcctggtaaa

SEQ ID NO: 579158 - DNA, 540 bp, Homo sapiens
tgctcttgcaagcactctattgaataaaagtgatgaggctggccatccctatcttgtactcaatcttagtggaaaagctttagttgttccccactaactatgattagactgtgggtttttcataaatggtctttattatgttgaggaactttccttctatacataaactattaagaggttttatcaagaaakgttgctaaactttgttaaatgcttttactgaatcaattgaggtgaccatgtcattttatctttcattttgttaatgtgatatatcacattgattgatttacatattttaaaccagccttgcatgccagggataaatcccacttaaacacgatgtataatgtttttgatgtgttgttgaattctatttgctaaaatttttttaggatgtttgcatcagtatttaatttattggagaagttgacctgtagtttttgtttggtgtgtgtgtgtgtgtgtgtgtgtgtgtgtgtgtgtgtgtgtgtgtgttttggtttggcttaggtattaaggtgatactggcctggtaaa

SEQ ID NO: 579159 - DNA, 540 bp, Homo sapiens
tgctcttgcaagcactctattgaataaaagtgatgaggctggccatccctatcttgtactcaatcttagtggaaaagctttagttgttccccactaactatgattagactgtgggtttttcataaatggtctttattatgttgaggaactttccttctatacataaactattaagaggttttatcaagaaaggttgctaaactttgttaaatgcttttactgmatcaattgaggtgaccatgtcattttatctttcattttgttaatgtgatatatcacattgattgatttacatattttaaaccagccttgcatgccagggataaatcccacttaaacacgatgtataatgtttttgatgtgttgttgaattctatttgctaaaatttttttaggatgtttgcatcagtatttaatttattggagaagttgacctgtagtttttgtttggtgtgtgtgtgtgtgtgtgtgtgtgtgtgtgtgtgtgtgtgtgtgtgttttggtttggcttaggtattaaggtgatactggcctggtaaa

SEQ ID NO: 579160 - DNA, 540 bp, Homo sapiens
tgctcttgcaagcactctattgaataaaagtgatgaggctggccatccctatcttgtactcaatcttagtggaaaagctttagttgttccccactaactatgattagactgtgggtttttcataaatggtctttattatgttgaggaactttccttctatacataaactattaagaggttttatcaagaaaggttgctaaactttgttaaatgcttttactgaatcaattgaggtgaccatgtcattttatctttcattttgttaatgtgatatatcacattgattgatttacatattttaaaccagccttgcatgccagggataaatcccacttaaacacgatgtataatgtttttgatgtgttgttgaattctatttgctaaaatttttttaggatgtttgcatcagtatttaatttattggagaagttgacctgtagtttttgtttggtgtgtgygtgtgtgtgtgtgtgtgtgtgtgtgtgtgtgtgtgtgtgttttggtttggcttaggtattaaggtgatactggcctggtaaa

SEQ ID NO: 579161 - DNA, 539 bp, Homo sapiens
gtgcccgaatcataagtgtgcatctagatgaactgtagcacaccaggctgccacgccctggaccaagcagtagccttgacctgtggcctctcccaggcactgctgccccaaccyacaaaatagctactttcccagttcctgatgtagatttgttctgcctggttttgacttctataaaatacagcacattctatttagcctggcttctttggttcagtattacagaacacatccatgttcttgtctatggcagacattgatttatcgtcattgttgagttccattatatgactgtgtcaccatttttccattgatgagtaaaatgatttcctatttttggctgttatcccacggccctgaacactaggtctggatatgggacttgcaggtatgcaggggcacacacacttctgctggaggatccctgggtggggtggagactccagggcacctgtgctctgcttcagtgtggaggcttctgtgttgtgttcggggagcacagtggcttggcctccgccaccagcagcagcttaaagagt

SEQ ID NO: 579162 - DNA, 510 bp, Homo sapiens
gtgcccgaatcataagtgtgcatctagatgaactgtagcacaccaggctgccacgccctggaccaagcagtagccttgacctgtggcctctcccaggcactgctgccccaacctacaaaatagctactttcccagttcctgatgtagatttgttctgcctggttttgacttctataaaatacagcacattctatttagcctggcttctttggttcagtattacagaacacatccatgttcttgtctatggcagacattgatttatcgtcattgttgagttccattatatgactgtgtcaccatttttccattgatgagtaaaatgatttcctatttttggctgttatcccacggccctgaacactaggtctggatatgggacttgcaggtatgcaggggcacacmcacttctgctggaggatccctgggtggggtggagactccagggcacctgtgctctgcttcagtgtggaggcttctgtgttgtgttcggggagcacagtggcttgg

SEQ ID NO: 579163 - DNA, 211 bp, Homo sapiens
ggaatgttcaactctgtgacttgaatgcaaacatcacaaagaagtttctgggaatgctgctgtctgctttttatatgtaatcccgtttccaacgaaatcctcaaagctagacaaatatccacttgcagattccacaaaargagtgtttcaaaactgctctttcaaaacgatgattcaattctgttagttgagggcgcacatcacaaataag

SEQ ID NO: 579164 - DNA, 520 bp, Homo sapiens
aatgtccacatccagatactacaaaaagagtgtttcaaacctgctctatgaaagggaatgttcaactctgtgacttgaatgcaaacatcacaaagaagtttctgggaatgctgctgtctgcttttyttatgtaatcccgtttccaacgaagtcctcaaagctagacaaatatccacttgcagattccacaaaaagagtgtttgaaaactgctgcctcaaaagaaaggttcaactctgttagctgagtagatacatcatgaaaaagtttccgacattgcttctatctagcttttattggaagatattacctttttcaccgtagtccgtagctccaaatgtccacttccagatactacaaaaagagtgtttcaaacctgctctatgaaagggactgttcaacactgtgacttcaattgaaacatcccaatgaagcttctgagaatgctactgtctagggttaatatgaagacaatcccgtttccaacgaaatcctcaaacctatccaaatatcctcttgcag

SEQ ID NO: 579165 - DNA, 520 bp, Homo sapiens
aatgtccacatccagatactacaaaaagagtgtttcaaacctgctctatgaaagggaatgttcaactctgtgacttgaatgcaaacatcacaaagaagtttctgggaatgctgctgtctgcttttcwtatgtaatcccgtttccaacgaagtcctcaaagctagacaaatatccacttgcagattccacaaaaagagtgtttgaaaactgctgcctcaaaagaaaggttcaactctgttagctgagtagatacatcatgaaaaagtttccgacattgcttctatctagcttttattggaagatattacctttttcaccgtagtccgtagctccaaatgtccacttccagatactacaaaaagagtgtttcaaacctgctctatgaaagggactgttcaacactgtgacttcaattgaaacatcccaatgaagcttctgagaatgctactgtctagggttaatatgaagacaatcccgtttccaacgaaatcctcaaacctatccaaatatcctcttgcag

SEQ ID NO: 579166 - DNA, 520 bp, Homo sapiens
aatgtccacatccagatactacaaaaagagtgtttcaaacctgctctatgaaagggaatgttcaactctgtgacttgaatgcaaacatcacaaagaagtttctgggaatgctgctgtctgcttttcttatgtaatccygtttccaacgaagtcctcaaagctagacaaatatccacttgcagattccacaaaaagagtgtttgaaaactgctgcctcaaaagaaaggttcaactctgttagctgagtagatacatcatgaaaaagtttccgacattgcttctatctagcttttattggaagatattacctttttcaccgtagtccgtagctccaaatgtccacttccagatactacaaaaagagtgtttcaaacctgctctatgaaagggactgttcaacactgtgacttcaattgaaacatcccaatgaagcttctgagaatgctactgtctagggttaatatgaagacaatcccgtttccaacgaaatcctcaaacctatccaaatatcctcttgcag

SEQ ID NO: 579167 - DNA, 520 bp, Homo sapiens
aatgtccacatccagatactacaaaaagagtgtttcaaacctgctctatgaaagggaatgttcaactctgtgacttgaatgcaaacatcacaaagaagtttctgggaatgctgctgtctgcttttcttatgtaatcccgtttccaacgaartcctcaaagctagacaaatatccacttgcagattccacaaaaagagtgtttgaaaactgctgcctcaaaagaaaggttcaactctgttagctgagtagatacatcatgaaaaagtttccgacattgcttctatctagcttttattggaagatattacctttttcaccgtagtccgtagctccaaatgtccacttccagatactacaaaaagagtgtttcaaacctgctctatgaaagggactgttcaacactgtgacttcaattgaaacatcccaatgaagcttctgagaatgctactgtctagggttaatatgaagacaatcccgtttccaacgaaatcctcaaacctatccaaatatcctcttgcag

SEQ ID NO: 579168 - DNA, 342 bp, Homo sapiens
acatcatgaaaaagtttccgacattgcttctatctagcttttattggaagatattacctttttcaccgtagtccgtagctccaaatgtccacttccagatactacaaaaagagtgtttcaaacctgctctatgaaagggactgttcaacactgtgacttcaattgaaacatcccaatgaagcttctgagaatgctactgtctagggttaatatgaagacaatcccgtttccaacgaaatcctcaaasctatccaaatatcctcttgcagattttacaaaaagaatgtttcaaaactgctctatcaaaataaagcttcaacactgttagttgagggcgcacat

SEQ ID NO: 579169 - DNA, 627 bp, Homo sapiens
tgtgttctaagaactctattcactggctgttcccctatctctctctcctcaggcctccctactccctaagacacaataatattaaaattaggccagttaataacactacaaagacctccaagtgttcaagagaaaggaaagatcgcacatctttaactttaaattaaaaggtagacaatcatgccttattgtggaagacatctcaaaagctgagataggccaaaagsgagaccttttgtgcaaacggccaaattgtgagtactaaagaaaagttcttgaaagagaccagaagttcttgaaagaggccatgcactctagtgaatgcatgaatggtaaaaaagtgaaacaggcttactgatgatatataaagttgatgggtctggatagaagatcaagccaactacatttccttaaacccaaacctaatccagagtagggccctaactctcttcaattttgtaaaggctaaaagaagtgaagaagctacagaataagtatgagactaacagaggttgcttcatgagatttaaggaaagaagtcatctccataacaaaacagtgcaaggcgaacgaacaagtgctgatgtagaagctgcagcaaattgttcagatctagctaagacaatg

SEQ ID NO: 579170 - DNA, 627 bp, Homo sapiens
tgtgttctaagaactctattcactggctgttcccctatctctctctcctcaggcctccctactccctaagacacaataatattaaaattaggccagttaataacactacaaagacctccaagtgttcaagagaaaggaaagatcgcacatctttaactttaaattaaaaggtagacaatcatgccttattgtggaagacatctcaaaagctgagataggccaaaagggagaccttttgtgcaaacggccaaattgtgagtactaaagaaaagttcttgaaagagaccagaagttcttgaaagaggccatgcactctagtgaatgcatgaatggtaaaaaagtgaaacaggcttactgatgatatataaagttgatgggtctggatagaagatcaagccaactacatttccttaaacccaaacctaatccagagtagggccctaactctcttcaattttgtaaaggctaaaagaagtgaagaagctacagaataagtwtgagactaacagaggttgcttcatgagatttaaggaaagaagtcatctccataacaaaacagtgcaaggcgaacgaacaagtgctgatgtagaagctgcagcaaattgttcagatctagctaagacaatg

SEQ ID NO: 579171 - DNA, 528 bp, Homo sapiens
attcccaataagcagatagagggcctcaaaactgccatccttggaagctactggtgttcagacattttatgacttttctttttaaaataattgtgaagcctccattttagtgaatatctttagttttgctcttctttctttgtaacaaaaggatagttattttcagtcaatcccttgacgccaagtgaaaagagaacaatcttgtataggagaattagacgtatttagaagctaaatacggcactcctgttaagcagttttggaaaatttcaaggcaaagggattcataaggaaactgcagttgggaagagaataacaagcatctgaaagctggagaatagaatgagaggattagttacaagtgcaggtatagaaccagataattgaggcaaagtgggtgcagtgctgtgagttcttcttctgaaggttaccacaatatagaaattaaaggtaagttaaccctgaacactcccaatataattaacaactcagaaaagcacasaaaagataataatacagcaaaaattc

SEQ ID NO: 579172 - DNA, 578 bp, Homo sapiens
tatataaaattatctttaggtatgtgtataaggtgtytataaaacagaaatagagttattgttcaggacttgggtcccatcctcacgatatctcattatgaagatgcaaaaatattacaaaatctaaaatccaaaacacttctggaatgaagtatttcagatgagggatatccaacccatattattttgaatagaaagggtaacagctaccttgtactgtcctttatcttaaaggaaaagctttcagtttttcgtcatcgagtatgatctttactgtgggctcttcatatacaacctttgttatgttaaggtaatttccttctattactagttttgttagtgttttatcatgaaagggtgttgaattttgccaaatgctttttcctatcttctttccagcttttccaaccaagaatgtctttctcaaggaccttagagccatctctttgaaatgtaatcatggaggaagaaagcaccctgatctcccagtctgtctggaagagcaagagcctaattttgataagtgctaagcagcaaacacaaatgacctaatcacattgaccaaacctctccactaa

SEQ ID NO: 579173 - DNA, 465 bp, Homo sapiens
aataagagcacagatctaaagacacaaaaagatttggtggtgagaagattcccttttaactgtctcagggcagttggcatggtttcattgtcccacccaaatcctaaaagagggctgcttacatttttgggaaaagtgttcarggacaaaattctggatttgaaactgccaaaaaccctagatttaaccttttttttcttcaccttgttcctggaaaatagactaggtacggataaaactgtcctgttaaaagtcagtaggcaacagggattcagtatatagaggtaatactaatttaaaaaatgaaaaaaggataaaaggataaatgcttattaaaaattccatatttcactcaagaaacaaaagtacttcatgtaaagagttttccttaaaaaattaagacatggactcattttgtttcatttttatgattgttgctattggtctttaaaatttacatacagg

SEQ ID NO: 579174 - DNA, 527 bp, Homo sapiens
ggaaacactgcctgatgaagtcttcctcttggaggttcacaatgcatattaacacataagaaaagcgtcagtaaatatatctgcttaattttgtttaacagctaaacaaatttacttatataggaatagatttattttatttctctcacacttattcataaaaarccaaagcaatttgcccttgataccagcaagggctgtaaacagtgtagatatggactaaagatttcatctcttgtcatggagactcaatggcaaattaaatcatgtgctccattaccataaaaatcataggcatattttgaagaagtccagacagatttcttttctggtcaagtacattgctgtttgtatgctaattataacttattggtagtggtcaactggaaattttatctcaccagactttttaaaggccaggtgatcagatggaatgcatgagttgcactggcattagttttctttctggaaatgaagacggaaataatacaactcattcagggaagcgcaagtagctctatttgaca

SEQ ID NO: 579175 - DNA, 527 bp, Homo sapiens
tattctggaatgatagaggctgaagaacgggcttaaatgacttctgggagtccttccagtcagtgagcctgaacacaggcatgagagaggcacttggaggaatggtctgctttgtgcagtcaggatttaggtctcactaagcttggggcctctaggctcaggaggcaggagctgaacgagagcccctgaccatctccaaagagagcaaacctcctttgcaatgtccatctgctgtgtgccgggcagtacaygtatcgtggtgggacgaggggagagccttggggactctgtcccagggagaaggactccagactctcacaatgaccacggcctcttgcaggctcagcccctccaaggtctctggggagagctcacatttaggaactgttaacatcatttctagggaacagaaccagctggctgacttattccccttaactttcaatgctattattagggcacatctgtctcggagtgaagtcaccaaggaaaaacccagctgaagaaaatattttcaggcagtcgtc

SEQ ID NO: 579176 - DNA, 396 bp, Homo sapiens
acaacattaaaggttacccagataaactaccgacacaaccattaagccactctactgtccccaccacacctctgtttatgttgggcttgataattccaacaatacatgtttrccctcaaaggtagtagattttatctgtgaacttcctctactccaaaatgattagtgtaattccatacatagctcttagaaatgctaatttttctttgaaaatagtaaaggcttttttatattcttttttaatatttcaaaattgctataaaaagtagtatattcttttttaatatttcaaaattgctataaaaagtaggtttttgccaagtgcagtggctcaagcctgtaatcccagcactttggtaggccaaagtgggaggatcacctgaggtcaggagttcg

SEQ ID NO: 579177 - DNA, 514 bp, Homo sapiens
ttaagggaatgtcatggctggctttatctgtctagtccactaaaacttttgccatgtctacaktaagactctcactttcttaccacttgtgtgttcattggagtagcacttgaatttacttcaagaacttttcctttgtattcacaacttgactatttgatggaagaggcctggctttcagcttatcttggctttcaacataccttcctcactaagcttgattgtttctagcttctgacttaaagtgagagatatgcgactattcctttcatttggacacttagagcccattgttggattattaatcggccttttttcaatatcaatgtgtcacaggaacagggaggcccaaggagagggagagagatgggggaacaaacagccagttggtgtagcagtcagaacatacacaacattgattaagttaattatgttatatgggcttaggatcgtggcaccccaaaacaattacatggtaacatcaaagatctctgatcgcacatcaccgtaacag

SEQ ID NO: 579178 - DNA, 586 bp, Homo sapiens
tggcaggtgggtaccaaggagagcatatgagacaaacccccagaccaaaaggagactgggcatcgctactgtccatggaggtcaggaagatgggcagaccttcatgtggttccttctggtgagagggcatggctatgggtgtgggttgctccactgcagtgaagatgagggatatggtttggacctgtgtctctgccaaaatctcatgtccagttgtaatccccartgttggaggttgggcctgataggaggtgattggatgatgggggtggtttctaatggtttagcatcatttccctagtgctgttatcaggatagagctctcatgagagctggttgtttaacagtgtgtagcatctcctcctgactctcttctttctgccccacccatgtgaagttctccctccccctgtgaagtgctccttcttcctttgccttccgctagatatgcaagtttcctgaggccttgcagaagccgagcagatgccaaaatcaggcttcctgtacagcttgcagaactgtgagccaattaaaccttttttctttataaattacccagtctcaggtatttctttacagcaatgca

SEQ ID NO: 579179 - DNA, 357 bp, Homo sapiens
ccagcttgggcaacatagcaagacccctcactctrcaaaaaaaatttaaaaaatagccaggtatggtggcactcaactgtggtaccagccagtggggagctgaggcaggaagatggcttaaattcagaaggtcgaggcttcagtgagctataagtgcacaagtgctctccagcctgggcgacagagcaggaccctgtcacaatacaaattaagtaatgaaatcataagttagagcctttagcgtttgtagcccttgcaaccccggagccgtgcagtgggatttgcattgctgggaatgaagagacccctgcccagtattgctgcctgactaatcagtgttttaaaaaatatatgaat

SEQ ID NO: 579180 - DNA, 357 bp, Homo sapiens
ccagcttgggcaacatagcaagacccctcactctacaaaaaaaatttaaaaaatagccaggtatggtggcactcaactgtggtaccagccagtggggagctgaggcaggaagatggcttaaattcagaaggtcgaggcttcagtgagctataagtgcacaagtgctctccagcctgggcgacagagcaggaccstgtcacaatacaaattaagtaatgaaatcataagttagagcctttagcgtttgtagcccttgcaaccccggagccgtgcagtgggatttgcattgctgggaatgaagagacccctgcccagtattgctgcctgactaatcagtgttttaaaaaatatatgaat

SEQ ID NO: 579181 - DNA, 575 bp, Homo sapiens
tttcaccgtgttagccaggttggtctcgatctcctgacctcatgatccgcccgccttggcctcccaaagtgctgggattacaggcgtgagccgcccccctggcctggtattggattttttttgcgtcgtaagtacatagcatacaagatttctttttcttttagtcctgcgttagatattcctcagttaactccataactttgggagttgaaagaatcattttcattcatcagttaggtattttgaggcaaagtatctgttacttttattacattataaatgatgaacaagtgatagaattttttctaagacagtgtgtctaactttagtcattcatgtatcatcttcagatttgtcatatccatgtatcatttgttcttttttatttaaaatgtgtatatttactgatttactgtacatttacattttctcccttgctgaatttgatacctcctctgtgcttctaaaatacctrtgtacccagtgttcacttttatcaacatcattaaagtgcctctccactagtatatgatctccttgatgacacactaagtataatgttccaaacatttgcc

SEQ ID NO: 579182 - DNA, 492 bp, Homo sapiens
taactatataagtgatgtaaagtcatcaactagggacacacaaaaaaatgactttcaacaaatcacttaataaatttattttggtgccaattacgtgcagaggactgtgctgagccctggagaaaaaacgttagacaaaatgttccctggctttacagagcttacrttgtaatggggaagacagacaaataagaatttcaaattactatagatgaaataaaaaagcaattgagaagttaaaaatggacagtattagtaacagaggaagatttggaaccaattttggttagaaaaagagacctatctgaggggttggtatttaagttgatgcttaaaagattgagaaaggggctgggcgcagtcgtacgcctataatcccagcactttgggaggccgaggcaggcagatcacctgaggtcaggagtttgagaccagcctgaccaacatggtgaaatcccgtctttactaaaaatacaaaattagccaggcgtg

SEQ ID NO: 579183 - DNA, 454 bp, Homo sapiens
ttttgaatgcagaaatgttggcaaaataactgttatttctagagtgacagaggagaagtataattttccttttctctgctacttcgattagagttcagagaaacggattttagaaattagtatattgatattaagtgctttcatttcttaatagtatcttttctattgagaaggagcggtttccccatcattttccakgaggtacatagtatagggtataagtgctatcagaaggaacttactgttcaaagtattagtggctatccaaacactggaaactatagacaccctgtactcgtttgtttgtttgtttgtttttttggcttttaaatagttgaagcaatagaaattgttttagaaacacatttccttggtctgcgataggattgggaaagattctgctcaatcttgcctacgtattctagtatttgtaacaatatttgtaatgtttgga

SEQ ID NO: 579184 - DNA, 454 bp, Homo sapiens
ttttgaatgcagaaatgttggcaaaataactgttatttctagagtgacagaggagaagtataattttccttttctctgctacttcgattagagttcagagaaacggattttagaaattagtatattgatattaagtgctttcatttcttaatagtatcttttctattgagaaggagcggtttccccatcattttccaggaggtacatagtatagggtataagtgctatcagaaggaacttactgttcaaagtattagtggctatccaaacactggaaactatagacaccctgtactcgtttgtttgtttgtttgtttttttggcttttaaatagttgaagcaatagaaattgttttagaaacacatttccttggtctgcgataggattgggaaagattctgctcaatcttgcytacgtattctagtatttgtaacaatatttgtaatgtttgga

SEQ ID NO: 579185 - DNA, 338 bp, Homo sapiens
tcttgtgcctcagcttcctgagtaactgggattacaggtrcatgccactacacctggttaatttttgtacttttagtagagacggggtttcgccatgttggccaggctggtctcaaactcctggcctcaaatgattcccccgtctcggctttccaaagtgctaaaattacaggcaggagccactgcacccggcctatcagctgcttttaacagggaggatttgccagtctcttcattcagctgtagccagaaggtctgcctcatccccttcactcctttttttttttaacattcttttattttgtaattaaacactcccctaccttactgaatattgg

SEQ ID NO: 579186 - DNA, 608 bp, Homo sapiens
aaaataaatacataaaataattaaaatgcaatgcaatgcaatgcaatgcaaaaaaaattctgctgagtgaaaagaaatgaggtgagaatgtcaagaagatccccatcctccggacaaccagacgccctcaccaacactggccctccctctcgggaggctctgcggcactgtctctcacctccccttgtttycttctgtgaaatgaggcgcccaagctcggccctgcaccccactgctgcccatgtacatgccaccagccctacccaccggcagtagccctaccaatctccatgcccgaaccccatgtgcgccccggcctccccacccacaccggccccactcactttgagcttggactgttgctccaactgcagcgtctgctcctgcatctgtgccacattcagggcgtcctttgatgtggcctgcaggcacaggggcacagagggcgggtgttaggatacacggatgccgctgggcaggcaccacaccagccaaggggctttctggaatccacggccacgcctcgacctcaaagcccccagccctgcctccccatcctccttcctagtcagacctggcgtgacgatgccccatccccagcacacggc

SEQ ID NO: 579187 - DNA, 620 bp, Homo sapiens
gggtggattgggtagtggggcatatgtatctttaaagatggcatagacttggcactctctggcagggtttaaaacccccttctgatttaggacagaacaaggtttagggattcgaatgtatacatttgaatcaagatcaaggagaagctggttagcagcaggaagtatataatgggtgagtgaatggtttggtgtgctgatgttggggcttgatagagggtgttaatttatagaatttatctgcaggaagtgatttctaattatattgcttctttttccctcaaaattggtgacatcattttggatatgcctaagattttgggtaagattttagtgctaaaatgggctttaagaataaaccttctcaaacactttattctagccatcctcactttccagttgaagctcgctacagactaacttgccctaagttcaatatctagttagtattagaacttaygccaaatcagacctgacttctagacaagagctcttttcctttatgccaggttacatccaatcaagaaacagggaatacaaaaagaactattttttatcttttattaatgcataatagtaaaatattcattttatttctttttatatcacaaacatgcatg

SEQ ID NO: 579188 - DNA, 607 bp, Homo sapiens
atgttaaagttaccagatttaacaaagaagctccaaatctcagtggtctaaagagagataactgttttttgttcatgtgggtattcagagtattcggagggtgaccatctacatggacattcaggaatctaccttcttttgttttgcagcctctttccatgcttctccccactcagccagtggatggggaaagagaattttacataggagggctttatgggccaggcctggaagtgacatatatcacatctgtccgtttttccttgaccattactcagtcagaaatcttcatctaattggaagggaggctggaaatggattctagatgtatgactgaggtaaaaagaaaagagtttgggccgggtgcagtggctcacgcctgtaatcccagcactttgggaggccaaggtgggtggatcatgaggtcaagagattgagaccatcctggccaacatggtgaaaccccrtctctactaaaaatgcaaaaattaactaggcatggtggcgtgcccctatagtcccagctacttgggaggctgaggcaggagaatcgcttgaacccgggaggtggaggttgcagtgagctgagatctcaccactgcactac

SEQ ID NO: 579189 - DNA, 607 bp, Homo sapiens
atgttaaagttaccagatttaacaaagaagctccaaatctcagtggtctaaagagagataactgttttttgttcatgtgggtattcagagtattcggagggtgaccatctacatggacattcaggaatctaccttcttttgttttgcagcctctttccatgcttctccccactcagccagtggatggggaaagagaattttacataggagggctttatgggccaggcctggaagtgacatatatcacatctgtccgtttttccttgaccattactcagtcagaaatcttcatctaattggaagggaggctggaaatggattctagatgtatgactgaggtaaaaagaaaagagtttgggccgggtgcagtggctcacgcctgtaatcccagcactttgggaggccaaggtgggtggatcatgaggtcaagagattgagaccatcctggccaacatggtgaaaccccgtctctactaaaaatgcaaaaattaactaggcatggtggcgtgcccctrtagtcccagctacttgggaggctgaggcaggagaatcgcttgaacccgggaggtggaggttgcagtgagctgagatctcaccactgcactac

SEQ ID NO: 579190 - DNA, 556 bp, Homo sapiens
actattagtagttagtttggttgtgatgaaacaacttttaatctgttttattcctgttaacctcagaaacaaaataactgtttttgaccactattattattatctacggctttggaactttaggacaaagtaataagacctgaaataaaaatgagagatataaacattggaagtaaagagaccaccgtattattacttaataatagatggttgtagaaaatccaagaggataaaytgaaaatcagttagtatagacaagagttcactaaggtatcaaaaaagaaaatatataaaactcaatacaaacgtgtaagatttaaagcttgacatggtggtacgtgtcaatagtcctacctacttagaaggttgaggtgtgaggattgcttgaggccaggagttcaatgatgtaatgtgctgtgagcacacctgcgaatagccactcaaaatagcccattgtttgagaccccatctcaaccaaacacacaaccaacaaaccatgtaagattaaaaaacccaaaatatgtagatatgataaaatatgcagtatattgtaaac

SEQ ID NO: 579191 - DNA, 596 bp, Homo sapiens
tattgaggaacattctaaaacataactgaccagtactctgtcaagaacattaaagacaagaaaaacatgaggggctgccacagattacgtggagaagaatgaggaagcagtgtgggatccttgattcgatcctggagcaggaattgatggaattggaataaggtctgtatttgttagaagcaaggaactaggtccarctcacactcaacggcgggagggggggtggtgggggttgcacaagggatttactggggactctctcagaggctgcctatggcaagcagcaaacagcaaagggagagcaagaggaagagcagggttggaagtcagggaggggtaatcacttccattttggacatattgtgtataaaatgttgatgaatctttaggtggagatgtctgtctggaagttggatgttgaacctgaggctcaagtaccagatctgaacaagaggtgaagatttaggtatctttagcctgccagtggcaattaatgccgtagagatagtagtgaacatcactcaaagaaaatgtgcaggctgaagtgaggagtaccaatatttaagatacatgcagataaagaaaagtccaaaaaa

SEQ ID NO: 579192 - DNA, 596 bp, Homo sapiens
tattgaggaacattctaaaacataactgaccagtactctgtcaagaacattaaagacaagaaaaacatgaggggctgccacagattacgtggagaagaatgaggaagcagtgtgggatccttgattcgatcctggagcaggaattgatggaattggaataaggtctgtatttgttagaagcaaggaactaggtccagctcacactcaacggcgggagggggggtggtgggggttgcacaagggatttactggggactctctcagaggctgcctatggcaagcagcaaacagcaaagggagagcaagaggaagagcagggttggaagtcagggaggggtaatcacttccattttggacatattgtgtataaaatgttgatgaatmtttaggtggagatgtctgtctggaagttggatgttgaacctgaggctcaagtaccagatctgaacaagaggtgaagatttaggtatctttagcctgccagtggcaattaatgccgtagagatagtagtgaacatcactcaaagaaaatgtgcaggctgaagtgaggagtaccaatatttaagatacatgcagataaagaaaagtccaaaaaa

SEQ ID NO: 579193 - DNA, 597 bp, Homo sapiens
acaacttatacacaaaaatatggatgtgtctcacaaaggggatgttgagcaaagaaagtcaacacacaaaaaaacacaagctatgtgatttcatttatatacaaatgggaaaactaattaatgggctttagagtccagatattggtttaccttagggtgagtaatgacaagggtggccaaaggaggcttctgagatgctggtsacgttctgtttgtgaaaatttattgagttgtacatttacgatttcgttacttttctacatgtacactatacttgggtttaaaaaattcaaagctctccagtttctggcagtaataaaaacttgttctttgttgcacttatctctcttaggattttaccacctacttgtgtcattgcttcatcagtgcctctgttgccctctagagtctagactgcaagctccatgtaattgggaaattcagtttttaataatcattactacttggtgcctaactcagtatttatcaaatatttgataaattaaaatgtataaatacaatctgcctcagtaattcagagcatgaacctgggaagcaaaggacctatgtgttaaaactcattttgtaagaccagcc

SEQ ID NO: 579194 - DNA, 597 bp, Homo sapiens
acaacttatacacaaaaatatggatgtgtctcacaaaggggatgttgagcaaagaaagtcaacacacaaaaaaacacaagctatgtgatttcatttatatacaaatgggaaaactaattaatgggctttagagtccagatattggtttaccttagggtgagtaatgacaagggtggccaaaggaggcttctgagatgctggtcacgttctgtttgtgaaaatttattgagttgtacatttacgatttcgttacttttctacatgtacactatacttgggtttaaaaaattcaaagctctccagtttctrgcagtaataaaaacttgttctttgttgcacttatctctcttaggattttaccacctacttgtgtcattgcttcatcagtgcctctgttgccctctagagtctagactgcaagctccatgtaattgggaaattcagtttttaataatcattactacttggtgcctaactcagtatttatcaaatatttgataaattaaaatgtataaatacaatctgcctcagtaattcagagcatgaacctgggaagcaaaggacctatgtgttaaaactcattttgtaagaccagcc

SEQ ID NO: 579195 - DNA, 500 bp, Homo sapiens
gctagaacatgaggaaagtgatatcagagtaccagatggggaccttcaagagagytaacttgtccccctcatactttcctgtcccttgccgtaagtctgagcatggacacacccacaagccagccttaaccatgcattctgcatataagaatgtcccagagcagagcttcccaaacttcagttcatggcactgtaaagtttcaataatctttccacagtacccctaggccaaaagaaatagctaatgattcaatttaaaagcagttagtttcaaaaaaacttagtatgtcctgatgatctagtaagcacttgaaacaataacagaaattgagagaaatatttgcattttattcttaatcattactaatacaatttgtccatttgttaagcatcgcacaacttctcaaataccaccaacctcaacactgatttttgcaaaatacttgctttttcaaatcacaacaattgctgaaaaacagcttcacaaagatatgccatca

SEQ ID NO: 579196 - DNA, 417 bp, Homo sapiens
gagcttcccaaacttcagttcatggcactgtaaagtttcaataatctttccacagtacccctaggccaaaagaaatagctaatgattcaatttaaaagcagttagtttcaaaaaaacttagtatgtcctgatgatctagtaagcacttgaaacaataacagaaattgagagaaatatttgcattttattcttaatcattactaatacaatttgtccatttgttaagcatygcacaacttctcaaataccaccaacctcaacactgatttttgcaaaatacttgctttttcaaatcacaacaattgctgaaaaacagcttcacaaagatatgccatcattgaaaggggtgtagtgtgagatctggcattgaaactgatcttatttgcgttgtgggtttctgtgttggaacaattaaca

SEQ ID NO: 579197 - DNA, 569 bp, Homo sapiens
caaggaaggatagaaataagtaattaatttctttggtgtatttttcccctggtgacttgttccaccaatgatccaggtaaattctgaaagccatcctctgctcttccttcttccttgagcccaacagttgattctgcttcaaattcagcaacttatatcttcactgccattaccctaagctcaggccaccagcagctctctccttggccactaaaataattcacctgtttcctcccacatgtctaatccatcccctatycatcctattctctgattgtcagtcatgcttgaaatcctacattggcttcctttggcctttggatattgtttaaccttcctcacaggccttacatgtccctggtaaattggaatgagtgctctttgattgggcccatggaacattgctttactttcttcctgttctggatatgtgcacatgctgtttgctttgcctagaaacctcttgtgccatgctcctggtgaacttttattcagttctcaatttaaatgttcctctcttgggaggactcagtggcttcttagatttggttacatattcctgttacaca

SEQ ID NO: 579198 - DNA, 569 bp, Homo sapiens
caaggaaggatagaaataagtaattaatttctttggtgtatttttcccctggtgacttgttccaccaatgatccaggtaaattctgaaagccatcctctgctcttccttcttccttgagcccaacagttgattctgcttcaaattcagcaacttatatcttcactgccattaccctaagctcaggccaccagcagctctctccttggccactaaaataattcacctgtttcctcccacatgtctaatccatcccctatccatcctattctctgattgtcagtcatgcttgaaatcctacattggcttcctttggcctttggatattgtttaaccttcctcacaggccttacatgtccctggtaaattggaatgagtgctctttgattgggcccatggaacattgctttactttcttcctgttctggatatktgcacatgctgtttgctttgcctagaaacctcttgtgccatgctcctggtgaacttttattcagttctcaatttaaatgttcctctcttgggaggactcagtggcttcttagatttggttacatattcctgttacaca

SEQ ID NO: 579199 - DNA, 561 bp, Homo sapiens
accatattaatgcatgcaaagaatggcaattatgtcatggttgctgccaataacacttgcaactgtaaactgtatgctggatcccgattttacaaatactaaaatgggaggtggtggcaagtgggaagtttttcttacaatcggtaaaatataaagttacacatcctggagcacaaagtaaaatccctacaagatgggatcatcatttttacttctgctaaaataaatgttttaactcaaggatactttcagagcatcttcaaactagtgaaaactctcaattatttccaagtggagtagctcagtggtaggataatgaacrcaaagcctcagctactccaaccgtctggtttgggcacatggctcttcttgagtaaaagaaacttcagagcagagagtgctgcaccaaaggaggcaagagtttcctgaatggtaatactttccattgctccaagctacccagagttgggtgggtggaacagaaaaggctttaaacacaaatattgtaaacacataattgccttaccccacctctacctctccttacaaatagtgaggatg

SEQ ID NO: 579200 - DNA, 561 bp, Homo sapiens
accatattaatgcatgcaaagaatggcaattatgtcatggttgctgccaataacacttgcaactgtaaactgtatgctggatcccgattttacaaatactaaaatgggaggtggtggcaagtgggaagtttttcttacaatcggtaaaatataaagttacacatcctggagcacaaagtaaaatccctacaagatgggatcatcatttttacttctgctaaaataaatgttttaactcaaggatactttcagagcatcttcaaactagtgaaaactctcaattatttccaagtggagtagctcagtggtaggataatgaacgcaaagcctcagctactccaaccgtctggtttgggcacatggctcttcttgagtaaaagaaacttcagagcagagagtgctgcaccaaaggaggcaagagtttcctgaatggtaatactttccattgctccaagctacccagagttgggtgggtggaacagaaaaggctttaaacacaaatattgtaaacacataattgccttacccyacctctacctctccttacaaatagtgaggatg

SEQ ID NO: 579201 - DNA, 549 bp, Homo sapiens
tgtgttttattatgactcamatcagtctccctgaaaatttggaggctagcatttttcaaggatagtttgagcaaagagaaaggggtggctaggcaatgggtgcttgttgccaattggttgggtgtgcaatcataggggtgtgggaaatcgtcctcatgtgagcttagtcacttctggctgggccacaggagtggtctgcagtccaggtggagctatggtcatcatgagacatgcaaaaaaaaaccccgtaaagacatcttgaaaggccaatcttagattctacaacaaggatattatctgcaggagtaactgaggaagttgcaaacctgtgacctccagaataatggcaggtaattgtttatgtctacatgtaagcagaattcaggctcatctcatcttcctagcctggtggtctctcattagctttaaaaatgtgctctagtttggggggaagggctattattatgtaaactatacattaaatgtttcccaaagttagtttggcccaagcctaggaataattaagggcattttggaggctaaaggcta

SEQ ID NO: 579202 - DNA, 590 bp, Homo sapiens
aaactccttctcaaaaaaaaaaaaaagaaacaaacaaagaaaagaaaagtcatatgttaacaggaaaacatgaaaatttagtgaaaataatttaagtatcacggaaacaatatgagaactctaatgtattgtgccactccattataagcattaaagatactcatctaggcttaaagaaatctatgctgcctgcccattttctaactgcaaagctcttcacatcttcaagtaatttttggagctattctgtaactggaaaacttcyattgatacattttcccaagatacttaatattatgaatgggttctggagttgaaaaacccttagtgtacttcaagaatctataccaatgtatcacagcaaggtgaaatttactactactgaaactatctaggcataacttttaatgggatgtgctatgttagctatgataaactataccacactgcaaatgaggacaggctagattactttaaacaaaacacataaaaggcataattaaaatatttcaaataagtcttctttttgaatgaagccaccttacgttattaacgcttaataaaaactatgagaaaatcaagcaccaaag

SEQ ID NO: 579203 - DNA, 569 bp, Homo sapiens
tttctgttataaagcagtgtaaatttctcatgttgatgaaggcataatcttcaaaccttcaccatattttgaaagtcttctatgatttctacaacatgagtctaaagagatgaagcttttccttggggcccaaatagagtcagccacaaaaatagatgtttaagactataggtcatgttgtgccagtgctgaatggcagctctcaagtgtccgaagtattccttttttgatcttgtttttgtatatgttttctatatttgtgtatgtttgtactayacagaaatatctaacttgctggcccaaggaaggaggctctattgtccaggtctagaatttaggtgtcatagcttattttcaatgtcaaaggagcatttgttgaagaagccaattccaaaagcttggatgtctctccatgttgtttcaagtttaacctaatcaggacttccatacatgatttacttttgtttggcaatgatacacagtatctctaaccccatctgtgcttagctaacctagaagtgtaaatcagctgtgcagcagagtgtccactgggtcccatccaacactgt

SEQ ID NO: 579204 - DNA, 534 bp, Homo sapiens
ccagcctgggcaacatggcgaaaccctgactctacaaaaaatacaaaaattagccaggtgtggtggtgcatgttagtaatcccagctactgaggaggctgagatgggaggattgcttgagccgagaaggtggaggtggcagtgagctgagatcataccactgcacttcagcctgggcaacagagcaagagcctgtctcaaaaaaataaaattttatatatatatggtagcacataagttgcccagaagaccagagagccagacacatgtcttaccttctaaatataaaactmaatttcaaaccacagaactggccaaatgaggaaatccccaccccactgagcagtggaggcatggccaaaaacggaagctcacttcccagcatgctttctcatgttcttgacatctgaattgcagccctacaaacatgcatatgattggcagagtctgggtcccatacttgcatcctagctgcataagatcctggaatttgagtctacatctatactggggaggaaaaattcatcatatgaag

SEQ ID NO: 579205 - DNA, 617 bp, Homo sapiens
gaccacatatgattgtgggagaagctgtggaaataagagtctgaatggggcagtggaaggatcagagaaaatctctacccaccccttttgagatttgtgaaggtagacaagtgaggagaatgagagcatgctagaatctgtagcatgtctgcaactgtcactcatctctcctaaatacaacagccgtaagagagcagtggtgctgctttactttttctaaatcttgcattaagtcttttgaccaactccaacctgaaattgtacaggaagtgaatttagggaaatatrgtcctagcttagccaagtagacacagttacaaactactacatccatgttgcagagagtggtagacattgagatgggacagatctgggagccacaaggctgggtgaggagacaccagcagcaggctctgcatgggctgctcagataacactgcaatggatgctgctgctgaggatgagatgagagacacagatgttcttccccatccccgtccctctccccagtgcattgctaccatacatcagcctttccattccaacactcctatccccatcagaactaaggtgcaatcttgggatggaggaagccctggcatgatgagaaaaaaaaa

SEQ ID NO: 579206 - DNA, 528 bp, Homo sapiens
tactacttaccatctgtgtggcctcgacaaatgacttaactactctttgcctcattttccttatttgtataaaataaggatgatgataataactcaaaaggttagtgtgaggattaaatgtgttaacacatgtgaaggcaatcaggctgctagaggattaaagaaagagatgcatacagaatgctcagaactgtgtctggcacctggctctcatgcaatcacggtgagcacttatgagtcttttagaaggctttcctggactcctactttcctttaactcagctaatcagattacggtgttagtgttatgtggcctctgagcaccaaagttcagattcattagatttgggttgggattcagatatgccagtccctttttggcaggcattccaggcgatttgagtggttcccacttagttcgtctgggatggtatttctcaattcttcactataagatacgaggctattttctccagaccctgaactctgtgagggcaggagctrcccctgtgttttttttaatcagtg

SEQ ID NO: 579207 - DNA, 412 bp, Homo sapiens
cctcccagcgcagctcgggccacttggacgccgcgggctytgaggccggagctgcagccgctgcgcctcgagctccccgcgccctgacgcggtccacccaggctcagctcccttgcgcgccccgtcttcgcctatttcccgcaactttacaaaaaaaaaaaaaaaaaggacgacctccccgctttggtgaggcggtctgggtttagagacgcacctccggggaaatctgctatctttctgccccctctagagcggggccagaagcttcgaggaccgggagggagaatttggccgcgccccccagctcaggtgcgcggcgggccagagattcctagtcgagggtcctgggaggtagacgcgtgttccaagaccccacccttccaagagctccttaatggattcagtgggcact

SEQ ID NO: 579208 - DNA, 545 bp, Homo sapiens
ggactccaccagggacacgactccttcattcgtcgaatcttggacattttgcaagagaacacctccctctagcttatcttcctgctggcccattccaactattactaataagcataattgaaatcatgttgctggaccacaacttattataataatgatgagaataacactagtaatgtcctagctaacttttatgtatcttttacgcaccatgcactgtgttaaatgcataatacattttaccttatttgatctttactataatcctgggaatttgggtctaataatatcattgctttatcattgatgaagctgaagttttgataggttaaaggatttaccccagttcacaaacctagtgtacattgaggcagggattccaactcagtgatgtgatactgctccaggatcttgagtctttatcgcctgtggacctaccatgctttttacctggttccctttgacagtctttygcatctgacactcacgctctcaccgcattctttcacttctataagcagctgtgaagtgaatatctttgtatg

SEQ ID NO: 579209 - DNA, 545 bp, Homo sapiens
ggactccaccagggacacgactccttcattcgtcgaatcttggacattttgcaagagaacacctccctctagcttatcttcctgctggcccattccaactattactaataagcataattgaaatcatgttgctggaccacaacttattataataatgatgagaataacactagtaatgtcctagctaacttttatgtatcttttacgcaccatgcactgtgttaaatgcataatacattttaccttatttgatctttactataatcctgggaatttgggtctaataatatcattgctttatcattgatgaagctgaagttttgataggttaaaggatttaccccagttcacaaacctagtgtacattgaggcagggattccaactcagtgatgtgatactgctccaggatcttgagtctttatcgcctgtggacctaccatgctttttacctggttccctttgacagtcttttgcatctgacactcacgctctcaccscattctttcacttctataagcagctgtgaagtgaatatctttgtatg

SEQ ID NO: 579210 - DNA, 188 bp, Homo sapiens
ctttaccaggtggttaattaagcaagctgtggtatatccacaacatgacatactacccagcgataaaagggaacaaactattggtataaacaacaactgggataaatcttccaggaattaagctaagtaaaatcsaatcccaggttgttaaacactgtgatttcatttgtatgatttttttaaataaa

SEQ ID NO: 579211 - DNA, 586 bp, Homo sapiens
ttaaaatcaaccatttgtgtatttgtgctcttagagtaaggaagatgacacaaagaataatcttttcagtagcattctgccagagatgtgcatttgtgttagcaaagtttcaagtgtagagtttcctaatcctttgttacgcagagagggaaagattgagagttatgatggtaaaactcggtagaactaccttgctatagcctgggatacagacactaagagattttaagactccttgcaggtaacggccatggtaaacaaagctagaaatgcatgagtataaataatgtacaagttaagagttgactcttaacagtcaagttaacagagttaagtgttaagagttaacaagataagagataactaaacactgaatgcatgtataatcttctggactatttgaatttgtaaataattatatatatatttatcttatgttatttaaaatatacrtttatatagttatttttatatttatatatttacttttatatttatataaaatataaaaattctaatatttatattaaatttataaattttactttcagaattgtatctatctaaatcatatttttatatataa

SEQ ID NO: 579212 - DNA, 453 bp, Homo sapiens
ttaagtacacagaccagtaacattaaaaagcaaccacacaaacaagtctgcataayaaccagctaataagacaatggcagaattaaatccatacatatcaatactaaccttgaatgtaaataggttaaaaaccccaattaaataagacagagtagcaagttggataagaagcaaggtccagtagtatgctgccttcatgagatccatctcacatgccatgacacacatagattcaaaataaaaggatggagaaacatctaccaagtatattagtctgttttcatactgctatatgctagaaagaaatacctgagactgggcagtttatggagaaaagagattgaattaactcacagtttggcaggctgtataagaggcatggctggtgagaccttaggaaacatataatcatgacgaaaggtgaagtggaaccaggtacaatattcacatggt

SEQ ID NO: 579213 - DNA, 453 bp, Homo sapiens
ttaagtacacagaccagtaacattaaaaagcaaccacacaaacaagtctgcataataaccagctaataagacaatggcagaattaaatccatacatatcaatactaaccttgaatgtaaataggttaaaaaccccaattaaataagacagagtagcaagttggataagaagcaaggtccagtagtatgctgccttcatgagatccatctcacatgccatgacacacatagattcaaaataaaaggatggagaaacatctaccaagtatattagtctgttttcatactgctatatgctagaaagaaatacctgagactgggcagtttatggagaaaagagattgaattaactcacagtttggcaggctgtataagaggcatggctggtgagaccttaggaaacatayaatcatgacgaaaggtgaagtggaaccaggtacaatattcacatggt

SEQ ID NO: 579214 - DNA, 573 bp, Homo sapiens
tgctggacagatgaataagtgaaaggctatcctctgagaaatattgttcaaaaccttccaaggttagagaacagaagactccagaagcctttggacagtcttttcctccctgtgattcttttcctcttgggcttcygggatttcaaactcggtacatctggtctcttggagacacatcctccctggaagctccagcagaagatggccaaagaccccttttgccttttctgcttctccaaagcacaaatgagagactgataattcagaaataattctaatacctacaaaatgagaacaaaacaggaaatacttaaaagcagtcaggttttcaaagcacagctttctgatactcacccagtcctctatcttaaaacactaccccttggttctagagggtgtgatggctatgcaggtctgtttctcatttgtcagcattttgctatctcctggacaagcagctttcagtatttatcttgtctgtagtcctagaaatgggtctaatgattcattctacttccatacgtaacctccctgaattttagttttgtcatctgtataaaaagggaataaaaa

SEQ ID NO: 579215 - DNA, 523 bp, Homo sapiens
tatgagattgtgtgcaggtgaattatgtctgtgtgtgtttctgtgtgtgttgggttgtgtgtgtgcacatgtgttaggaggagtagattagagaacagaggagagtagatatcagcagtggcacattgtacataggaaagtttattcctcacaaaaaaggaattgaattaaaatgcagagagatagaaggaaattgtctagaagtgaagatcataggttttgatgttttaggcagtccatttcttctttctgtgatgtaactagatygtaggggataacataagattggtagaaagggtggctatacatagcagatgttaaacagtaatttttattgaagcagcagggttacagcaaccatggaggtactgccccttgcagagcagggctactccataggcagtgtgcccagaatagcagcccagaggcagttctgcactcatatttacactcacttttttttttttgagacagagtctagctctgtcgaccaggctggagtgcagtggcacatctgggctca

SEQ ID NO: 579216 - DNA, 634 bp, Homo sapiens
tttttaaacacatacatgtataagaaactattttatgtgtgtgtttgtatacatacatattacatacraagtattcaataaatgagctgttgttttatattacatatttactcatggaatataaaatagtgagcacattttatgtatatatatgtaatatatatacacatacataaaatggaatgcattatatttctatctagaaaaacattggtttataaatactttttgaggacttctggtttcctgtacagcatataagaagcttgaaagttgttattctatcctaacaaataaaaacatgaacaaactgaaaaatcaataactcttcttagatccctcagagaaataaggtcacaaggcgaaccactgcctcccaaattaggaagataagcagaagaatatgaagaatcacagcttactagaacagaaacagaaagacaaaactcaacgggaaccaggtgcctgggtaggaaaacctgaagtgtaattgacaaactgttggaggctaagcatgaacaagtctgagagattaaaaactccagactcagacatggcagggaagcacattgctgtgagttttgtcttctggaatttgatcaggcacttacagtgaatttcaaaggaaaaatcc

SEQ ID NO: 579217 - DNA, 634 bp, Homo sapiens
tttttaaacacatacatgtataagaaactattttatgtgtgtgtttgtatacatacatattacatacgaagtattcaataaatgagctgwtgttttatattacatatttactcatggaatataaaatagtgagcacattttatgtatatatatgtaatatatatacacatacataaaatggaatgcattatatttctatctagaaaaacattggtttataaatactttttgaggacttctggtttcctgtacagcatataagaagcttgaaagttgttattctatcctaacaaataaaaacatgaacaaactgaaaaatcaataactcttcttagatccctcagagaaataaggtcacaaggcgaaccactgcctcccaaattaggaagataagcagaagaatatgaagaatcacagcttactagaacagaaacagaaagacaaaactcaacgggaaccaggtgcctgggtaggaaaacctgaagtgtaattgacaaactgttggaggctaagcatgaacaagtctgagagattaaaaactccagactcagacatggcagggaagcacattgctgtgagttttgtcttctggaatttgatcaggcacttacagtgaatttcaaaggaaaaatcc

SEQ ID NO: 579218 - DNA, 509 bp, Homo sapiens
ggtggcatgtgcctgtaatcccagctacttgggaggataagacaggagaatcacttgagcccaggaggtggaggttgcagtgagctgagatcacaccactgcactccagcctgggtgacagaataagactccgtctcaaaaaaaaaaaaaaaaaaaaagaaatgacttgagygaggggctttaaggaaaggtggagactgtagcaaacaggagagcatgtcctgctttaaaggagcagctgtgactcaagggcagccacaactctgtgccagccataattgccatgccatgcaagaatgtggttccagtgttaatcagatcctttaatttttcaagtgacgctgcaaatccatattttatgtaaactcttatgatgtttcactgttgattacaattttaaaaaatactctcatggccaaacaacacaagtccacagtccaccagctcatgccctctgctatttggaatagagattgcctagagggctggaacactgcttacgtaccagc

SEQ ID NO: 579219 - DNA, 509 bp, Homo sapiens
ggtggcatgtgcctgtaatcccagctacttgggaggataagacaggagaatcacttgagcccaggaggtggaggttgcagtgagctgagatcacaccactgcactccagcctgggtgacagaataagactccgtctcaaaaaaaaaaaaaaaaaaaaagaaatgacttgagtgaggggctttarggaaaggtggagactgtagcaaacaggagagcatgtcctgctttaaaggagcagctgtgactcaagggcagccacaactctgtgccagccataattgccatgccatgcaagaatgtggttccagtgttaatcagatcctttaatttttcaagtgacgctgcaaatccatattttatgtaaactcttatgatgtttcactgttgattacaattttaaaaaatactctcatggccaaacaacacaagtccacagtccaccagctcatgccctctgctatttggaatagagattgcctagagggctggaacactgcttacgtaccagc

SEQ ID NO: 579220 - DNA, 509 bp, Homo sapiens
ggtggcatgtgcctgtaatcccagctacttgggaggataagacaggagaatcacttgagcccaggaggtggaggttgcagtgagctgagatcacaccactgcactccagcctgggtgacagaataagactccgtctcaaaaaaaaaaaaaaaaaaaaagaaatgacttgagtgaggggctttaaggaaaggtggagactgtagcaaacaggagagcatgtcctgctttaaaggagcagctgtgactcaagggcagccacaactctgtgycagccataattgccatgccatgcaagaatgtggttccagtgttaatcagatcctttaatttttcaagtgacgctgcaaatccatattttatgtaaactcttatgatgtttcactgttgattacaattttaaaaaatactctcatggccaaacaacacaagtccacagtccaccagctcatgccctctgctatttggaatagagattgcctagagggctggaacactgcttacgtaccagc

SEQ ID NO: 579221 - DNA, 509 bp, Homo sapiens
ggtggcatgtgcctgtaatcccagctacttgggaggataagacaggagaatcacttgagcccaggaggtggaggttgcagtgagctgagatcacaccactgcactccagcctgggtgacagaataagactccgtctcaaaaaaaaaaaaaaaaaaaaagaaatgacttgagtgaggggctttaaggaaaggtggagactgtagcaaacaggagagcatgtcctgctttaaaggagcagctgtgactcaagggcagccacaactctgtgccagccataattgccatgccatgcaagaatgtggttccagtgttaatcagatcctttaatttttcaagtgacgctgcaaatccatattttatgtaaactcttmtgatgtttcactgttgattacaattttaaaaaatactctcatggccaaacaacacaagtccacagtccaccagctcatgccctctgctatttggaatagagattgcctagagggctggaacactgcttacgtaccagc

SEQ ID NO: 579222 - DNA, 269 bp, Homo sapiens
gaccagcctgggcaacatggaagaccttgtctctgcaaaaaataataaaaaaataaaaaactaaatagccagacagacayagttgtatgagcttgtggtcccagctactaaggaggcagaggtgggtggattgcttgaacctgagaggtcaatgctgcagtgagtgttgcagttgcaccaaccagcaccctccagcttgggtgatagtatgagaccctgtctcaaaaacaaaacaaaacctgttacttgggtgcttccaaagcgacact

SEQ ID NO: 579223 - DNA, 580 bp, Homo sapiens
aacaggatttgttggtgggattgggtatgtggtgtgagaaacagagaaaggaatcaaggattactttgcaatgtttttagtctcagtaaatagaaatataaagttgtccttaaataaaatgaagaaaactatagagtgattatgttggaggaaagatcagggatttggttttggacataataagtttcaaatgcgtaacagttatccatgtggagctattcagtagatagttggatgtcagggcctcaacctcagggcaatctaggttgagatgtaaatgtggtaatgstctgcatatagattgactataaaggcatgtggttagatgatgtcacttaaagagcgattaagcacaggaagctcaagtatccagacttgctgggaaaggagggagcatcattaactgagacccagagggagtagccagtgaagtaggttagaaatcaggtgaaagatggccgaataggaacagctctggtctgcagctcccagcatgatcaatgcagaagatgggtgatttctgcatttccaactgaggtacctggttcatctcattgggactggttggacggtgggtgca

SEQ ID NO: 579224 - DNA, 617 bp, Homo sapiens
tttttgtttcttttttttttttcctcacagcattttgtggaagacttttcctctccccttttcttttcgttaggaaatgaagcactacttagaacctttcacatttcaagtaaaagctttcaaaatgaaaggaaaaaatatttcaaacctcggcatttaaagtccatatggtctctattcatagtgaacaattaacgtgtggttggcaactgtgctatagaaacagacgtgcccagcttctacaaacgtgggtggatgtctgatggcagatctaacatttatggccttcggtgcatcattgccagaaaggtgacatgaacaagagctgagcgttgaaggtgcttggatattttcagccaatgaaacaggtggaggtgtacatgaaacacasgtacgcaggtgacatgtaaattatgagtatatattaacatgtgctgacttaatccctataatcatgttttgactttttgagtaatcatcaatgcaacaagttaggcattttattttgaataaaagtaatgatattccaacagtaactctaattccaagttaacccattcactttaacacataaggtgagagtaccaaaagccagtctaatttacataggccctgga

SEQ ID NO: 579225 - DNA, 617 bp, Homo sapiens
tttttgtttcttttttttttttcctcacagcattttgtggaagacttttcctctccccttttcttttcgttaggaaatgaagcactacttagaacctttcacatttcaagtaaaagctttcaaaatgaaaggaaaaaatatttcaaacctcggcatttaaagtccatatggtctctattcatagtgaacaattaacgtgtggttggcaactgtgctatagaaacagacgtgcccagcttctacaaacgtgggtggatgtctgatggcagatctaacatttatggccttcggtgcatcattgccagaaaggtgacatgaacaagagctgagcgttgaaggtgcttggatattttcagccaatgaaacaggtggaggtgtacatgaaacacacstacgcaggtgacatgtaaattatgagtatatattaacatgtgctgacttaatccctataatcatgttttgactttttgagtaatcatcaatgcaacaagttaggcattttattttgaataaaagtaatgatattccaacagtaactctaattccaagttaacccattcactttaacacataaggtgagagtaccaaaagccagtctaatttacataggccctgga

SEQ ID NO: 579226 - DNA, 550 bp, Homo sapiens
tttgattttttttctcaaaaatacttgcctacacttcattgctttaatagtcacgtattatcttgttgcctctcttttatgatgttaatatttatcaataggttcaggagttgtcaattcaattcgtccatttttaaattctccattagtgtttcatctagtagttttagtagccaccaaggattattgtctagatttataattatattaacggatggcaaaatgatgatatccttccattatttctgctcttgtcagctgtggaatttttctataaagaaaagcttgtatttctctactattaaattactctgmaacctaattggcatgggaaaggcaggataaatgcatgtgttcccctgcccccatttttttgctaccagttttttaaatactgaatttgtgccttaaaaatttcctcaagtgatcagtgagatgtatttttgtgtcactatgaattcagaaatgatgatcttgaatcttttataaccaaacttctttttgatgctcaaattgtttattcttttccagtggaggtctttcagaatga

SEQ ID NO: 579227 - DNA, 518 bp, Homo sapiens
agcaggtgctgggaataaaacagaaaaacaaaagagaattaacccgttcctcctggagcttcaaatgaagcaagacccctgagccaggctggtgctagggccctcttcaggatttccacaaagaagacccttgtcatttgatcaatcctctcagtactgcaatggaatgatctgcatttgggggtccatctacctccaaggcagggagttcaactggaacttatgtctgccaccccacggaagacattcaaaccccactcccctttcctggtctcaggaaacatctctccaacaccaaggactcctcttcaccaagccctaatccccccaraaagcctgcatgtgatattcagaaccattcctaaaaacctcaagaaactattaacttcttcctcacctatgaccaccagaacacagagctctcctggccacctcctaaagaggtggaagggaaaacgtcactcattcttctatgatgaatattcaggcaagaaaacaagacaggctcatctcccagg

SEQ ID NO: 579228 - DNA, 627 bp, Homo sapiens
ggtgagtagttctgctgtgaaagttgtcgcagcattgtgtgcgtgygtgtttgtgtgtgcgtttgtgtgtgtgtgtgtgtgcttccctttcccacctcatgggggaagagaggggtgtatttctctgcccttcctccaagccagatgaggaaggcttctgagaatcatttggaaaaatgcctggcactgaagtgcttagtgactggtgcacgactcatgcctgaaggatctgaaggagagagactgaaaattctcctggcagccttgcgctttctcaggcagacactttatggggggctaagatcatcctaggactcagccttgagctgttagaaactatgttggtgtttaagccttttaatgtgggtggggggaaagaggggtgtccaaaatcatttgtgctgagaatctgtagttcaatgggccaaggctgaggtctaattgaagagaggattcagaggagcttggttaaagtttggccaaggagggaatcttcgttgaggggcaaggtgaccccaacagtgtctaggacagactgctgggtctcttcctggccttctggctgagatcaagtgtaggatagaatgctggaagggaggggctaggtcagctggaggaggcatggcc

SEQ ID NO: 579229 - DNA, 222 bp, Homo sapiens
tgtggggagcgcctctgccccgccgccccatctgggatgtgaggagcgcctctgcccggccgagaccccgtctgggaggtgaggagcgtctctgcccggccgccccgtctgagaagtgaggagaccctctgcctggcaaccaccccgtctgagaagtgaggagcccctccgcccggcagcygccccgtctgagaagtgaggagcctctccgcccggcagcca

SEQ ID NO: 579230 - DNA, 219 bp, Homo sapiens
tgtggggagcgcctctgccccgccgccccatctgggatgtgaggagcgcctytgcccggccgagaccccgtctgggaggtgaggagcgtctctgcccggccgccccgtctgagaagtgaggagaccctctgcctggcaaccaccccgtctgagaagtgaggagcccctccgcccggcagccgccccgtctgagaagtgaggagcctctccgcccggcag

SEQ ID NO: 579231 - DNA, 219 bp, Homo sapiens
tgtggggagcgcctctgccccgccgccccatctgggatgtgaggagygcctctgcccggccgagaccccgtctgggaggtgaggagcgtctctgcccggccgccccgtctgagaagtgaggagaccctctgcctggcaaccaccccgtctgagaagtgaggagcccctccgcccggcagccgccccgtctgagaagtgaggagcctctccgcccggcag

SEQ ID NO: 579232 - DNA, 583 bp, Homo sapiens
ataatcccaatttatagaagcaatataccatatgagttggagatcttaaatatcctgtgtaaaagataaggacataaattaggaaggagtttaaaaattatttgatttagccactttgttttacagatttttaaaaagtctgagattcagagaggttagatgacttgctcaaggtcacacaactaagctagtgactgagctggtaatagaaataggcctcctggagctttgtaaagtcaatattaagtaaaatgaactaaatcctagcatttccaaatgtctgcagagtattacaattcctttaggcctatttgatgggagtttaacaaaatttgtaattcagacatattttggaaaggaaaatattacactgcaggaattaggtactgatgtacttccaagcacttcattaaaatgtttgatttaaatcaaraaaaactgattattagtgatgtattcctgctgatttatgagaagctgtaagtaagtaatatagggtgaagggatgatgataaagacacaggtgagataagtggccgacctggaatgcaaatatatgtggtggtctatgtgaatatgtttg

SEQ ID NO: 579233 - DNA, 336 bp, Homo sapiens
ttcactcggctctcattctctctgctgctgccttgtgaagaggtgccttctgtgattgtaagtttcctgagtcctccctagccatgtggaactgagagttaattcaacytctttcttttatgaatttcccagtctcaggtattctttatagcagcttgagaacagactaatacaaggtctgagcatagcactgtgattgaaaggccatgcctgaaccattaatatgcaccactcctctaactctagggtcttccagagcagcgatttccttagaggctaaggaagaaggaaattaacatatactgattgcctaatttatcccaggccctcccacgt

SEQ ID NO: 579234 - DNA, 336 bp, Homo sapiens
ttcactcggctctcattctctctgctgctgccttgtgaagaggtgccttctgtgattgtaagtttcctgagtcctccctagccatgtggaactgagagttaattcaacttcyttcttttatgaatttcccagtctcaggtattctttatagcagcttgagaacagactaatacaaggtctgagcatagcactgtgattgaaaggccatgcctgaaccattaatatgcaccactcctctaactctagggtcttccagagcagcgatttccttagaggctaaggaagaaggaaattaacatatactgattgcctaatttatcccaggccctcccacgt

SEQ ID NO: 579235 - DNA, 581 bp, Homo sapiens
aaagacacccaaattggaaaggaaaakgtcaaattatccttgtttgcagatgatatgatcttacacctggaaaaacctggagactccaaaagagaactattatgattgacaaacaaataaaatttcaagatacaaaatcaacatacaaaaatcagtagcatttctatatgccaacagtgaacaatgtgaaaaagaaatttaaaaagtaatcctatttacaatatccacacataaaattaaatacctaggagttagctgaagaagtgaaagatctctgtaatgagaactataaaatactgataaaagaaattgagaagaacacaaaaaaaagaaaaatattccacattcatgggaatcagtattgtcaaatgtttatattacccaaagcaacctacagattcaatgctatcactatcaaaataccaatgacattccttgcaaaaatagaaaaaacaattctaaaatttatatggaaccacacctccccaacacacacacagaatagccaaagttaacttgagaaaaaagaatgaaactggaggaatcacattacctgacttcaaattatgctataatgctat

SEQ ID NO: 579236 - DNA, 608 bp, Homo sapiens
acaatgtgaaaaagaaatttaaaaagtaatcctatttacaatatccacacataaaattaaatacctaggagttagctgaagaagtgaaagatctctgtaatgagaactataaaatactgataaaagaaattgagaagaacacaaaaaaaagaaaaatattccacattcatgggaatcagtattgtcaaatgtttatattacccaaagcaacctacagattcaatgctatcactatcaaaataccaatgacattccttgcaaaaatagaaaaaacaattctaaaatttatatggaaccacacctccccaacacacacacagaatagccaaagttaacttgagaaaaaagaatgaaactggaggaatcacattacctgacttcaaattatgctataatgctatagtaaccaaagcagcatgatactggcattaaaaaaaaaaaaaaaaaaagatatatagaccaatggaacagaatagggaactcagaaacaaatccaaacacgtacagtgaactcatttttgacaaaggtgccaaggacatacactggggaaaatgtcatctctgccacmaatagtggtgggaaactggatatccatacacagaaaaat

SEQ ID NO: 579237 - DNA, 465 bp, Homo sapiens
atgctcttctttttttgtctctggaacattaaattaaaaagattctgccatcttcaggaatggcagaagtgatactatatttactgttacacctaccttcttggaaagggctatgaactcaagacatgggtgagagtgacagtgaaatattgcatttttagattaggaagacctccttgttgaatgaatatcacttttacatcattayaaagttggaagatacttgtattttcattctatttgagatgatgcgaagcaaatactatcctttaatgattacatattaatgtactttctgaaacactttaatattggaattttttttttctttgagatgcggtctcactctgtcgtctaggctggagtgcagtggcacaatctcggctcactgcaagctccgcctctcaggttcacgccattctcctgcctcagcctcccttgtagctgggattacaggcgcctgcc

SEQ ID NO: 579238 - DNA, 538 bp, Homo sapiens
atttggggccttataaatagggtgcccgcataatttacattctatcatatatagcttccaaatctaaacactttggagagtgaaaggagattctcttagtaagtatactgggacaacaggcacgaatcatactatcccaggaaaaccagagtgaagttcatctgactgacaagccatgttctggagcttggactttaacctgtgacaagamtttgaagggctctaagcaaggaaaagacaagcacaaagatttacattttaggaagctcattctggctacagtgtgaaggatagatctgcaggggaagaacagagtcaaggacaccctagactatagtaataagccaggtgagagaagacggatggctaggcactcacatacatgcacacacacgtacactcaagcacatacacatacacacactcatgctgctatatataaaagctgggttcatttcagccaaatgaaatattcctggcctacaatagtctcataaagtcgtattgttgttttcagggagtgatcaggaacaaaaag

SEQ ID NO: 579239 - DNA, 651 bp, Homo sapiens
ctagagaatttggggccttataaatagggtgcccgcataatttacattctatcatatatagcttccaaatctaaacactttggagagtgaaaggagattctcttagtaagtatactgggacaacaggcacgaatcatactatcccaggaaaaccagagtgaagttcatctgactgacaagccatgttctggagcttggactttaacctgtgacaagactttgaagggctctaagcaaggaaaagacaagcacaaagatttacattttaggaagctcattctggctacagtgtgaaggatagatctgcaggggaagaacagagtcaaggacaccctagactatagtaataagccaggtgagagaagacggatggctaggcactcacatacatgcacacacacgtacactcaagcacatacacatacacacactcatgctgctatatataaaagctgggttcatttcagccaaatgaaatattcctggcctacaatagtctcataaagtcgtattgttgttttcagggagtgatcaggaacaaaaagaagaaactaacaacttcagatcataatatacaggctaaggaatatttagtgataacaggagttcttccattgaacaaayacatgaagaagactcaaaaacatgtaa

SEQ ID NO: 579240 - DNA, 644 bp, Homo sapiens
atttgcataagtaacaaggagctgaatgttaatcaccaagacaatggggaaaatgtcttcaggggatgccagatacttttacagcagccctccaatcacaggcctggaggactaggagggaaaaatgattttgcaggcttggcccagggcccagctgctctatgcagccttgtaacatagtgccctgcatcccagctgcttcagatccagctgtggttaaaaggggtcaacatgcacctcaggccaatgcttcaaaggatgcaagccccaagccttggcagcttccatgtggcattgggcctgtgtgtgcacagaagtcaagaattaaggtttggggacctgcatccagatttcagaaaatgtatggaaatgccaggatatccaggcagaagtttgctgcaggggcagagccctcatggagaacctttgttagggcagtgcagaagggaaatgtagagtcagagcccccaaacagagtccccagttagggactagtgaagctgtgagaagagggccatkgttctccaaaccccagaatggtagctccattgacagcttgcaccatgtgcctggaaaagtggcagacactcaatgccagcccatgaaagcaggcaggagggggctgtactctgcaaagccacaga

SEQ ID NO: 579241 - DNA, 597 bp, Homo sapiens
tgagtattgaaatttctaggataaccagtaaaaaaaaagtacaagtacatataaatacaaactaatggaaraaaaagaaattagaatgatagttgactaatataaaacaagccaaaaacaaaaacaaaacaaaacaaaacaaaacaaaacaaaaaaacaggaaatggggatagcaaatagaaaacaaaaagcaagatggtagaattaaactcaaccatatcagtaacaggtatcaacccaaagctctcatatcattgagttgctaggccaatcctgaaacctcctactgttagaatcctttgttttagatgaaggtaaaacttacataaaacttaccagttaatcattttaaagtgtatagttcaggagcttttagtacattcacaatgttgtgcagatatcaccactatctagttccagaacttcttcatcaccccaaatggaaatccattaagtggtcacactctattccttctccctccatcccactccaagcactaatctgctttctgtctctatggatttgactattctggatatttcatataaatggaatcatacaatatgggacctctagtgtctagctcttttcgttta

SEQ ID NO: 579242 - DNA, 597 bp, Homo sapiens
tgagtattgaaatttctaggataaccagtaaaaaaaaagtacaagtacatataaatacaaactaatggaaaaaaaagaaattagaatgatagttgactaatataaaacaagccaaaaacaaaaacaaaacaaaacaaaacaaaacaaaacaaaaaamcaggaaatggggatagcaaatagaaaacaaaaagcaagatggtagaattaaactcaaccatatcagtaacaggtatcaacccaaagctctcatatcattgagttgctaggccaatcctgaaacctcctactgttagaatcctttgttttagatgaaggtaaaacttacataaaacttaccagttaatcattttaaagtgtatagttcaggagcttttagtacattcacaatgttgtgcagatatcaccactatctagttccagaacttcttcatcaccccaaatggaaatccattaagtggtcacactctattccttctccctccatcccactccaagcactaatctgctttctgtctctatggatttgactattctggatatttcatataaatggaatcatacaatatgggacctctagtgtctagctcttttcgttta

SEQ ID NO: 579243 - DNA, 490 bp, Homo sapiens
aatgaggtatgttggactaaccattctattgtggagagagaaaaagctggacaaaaattaaaaatatgtatgtatccaattacttgaaagttaatggataattataaaatcttggaaaagacataaatccagcatttgggtctgtttttcccctggagatattgccaatttcagacaaagcttctgcaagcctgagaatctcagtagcatttttgactgactcacaggggtaggagattaaaattggacctcagtactttccaaaaatggatgctggcaaatctcttctgtcttaggatgggtcccttagagctataccttaagattagtgtaaatcagacatagggcagcccttgaaggaactggcacctracttccagttttctcaatccttagaaattggtttgaggcaatctcaggttgctatcattcccccaggaaccagacagaatcaaatattaatcctctctagaggaagataataccattc

SEQ ID NO: 579244 - DNA, 503 bp, Homo sapiens
aagattaggctttaaaaacaactatgctaaggagaaatgaactggccaagttggaaatgaaggctctcaaaattttcatgctcagtagttggatcacacctgtgaatagccactcattacactctagcctaggcaacatagcaagctcctgtctcaaaacaaacaaamctttgggaggctgaggcaggtggatcaacgaggtcaggagatcgagaccatcctggccaacatggtgaaaccccatctttactaaaaatacaaaaaattagccaggtgtggtggcacgcacctgtagtcccagctactcaggaggctgaggcaggggaatccgcttgaacccaggaggcagaggttacagtgagctgagatcatgccactgcactccagcctggtgtcagagcaagactctgtctcaaacaaacaaaaaccctaaaaaacaaattaaaataaataattatgctttctatgttcacctagataaagaaaaaacttggccaggtgca

SEQ ID NO: 579245 - DNA, 503 bp, Homo sapiens
aagattaggctttaaaaacaactatgctaaggagaaatgaactggccaagttggaaatgaaggctctcaaaattttcatgctcagtagttggatcacacctgtgaatagccactcattacactctagcctaggcaacatagcaagctcctgtctcaaaacaaacaaaactttgggakgctgaggcaggtggatcaacgaggtcaggagatcgagaccatcctggccaacatggtgaaaccccatctttactaaaaatacaaaaaattagccaggtgtggtggcacgcacctgtagtcccagctactcaggaggctgaggcaggggaatccgcttgaacccaggaggcagaggttacagtgagctgagatcatgccactgcactccagcctggtgtcagagcaagactctgtctcaaacaaacaaaaaccctaaaaaacaaattaaaataaataattatgctttctatgttcacctagataaagaaaaaacttggccaggtgca

SEQ ID NO: 579246 - DNA, 503 bp, Homo sapiens
aagattaggctttaaaaacaactatgctaaggagaaatgaactggccaagttggaaatgaaggctctcaaaattttcatgctcagtagttggatcacacctgtgaatagccactcattacactctagcctaggcaacatagcaagctcctgtctcaaaacaaacaaaactttgggaggctgaggcaggtggatcaacgaggtcaggagatcgagaccatcctggccaacatggtgaaaccccrtctttactaaaaatacaaaaaattagccaggtgtggtggcacgcacctgtagtcccagctactcaggaggctgaggcaggggaatccgcttgaacccaggaggcagaggttacagtgagctgagatcatgccactgcactccagcctggtgtcagagcaagactctgtctcaaacaaacaaaaaccctaaaaaacaaattaaaataaataattatgctttctatgttcacctagataaagaaaaaacttggccaggtgca

SEQ ID NO: 579247 - DNA, 503 bp, Homo sapiens
aagattaggctttaaaaacaactatgctaaggagaaatgaactggccaagttggaaatgaaggctctcaaaattttcatgctcagtagttggatcacacctgtgaatagccactcattacactctagcctaggcaacatagcaagctcctgtctcaaaacaaacaaaactttgggaggctgaggcaggtggatcaacgaggtcaggagatcgagaccatcctggccaacatggtgaaaccccatctttactaaaaatacaaaaaattagccaggtgtggtggcacgcacctgtagtcccagctactcaggaggctgaggcaggggaatccgcttgaacccaggaggcagaggttacagtgagcygagatcatgccactgcactccagcctggtgtcagagcaagactctgtctcaaacaaacaaaaaccctaaaaaacaaattaaaataaataattatgctttctatgttcacctagataaagaaaaaacttggccaggtgca

SEQ ID NO: 579248 - DNA, 576 bp, Homo sapiens
tccatatatataaagagttcttacatatcaataagaaaaaggcractaaatggaaaagtgggcaaaagatatgtcagaagaaatagaccagaattatagctatatacacagttttccaatatgtaatattcaaataaatagaaaataaaacaatgatataactggttgtttctggtatataggaaccaaattgatgttggtgaatttgcttatttttattttattttgagataatcatacattcacatggagttacaagtaataattcaaagaaatcccatgtattctttacctaatttccaccaatagaaatcttctataaagctgtagtacaatatcacaaccaggatgttgacactgatatagtcaagatacagaacagttcaatcaccacaatgatctcgcatgttgtctttttatagccacatccaagaatattatataaatgaaatatgagactttgaaatatgaacttttgagactgaatttttttcactccgtctaattccctagaaatttatctcacttgctcaagttgaatgatgaggagctcctctgcaaaaaaaaaaaaaaaaa

SEQ ID NO: 579249 - DNA, 604 bp, Homo sapiens
gctaaaaaaatagaaaggcagacaaagaggcaaagcaggctgcaatgacaactccaccttctaaaaagaaagccttagctatgcctctcctcccagagattcccctcctggagatcctgagctactccaaatgaaagggcttaatttgcccagaaaaataaaaactacattgaaaaaggatagtaaaaattctccaatgggaggctagccatacctgaaatggtggcccccagatttgtaaaagagttccaccaaggaactcacatggagaaaaacagcactaaagacattattaaggcatcacttctatatgccatggctcactgccattactcaagccatttgtaaacaagcagtgtttaacttgcactcagaacaatccacgacaaaggcctacctggccccygggagatcagaaaacaaaagccatgccctgtgaaaaactgcttatggacttcaccgaattgccctgagagggaggctatcagtacatgttggtgttcatttgcaccttttcagggtaggtcatggccttccccacctggacagagaaggcactagaggtaaccgaggtgttaagagacattattcccagatttggact

SEQ ID NO: 579250 - DNA, 437 bp, Homo sapiens
ggtgcagtggcatgatactagctcactgcaaccttgaactcctgggctcaagtgatccttctgcctcagcctcccaagtagctacggctgtaagtatgtattaccatgcctggctaatttaaatttttttttttttctagagaygaagggtcttgctatatttcccaggctggtcttgaactcctggtctcaggcagtcttcctgcctcagcctcccaaagtgttgggattacaggtgtgaggcactgtactaggcctgaatcgttgaatttttgactctagtcttgaagggatggaacctgcccttctagtgttgtttcactttgggataaagcccaaaggctcagagctcacctgtaatctggtggtggtagactgatgtgtgtccatcatgggttcaaagttgatatttacttagtaaaaacctgccaggcctc

SEQ ID NO: 579251 - DNA, 573 bp, Homo sapiens
tacaggaaccaggggttaggactttaacatatctttwgggataatccaattcaacccatagtaatcattaccattgtcaaattagcacttgttggaatggacatttccatgtagggtaaaatgtgttcacttcattcttgtcatagccctggatagagctgcctcagagcttgcctgtactcatttcagtcaaaaactgatttagatgctgggcttatagaagtttcagatcttctggatagaaaaaaaaagagggattttaatttgtgaagaaactgcaaaggcaatacattaatgctgctctgttgtttttattaaggaagctatagagaaagttagagttcatcagtagggcagtttcattagaaccatttttttctgactagcaatttctcagtattctgggtttacacatctaattcctccagaagtttcccagggggagaaaagacaacaaaacttgaataaaattatgactgttgcacttcatgaatatattattctagtaccaggactctccaggacaatttgtcctcacagtttattcagaagagggtaggataagaaaaatgc

SEQ ID NO: 579252 - DNA, 573 bp, Homo sapiens
tacaggaaccaggggttaggactttaacatatcttttgggataatccaattcaacccatagtaatcattaccattgtcaaattakcacttgttggaatggacatttccatgtagggtaaaatgtgttcacttcattcttgtcatagccctggatagagctgcctcagagcttgcctgtactcatttcagtcaaaaactgatttagatgctgggcttatagaagtttcagatcttctggatagaaaaaaaaagagggattttaatttgtgaagaaactgcaaaggcaatacattaatgctgctctgttgtttttattaaggaagctatagagaaagttagagttcatcagtagggcagtttcattagaaccatttttttctgactagcaatttctcagtattctgggtttacacatctaattcctccagaagtttcccagggggagaaaagacaacaaaacttgaataaaattatgactgttgcacttcatgaatatattattctagtaccaggactctccaggacaatttgtcctcacagtttattcagaagagggtaggataagaaaaatgc

SEQ ID NO: 579253 - DNA, 565 bp, Homo sapiens
actttctagcccagacaacttaggcatcccttggtgagaccttttcatattaaagttaagaagttaaatttaataatttattcaaggatttcttttctgactttaaatggtaactggaaacaaaaggctagcttgagaaaaaattataaagggatggtggaagtagcatttaagtagagatacttcaaacccactcacatcgctggcacaaaagttctttgttatctacgtgatgttcatcagaagatgagcaataatattggctctgcacccattatcttaactccttctacattaaccaagccgtgattaagaaactgatgtccagtttatggttctgctaagttaaccacagaaggaggtagaaaagtagattgttagtatgtaataaatgctataattaggctatgatgaaaggaatctggcagtctttatcctgagagaatatttaagtctggaaggacatggcatggaggtgttcatcatcagtgatgggctgtgaggagagatgagaacattctatagatttagatgatcccatrtgaaagtaagtaccagctcggcc

SEQ ID NO: 579254 - DNA, 570 bp, Homo sapiens
tgaattctaaggttactatataatagctggaaggctttcaacataccacacaacctctcagattcttagtccatttatatgtgaacagagataaaggggataataataattaatttccatggacatttggaagaattgagactcatcaaaaaagagtaattcatgrcttataatagtaagtttataattaaattgtttgttatcattatcattggaaaatttacagtatttttgtcagactcactttcttttttaagttaacatttttgcttcattgtatttagtttctgagtttataataggtattaatttgcatggttttgtaatatataaggtgctttgagctctctgaggaaaagccttatgtaattagaaaacattattcactgcactgatgtgtgaatgctcaaggctctagacacatccatcttaaaggaaatattaacttcaaaatctacataaaccctataaatacatacttagaaaacactgacaatttgtaatttttcacttttctgttaaaaggaaaagcaaagacaaaaagttatcatagtgcaaaatttatgacat

SEQ ID NO: 579255 - DNA, 223 bp, Homo sapiens
ggccacttacagtcaatgttaatattgagatgtgaggtaccattccattcatcatgatatttgttgcctgtataccttgtttttttaattgtatttttgtattataggtcctatgaaatttatawtttaaagaggttctgttttgatatgtttccaggatttctttcaatatttagagctccttttcgcagtttttatagtgctggcttggtagtagagaatt

SEQ ID NO: 579256 - DNA, 406 bp, Homo sapiens
gttggtctggtttggggccaggcatttgggtttttttggttttgtttttggcatcagtattttttaaaaagcttccttgttagctttcctaggtaatgctcatatgtggtcagagctgagaacttctgacctggaggcaaaggaaatacaagtaggcagaaaagacagagtagcccagtgtgctcaatagaagaaccagttttccttcaaaacaaactaaaacggggtagagktcgtgcgttcgtttcccattactgctgtaacaaatgaccacaaacttagtagcttaaaacaacacaaatttattatctgacacttcagtaggttagaaattcagcgtgagtcccacaggactaaaatcagagtgtgagcagggctgttgcattcttttagaggccgttaggga

SEQ ID NO: 579257 - DNA, 505 bp, Homo sapiens
ctagcctgagcaacatagcaagatcctatctctacagaaaaaaaaaacattaaaaagcattaaccaggtgtggcatggccctattgtcccagctattcaggaggatgaggcaggaggattgcttgagcccaggagttcaaggttatagtgagctatgattgtaccactgcactccagcttgggtgacagagcaaggcactgtgtctaaaaaattaaaattacaaattaaaacaaaattaaacctacaaaaatcctgaaaaaaattgtaaagagcactaacatcacccagtttcaccaatgggacattctyttatataaatataatgccaatcatccttccaaggtacttaacattgatactctagtattatctaaaataaactccatacttaaacttcctcaattgtccctgcagctttttaaatgtcttttatgacttgaataattttgaagagtccaagccagtgttttgcaaaatgtccctataatctggatttatctaatt

SEQ ID NO: 579258 - DNA, 606 bp, Homo sapiens
tgggaagactgggtggtttggacccagaggaattctccccagtgcagtacagtggctgtgacagattacggacagactgcttaagttggacataaattcatccctcctcactgggttggggcctccctgcaagaatttcagcaactccagccaggggtttagggacagaactctgacatccctgggaaggggcctctagaggggaagggcagccaaggtgtcccagttcagtggacctagtctttcctgtctgctggccgtccagaggaggaggatgattctccccagtgcaatatgggctcyaccaaggtgcagtcagacttcttctttaagcaggtccctgaacctgtgcctcctgactgggtgagatctttcaacaggagttgccagacacttaatacaggagcattctggctggcatcagattggtacccctctgggacagagctcccagaggaaggaacaggcggccatctttgctgttctgcagactccaccagtgatacctccacgtgcgggagggaccctggggaattttttctgtagcggtcccccagcaaactgcagcagccctatggaagaagggcctgcctgataaaaagaaaa

SEQ ID NO: 579259 - DNA, 606 bp, Homo sapiens
tgggaagactgggtggtttggacccagaggaattctccccagtgcagtacagtggctgtgacagattacggacagactgcttaagttggacataaattcatccctcctcactgggttggggcctccctgcaagaatttcagcaactccagccaggggtttagggacagaactctgacatccctgggaaggggcctctagaggggaagggcagccaaggtgtcccagttcagtggacctagtctttcctgtctgctggccgtccagaggaggaggatgattctccccagtgcaatatgggctccaccaaggtgcagtcagacttcttctttaagcaggtccctgaacctgtgcctcctgactgggtgagatctttcaacaggagttgccagacacttaatacaggagcattctggctggcatcagattggtacccctctgggacagagctcccagaggaaggaacaggcggccatctttgctgttctgcagactccaccrgtgatacctccacgtgcgggagggaccctggggaattttttctgtagcggtcccccagcaaactgcagcagccctatggaagaagggcctgcctgataaaaagaaaa

SEQ ID NO: 579260 - DNA, 606 bp, Homo sapiens
tgggaagactgggtggtttggacccagaggaattctccccagtgcagtacagtggctgtgacagattacggacagactgcttaagttggacataaattcatccctcctcactgggttggggcctccctgcaagaatttcagcaactccagccaggggtttagggacagaactctgacatccctgggaaggggcctctagaggggaagggcagccaaggtgtcccagttcagtggacctagtctttcctgtctgctggccgtccagaggaggaggatgattctccccagtgcaatatgggctccaccaaggtgcagtcagacttcttctttaagcaggtccctgaacctgtgcctcctgactgggtgagatctttcaacaggagttgccagacacttaatacaggagcattctggctggcatcagattggtacccctctgggacagagctcccagaggaaggaacaggcggccatctttgctgttctgcagactccaccagtgatacctccaygtgcgggagggaccctggggaattttttctgtagcggtcccccagcaaactgcagcagccctatggaagaagggcctgcctgataaaaagaaaa

SEQ ID NO: 579261 - DNA, 389 bp, Homo sapiens
tgttcctctcttcacctattaaaatggggataatgataataatggtacttaccatttaggattgttgtgaggattaaacaaattcacttagcataatatccttgagattcatgtaaagcactgtgaatgatgtctggcacacagggagagagcacgcttgctcttctgctcatggagcccatattaatttttcattgatgttaaggtgaaatagaagcttttgccaacatgctttccaaaggttcaccttacttcayatatctgacatttaagtgtcttacctctctgaatgtgatttaaaactatgacttggacaaaatgttatcagtgaacaaaatatatcacaatatatcaaataaaccttatttcaacttataaatgctaggaga

SEQ ID NO: 579262 - DNA, 534 bp, Homo sapiens
cttaaagtataataataaaaaaaagatcaatgaattcaagggttgatttttttgaaaaaaataataaaataggccattagctagattaataaagaagaaaaaatatcccaataaacacaattagaaatgatgaagggaatgttactactgaccccacagaaataaaaacaaccatcagaagcttctacaaacacctctacatacacacattagaaaagagatagatatacccacccacaactgagtggggaaaaactgattccctgaacagaccaataacaagtcccagaattgaatgagtactaaatagcctgtsaaccaaaaaaagcctgggatctgatagtttcacagctgaattctaccagatgtacaaagaagagctggtaccattcctacagaaacaattccaaaaaaatgaggaggaactcctccccaactaattctatgaaatcatcatcagcttgataccaaaacctggcagagacacaacaacaacaacaaaaacgtcaggccaatattctttttgttttattt

SEQ ID NO: 579263 - DNA, 534 bp, Homo sapiens
cttaaagtataataataaaaaaaagatcaatgaattcaagggttgatttttttgaaaaaaataataaaataggccattagctagattaataaagaagaaaaaatatcccaataaacacaattagaaatgatgaagggaatgttactactgaccccacagaaataaaaacaaccatcagaagcttctacaaacacctctacatacacacattagaaaagagatagatatacccacccacaactgagtggggaaaaactgattccctgaacagaccaataacaagtcccagaattgaatgagtactaaatagcctgtgaaccaaaaaaagcctgggatctgatagtttcacagctgaattctaccagatgtacaaagaagagctggtaccattcctacagaaacaattccaaaaaaatgaggaggaactcctccccaactaattctatgamatcatcatcagcttgataccaaaacctggcagagacacaacaacaacaacaaaaacgtcaggccaatattctttttgttttattt

SEQ ID NO: 579264 - DNA, 541 bp, Homo sapiens
gacaaaggcctctgcttcaggaattttgattagcaatatgttaatcataatttccaaataaaaagtctagacaccgtttcaagattaaatttggtctggtctgattttgtgaattcttataaaatgtcttatccaatcaaattttagcaatcattctgcattttgatgttaaaataaaattaaattaaaattttaacgaaaataattctgaccctctgaaacaatttcaaacttattttaaattccccaagtgcattcagtagcaagtagaaatagtcaccgtttagccaccccattacagtccatcacctcagcattgcccctaatgtggcaagattttaaaagtataatattcttcacctttacagctaaaacaacagcacattcacacacatcatygtatcgaatgtgggctagcatgcacacatgtgtccccattaatgtatcaattcttcagcctgtgactcattttttggtgacacatgtttttattgtattattgacctgagtcattcagttactatatatcaaatactggact

SEQ ID NO: 579265 - DNA, 543 bp, Homo sapiens
ggagctctctcatcccgttggtgggtgcataaggtgctttcaaacatcatagaaacaaatttggaagtcttcattaacatctaaaaagagcacatcctctgactcagaagttgtccttctgggaattgattctgcagaaataaaagcaccagaatgtacagtgaaacataaatgatgttcactgcagccttcttaaaaaatactggaatcaacctaatgcccatcaaaaggacataactgaataaatatgatttttccatagaatggatgctgcattagagaccagaggtaaaactacacgmactgacctgaaaggaggaacttgatacagtatcaagccaactgcaatgatccaacaatgaaaattgcccaccacaattctgtaaaaattgcatatgcacttatgcatgtaaatgtggatgtgtgttttaaactcaggaaaacattgggaaagacatataccaaattgtccacaatggtagcatctggtgttgtaatcaaactgccaagacaggttgtggaggacattaatgtcctctttta

SEQ ID NO: 579266 - DNA, 542 bp, Homo sapiens
ggtttcatcatgttagccaggctggtcttgaactcctgggttcaagtgatycacccgcctcggcctcccaaagtgctgggattacaggcgtgagccaccatgcagggtcttctttttgctgttttgaatgggctattagaagacttttaatgacatatgcggttgacaatgtatttctatttgacagtgctgtcgtggataaagcacatggtcaacctagagtccaggccctggacacagcacacctggggtttcttcctccaccccctcaaatgcagttggtgcagtcaccagccccaccttcctcttcttgaatcctgcccctcccttgctccagacctcaccaagtctctgcattacagttcacatcaaccctaagttgctctttccagcatcctaagccaccctggttgatctgctggcccctgtcctgaccttagtaaagggcccctggaagctgtctccatactcctttcatcccttccggcttcttgccatgccagggccacaggtagagaacaacccccgtcctgcccctaccc

SEQ ID NO: 579267 - DNA, 542 bp, Homo sapiens
ggtttcatcatgttagccaggctggtcttgaactcctgggttcaagtgattcacccgcctcggcctcccaaagtgctgggattacaggcgtgagccaccatgcagggtcttctttttgctgttttgaatgggctattagaagacttttaatgacatatgcggttgacaatgtatttctatttgacagtgctgtcgtggataaagcacatggtcaacctagagtccaggccctggacacagcacacctggggtttcttcctccaccccctcaaatgcagttggtgcagtcaccagccccaccttcctcttcttgaatcctgcccctcccttgctccagacytcaccaagtctctgcattacagttcacatcaaccctaagttgctctttccagcatcctaagccaccctggttgatctgctggcccctgtcctgaccttagtaaagggcccctggaagctgtctccatactcctttcatcccttccggcttcttgccatgccagggccacaggtagagaacaacccccgtcctgcccctaccc

SEQ ID NO: 579268 - DNA, 590 bp, Homo sapiens
ggccctcggcgtgctggaggtagcggacacaaatccaccaacmctgcccctccggagtccccaaaaccacgggcatctggaagcgtctagaaattccggtgcccggaacccggttttgccaaacttcgcaatctcctcacctgagggcacccgccaagatctccgtggcaggaccacgcatcgcgcctggatgctctgggccggagccagatgagcaatcatgcatcccactacccaagtccctactactctggggactttgcaggaggtgagcgcctaaccctatccgtcagccccagtgcttaagtatcctcccccagaggtaagaatgaggaggtcccccatgaggttccatgtcaaggcagcagtctccgtggagccccagtgggagcggtctgggatacgcgggcgagccaaggggtccaggcggggaagttggggttcagcctcccgccggtgggtggctctggaaggagcgcagacaaccaggcggcaggcaggcagcggctgcggagtggacctctctctttcagcagatgccgcgggggatggggaacttagagaaggggagacaaggagagtgtaccccg

SEQ ID NO: 579269 - DNA, 616 bp, Homo sapiens
gcaatttgtttcttctcttcaaaagcttagggacctctaggctaaataaaataatgagtaatctttacaacatttttcagagaacctcagggatatcattagaaatctttgccaggggtcccaagtgaaattcaaactctggactggggtagaaccttcatacaccagtggttttgctttgatgatgttttctctgcccattgtcaacttgtttcttctccattccctatagtacatcccagcaagtaacaacaacaccccaatccatggcttttatatctattatcgacccacagacagtgacaatgatagtgactacaagaaggatatggtggaaggtgagacacagttctgtgtttatagcttctgcgtgatatagtttcctccgctggcatgggggacaaggtattggtgaaatctggtgaagcataaacctgcrtctggtgtgacacgaagctctaagctccgtgtcattgactcattcataatacccttgaagctgtcaacttcatgaacccatgtgatgatgggacaacctgggtggacacctagaacatttcctccagcgttcctccacacgccgcccctgtgccagtcagtggcatcctcccccaca

SEQ ID NO: 579270 - DNA, 607 bp, Homo sapiens
tgcctctctccttttccttgggccttcctattccctgagacaaaacaatattgaaattagaccaattagtaagcctacaattacctcttagtgttcaagtgaaaggaagagtcatacatctttcatttcaaatcaaaagctagaagtgattaagtttaatgaggaatacatgtcaaagccaagatatgcctaaatctaggcctcttgtaccaacagttagccaagttacgaatgaaaaggaaaaactagtgaaggaaactaaaagtactactccagtggaaacacaaatgataagaaagggaaacagctttgtattagtccattttcacactgcwgtaaagaaagacctgagactgagtaatttataaagaaaagaggtttaattgattcacagttctacatggctggggaagcctcaggaaacttataatcatggtggaaggtgaagaggaagcaaggtgcaaggcatgttttacatgatggcaggagagagagagagtgaagggcaaactgatacttttaaaccatcagatcttgggagaactcactatcacgagaacagcatgggggaaactgcccccatcattcaatcacctcccaccaggtc

SEQ ID NO: 579271 - DNA, 607 bp, Homo sapiens
tgcctctctccttttccttgggccttcctattccctgagacaaaacaatattgaaattagaccaattagtaagcctacaattacctcttagtgttcaagtgaaaggaagagtcatacatctttcatttcaaatcaaaagctagaagtgattaagtttaatgaggaatacatgtcaaagccaagatatgcctaaatctaggcctcttgtaccaacagttagccaagttacgaatgaaaaggaaaaactagtgaaggaaactaaaagtactactccagtggaaacacaaatgataagaaagggaaacagctttgtattagtccattttcacactgctgtaragaaagacctgagactgagtaatttataaagaaaagaggtttaattgattcacagttctacatggctggggaagcctcaggaaacttataatcatggtggaaggtgaagaggaagcaaggtgcaaggcatgttttacatgatggcaggagagagagagagtgaagggcaaactgatacttttaaaccatcagatcttgggagaactcactatcacgagaacagcatgggggaaactgcccccatcattcaatcacctcccaccaggtc

SEQ ID NO: 579272 - DNA, 548 bp, Homo sapiens
gtccattttcacactgctgtaaagaaagacctgagactgagtaatttataaagaaaagaggtttaattgattcacagttctacatggctggggaagcctcaggaaacttataatcatggtggaaggtgaagaggaagcaaggtgcaaggcatgttttacatgatggcaggagagagagagagtgaagggcaaactgatacttttaaaccatcagatcttgggagaactcactatcacgagaacagcatgggggaaactgcccccatcattcaatcacctcccaccaggtccctcccttgacatgtggggattagaatttgagatgagayttgggtggggacacagagctcaaccatatcgagacttattgctaatatggagaaagttttaatggtctggataaaagatcaaaccagcaaacagtcccttaagccaaagcctaatctagaacaagaccctaactctctatgaaggctgagagaggtgaggaagctaaagaagaaaagtctgaagctagcagaggttggttgatgagtttcatgaaaaaa

SEQ ID NO: 579273 - DNA, 621 bp, Homo sapiens
cttctggtggacatattgagtaattcgttgccttttttctggcctttcttaatcctctcgtatacaagtcagtaagtgcctgtgactccagtctccatgctcagaattgaggtcctaatggggatccacactgagaaccacctgttagcctgtggggagttgttccctttcttctgatrtcattttatcatttacctgccttaggtaccagagattcccaaactcccgggccgcagctaaggtggcctctttttcattgggagttgatgtttgacctaacaacaacataatattactccatgctaaatcaaaagactgtcctaatccctgtaagacgtctatgtatccatgaggattatgagaattttcctaggtccagtttgatctgttttaagtctgagagggaaaaggagacatgtactcatgctgggccaaagtctcctcttcctcccgtagcttggagggggcacaatcaagggccattggcgcctttcggttccttgactatctttttttctggttccttttgggctgttagggccaaagaagagtccttactagtgggaggcagagctgtggggagaccagggtttgagggtaggctttgaggaccgctggtag

SEQ ID NO: 579274 - DNA, 495 bp, Homo sapiens
aagtacacccgatttgctacagcttacractagcctcatgaatcctttttctcattaattcaaagtttgcaaaaaaaagaaatcacatacttaaaaataaatcacttgagcacagaagcatatcaaaatctaatataaacaaacaaaaaacccaacttatgttaacatgccactgaaactgggctcaagttttcaaatgtcttatgaaatattacactctccagcaggctattttttttttcctaactggagatgaatggcagagttctgatatggaaaagcactccatgtttgtacagaaaggtagcataggaaaagtggtcaaattcaaccagtctgtcctcatcaaacaggcaactactgtcttctcagcatttccaaaagaaatcatatgtctgctactgtttatgtcatatgcctgttaatttttcatgctaattcttagtgtttctggaaaacctcactgtttggcaccaaaaattgttattgctattg

SEQ ID NO: 579275 - DNA, 483 bp, Homo sapiens
tttgctacagcttacgactagcctcatgaatcctttttctcattaattcaaagtttgcaaaaaaaagaaatcacatacttaaaaataaatcacttgagcacagaagcatatcaaaatctaatataaacaaacaaaaaacccaacttatgttaacatgccactgaaactgggctcaagttttcaaaygtcttatgaaatattacactctccagcaggctattttttttttcctaactggagatgaatggcagagttctgatatggaaaagcactccatgtttgtacagaaaggtagcataggaaaagtggtcaaattcaaccagtctgtcctcatcaaacaggcaactactgtcttctcagcatttccaaaagaaatcatatgtctgctactgtttatgtcatatgcctgttaatttttcatgctaattcttagtgtttctggaaaacctcactgtttggcaccaaaaattgttattgctattg

SEQ ID NO: 579276 - DNA, 483 bp, Homo sapiens
tttgctacagcttacgactagcctcatgaatcctttttctcattaattcaaagtttgcaaaaaaaagaaatcacatacttaaaaataaatcacttgagcacagaagcatatcaaaatctaatataaacaaacaaaaaacccaacttatgttaacatgccactgaaactgggctcaagttttcaaatrtcttatgaaatattacactctccagcaggctattttttttttcctaactggagatgaatggcagagttctgatatggaaaagcactccatgtttgtacagaaaggtagcataggaaaagtggtcaaattcaaccagtctgtcctcatcaaacaggcaactactgtcttctcagcatttccaaaagaaatcatatgtctgctactgtttatgtcatatgcctgttaatttttcatgctaattcttagtgtttctggaaaacctcactgtttggcaccaaaaattgttattgctattg

SEQ ID NO: 579277 - DNA, 483 bp, Homo sapiens
tttgctacagcttacgactagcctcatgaatcctttttctcattaattcaaagtttgcaaaaaaaagaaatcacatacttaaaaataaatcacttgagcacagaagcatatcaaaatctaatataaacaaacaaaaaacccaacttatgttaacatgccactgaaactgggctcaagttttcaaatgtcttatgaaatattacactctccagcaggctwttttttttttcctaactggagatgaatggcagagttctgatatggaaaagcactccatgtttgtacagaaaggtagcataggaaaagtggtcaaattcaaccagtctgtcctcatcaaacaggcaactactgtcttctcagcatttccaaaagaaatcatatgtctgctactgtttatgtcatatgcctgttaatttttcatgctaattcttagtgtttctggaaaacctcactgtttggcaccaaaaattgttattgctattg

SEQ ID NO: 579278 - DNA, 238 bp, Homo sapiens
aagcctcttgcagttgagatagaggaaggccactgtctcctgtctgcccctgggaactgaatgtctcggtataaaacccgattgtacatttgttcaattctgagatagtagcaaaaccgccctatggtgggaggcgagatatgtttgcagtaatgctgccttgttattctttactccgctgagatgtttgggtggagagaaacataaatctggattacrtgcacatctaggcatagta

SEQ ID NO: 579279 - DNA, 501 bp, Homo sapiens
agccatctcttatctctggaccctgctatgaccattgttctagcagggtctagagaaaagagactctcttgttatactwactggagaacaagtgttataggtttgaggcatttatgtttggagggcagcttgtacctggtacacaaaggggtgggcaaccgagattttgagagcctgagccttgtactctctaaccaggatgtagacccaagtcttctgggttgctggcttacatgtggtcataggtttgaccattgttctccaattagagaataacaataacacaacaacagcaacaaaagggagcaagctttaactatgacatagttctatctccctgaagttttcctcagccacctttttggaacctgactctatttggaaggggtatctgcatttgacatgaagtctgatgtttgtacaggtaggacctcatgataaatatagattctgagaagctctgagttaaatcaatggccctctccaaggtaattaaagtga

SEQ ID NO: 579280 - DNA, 589 bp, Homo sapiens
taactatcctaaatatatatgcaamaaacacaggagcacccagattcataaagcaagttttttcttagagaccttcaaagagacttagactcacacacaataataggggagactttaacagcctactgacaatatgagacacatcactgagacagaaaattaacaaagatattcaggacctgaactcaccactgtatcaaatggacctgatagatatctacagaactctccacataaaaacaacagaatatacattcttctcatagtcacatggcacatactctataatcagtcacataatcaaaagtaaaacactcctcagtaaagcaaagtaactgaaatcataacaaacagtctcttggaccacagtgaaatcaaattagaaatcaagactaagacatacactaaaaaccatacaattacatgaaaatagaataacctgttcctgaatgacttctgggtaaataatgaaattaaagttgaaatcaagaagttatctgaagctaatgagaacaaagatacaacataccagaatctctgggacacagctaaggcagtgataagacagaaattgatagcactaaatgcc

SEQ ID NO: 579281 - DNA, 532 bp, Homo sapiens
tgagatcgttgctcaggggtcaggccccaggtgttaagaagagcaggcattacaaggtttattgagaagaatatgacagggatgcattaccaggtgcagcatgatgagatggaagacaggactgcacctggctctgaggtcagcctcagcrtgaaggaggcaatatgtttgactctgtggttggggtggagaactttgggtcacttctctctggagtgaagagacgacagctaatcagcttccagtctaaggcagcagccttcctttcccaggtctgatcagttccttaaatttcctttattcttgtagcctctttttacataattgttatttcagaagaaaaggtggagaagctgcactggaaattccagctttgctagccacatgcaaaatgaagctacatgtggaacacaaatgagaactagtggacatctccctagtgctgtgggaggaaggaatacactcaccaaaaagaggaggattggctgcagcgggaaggggagaagaagggaaggaggagaggtgtgactgg

SEQ ID NO: 579282 - DNA, 613 bp, Homo sapiens
tatgttgtaattttcagaatcttcaagtatcacgtaaaatacacagcatagttctgcagctctgtaatgttctgttatgcttggttgtgagattcgtattggcataacagtgcatgagagtaaacatttaatattttaaatttataaaatgcagttgctgtatgtacaaacatattaaaaaggtatatgatagtgtgtttgatattttaggtatatgatactttgtggctattagtgagaaacagtacaccagagaagtgctattttagacaagtgtgtgcatcccttttcctctctgtagcctgtgatgttatttggaggtttgtccatagaaaaacaggtgatgcctaatgttaaaagccaaaaagcagttactatggaaaccagatgcaaatttagatctgtgtccactttttactgcgtacagaaaaaaaaaagctataatagagttaaaaawtatgattcacatccatgtcttctgagtcttaaatgtctgccaaatacggagatgttgagtaagctacaacttctcagcctgaacttccaataaaatctcaaaaatgataaaattagagaacacttcaaaatgttctttttatttcttcatttgcca

SEQ ID NO: 579283 - DNA, 613 bp, Homo sapiens
tatgttgtaattttcagaatcttcaagtatcacgtaaaatacacagcatagttctgcagctctgtaatgttctgttatgcttggttgtgagattcgtattggcataacagtgcatgagagtaaacatttaatattttaaatttataaaatgcagttgctgtatgtacaaacatattaaaaaggtatatgatagtgtgtttgatattttaggtatatgatactttgtggctattagtgagaaacagtacaccagagaagtgctattttagacaagtgtgtgcatcccttttcctctctgtagcctgtgatgttatttggaggtttgtccatagaaaaacaggtgatgcctaatgttaaaagccaaaaagcagttactatggaaaccagatgcaaatttagatctgtgtccactttttactgcgtacagaaaaaaaaaagctataatagagttaaaaattatgattcacatccatgtcttctgagtcttaaatgtctgccaaatacggagatgttgagtaagctacaacttctcagcctgaacttccaataaaatctcaaaaatgatraaattagagaacacttcaaaatgttctttttatttcttcatttgcca

SEQ ID NO: 579284 - DNA, 554 bp, Homo sapiens
ggggttttgccatgtttcccaggctggtcttgaactcctcagctcaagcaattcacccacctcagcctcccaagtgctgggattacaggcgtgagccaccatgcycggcttccattaacaattttttaaagagaaaaaaaatagactatatgggataaaaggaggcatagttcagtatcttataaacaaaaataagcgtcacccctctgacaaagtatgaaccagtcttctaaataaaattaatggcttctttaagaaaagcctcagccaccttgcaaagatgacttgggaaatcttaaggaagaatgtgtctccttctggagacaccagacaaacaactctgaggtgctttctcttcagcaacgaaggacagactcattaacttgtttcatggccaggaattgattaagtcacaggatgttacagccagaagagatttggggggctttttagttcagtctcgccttattgcagatcactaagttgaagccaagagagaaatgacttgccccatgccccacagtttgttcatggtagggccagaacacaggaag

SEQ ID NO: 579285 - DNA, 635 bp, Homo sapiens
cagctactgtaggaccactagtcgcagtttctgtggttgttacagcatcagctgagttgccttggttggtggctggaggaacaaagataccaagtttgaggagacagtacattgaataactaatggcagttacttaatactaaatcatatccaactcattcttttttttttttttttagaggtagggtttccccaagttgcctagattggtcataaacccctgggctcaagcagtccaccctccttggcctcccaaagtgctgagattataggtatgaagtgccatgcccagcctcaactcattcttttctggaaaaatgaaaatatatgactacattaaaaattaaaatacatggttatttctaaacacaaaaaacccacaataaataacattaaaaattaaacagacaaaactggaaaaaatgttattgaaaaatgtgacaaataaagagttaatgtttatttatttattttagraataaggtcttgctctgccacccaggctggagtgcagtagtgtgatcatagttcactgcagccttgagctcctaggctcaagcaatcctcccacctcagcctcccaaatagctaggactacagttgtaacacctccatggctggctaatttttttgtg

SEQ ID NO: 579286 - DNA, 635 bp, Homo sapiens
cagctactgtaggaccactagtcgcagtttctgtggttgttacagcatcagctgagttgccttggttggtggctggaggaacaaagataccaagtttgaggagacagtacattgaataactaatggcagttacttaatactaaatcatatccaactcattcttttttttttttttttagaggtagggtttccccaagttgcctagattggtcataaacccctgggctcaagcagtccaccctccttggcctcccaaagtgctgagattataggtatgaagtgccatgcccagcctcaactcattcttttctggaaaaatgaaaatatatgactacattaaaaattaaaatacatggttatttctaaacacaaaaaacccacaataaataacattaaaaattaaacagacaaaactggaaaaaatgttattgaaaaatgtgacaaataaagagttaatgtttatttatttattttaggaataaggtcttgctctgccacccaggctggagtgcagtrgtgtgatcatagttcactgcagccttgagctcctaggctcaagcaatcctcccacctcagcctcccaaatagctaggactacagttgtaacacctccatggctggctaatttttttgtg

SEQ ID NO: 579287 - DNA, 348 bp, Homo sapiens
tttgacagaagagcccaccaatactcagaagggttaaggaatttgcccagaggcaaagccaggtctgtgagatgacaatgtcctaactatcacttgattaaagttatggggaaggccatccatttaatgaaaaagccaagacccccgaggaacaaacacaagaaaagcaaatagagaaaattggggatcagaatgaaagcggtggaaatagaagtgacctccacggtgccctctatcatcggrgtagcagtgagagtggccaggggctggctctcgctgtggaaaactctggacagaagaaaaggacttggcagactgtgggtgcaaacaaccccaaccccaccagac

SEQ ID NO: 579288 - DNA, 554 bp, Homo sapiens
gtttatttttgtaagaaaccaccaaactttcctctcaaagtggctgtgtcattttgcattcccaccaaygaatgagagttcccattgccccatattctcaccagcattattttactttttattttttaataaaagtaaattaggcctataattatggaaaaaacagctcaaacagggcaaaatcatgtacaataaaaaataaatctccctctcatcctaaacccccaggacccagacccccagtttccttccccagaggcaacttctgtgcccaattccttgtatctccctcctgaaattacctatgcaaatataagcaaatatttgcttgtgtataatccttcccttcttttattcacaaaagagagcatgttatacacattgtaccttacatacagcttttaaagaaatcagtggtttctacatataggtttgtaagactctcaagacagctctgaaggttatcaaacacataagctattctgacatcacagctcagaatcattccacttgacagaagtgaagaaaactcatagcccagatcaccactggac

SEQ ID NO: 579289 - DNA, 581 bp, Homo sapiens
tttatttttgtaagaaaccaccaaactttcctctcaaagtggctgtgtcattttgcattcccaccaacgaatgagagttcccattgccccatattctcaccagcattattttactttttattttttaataaaagtaaattaggcctataattatggaaaaaacagctcaaacagggcaaaatcatgtacaataaaaaataaatctccctctcatcctaaaccccyaggacccagacccccagtttccttccccagaggcaacttctgtgcccaattccttgtatctccctcctgaaattacctatgcaaatataagcaaatatttgcttgtgtataatccttcccttcttttattcacaaaagagagcatgttatacacattgtaccttacatacagcttttaaagaaatcagtggtttctacatataggtttgtaagactctcaagacagctctgaaggttatcaaacacataagctattctgacatcacagctcagaatcattccacttgacagaagtgaagaaaactcatagcccagatcaccactggaccactgagctaactctcctcctcagatct

SEQ ID NO: 579290 - DNA, 581 bp, Homo sapiens
tttatttttgtaagaaaccaccaaactttcctctcaaagtggctgtgtcattttgcattcccaccaacgaatgagagttcccattgccccatattctcaccagcattattttactttttattttttaataaaagtaaattaggcctataattatggaaaaaacagctcaaacagggcaaaatcatgtacaataaaaaataaatctccctctcatcctaaacccccaggacccagamccccagtttccttccccagaggcaacttctgtgcccaattccttgtatctccctcctgaaattacctatgcaaatataagcaaatatttgcttgtgtataatccttcccttcttttattcacaaaagagagcatgttatacacattgtaccttacatacagcttttaaagaaatcagtggtttctacatataggtttgtaagactctcaagacagctctgaaggttatcaaacacataagctattctgacatcacagctcagaatcattccacttgacagaagtgaagaaaactcatagcccagatcaccactggaccactgagctaactctcctcctcagatct

SEQ ID NO: 579291 - DNA, 536 bp, Homo sapiens
ttagaatattcaggtgaggtccattgtccaaatatctatttgtattgatgctttgaggtctttttttttttttaacttgagactgtggataacagcagcaaaaaatgattagttaaaaatgacagatactctattatggaatgagacttatgtaccatttagaggatatcgtgtaagttaattctcttcattaagaaaatgacagccgggcgcggtggctcacgcctgtaatcccagcactttgggaggccgaggcaggcggatcacgasgtcaggagatcgagaccatcctggctaacacagtgaaaccccatctctaccaaaaatacaaaaaaaatagccaggcgtggtggcaggcacctgtagtcccagctactcgggaggctgaggcaggagaatggcgtgaacccgggaggcagagtttgcagtgagcctttattgtgcaactgcactccagcctaggcgacacagcgagactccgtctcaaaaaaaaaaaaaaaaaaaaaaaaaaggaaaatgacagcactttgggaggt

SEQ ID NO: 579292 - DNA, 599 bp, Homo sapiens
gtggagctgaagtcttctggctccgatagaggagatgatttgtcagctgtgaygtcagctgaaggcagtggaagtgtatgcctgggaatagcctccctacatggctcttcccacagctgcgggttctgggggtgagcaggcatgctgcggaaggagccaagaagcctagtctgtgggctcaggtgagctgcaggagctcagaactctccagttaggtgcgaggccgtgagccacaaagggccattggttctacagagagagaggcccaagatttcaaaaaggcgacactttgaaattttaggttagcctccactgataaaaacagttctccttttatttatctcatggataagtgcaatgtaactactaaaatgcacctcccctgactaggactcttgctacagcagggtgatggtgagtggtggagaccatgggacacaggagttcttgcttaaaaccatcagggccaaggattatgtaagaatagggattatatttagaggaccttgaagaaacaaccatgcccggggcagaactgtccccagtggctgcaccatttccagaaatgtgaagcgggactccccgcttcagggtggaga

SEQ ID NO: 579293 - DNA, 599 bp, Homo sapiens
gtggagctgaagtcttctggctccgatagaggagatgatttgtcagctgtgacgtcagctgaaggcagtggaagtgtatgcctgggaatagcctccctacatggctcttcccacagctgcgggttctgggggtgagcaggcatgctgcggaaggagccaagaagcctagtctgtgggctcaggtgagctgcaggagctcagaactctccagttaggtgcgaggccgtgagccacaaagggccattggttctacagagagagaggcccaagatttcaaaaaggcgacactttgaaattttaggttagcctccactgataaaaacagttctccttttatttatctcatggataagtgcaatktaactactaaaatgcacctcccctgactaggactcttgctacagcagggtgatggtgagtggtggagaccatgggacacaggagttcttgcttaaaaccatcagggccaaggattatgtaagaatagggattatatttagaggaccttgaagaaacaaccatgcccggggcagaactgtccccagtggctgcaccatttccagaaatgtgaagcgggactccccgcttcagggtggaga

SEQ ID NO: 579294 - DNA, 582 bp, Homo sapiens
gatgcagcccaaacctctcatgtatggaagctggaggtcagggcaaggaaaaggtggcctgggaccactctgctgcacaggaccgggtgcaggctttcttgacccaccccagggctctttctaatccccacacctgatatgcacttctttctttggaaattggctctctgtccacagataaggtaaaaaacaaaaataaaaaaataaaaaggaatttggctctgtgactttggaaagagatcatcaggttgtatcgtggttgtaagggtctctgcccccaaaactatgagtgctggagggcaggactgtgttttgctcactattttatttccaaggtgcagcatgatccctgtcacacattaggctgttggtatatatctgttgaataagtgaatggatggagtcaaagtgcagttcttacacatgaagacttttatgtgtgactcctaaaattccattaactcctaccagattcgcccctcaaggtgcactccttagttctccagtaggaaacaagatgatgttgggaatgtcagaagtgtaaaggctattaaatactyggtcaggttaggtcacatctgc

SEQ ID NO: 579295 - DNA, 601 bp, Homo sapiens
tactagttattgtttcattgttgctgtatctaggacctgcctatgctgctattgctagcatgttaagtgaggagtcatttgctttcttcgagtctatagaaacttaaatgtggcaaaaattagtacctggttgaaactctctgatgtgttcaagaactgaaagaaaactgagacaagaaagcctcttggaaaaacatgggacagttttctctaatagtaacaattttaaaaattatgatttcacaaccaaaatatatccaaatcttattcagacttccccagttatatctgcagttgggtatgtgtatgtattaagtactatcaaattttgacatctatgaagacttgtgtatccatcaccaccacagtcaagtcaccgcagttccaacacccaaaagaccccttgtgttgcccttttaagatccacacctccctccctcctgtgccctgtctcctgtccctaaacsccagtaaccattaatctatgcttgctttaaaaaatggtactggataaagaaaatgtggcacatatacacaatggaatactatgcagccataaaaaagaatgagttcatgtcctttgcagggacatggatgaagc

SEQ ID NO: 579296 - DNA, 602 bp, Homo sapiens
ccgcaacctccgcctcccaggttcaagggattctcctgcctcagcctcccaagaagctgggattacaggcatgtgccaccacaccyggctaattttgtatttttagtagagatggggtttctccatgtcagtcaggctggtctctaactcctgacctctggtgagcttcccacctcagcctcccaaagtgctgggattacaggcatgaaccaccgcacccggccattacccattattacaaactgatgacaactttacattgattgcacaaacaaattaacaaacaagcaaggagaaaactaataaaaactctacactttaattccttctccacttttaaactttttattatttctatttatatattatcatactatgtgttgtaaagttgttgtagttattattttttatcagttcattttttagtctttctattcaagatatgagtagtttacacaccacaattgcagtattatgatattctgcatttttctccacagttaccaaagacaggaggttttgtaccttcagataatttcttattactcattaatgtcctttctttcagattgaagaacccactttagcatttcttgcaggac

SEQ ID NO: 579297 - DNA, 482 bp, Homo sapiens
ttactgggaatccattgccactggtttttccctaagggacattgctctctctctctctcttaaaaactcaggcctaaatgcagacaaaatcctcttcacagttaagaacaacagaatgtcaagaggtttgtcgaaagcaacaaaagatcaatttaaaaatgcaagaaattttaagccagtgcattttacaaagcwttgatttctagccatgagaggtgccaactttctaaggtttatagcttggtgtagttgtgaacagatagttttctttactttttccaccaacagcagccacaagtttataagcatcttgactcacttttttggttctaaaataccaatctgactccatagggaggtctaaaataccaatctgactccatcttaccttcctgttggtctctatttggttataatctttggactcagaaggctgggaaggtgggagggggtgagggatgagaaattacttaaattactta

SEQ ID NO: 579298 - DNA, 516 bp, Homo sapiens
caagtagctgggattacagttggatgccaccatggctggctaatttttgtacttttagtggagacgggggttccagcatgttggccaggctagtcttgacctcttgatctcaagtgatctgccagcctcggcctctcaaagtgctgagattacagtcatgagccacggcgcccagcccacattttttattggtacgtaatagatatgccgagtttgaggatacrtgtgataatttaatacagttatataatttgtagagactaaatcagtgtatttgagatatttcttaccttaaatatttgtcttttccttatgctagaaacatttaaattcttctcttctagctattttggaatgtacaatagattattgtttactatagttaccctcctgatctatctaacactaggtcttacttattctatcaaactatttgtaaccgttaatcatgtgcagttatttttaaacataaaagtgattctcataaaattttcagctttcctcataaagaaaccc

SEQ ID NO: 579299 - DNA, 516 bp, Homo sapiens
caagtagctgggattacagttggatgccaccatggctggctaatttttgtacttttagtggagacgggggttccagcatgttggccaggctagtcttgacctcttgatctcaagtgatctgccagcctcggcctctcaaagtgctgagattacagtcatgagccacggcgcccagcccacattttttattggtacgtaatagatatgccgagtttgaggatacatgtgataatttaatacagttatataatttgtagagactaaatcagtgtatttgagatatttcttaccttaaatatttgtcttttccttatgctagaaacatttaaattcttctcttctagctattttggaatgtacaatagattattgtttactayagttaccctcctgatctatctaacactaggtcttacttattctatcaaactatttgtaaccgttaatcatgtgcagttatttttaaacataaaagtgattctcataaaattttcagctttcctcataaagaaaccc

SEQ ID NO: 579300 - DNA, 565 bp, Homo sapiens
tgtgtaatgtaattcttcattagggaaatgcaaaattatactacaatgagaaaccactccacacctgtcagaatggctaaaatgaacaaagtctgaccagatcaagtgttggtaaggatgtgtaggaagcaccccagaagatatttacttaatgcaaaggaaggcgtaaaggaagaatagaagaacccacaacacctgacacatatgaaaaacaatacaatgtacygtggaaatctttctaaattaataactgagctacaagccaaccttttcttttaaatggctgtatcacattctacttagtgcaatgttctataatttatctattaccaatgatgattgcatagagtgaatccatgtctttattattattattattaattaattaatttatttatttgagatggagtctctctctgtcgcccatgctggagtgcagtggctcgatctcggttcactgcaagctctgcctcccgggttcacgccattctcctgcctcagcgccccgagaagctgggacgacaggcgcccgccaccatgcctggctaattttttgtgtttttag

SEQ ID NO: 579301 - DNA, 580 bp, Homo sapiens
taatcaacacggcatcaaaacctggagtttctggtagagcacaaatcaaaagctgtaggaatccaacagctggagcctgtctcattatttccctgttctttgatgtgcttttcagccaagtatcttagagaattacttgcagatatgtctatctacaaattctacaytgcttacatattatagtttccaacagagataaatactgtaactgagttctcattttcaaaatagaaccccttctttttttcatcttttattatgcacacaatcttgtaaatggcaaaactgaaaatcagctgcatctactaagagaatcaagtttgttattgactctgagatgctagtttctattagatcatccatcatagctttattatgtgatcaactgcctaattaattttgtactggggtatttagacagaacactgaatgtttcagtgggattttactataatcctgcacctgcggcctcagagatttagatatcctcctatcataagtttgtactgtgcctataatcacttctgcttcactaggattccagcaattcagtccagtgaaattcagcaatattaatttc

SEQ ID NO: 579302 - DNA, 618 bp, Homo sapiens
cacacacctatttctgtctaagcttcaacattagcgtggaccctcaagttaccacttgtacaactagaagcatgagtgtttgcagctgggaaaatgaatttttcacacattgctggagtcctaaccctgagcagacacagcatcctcccagtatacaagttttctgagtgaaatcagtgctgctgacaggatccacgttttcaatctatattcatctacacagcatcatatcttcttgggaagggcattgtcatacagttgaagctaatgttctggcaggcttttgtcttgctrgtctatcattacaatcccaactgaaccggaaggcctcaggggttttctgttgctctcagtcaatcagaatggcaggtaccgacttttcataacatgctgatccaaaggaggcagtcactgcatggggtttccgtgtttggcctcttttcctccttgtacatgagaaacctggaataattaattggaaaaaaattgagaagcattaggtctgcagtatttgaccaggctatgagtttcaattaatgttcataaatttccagtttcctttctcgctgttatctagcaagctgctgctaaaatttaaagttcaagaagaactttccc

SEQ ID NO: 579303 - DNA, 543 bp, Homo sapiens
actttgggaggctgaggcgggcagatcacttgaggcctggagttycagaccagcttggccaacatggcaaaatcccatctctactaaaatattagctgggcatggtggcacacacctgtaatcccagctacttgggaggctgaggcatgagaattgcttgaagcctgagagccggaggttgcagtgagctgagatcatgccactgtacttcatcctgagagacagagtgagattcttaaacaaaaaacaaaaaacaaaaacaacagaaataaacaacagagtggacagagagcctgcagaatgggagaaaatatttgcgacttatgcatctgacaggggactaatatccagaatttacaaggaattcaaacaactcaacaacaacaaaatacaaataaccccattaaaaagtgggcaaaggacatgaatagacattttaaaagaagatatacaaatgaccaaaaagcatatgaaaaaatgctcattattacaaatcatcagagaaatgcagatgaaaaccagaacatgataccatcttacacc

SEQ ID NO: 579304 - DNA, 543 bp, Homo sapiens
actttgggaggctgaggcgggcagatcacttgaggcctggagttcsagaccagcttggccaacatggcaaaatcccatctctactaaaatattagctgggcatggtggcacacacctgtaatcccagctacttgggaggctgaggcatgagaattgcttgaagcctgagagccggaggttgcagtgagctgagatcatgccactgtacttcatcctgagagacagagtgagattcttaaacaaaaaacaaaaaacaaaaacaacagaaataaacaacagagtggacagagagcctgcagaatgggagaaaatatttgcgacttatgcatctgacaggggactaatatccagaatttacaaggaattcaaacaactcaacaacaacaaaatacaaataaccccattaaaaagtgggcaaaggacatgaatagacattttaaaagaagatatacaaatgaccaaaaagcatatgaaaaaatgctcattattacaaatcatcagagaaatgcagatgaaaaccagaacatgataccatcttacacc

SEQ ID NO: 579305 - DNA, 543 bp, Homo sapiens
actttgggaggctgaggcgggcagatcacttgaggcctggagttccagaccagcttggccaacatggcaaaatcccatctctactaaaatattagctgggcatggtggcacacacctgtaatcccagctacttgggaggctgaggcatgagaattgcttgaagcctgagagccggaggttgcagtgagctgagatcatgccactgtacttcatcctgagagacagagtgagattcttaaacaaaaaacaaaaaacaaaarcaacagaaataaacaacagagtggacagagagcctgcagaatgggagaaaatatttgcgacttatgcatctgacaggggactaatatccagaatttacaaggaattcaaacaactcaacaacaacaaaatacaaataaccccattaaaaagtgggcaaaggacatgaatagacattttaaaagaagatatacaaatgaccaaaaagcatatgaaaaaatgctcattattacaaatcatcagagaaatgcagatgaaaaccagaacatgataccatcttacacc

SEQ ID NO: 579306 - DNA, 585 bp, Homo sapiens
gtatgtataaagtctctgaaaaattaaaaataaaaacataggcaatgaatataaagagaaaaaagtaaaataaagtaagatgaaacctgggcaaggtaaacacaggaaaaaacaactgttctctaccttctacgtggcaaaaaattgattctaaaactagaacacaaactgtgttcccaattctaggagayaaatccttacatgcagatcatagtattgcatgaattcacaaattttgagagtttcagcaattgttgcaaccccttcatttcagaagagaagaatcaaaatcaaatgccagttctgtcttctgccacctggctatattcagtgcagactgctaggagcagttgtaagtttttcctggttgacatatttctgagttagtctgacagaggggacataaagtggcatctctaaaagcaaatgaaattatattgtcacaaataggtaaaagctctggccagggctcaacatgagcaatgcccaatgaatcactccaggctgctctctttgcctaaaataatccagggccttttgtgtctgaggaagccatgaatctttctactccccaagcagcaagag

SEQ ID NO: 579307 - DNA, 612 bp, Homo sapiens
atacattcctgtggcagaaatcctacaagaattgtctttgtgatttccttgaatctacaggtcaatttagaaagatttaataagtttacaatgttaagtattctaactcagaatatgatataatcctctttagaatttctttagttgcattcattattaaaaacttttaatataacataacatacatgtatcaatatgcataaacataactcaattgcaattttgctaacaattttttactctcaatattaacagttttctccagctrtatttcacatcttttctcaggcttagtagtaagtattttttgttactattgtaaataaagtatattttattttattttttaatgatttattgcttatatgcagaaatagaattgatttttgttgcttaacattgtatacaataagtttgttgaattcacttgttaattttaatgatacatctgtaaattgaaaagaaattatggattcgatcctgctgtataattttatttctattttttaatcttgataactttcattttcttttctttttttatttctttgactaggactttcaatatgatgttgaagaaaaatgctgatagctgatatccttgtctcagtc

SEQ ID NO: 579308 - DNA, 598 bp, Homo sapiens
actccttcctttttttctttcctattatcaaggatttcagtggctactatgaactaracagtaggctatgtgctgaaaaaggatgaaaaagccataaagtggagatgtcaatacctctttaagaatgataggctacaaagctgattagctgcatacttgcattctttgtcatcactacctgaaggcaaaaggcctttttttgggagcatgtgctaaagataaaattactcttcctagttccttctggcaaatggtcaccaaaaaacacattcaagagccaatgtcttttgtgtgcaatacataggatattaaaagttaaggtaaacaaaggtcaaagattatgctagttggagtctcagggtttcctggttccttaaaatttagttaagtttgggccaatttttggaagtccaaatctcttctcaaatattctgttatttgtgctcctcttaggtgggaatgggaatttttgttctctaccctggggttgacacaaatgtgggactttcttgatcctccctcctaaagaactacagatcaagagcttgtattagatttttaaggggcatagggaaaggttatgtttgatgtcatagag

SEQ ID NO: 579309 - DNA, 549 bp, Homo sapiens
actcatgatttggctgtttgtctattattggtatatargaatgcttgtgatttttgcacactgattttgtatcctgagactttgctggagtagcttaccagcttaaggagatttttggctgagacgatggggttttccaaatatacaatcaggtcatctgcaaacagagataatttcacttcctctcttcctatttgagtaccctttatttctttctcttgactgattgcccttactgccagtgttttttaaattaaaattgttatttgtgtattaaagttttagttcaaagtttcataggttttgattggcttattccaaagcaggttttccccaaaaaacctgttatttttcccatgtaggttacaacatttttcaaagtatatttgatataatagcagaaatgcatgtatctgcaatttctggcaagattaaagttctcaaaaatatttactaaatgggaacaaattataactattattattgtattccttgaacatttttgtctgagcatctcttagtcatagctgaactcaacttttcactggt

SEQ ID NO: 579310 - DNA, 549 bp, Homo sapiens
actcatgatttggctgtttgtctattattggtatataagaatgcttgtgatttttgcacactgattttgtatcctgagactttgctgragtagcttaccagcttaaggagatttttggctgagacgatggggttttccaaatatacaatcaggtcatctgcaaacagagataatttcacttcctctcttcctatttgagtaccctttatttctttctcttgactgattgcccttactgccagtgttttttaaattaaaattgttatttgtgtattaaagttttagttcaaagtttcataggttttgattggcttattccaaagcaggttttccccaaaaaacctgttatttttcccatgtaggttacaacatttttcaaagtatatttgatataatagcagaaatgcatgtatctgcaatttctggcaagattaaagttctcaaaaatatttactaaatgggaacaaattataactattattattgtattccttgaacatttttgtctgagcatctcttagtcatagctgaactcaacttttcactggt

SEQ ID NO: 579311 - DNA, 569 bp, Homo sapiens
actcatgatttggctgtttgtctattattggtatataagaatgcttgtgatttttgcacactgattttgtatcctgagactttgctggagtagcttaccagcttaaggagatttttggctgagacgatggggttttccaaatatacaatcaggtcatctgcaaacagagataatttcacttcctctcttcctatttgagtaccctttatttctttctcttgactgattgcccttactgccagtgttttttaaattaaaattgttatttgtgtattaaagttttagttcaaagtttcataggttttgattggcttattccaaagcaggttttycccaaaaaacctgttatttttcccatgtaggttacaacatttttcaaagtatatttgatataatagcagaaatgcatgtatctgcaatttctggcaagattaaagttctcaaaaatatttactaaatgggaacaaattataactattattattgtattccttgaacatttttgtctgagcatctcttagtcatagctgaactcaacttttcactggtttctgaaatattatccacct

SEQ ID NO: 579312 - DNA, 546 bp, Homo sapiens
  misc_feature 463: n = A,T,C or G
gatcctgtttatttttttaaacgctgagttccaacacacattttaaatctcagtaaaatgtggcttmttttctcagtaaatactgtcaggaaaaattgtccaaaccttggaaatggaagaagagattatggagcatcctttaaatgaagtgctatgttttgtctgttgaatttttcaaggtttatcagattctgaagaggtgtgctcctttgagtgacttcctattgacaaggttaaatgtctcaaaccttttagtctcaggacccctttacactctcaaaactttttgagggtcctaaagacttttgtttatgtgcattttatctattgatatttatcatactataaattaatgctaagcaattaaaatattacacatatatgtgttaatttattttaaataacaataataattccattgcctattagcatgggacactggcttatttttataaaaaataantttttaatttcgaaaaaaattttcaggtgaagaggggatgttgtcctttacaattttttgcaaggtttctttaacatctggct

SEQ ID NO: 579313 - DNA, 548 bp, Homo sapiens
tctgaaagaagaagaagaagaaayaaattcaattttcagaaaatggcccattagaagtctccaattaatgaagtgataaattgagttgtgcattaaaagttaccataaattttatatttcttatatagcaacatatttctctaacttagtaattagtctattgatttgttcataaatgaaatttgagacacaagcaaggtgagttgttacatgttaaatcagttattataaaatcaggtttttgtcaaattgtacttatctaaaagtaaataaataattagctgatccttcacacagtgttttccaatgtcctcattactgtcttctgcacaaaccactagggggcaagacagtctaacatattagagtagacctaattgtatccaacagagggcagtaatacacaaactagggagacaagtcaattacattacatttcagccattcgcatctgccatttcctctggggattataagagggagggaagaaaggaaggaaggaaggaagaaaggaaggaagaaagcaaggaagggagggagggaacaac

SEQ ID NO: 579314 - DNA, 511 bp, Homo sapiens
caaattggaattaaatacaaataataygaattttacttctgaaacatagctaacaatgttacattgcaaaactttaaattttgaattaaaaagtaaaacaacacattacaaatatttaatgcttatctattctcagattttaaaataattgtgggttctaattaacagaataactttaaaatatcacacatgactagtacacaggtgaaccacacacaaatccccctcataaatgcaagttcaacagtatccatactgatctatgtcctatcaaacatgatgagttcagtgatcatgagcttggataccgtggtatgtcaattgtgataatggtttctaaatgtttactcccattttctatacttttttggcattattttgctgtaagctggtaatcaacagtttgcacactggcatcaaatgcaaagcccactttgacacttaatcatagtatcatttcaaatgtaccacatcgaatgtatgagttggggctctccagagaaatggaacc

SEQ ID NO: 579315 - DNA, 557 bp, Homo sapiens
tctgctctacttggtccaccaattcaaatgttagtcttttcagaaataccctcacagacatactcagaacaatgttcacccaaatatctgggcacctccatggctcagccaagttgaaacacaaaattaaccattaaaccatgttttattgaacaatctgcccagaatagtaaatgaaatcatagtcattcaacaaatttgataagtatttagtagatcttatcatggatgtgttcccattgtagtctctgggtttagagtagtgattaaaatggataaaacccctgccytcatggaggtgacattaagaaaggtagttcatatttcataggcaatgaccttccttcaaatggtctgttgaagaatctctaggcctttgcaaagttgtctcattagacagcatccaagcattctagcaatttagtcaattcgtcaacaattacttgctgaatgaatgaatgttaaccatgttcttcttttctcatttctgaggcctgtgttgtatctgtgtagtcacatgaatgtgtcttacatctgtgaacatccaaggctcaatg

SEQ ID NO: 579316 - DNA, 384 bp, Homo sapiens
aagctcttgttcctgatccctaaccttcaggcctcatcactgggcatggtggtggacagaatgtgaacacagacaggtgagcaggaaagcctctctccacaaacattgtccayaaaagttattgttttgttgaatttgggattgtagacggaatagctccttacctcttagtttagagagttggtaaccaaatcgctggctgctcgctttggaatgtggagccaatgggcacttcttgtcctcatctagagatccgagaagccaacttcagggcaacagaaaaactttctcaatattcagtattggtttccaatagagatagaatgtgagccacattatgcaattccaatttttttagtagccacattaaataaggtaaaatga

SEQ ID NO: 579317 - DNA, 630 bp, Homo sapiens
atttagtgtgggagccttaagtcatgggttatcagccaasctggagactgaaattaaccatgtgggaaactgatcaatcagtaatgcttatgtgatgaagtctcaataaaaactatggcaaaaccccatctctacaaaaaatgcaaaaattacctgggcgtggtggctcatgcctgtagtctcagctacttggaaggctaaggctggaggatcacttgagtccaggaggcggaggttgcaatgagctgatatagcaccactgcactccagcctgagagacagagggagaccctgtctcaaaaaaacaaaacagaaaaaaatagctgaccacggtggctcacacctgtaatccccaaactttggaaggttgaggcgtgtggatcaccagaggtcaggagttttagaccagcctaatatggttaaaccctgtatctactaaaaatacaaaaatcagctgggagcggtggtgggcgcctgtagtcccagctacttgggagggtgagaaaggagaattgcttgaacccaggaggcaaaggttgcagtgagcccagtcgtgctactacactccaacttgggcaacaaagcaagactctctctcaaaaaacaaacaaacaaacaaacaaacaaaaa

SEQ ID NO: 579318 - DNA, 630 bp, Homo sapiens
atttagtgtgggagccttaagtcatgggttatcagccaacctggagactgaaattaaccatgtgggaaactgatcaatcagtaatgcttatgtgatgaagtctcaataaaaactatggcaaaaccccatctctacaaaaaatgcaaaaattacctgggcgtggtggctcatgcctgtaktctcagctacttggaaggctaaggctggaggatcacttgagtccaggaggcggaggttgcaatgagctgatatagcaccactgcactccagcctgagagacagagggagaccctgtctcaaaaaaacaaaacagaaaaaaatagctgaccacggtggctcacacctgtaatccccaaactttggaaggttgaggcgtgtggatcaccagaggtcaggagttttagaccagcctaatatggttaaaccctgtatctactaaaaatacaaaaatcagctgggagcggtggtgggcgcctgtagtcccagctacttgggagggtgagaaaggagaattgcttgaacccaggaggcaaaggttgcagtgagcccagtcgtgctactacactccaacttgggcaacaaagcaagactctctctcaaaaaacaaacaaacaaacaaacaaacaaaaa

SEQ ID NO: 579319 - DNA, 630 bp, Homo sapiens
atttagtgtgggagccttaagtcatgggttatcagccaacctggagactgaaattaaccatgtgggaaactgatcaatcagtaatgcttatgtgatgaagtctcaataaaaactatggcaaaaccccatctctacaaaaaatgcaaaaattacctgggcgtggtggctcatgcctgtagtctcagctacttggaaggctaaggctggaggatcacttgagtccaggaggcggaggttgcaatgagctgatatagcaccactgcactccagcctgagagacagagggagaccctgtctcaaaaaaacaaaacagaaaaaaatagctgaccacggtggctcacacctgtaatccccaaactttggaaggttgaggcgtgtggatcaccagaggtcaggagttttagaccagcctaatatggttaaaccctgtatctactaaaaatacaaaaatcagctgggagcggtggtgggcrcctgtagtcccagctacttgggagggtgagaaaggagaattgcttgaacccaggaggcaaaggttgcagtgagcccagtcgtgctactacactccaacttgggcaacaaagcaagactctctctcaaaaaacaaacaaacaaacaaacaaacaaaaa

SEQ ID NO: 579320 - DNA, 442 bp, Homo sapiens
cccatgagaaacccactgacattctagaaaatctgagtaatactgcttttgggtatggtcactgatttgtggtggcctctgaagtagaaagtcaagaaaacctacagattacttttaaaggaaaagtgtaacatttagctaattgtatttggatgtatttgaactcttcactttttcccagaaaagagtcttcaactgactgactgaagagtgtcattactgctgttatgtctcatctgcattctacgttgcatatttctgcataatattcacttattgaaacttcatagtaatttagtcctctataaaatatctgagactgctgtggtgaaaactttgttttttgtttgttgtttgtttttttttttgaggcagagttttgctcttgtcscccatgctggagtgcagtggtgtgatttcagctcgctgcaacctccacctc

SEQ ID NO: 579321 - DNA, 543 bp, Homo sapiens
ccagcctgcgcaacatgacaaaaccccatctctactaaaaatagaaaaattagctgggcgtggtggcataggcctataatcccagctattcaggaggctgaagcacgagaattgtttgaacccgggaggcagaggttgcagtgagccaagaatgcaccactgtactccagcctgggcaacagagcaagactctgtctcagggaaaaaaaagaaaagaaacggtctgtcaaatgctcatttatgcaaagtcatttgcacctatgcaattagattatcatggagacaatctgctcagactaatagctttcattgcaaatgaaattattctagttttaatccatcttaattgagtaggagagcaggmatgggtaggtgggtcagtaaatgaacctccaagatcaaagcagataaaaggatgttcattccaaagtggatcactaaataattttttggcacagagtaatagaatcattaaaatggaaaaaaaaaattagaaattatctaattcaccctctcagccaaagcacaactttcctccacata

SEQ ID NO: 579322 - DNA, 580 bp, Homo sapiens
ctcctgtacagcctgtggaactgtgagtcaattaaacttcttttctttctaaattacccagtctcargtagttctttataacagtgtaagaacgaatacagaaaattggtaacgagaatgtacatgtatatatgtgtgtgtaatgtatctttcactgggtctgtataaaattaggaaaagattggaaaggataggcacaaaaggtactatgaaaaatggagttgaatgagaggggaaaagttgtcatgtttttatattttttcatttcaaaagtagtaacttttacaataattaggatggtaattttagctacatctatgaggctttcatttgtaaactgaataaaatatttgacttcaattctttctaccataaatacatttttttcaattagcccacatattctttagtttatagctctattttttacatcatagtcactaaataaatatttgttgaataaataaatggccattctctatcttttatttgtctgtgagattcttttcgtctttaagtgtattaactagttttgatttctattgagtttgttagcactaattatttatcaaatttttca

SEQ ID NO: 579323 - DNA, 580 bp, Homo sapiens
ctcctgtacagcctgtggaactgtgagtcaattaaacttcttttctttctaaattacccagtctcaagtagttctttataacagtgtaagaacgaatacagaaaattggtaacgagaatgtacatgtatatatgtgtgtgtaatgtatctttcactgggtctgtataaaattaggaaaagattggaaaggataggcacaaaaggtactatgaaaaatggagttgaatgagaggggaaaagttgtcatgtttttatattttttcatttcaaaagtagtaacttttacaataattaggatggtaattttagctacatctatgaggctttcatttgtaaactgaataaaatatttgacttcaattctttctaccataaatacatttttttcaattagcccacatattctttagtttatagctctattttttacatcatagtcactaaataaatatttgttgaataaataaatggccattctctatcttttatttgtctgtgagattcttttcstctttaagtgtattaactagttttgatttctattgagtttgttagcactaattatttatcaaatttttca

SEQ ID NO: 579324 - DNA, 529 bp, Homo sapiens
tctcaaaaaaaaaaaaaaaaaaaaaaaaaaaaaaaaaaaaaactaaaggaaatcagtaaatccagggagggtcagctttcaggagtaattcagagactcctgtattttgattgatttgtaagggcatgaatggacaacttatttatatatcatttttttctgattataaaaataaaatctgttctgcagaaaacttagaaaacatagaaaaatgtaagcaagaaaatagaaatatcacaattgttgtgccagaaataactgctgttaaraattttacttatttctttctgatctatgtgcacacacatatacacacaacacaaacacacaaatggaattatactgtatatagagtgttgtggattattataacatagatatagtagaatgtatttaaacttctcatattgttgggatttatgtctatttttataaattatacctagcaataagaatatgcttttacatttaaaaaatttttttttttaaaatttgtttagaccacattccttgattttaaatgattggg

SEQ ID NO: 579325 - DNA, 529 bp, Homo sapiens
tctcaaaaaaaaaaaaaaaaaaaaaaaaaaaaaaaaaaaaaactaaaggaaatcagtaaatccagggagggtcagctttcaggagtaattcagagactcctgtattttgattgatttgtaagggcatgaatggacaacttatttatatatcatttttttctgattataaaaataaaatctgttctgcagaaaacttagaaaacatagaaaaatgtaagcaagaaaatagaaatatcacaattgttgtgccagaaataactgctgttaagaattttacttatttctttctgatctatgtgcacacacatatacacacaacacaaacacacaaatggaattatactgtatatagagtgttgtggattattataacatagatatagtagaatgtatttaaacttctcatattgttgggatttatgtctatttttataaattatacctagcaataagaatatgcttttacatttwaaaaatttttttttttaaaatttgtttagaccacattccttgattttaaatgattggg

SEQ ID NO: 579326 - DNA, 529 bp, Homo sapiens
tctcaaaaaaaaaaaaaaaaaaaaaaaaaaaaaaaaaaaaaactaaaggaaatcagtaaatccagggagggtcagctttcaggagtaattcagagactcctgtattttgattgatttgtaagggcatgaatggacaacttatttatatatcatttttttctgattataaaaataaaatctgttctgcagaaaacttagaaaacatagaaaaatgtaagcaagaaaatagaaatatcacaattgttgtgccagaaataactgctgttaagaattttacttatttctttctgatctatgtgcacacacatatacacacaacacaaacacacaaatggaattatactgtatatagagtgttgtggattattataacatagatatagtagaatgtatttaaacttctcatattgttgggatttatgtctatttttataaattatacctagcaataagaatatgcttttacatttawaaaatttttttttttaaaatttgtttagaccacattccttgattttaaatgattggg

SEQ ID NO: 579327 - DNA, 466 bp, Homo sapiens
aaccagctcttgcctgaactaatagagtgaaaactcatttattaccacagggaaagcaccaagccactcatgaacgatccaccccatgacactaaccctcccaccaggctccacctccaacattgaggatcacatttcaacaagagatttagaagggacaaatatccatattgtataagcagtcaaaagcacaatttctggtgttatgaaatctctctctctatatatatgtctgtgtgtgtgtgtgtgtgtgtatgtacacacatagacacagtatacatacatgcaaatctcagcctggctatggaccaagttccttaattttcttattttatttttatttttttgagatggaatctcactctgtcgcccatgctggagtgcagtggctctatcttggctcactgcagtctccgcctcctgggttcacaycattctcctgcctcagcctcccgagtagctggga

SEQ ID NO: 579328 - DNA, 624 bp, Homo sapiens
gtagtgcctaatttcttatggttgaaaccttagttttttgttttttttttctgtattccccagagaccttataaaccagccttacagctgaggtgctgtctctagccttcagattttcccaatacttcttattagctactctgcattttgctttattctaaaacctcygccattttgttccaccattccactggtatatctgtaatcacaggatctctctcaggtgatttgcttgtcttggctcccacctgttgtctattactgcatcttccatgaatgcttactacccacctggggaagcacttaattttagatctttcttcactgcagctaattcttctattttgggatgtgtctggtgtgatcagagtactttctaatcaccttctctaatatgatcacagtaaacttggccctgaagcctgcctgttatcccatgttatttctattgcccttcacaggggattgcacactcactatggaaaaaaaaaaaaccccaccaaactgtcctacaaaatgatctaattaagaaattaactatttactgacttgtgctatcatttaatttttaataggaaacatatatgcactgaagtaggaaaaaaacaaaaattttaaaaccct

SEQ ID NO: 579329 - DNA, 536 bp, Homo sapiens
ccttcctctttggaagctctaaacaactcttactgcatttaggggactcccttggcataacaaataagaaagggcatggcattcaaagccctgtaccttctggacctagcacacatttccagccctgcctcttctttctacttgtaccaccgttggaatttcccccagtcctgaaggccaggctcagttgccacttccttcatgagaactttgctgttcttctcccaccagctttgatctctcctacttaccaactagagtgctttagtmcctttcttttgtcatttacattctgtcatctcttacggttaattcatgtatttgactccattgagtcaaggactgtgcactcagggcacctcccccacagggctgagcaccttatctggaaacttcgtatgtgttagaactagattcacaagccagctaagcatatgttacttagttctgtggttcaaatgtatagcaaacttgaccatttactaaaaggttgaacccacccagagaattatttcacttctcttaatatatactta

SEQ ID NO: 579330 - DNA, 582 bp, Homo sapiens
caggagtttgagaccagcctgggcaacatagcaaaaccctgtttccaccaaaaatataaaaacttagctgggcatggtggcatgcacctgtggtcccagctactctggagactgaggtgggaagatcgcttgagcctgggaggcagaggttacagtgagccragatggcgccactgcattccagcctggacgatagagcaaaaccctgtctcaaaaaaaaaagtttgccaagaccaggcacagtggctcacacctaccatcccagcactttgggaggccaaggtgggaggatcacttaagccctggagtttaagaccagcctgggcaacatattgggaccctgtgtctacaaaaaaaaaaaaaatgaaaaaaattaattgattagctgggcatagtggcacatgtctttagtcccagctacttgggaggctgtggtggggggattgcatgagcctaggagatcaaggctatggtgagccatgatcacgctactactacattccttgaaatcataagctgaagattgtgatggaaatgtgactagaagtaactgtagtctaggtcctcaggcccaccaagaag

SEQ ID NO: 579331 - DNA, 493 bp, Homo sapiens
aaggcagtgtgtgtgtgtgtgtgtgtgtgtgtgtgagagagagagagagagagagacagacagacagacacacagacacacacaaacaggctgataggagcctaaaaacaggtttacaggccaggcgcggtggctcatgcctgtaatcccaacagtttgggaggctgaggtgggcggatcacctgagtttgggagtttgagaccagcctgaccaacatggagaaaccttgtctctactaaaaatacaaaattagctgggcatggtgacgcatgcctgtaatcccagttacgcctataatcccagttactcrggaggctgaggcagaattgcttgaacccgggaggcagaggttgcagtgagtggagatggcgccattgcactccagcctgggcaacaagagcaaaactccatctcaaaaaacaaacaaacaaacaaataaaacaggtttataaatctgtactgagtttggtaggtcatggggaattactaaag

SEQ ID NO: 579332 - DNA, 505 bp, Homo sapiens
tcataaagggatgctggattttgtcaaatgctttttctgtgtctattgagatgacaatgtgatttttttaacaaaaattctgtttatgtggtgtatcacatttattgacttgtggatgttaaaccatccctgtatccctggtgtgaaacccacttgatcatgggggattatctttttgctatgctgttggatttggttaggtagtattttgttgaggatttttatatctatrttcatcagggacattggtctgtagttttctttttttgttatgtccttccctagttttgatattagggtgatactggctttatggaattatttaaggaggattccctctttctctgtcttttggaataatttcagtagaattgttgagaattcttctttgaatgtctgatagaattcagttgtgaatccttctggtcctggacttttttttttgtttggcaatttttaaattaccatttgaatctcactgcttgttattggtctgttcagagtt

SEQ ID NO: 579333 - DNA, 505 bp, Homo sapiens
tcataaagggatgctggattttgtcaaatgctttttctgtgtctattgagatgacaatgtgatttttttaacaaaaattctgtttatgtggtgtatcacatttattgacttgtggatgttaaaccatccctgtatccctggtgtgaaacccacttgatcatgggggattatctttttgctatgctgttggatttggttaggtagtattttgttgaggatttttatatctatattcatcagggacattggtctgtagttttctttttttgttatgtccttccctagttttgatattagggtgatactggctttatggarttatttaaggaggattccctctttctctgtcttttggaataatttcagtagaattgttgagaattcttctttgaatgtctgatagaattcagttgtgaatccttctggtcctggacttttttttttgtttggcaatttttaaattaccatttgaatctcactgcttgttattggtctgttcagagtt

SEQ ID NO: 579334 - DNA, 449 bp, Homo sapiens
ttattttttaagtttctttaagttgattttcacctttctctgatacctccttgagkagcttaataattgaccttctgaattctctttctgacaattcagagatttcttcttggtttggatccatgtttgctggtgagctagtgtgaccttttggggtgttatagaacgttgttttattatactaccagaattgtttttctggttctttctcatttgggtagactatgtcagaggaaagatttggggtgcaagggctgctgttcagatttgtcccactggcgatcctttgatgtggtgctctcccctttcctctagagatgcggctttctgaaagctggactgcagcgattgttattgcttttctcggtctagccacccagcggggctaccaggctctgggctgttactggggagtgtctgcaaagagtcctgtgatgtgattcatcttc

SEQ ID NO: 579335 - DNA, 449 bp, Homo sapiens
ttattttttaagtttctttaagttgattttcacctttctctgatacctccttgagtagcttaataattgaccttctgaattctctttctgacaattcagagatttcttcttggtttggatccatgtttgctggtgagctagtgtgaccttttggggtgttatagaacsttgttttattatactaccagaattgtttttctggttctttctcatttgggtagactatgtcagaggaaagatttggggtgcaagggctgctgttcagatttgtcccactggcgatcctttgatgtggtgctctcccctttcctctagagatgcggctttctgaaagctggactgcagcgattgttattgcttttctcggtctagccacccagcggggctaccaggctctgggctgttactggggagtgtctgcaaagagtcctgtgatgtgattcatcttc

SEQ ID NO: 579336 - DNA, 416 bp, Homo sapiens
ctgaggcacactagagtcagattgtctaaagtcaaagacagagaaagaattttaaaagtagcaagagaaaagcatcaagtcacatataaasaaatgcctattagactaatagcagattcctcaacagaaaccttacaggccaggagagaatgggatgatatatttgaaatgctagaagaaaaaaagtgccagccaggaatatcacacccagcaaaactatccttcagaaatgaagaagaaataaaatcttttgcagataagcaaaaactaagggaattcatcaccactagatcaattagtcttacaagaaatgctcaagggagtctgacatctggaagtaaaaccactatcatgaaaactataaaactcactggcagagccaatacacaaaggagaaagaaaaaggaatcaaacct

SEQ ID NO: 579337 - DNA, 500 bp, Homo sapiens
ttattagttccccaaattaatacttttataattttttatgcctgtctttactgcaatctctgaacataaattgtgaagatttcatggacacttatcacttccccaatcaatacccttgtgatttcctatgcctgtctttactttaatcccttaatcctgtcatctcgtaagctgaggaggatgtatgtcgcctcargaccctgtgatgattgtgctaactgcacaaattatttgtagagcatgtgtgtttgaacaatatgaaatctgggcaccttgaaaaaagaacaggataacagcaatgttcagggaacaagagagataaccttaaattctgagcaccggtgagccaggtggaacagagccatatttctcttctttcaaaagcaaatgggagaaatattgctgaattctttttctcagcaaggaacatccctgagaaagagaatgcgtccctgagggtgggcctcgaaaatggcccccttgggtgtggccgtctttta

SEQ ID NO: 579338 - DNA, 463 bp, Homo sapiens
aatagggcatcaggaagtcttgaatgtattgtactattgattctttttttttttttttttttttttttgagacagggtctcactttgggagttcagtggyacaatcttggctcattgcaccctcgaactcctgggctcaagtgattctcccacctcagcctcccaagtagctgggactccaggagtgcaccaccatgcctagctaagttttgtattttttgtagagacagaattttgccatgttgctcaggctggtctcaaactcctgagctcaagcaatccgcctgccttggcctctcagagtgctaggattacaggtgtgagccaccatgccagccttactgcacttttgactttaataatttatcgacattagctcattaattgtaacagataggctataatgtaagatgttaattgaaactgtgtgggatgggcatagaggaactctttgtattatctt

SEQ ID NO: 579339 - DNA, 466 bp, Homo sapiens
atagggcatcaggaagtcttgaatgtattgtactattgattctttttttttttttttttttttttttgagacagggtctcactttgggagttcagtggcacaatcttggctcattgcaccctcgamctcctgggctcaagtgattctcccacctcagcctcccaagtagctgggactccaggagtgcaccaccatgcctagctaagttttgtattttttgtagagacagaattttgccatgttgctcaggctggtctcaaactcctgagctcaagcaatccgcctgccttggcctctcagagtgctaggattacaggtgtgagccaccatgccagccttactgcacttttgactttaataatttatcgacattagctcattaattgtaacagataggctataatgtaagatgttaattgaaactgtgtgggatgggcatagaggaactctttgtattatcttctca

SEQ ID NO: 579340 - DNA, 443 bp, Homo sapiens
caggaagtcttgaatgtattgtactattgattctttttttttttttttttttttttttgagacagggtctcactttgggagttcagtggcacaatcttggctcattgcaccctcgaactcctgggctcaagtgattctcccacctcagcctcccaagtagctgggactccaggagtgcaccaccatgcctagctaagttttgtattttttgtagagacagaattttgccatgttgctcaggctggtctcaaactcctgagctcaagcaatccrcctgccttggcctctcagagtgctaggattacaggtgtgagccaccatgccagccttactgcacttttgactttaataatttatcgacattagctcattaattgtaacagataggctataatgtaagatgttaattgaaactgtgtgggatgggcatagaggaactcttt

SEQ ID NO: 579341 - DNA, 466 bp, Homo sapiens
atagggcatcaggaagtcttgaatgtattgtactattgattctttttttttttttttttttttttttgagacagggtctcactttgggagttcagtggcacaatcttggctcattgcaccctcgaactcctgggctcaagtgattctcccacctcagcctcccaagtagctgggactccaggagtgcaccaccatgcctagctaagttttgtattttttgtagagacagaattttgccatgttgctcaggctggtctcaaactcctgagctcaagcaatccgcctgccttggcctctcagagtgctaggattacaggtgtgagccaccatgccagccttactgcacttttgactttaataatttatcgacattrgctcattaattgtaacagataggctataatgtaagatgttaattgaaactgtgtgggatgggcatagaggaactctttgtattatcttctca

SEQ ID NO: 579342 - DNA, 604 bp, Homo sapiens
  misc_feature 465, 466, 467, 468, 469, 470, 471, 472, 473, 474, 475, 476,477, 478, 479, 480, 481, 482, 483, 484, 485, 486, 487, 488,489, 490, 491, 492, 493, 494, 495, 496, 497, 498, 499, 500,501, 502, 503, 504, 505, 506, 507, 508, 509, 510, 511: n = A,T,C or G
  misc_feature 512, 513, 514, 515, 516, 517, 518, 519, 520, 521, 522, 523,524, 525, 526, 527, 528, 529, 530, 531, 532, 533, 534, 535,536, 537, 538, 539, 540, 541, 542, 543, 544, 545, 546, 547,548, 549, 550, 551, 552, 553, 554, 555, 556, 557, 558: n = A,T,C or G
  misc_feature 559, 560, 561, 562, 563, 564: n = A,T,C or G
ttgttacaactactcatctctgcctttgtagcatgaagtcaagcagatataatacaaatggacatggcagtattccaataaaactttactgataaaaatatatggtaggccagatttggcaagagggccatagtttgcttggccctgatctatgtattcaggacctggtctacattcaggttagtatgctattctggacaaattggcattagtagctttaatgsatgaaatgaagtcaaaggcagtgaatgggctcagaggtggtatcagaggtaagagagggaaggtggggaaccttcctcactggaaggttattatcgtcaaggtgttcctaaggagacggtatggtacttaaaacccagagacttcatgattgccctgtaaagaggaactcttggggtgtgctgcaggagctcatgacacaaactcttaccaaaggcttcctttcctcataaaatctctgcnnnnnnnnnnnnnnnnnnnnnnnnnnnnnnnnnnnnnnnnnnnnnnnnnnnnnnnnnnnnnnnnnnnnnnnnnnnnnnnnnnnnnnnnnnnnnnnnnnnngaaatgttgaggcgtacacattcttattgtggagagcccc

SEQ ID NO: 579343 - DNA, 546 bp, Homo sapiens
ttttctctgtttcttcaaatattgccaatatcagttctcactgtatcccctgtacttgttttttgtccagcttgaaactcatttagagcagctaggtcctcatttaaaagctccttacctttctgtggcttcaattcccacttaacaatattagttttacctttcccagtgtgacaacaatacttttagacagagcagatggaagtaaaatagaagttgaatgaacacatttgttcttgtgctttgctagtattaaatctttatctgtgaggtagatgcaatacagcttttatcaaaacaagcaaaaacattaaaaaaaacaaaaataaagccactattaccaccaacattgtctctccccacacccccaatatctccatttaaaaagtcwtattaacttaaatattcacttcattttgagtcttagcttttctgatttgttagttatagcttttaataaaccacctacaaattatatattttttagtcttcctatttagttgaagaatattagatgatctttattttgaaatattttcaaggcct

SEQ ID NO: 579344 - DNA, 583 bp, Homo sapiens
ttttagcgccgagtggatacttgataatagtgagtaaccaacacttttctctttggggtgtagctatctttggagaagtgacgtggaagtttcaatgtcatgctctaaatgcaatgctaaaccatatgcctccagaagctyttggtggcttaggatagattccatgtgctttggcagtaattaccttcacttctccttttctttcacttcccacaatcaatccattagcaagtctggttagctctgcccttaaaacatatcctagctctttctgtctctactgttactgatccagaccaagccatttttttaggtttatgtgctagccttttaaactttcgtgcttctacttttgcctctgaaaaatgggaaagagttaaacgttgataaagataccattcctttgattattcaaagaagtacttaaaaatagataaacaaagattttgaaatttgatctaaacattgcacttagtttttatagtgtgtgttttattgtaatggcaagtagcatttgtttaagaagatggtctgtagggccattccagattagctaattctgaatggttttccaccagatttc

SEQ ID NO: 579345 - DNA, 539 bp, Homo sapiens
tgatgaggtgggtaggccagtccccagtaccacaggcggtgcttgcaggtaggtgtcagctgatgtggtagcagccaggagttcaggctcaacctcaggcttccagggtgagtgctaaggtgcccaaagtggtagactggttgggcaatccctaggacccccagctatatgctgttttagatggcatggctaagctgtgctgggatggcatgtgctcaggcttcccaaaggtgaaagcaggtaccagccatggttggcaggggcaagtctcttagtatcctggtgaagtgcttgggcgaagggtgatagcagctgcactgagaccctgccacgggagagtgctggacaacccttggtggccacagcttgggctagtgggtggggagtgtgcatccctctcatgtcccwgtcctggtgaggctcacgccccagccctggtggcagtaccttccccctagctctcacctcagctctggtgataggagtccctgcccagcttgcaactaggtccaagtggcgactcatgcccactgcgtact

SEQ ID NO: 579346 - DNA, 539 bp, Homo sapiens
tgatgaggtgggtaggccagtccccagtaccacaggcggtgcttgcaggtaggtgtcagctgatgtggtagcagccaggagttcaggctcaacctcaggcttccagggtgagtgctaaggtgcccaaagtggtagactggttgggcaatccctaggacccccagctatatgctgttttagatggcatggctaagctgtgctgggatggcatgtgctcaggcttcccaaaggtgaaagcaggtaccagccatggttggcaggggcaagtctcttagtatcctggtgaagtgcttgggcgaagggtgatagcagctgcactgagaccctgccacgggagagtgctggacaacccttggtggccacagcttgggctagtgggtggggagtgtgcatccctctcatgtcccagtcctggtgaggctcacgccccagccctggtggcagtaccttccccctagctctcacctcagctctggtgataggagtccctgcccagctygcaactaggtccaagtggcgactcatgcccactgcgtact

SEQ ID NO: 579347 - DNA, 551 bp, Homo sapiens
gagtccctgcccagcttgcaactaggtccaagtggcgactcatgcccactgcgtactaatctcagtgttggtggtgttcacttttcagcactggcagccacagcccatgcctcactcatttctcaaccctggctatgaaagcactctcccagctcatgtcccagtctcagcaacaacagcccaagttttcctaatgcttcygttccagtgctgccgggatccaggagagcatgcagtcttccaaaggctaggttagaaacaggcatcttgctgtagctgcttaggtctaggaaagtgtgtgggtctcagcagaagctgcctccttggagtggttccatcccaccgtcttcaggcagctccctgtgttagtttcagggcttggggtggcaggttgaggggatctcctgtggccaggattgcatggttcaatagtgaggatgtgggccgctagaagtctctcatttccaccttcccagcattgagaagtcactcgcagctgatcccgcccaataaggctgccactctttcttatgcttctttacttttggtat

SEQ ID NO: 579348 - DNA, 551 bp, Homo sapiens
gagtccctgcccagcttgcaactaggtccaagtggcgactcatgcccactgcgtactaatctcagtgttggtggtgttcacttttcagcactggcagccacagcccatgcctcactcatttctcaaccctggctatgaaagcactctcccagctcatgtcccagtctcagcaacaacagcccaagttttcctaatgcttctgttccagtgctgccgggatccaggagagcatgcagtcttccaaaggctaggttagaaacaggcatcttgctgtagctgcttaggtctaggaaagtgtgtgggtctcagcagaagctgcckccttggagtggttccatcccaccgtcttcaggcagctccctgtgttagtttcagggcttggggtggcaggttgaggggatctcctgtggccaggattgcatggttcaatagtgaggatgtgggccgctagaagtctctcatttccaccttcccagcattgagaagtcactcgcagctgatcccgcccaataaggctgccactctttcttatgcttctttacttttggtat

SEQ ID NO: 579349 - DNA, 573 bp, Homo sapiens
agtgttggcagcagtaggctcagagtgcctgtcctttggacccagggcagcgtatgctagcacaggtgttagcgggtccaggtgggttgattcataggtctccaagtggcttgcttgggtgccagtagtggcagtggtgggytcagtgggtgggtgggtccttaggccctgggcagccagtgtgacatgggcaatggcagtaacagtggtgggagtaacctctgggtcccaagcggttcatgctagttttggcagtggctgcaatgggctgagtgggcttgtccccaggtctgcaggtagcatgtgcttgtgggtgcccactgtggtggtcgtggcagtttgagtggacctgacctcaggcccctgggaggggtgttcaggtgccaacagtattgaattgggctgggtcatcaccaggcccatggacagagtgcttgatcactgagaagacattgttgggccagggaaaactgtcttaagggcccctgatggtgtgtacaaactgtggtaggcagggacagtgtgatcctcaggcccaaggtagaattctctggtgggggagtcagtggcttc

SEQ ID NO: 579350 - DNA, 575 bp, Homo sapiens
taggtctccaagtggcttgcttgggtgccagtagtggcagtggtgggttcagtgggtgggtgggtccttaggccctgggcagccagtgtgacatgggcaatggcagtaacagtggtgggagtaacctctgggtcccaagcrgttcatgctagttttggcagtggctgcaatgggctgagtgggcttgtccccaggtctgcaggtagcatgtgcttgtgggtgcccactgtggtggtcgtggcagtttgagtggacctgacctcaggcccctgggaggggtgttcaggtgccaacagtattgaattgggctgggtcatcaccaggcccatggacagagtgcttgatcactgagaagacattgttgggccagggaaaactgtcttaagggcccctgatggtgtgtacaaactgtggtaggcagggacagtgtgatcctcaggcccaaggtagaattctctggtgggggagtcagtggcttcactgcagccctgctactggggaggcggggggttgctttcagcagcagcagcagccatatggagacggctggggagcatgcactttgctagtgccct

SEQ ID NO: 579351 - DNA, 575 bp, Homo sapiens
taggtctccaagtggcttgcttgggtgccagtagtggcagtggtgggttcagtgggtgggtgggtccttaggccctgggcagccagtgtgacatgggcaatggcagtaacagtggtgggagtaacctctgggtcccaagcggttcatgctagttttggcagtggctgcaatgggctgagtgggcttgtccccaggtctgcaggtagcatgtgcttgtgggtgcccactgtggtggtcgtggcagtttgagtggacctgacctcaggcccctgggaggggtgttcaggtgccaacagtattgaattgggctgggtcatcaccaggcccatggacagagtgcttgatcactgagaagacattgttgggccagggaaaactgtcttaagggcccctgatggtgtgtacaaactgtggtaggcagggacagtgtgatcctcaggcccaaggtrgaattctctggtgggggagtcagtggcttcactgcagccctgctactggggaggcggggggttgctttcagcagcagcagcagccatatggagacggctggggagcatgcactttgctagtgccct

SEQ ID NO: 579352 - DNA, 303 bp, Homo sapiens
agattgggctctcgatatggcaccttgctgtggctgcttaaggctcacagtgtgtgtgggacccagagtgagttccctctctggggcaatgctgtctcatggtttccaggcagctccctatgttagtcttggtccatgagagtcaagggactgtccgtggcttgcagagtctatggtgggacagtggacctttggggtcackcactcacctttctccatgttggggagcctctcctcgctcccagctcatccagccgagcaggctgccttgcctccctctcctcccttgctttaggtgtttcc

SEQ ID NO: 579353 - DNA, 541 bp, Homo sapiens
acataaaacctaaattgcttcccaccttggaaagcagggctgtgatcaggaaatgtagctccagagatttcctaagtaacgttctttttaccctgttgttagttgtgcctttgtcaggattttgagtaaaggtatgtgcagtacctcccaaagtgctgggattacaggcgtgagccactgcaccccaccacaagttacttctyattaccatatgcttccagcagatgattaagcactagttatattttttaagttgtcccatgaactcaaagttcctttctttctctcagctgtagaatgacattaggtttaatttgccattttccccactgctccctgatccacaaggataaatggaagaaggagctggcagaaaccgatttctacgagtcatcaaaggcgtgttattaaaagttaatgtattttccattgccaggtttgggactaatgtagcaataaattgaatgaagatggctcagacagtctacataatgggaaatcagctaatgtgaaactagagaaccttctgtttttctagcgg

SEQ ID NO: 579354 - DNA, 541 bp, Homo sapiens
acataaaacctaaattgcttcccaccttggaaagcagggctgtgatcaggaaatgtagctccagagatttcctaagtaacgttctttttaccctgttgttagttgtgcctttgtcaggattttgagtaaaggtatgtgcagtacctcccaaagtgctgggattacaggcgtgagccactgcaccccaccacaagttacttcttattaccatatgcttccagcagatgattaagcactagttatattttttaagttgtcccatgaactcaaarttcctttctttctctcagctgtagaatgacattaggtttaatttgccattttccccactgctccctgatccacaaggataaatggaagaaggagctggcagaaaccgatttctacgagtcatcaaaggcgtgttattaaaagttaatgtattttccattgccaggtttgggactaatgtagcaataaattgaatgaagatggctcagacagtctacataatgggaaatcagctaatgtgaaactagagaaccttctgtttttctagcgg

SEQ ID NO: 579355 - DNA, 615 bp, Homo sapiens
ccctttccatggccatgacccagaagttatcacccgtttcctagaaagttctaagtaacctgsctgggcgtggtggctcacgcctgtaatcctagcactttgggaggcctaggcaggcggctcacttgaggccaggagttcaagagcagtgtaatcaacatggtgaacaaaaattagccatgcgtggtggcagacacctgtaatctcagctactcaggaggctgaggcaggagaatcgcttgagcccaggaggcggaggttgcagtgagctaagattgtgccattgcactccagcctgagtgacaagagcaaaacaccattccctctctcttccccccaaaaaagaaagttctgaatagcccatccttcagtttgcattaacctgccccttaatttgtgtgtaattgaaagtgggtataagtgagcataaatacagttgccaagagcccataccctgctgactctgtgcatggtctatgagttagtcctgctccacaaggagcaaattttaccatttgataaaatattgctgtctaacaccacctgctcatgctcaacttcttccctgggcaaagctaagaaccctcctggactaagcaccaattctggggctca

SEQ ID NO: 579356 - DNA, 615 bp, Homo sapiens
ccctttccatggccatgacccagaagttatcacccgtttcctagaaagttctaagtaacctggctgggcgtggtggctcacgcctgtaatcctagcactttgggaggcctaggcaggcggctcacttgaggccaggagttcaagagcagtgtaatcaacatggtgaacaaaaattagccatgcgtggtggcagacacctgtaatctcagctactcaggaggctgaggcaggagaatcgcttgagcccaggaggcggaggttgcagtgagctaagattgtgccattgcactccagcctgagtgacaagagcaaaacaccattccctctctcttccccccaaaaaagaaagttctgaatagcccatccttcagtttgcattaacctgccccttaatttgtgtgtaattgaaagtgggtataagtgagcataaatacagttgccaagagcccataccctgctgactctgtgcatggyctatgagttagtcctgctccacaaggagcaaattttaccatttgataaaatattgctgtctaacaccacctgctcatgctcaacttcttccctgggcaaagctaagaaccctcctggactaagcaccaattctggggctca

SEQ ID NO: 579357 - DNA, 625 bp, Homo sapiens
tgggtcaacccagatgttggccaagagctgagtgatctcaaggatcatctgagagaggtggcatggtggagaggaaaaggcattatcttttagacatgcagagaaggctgctgctttctaactctgcaaggggaagctgtttgactgcttgtggccttggttttggtttgcaacatgggaatctgccagcatttcagggctgttgtgaggatgagtggcaatgtgtgtgcgcatggcagtgtgctcagcaagtggaagtgattattggtaactccattttttttcaggtaagaaaaccagtgcttacctgaagattaaggaaggtagtaaggaaggaagatgattcagctattcatttgtgaactgagtcagtgcttctccaactgaatatgcacaaacattaactggagtgcctgttaaaaatgctgaatctggtttcgtaggtttgggtggggcccatgactgcagctctggcaagctcccaatgaggcctatgcttctagtcctggaccagattttgagtggcaagaacctatataaaacaacctcctaaagttgtggtgaragtaaatgagttagtatagataagtgcttagcaaatagtctgacacatagtataggcctt

SEQ ID NO: 579358 - DNA, 553 bp, Homo sapiens
ataagtattttaaagaagatgtcttaaaaatgttttaatgagcatttgtaaacatctctgaaacaaatggaaacaaactgttcrggcgatgtttgtgcccatcatggaacatgtgaagatcaccatttcgggaagttcaggtatttttttaagagaggaggcagctggtcaactaggtttttgttttttaaactctaatcatttctttgagggcctaagttggcttagtgttaaatacctcctgaatgtttccaacttacttcttggcaatcttatattaaaatagaatgaatagggacacagtcaacctcattggccattatggctaaagatttaaggaactgagaagtgacatcacttcgtatatagaatccaattatagctgtctctgaccagctcatatcttacttaagctacaactcttaataggaaccacgacttccctcctcttccttactgactgcagctcccataccccctctaccatctgcttactactccacccagagtcagtttagggggattttgtggatgattcagtgacagccatttt

SEQ ID NO: 579359 - DNA, 553 bp, Homo sapiens
ataagtattttaaagaagatgtcttaaaaatgttttaatgagcatttgtaaacatctctgaaacaaatggaaacaaactgttcaggcgatgtttgtgcccatcatggaacatgtgaagatcaccatttcgggaagttcaggtatttttttaagrgaggaggcagctggtcaactaggtttttgttttttaaactctaatcatttctttgagggcctaagttggcttagtgttaaatacctcctgaatgtttccaacttacttcttggcaatcttatattaaaatagaatgaatagggacacagtcaacctcattggccattatggctaaagatttaaggaactgagaagtgacatcacttcgtatatagaatccaattatagctgtctctgaccagctcatatcttacttaagctacaactcttaataggaaccacgacttccctcctcttccttactgactgcagctcccataccccctctaccatctgcttactactccacccagagtcagtttagggggattttgtggatgattcagtgacagccatttt

SEQ ID NO: 579360 - DNA, 622 bp, Homo sapiens
cattccaccattcaaagccatcactttcatgcaacttttttctttacatttcacttttgtgaagattgctttcttgtcctttgaggggatagagacaaagcaaccattcccctctgactaaataatgcttcatacacaacattcttagccaaatagtgccaagattctgcttcgcccatctaagtaatccccttcacacttctttgtttttattttaattatatctgttgctgttatttgatttctcttaagattaagaaataagactgaacatagaaatggaataagatgagaaatgtgccaaaaggaaaaataaccttgtggtttttacctcctctagttataagcaacatgttgactcaatttttagtagtactatatggaatttaaccaatttctaaacataatcattttgagttagtggtatactctgaactgatcttttaaaaaggttttattgtagtataatttatatacaaagaggtgtctatatgtaaagtatragtgttaacaaatatttgcacctgagaaactattatatactcaagataataaacataaacgttatctcaaactatttcctttagcccctttgtaatttctctcccacttcttttgatcc

SEQ ID NO: 579361 - DNA, 622 bp, Homo sapiens
cattccaccattcaaagccatcactttcatgcaacttttttctttacatttcacttttgtgaagattgctttcttgtcctttgaggggatagagacaaagcaaccattcccctctgactaaataatgcttcatacacaacattcttagccaaatagtgccaagattctgcttcgcccatctaagtaatccccttcacacttctttgtttttattttaattatatctgttgctgttatttgatttctcttaagattaagaaataagactgaacatagaaatggaataagatgagaaatgtgccaaaaggaaaaataaccttgtggtttttacctcctctagttataagcaacatgttgactcaatttttagtagtactatatggaatttaaccaatttctaaacataatcattttgagttagtggtatactctgaactgatcttttaaaaaggttttattgtagtataatttatatacaaagaggtgtctatatgtaaagtataagtgttaacaaatatttgcacctgagaaactattatatactcaagataataaacataaacgttatctcraactatttcctttagcccctttgtaatttctctcccacttcttttgatcc

SEQ ID NO: 579362 - DNA, 578 bp, Homo sapiens
tgagagtggacattcttgtcttctcttaaattttagagggaaaacatctggtctttcaccattaagtatgatattagctgtagggttttcataaatgttctttaccaggttgagggctttctttctttctttctctctctctctctctttctctctttctctctctctctctttctttctccttccttctttcctcccttccttccttccttcctttcttccttccttccttccttcttttttrtctttcttttttcttttttggtttttgataagaacattcaatataagatttacatcttagcaattttaagtatacaagaccacactgtgaactataggcactatactatatagtaggtctccagaacttatttatcttgtataagttctggatgaacttatacatgatgaaatttgtaccctttagccatcacctcctcattttctcctcctcacaacctttgtcaactgccattctaccttctgctttcatgagttttgactattttagattccacatataagtgagatcatacagtatttgtctttctgtgtctgacttgcttcacttagca

SEQ ID NO: 579363 - DNA, 538 bp, Homo sapiens
agaaatgatagaggagttcctctctaataaagcatttcctagtgtgtgttccataaaaccccagtgtttcacaagatgtcaataactatttaggaaaaatctcaatcacaaaataccatttcaaggtcaaatgaaatttatgaataatattgtccttattagggattcacaatgcacttgaactctcaaaatttctgcagttagctttgattataccagatatccaaagacttttagataatttctcctttttccctgaaagagttatagatttttttttacttgcaaacaacataactgactactctaatcagatccaaatccacatatgtactaaagttatgaaaataaaatttacttatatccacaaagtcattgaactgatattgcttttggwtcaagtactcaatgagaaaattgtaacctttaacaagaagaaaatcttgcttacaatgtgactaaaatatcaaaaagtattacatgtaggaaatggaagatttaaaaatgttcagggatcatgaatacattacccattatt

SEQ ID NO: 579364 - DNA, 584 bp, Homo sapiens
cccttctcttctcttcctgtcttcattctgtgtgcaggcrttctgtagttggcaagcaaaacaatcaccaaaagcttcaggttcatacctcccaactcagcaaccccccaaaaagaaacttttctgttttacaattttcgtaataaaatactggaggaaaaactgccgaattaaattcaatgacaactttttacataaacaactgtcacaatatacaaagggtagattccccattccattgcatcaaatagttcattttgaccttttacttatatattacctcaaatgcaaaattctcctttagagtttaagcatagtcttgaccaaaggttaattgattttgtaatgtgaatttcagtagaaagtcatctacagtcaccaggacccctgtggaaagtgatgctgtggcccacacctgcttcttctttccattccctctggctgtgcctggaccacctggccgggctttttcggttagttaggtgttctgttcctggttcaccagctccttaaatgttgctgttgcgtaggggacagctctcaggcctgccctcttctccttccttggacagtctctgagtagt

SEQ ID NO: 579365 - DNA, 584 bp, Homo sapiens
cccttctcttctcttcctgtcttcattctgtgtgcaggcattctgtagttggcaagcaaaacaatcaccaaaagcttcaggttcatacctcccaactcagcaaccccccaaaaagaaacttttctgttttacaattttcgtaataaaatactggaggaaaaactgccgaaktaaattcaatgacaactttttacataaacaactgtcacaatatacaaagggtagattccccattccattgcatcaaatagttcattttgaccttttacttatatattacctcaaatgcaaaattctcctttagagtttaagcatagtcttgaccaaaggttaattgattttgtaatgtgaatttcagtagaaagtcatctacagtcaccaggacccctgtggaaagtgatgctgtggcccacacctgcttcttctttccattccctctggctgtgcctggaccacctggccgggctttttcggttagttaggtgttctgttcctggttcaccagctccttaaatgttgctgttgcgtaggggacagctctcaggcctgccctcttctccttccttggacagtctctgagtagt

SEQ ID NO: 579366 - DNA, 584 bp, Homo sapiens
cccttctcttctcttcctgtcttcattctgtgtgcaggcattctgtagttggcaagcaaaacaatcaccaaaagcttcaggttcatacctcccaactcagcaaccccccaaaaagaaacttttctgttttacaattttcgtaataaaatactggaggaaaaactgccgaattaaattcaatgacaactttttacataaacaactgtcacaatatacaaagggtagattccccattccattgcatcaaatagttcattttgaccttttacttatatattacctcaaatgcaaaattctcctttagagtttaagcatagtcttgaccaaaggttaattgattttgtaatgtgaatttcagtagaaagtcatctacagtcaccaggacccctgtggaaagtgatgctgtggcccacacctgcttcttctttccattccctctggctgtgcctggaccacctggccgggctttttcggttagttaggtgttctgttcctggttcaccagctccttaaatgttkctgttgcgtaggggacagctctcaggcctgccctcttctccttccttggacagtctctgagtagt

SEQ ID NO: 579367 - DNA, 380 bp, Homo sapiens
gggaattctgagatgtattgcctaccatttctggttgtcagttttaatgtttgctgaatactgtgttggcatatgacatctgtcttaagtagcagcaatgcatcctcttggactccctytgaggtaatgcatcttccctccactactgagctgggcctttttgctaccccaacattttgcagctgctggaacctctcctcagtctgggatgctttcctctatgccatccagagtcctaaagggaacactggcggaagaagggaattagaaaaaaaaaaaaaaaaaaaaaaaaaaaaacacttagaatttatctagttcacacataccaagttaatatttaattttttcaaatttatatcttttttcatggatttcctaca

SEQ ID NO: 579368 - DNA, 448 bp, Homo sapiens
gctacacagtccacatgaaatgcaaatttgttttgctccctccatggcagctaagtatagtacaacatattaggatgtgagaaacctgagctaaacccccacattttcctgataactcactagccttatacaagtctccccatcaccaattcaagctctgcagtaagccacaccactttatcagaccctggacagcctttctaggcactgccacaggccactagaaaccrttgtttatattgaaatagcagaacttactgtgacctttaaaaataaagtactaatttatatccttatgctgtggtctgaatgtttgtgtctctgcaaaatccatgtgttgatatctagtcctcaatgagatagattaatgcgcttataaaaaaggcctaagggaggttgtttgtctcttccactgtgagaaggcaccatcattgaggaatggtcctca

SEQ ID NO: 579369 - DNA, 644 bp, Homo sapiens
tatattgaaatagcagaacttactgtgacctttaaaaataaagtactaatttatatccttatgctgtggtctgaatgtttgtgtctctgcaaaatccatgtgttgatatctagtcctcaatgagatagattaatgcgcttataaaaaaggcctaagggaggttgtttgtctcttccactgtgagaaggcaccatcattgaggaatggtcctcaccagacactgaatctgctgatgtcttcatctttgacttcctagcctccagaactgcaaaaaacaaatttctgttgtatataargcagccagtttatggtatttttgttatagcagcctgaatagactaaaacaccttatatattcctttacgtttcaacaaaaagtgggtgttgcttttttttaataagataatgcatgatgagtatttgggccctcagggacataattaattgagagacattttttaaagagatttttattacagaaactaacattatgagagcacagtcactgccacctgatccatctgcttattttgggtggtagaaattaaacaaaccaacagaagcagaagtggcttttcactaggaaaccacttttaagttttatatcacacatattcaatcatcattatgaattatcttaattt

SEQ ID NO: 579370 - DNA, 550 bp, Homo sapiens
gttgcttttttttaataagataatgcatgatgagtatttgggccctcagggacataattaattgagagacattttttaaagagatttttattacagaaactaacattatgagagcacagtcactgccacctgatccatctgcttattttgggtggtagaaattaaacaaaccaacagaagcagaagtggcttttcactaggaaaccacttttaagttttatatcacacatattcaatcatcattatgaattatcttaatttctaccaaactctaaagcaacatgttagtttggtaactggttgcttgcccctgaagaaagaaaagactgaaattttcactggacattttaatgggtttggagctttctagacagcatcagtggtgagcttaaattcagatttctgattgggcagccgaactcttaatttagagccaacggtagcagagcgtggctcaatgctaaacattggacaatggtatagggaacacaaagtcacctgctagtacaattttatctcataccaygctctgctagttgaaaagcaaaac

SEQ ID NO: 579371 - DNA, 539 bp, Homo sapiens
acccccacttgatccaacatctgatccagtttcttacccatttcttgactctgccttagagcaaatctccaaagaattaactatccttgctgctgccaatttctttcctcactttccttctcaaactcatctcaattaggcttccctgccaagagaaaatgctcttgatgaggtcagtaatgagctctcatggagtccccctcctctgctgttattactactctcttgatgaygttaagcaatcctttggccttagaaaccaccaattctatactgacagccccaaaattattatctccttcctgagcatctcctttgaacttcagattcttacatccaattgcctactcaacatccctaccttaacatatgacaaatatctcaaacttaacatgtccaaagctgaactcttaatcttccctttgaaacctattcaccctaattccataatcttcccatctcagtcaatggaaactccatcctttcagatgtcgaaaacaaagtccttgaaggcaatctgtatccatgaactttcactg

SEQ ID NO: 579372 - DNA, 536 bp, Homo sapiens
cttgctgccagcacagcagttgagattgacctgggacactggagcttggtgggcagaggggcgtccaccattgctgaggcttgcataggcagttctatgcttacagtgtgaacaaagtgtcagggaagctcaaactgggtggagccaaccacagctcagcaaggcctactgtttctctagatcccacctctgggggcagggtatatctgaatgaaaggcagcagacagcttctgcagatttaaacatccctgcctgacaactatgaagagagcaggagttctcccagcacagcgtttgagctctgataatgaacagcctgcctcctcaagggggtccctgacccccgtgtaacctgactgggggacacctyccagtaagcgccaacagacaactcacacaggtgggtgcccctctgggatgaagcttccagaggaggattcagacagaaatatttgctattctgcagcctccactggtgatacccaggaaaacagggtctggagtatacctacagcaaactccaacagacctgcag

SEQ ID NO: 579373 - DNA, 610 bp, Homo sapiens
tgacatatacatatatacaaatgttggctgggcacagtggctcacgcctgtaatcctaacattttgggatgctgagtcaggtggatcacctgaggtcaggagtttgaaaccagccttgttcaatatagtgatacctcctctctactaatatatacaaaagttagctgggcgtggggcatgtgcctgtaatcccagctacttgggaggctgaggcaggagaatcaggagaattgcttgaacctgggacgcagaggttgcagtgagccgaggttgcaccgctgcactccagcctgggcgacggagtgagactctgtctcaaaaaagaaaaaaaaagttatatatacgcawatataaaaatgtgatgtgtgtatatatatatatgtatatataaatgtaatatatattatgtatatatatgaatgagatatatacagttggcgccctcaacaacatggtatctgaactgcgatgagttacttacactcagattttcttgtgcctctgttcacccctgagacaccaagaccaagccctctcttcctcccttcttcttactatattgtaagaatacagtatataatacatatatctaaatatgtgttaactgact

SEQ ID NO: 579374 - DNA, 621 bp, Homo sapiens
gaaagatacaacaatctaccagaaaaataaaacaattctaaatttgtgtttacatagcatagcctcaaaatacagaaagcaaaaactgaaagaactaacgggggaaataggcaaaaacatccttacaataaatacaattgtgrgtttcataactcttcctcttacactgttacccccaggttggccctctggctcacatccaaagccaagtgtagcaaaaacaagtcttttggagggcagagtgattcattccaggtatatagatcaaaaaacgcttgccttgatctataggtacattttagggtatctagaagaatgcatgggctgcatatccatcagataatcccctgaaaggagaaatgtacatattaaaatgaagcacatgcagcttgccagggagattattgatatataagattttgtttgtttgttttttgacacctaaccactaaaaacacaactggctgtggttcaagataagaaccttagtcactgggggcatattgtgtttaataatatatgtgtgaaaaactgtgcttagtggctcacagtctccatttaactgtgtttagtgacacgtgtgaaacactttgtttaatggtgcatgatacatttgccact

SEQ ID NO: 579375 - DNA, 621 bp, Homo sapiens
gaaagatacaacaatctaccagaaaaataaaacaattctaaatttgtgtttacatagcatagcctcaaaatacagaaagcaaaaactgaaagaactaacgggggaaataggcaaaaacatccttacaataaatacaattgtgggtttcataactcttcctcttacactgttacccccargttggccctctggctcacatccaaagccaagtgtagcaaaaacaagtcttttggagggcagagtgattcattccaggtatatagatcaaaaaacgcttgccttgatctataggtacattttagggtatctagaagaatgcatgggctgcatatccatcagataatcccctgaaaggagaaatgtacatattaaaatgaagcacatgcagcttgccagggagattattgatatataagattttgtttgtttgttttttgacacctaaccactaaaaacacaactggctgtggttcaagataagaaccttagtcactgggggcatattgtgtttaataatatatgtgtgaaaaactgtgcttagtggctcacagtctccatttaactgtgtttagtgacacgtgtgaaacactttgtttaatggtgcatgatacatttgccact

SEQ ID NO: 579376 - DNA, 621 bp, Homo sapiens
gaaagatacaacaatctaccagaaaaataaaacaattctaaatttgtgtttacatagcatagcctcaaaatacagaaagcaaaaactgaaagaactaacgggggaaataggcaaaaacatccttacaataaatacaattgtgggtttcataactcttcctcttacactgttacccccaggttggccctctggctcacatccaaagccaagtgtagcaaaaacaagtcttttggagggcagagtgattcattccaggtatatagatcaaaaaacgcttgccttgatctataggtacattttagggtatctagaagaatgcatgggctgcatatccatcagataatcccctgaaaggagaaatgtacatattaaaatgaagcacatgcagcttgccagggagattattgatatataagattttgtttgtttgttttttgacacctaaccactaaaaacacaactggctgtggttcaagataagaaccttagtcactgggggcatattgtgtttaataatatatgtgtgaaaaactgtgcttagtggctcacagtctccatttaactgtgtttagtgacacgtgtgaaacacyttgtttaatggtgcatgatacatttgccact

SEQ ID NO: 579377 - DNA, 578 bp, Homo sapiens
tttgtttttctgcttcttcctcacaaaaacctgtgttaaggtcacaagaatagggaccttatcattcttaatctttgtcataaccctgacactagactagagcctggcacagagtgaatactcattataatatttattggatgacaaaattaacaacttttaattatagtaaaccttcagttcttatatcttagtgtttgagtatgatagtgtttgtctayaatatgtgtgaataatttgttttcaattactcttaagttgtggcagtcatggagatgggacacttggatttcccttcaagaaagaacttgcccttcagctgcaggggctgcagttagctgacagcttccattgttactgccatcaaggttaacgtcagcttggaaaaatgaggccaactcttctggggcaggctccaaccaagggggaataccaggtttagttctgcctaagacagatcaccactcacaagaaatgtccctctaaaaggaatccttaatctggagtttctgtgggctaagactttgttagatggcttggtggagactttattaggagctgcataagggatgttgcat

SEQ ID NO: 579378 - DNA, 235 bp, Homo sapiens
ttgtatagcaagaaaataaatggatcttttaatagattttttcaataccgtttctttaaaaatttatccctttcaatgcttaatttcctatgaattaggatctatgtgtgtactatatattatttcccattcattcacctatgtattkgttcaccttgcattttgaagtctaataggtctggtcgtttccctgttgtccctcataaaagcctttttaacaatttttgtatctatc

SEQ ID NO: 579379 - DNA, 622 bp, Homo sapiens
gagtcagcatcgctgcacttattttttattctactctgacattagaataatccttgagtgggggaaaggttaaaaacccccctggataagtgttactaattaatgatgattgttttaaacaatgtttggataatttttccttgtcccttgacataaacttgataactgagaagtgagaaggagattagtgggttgattaaattccattcaggtacttaaagttagctccaaaaatttagctatttataaattgtcatgcattgttaatgtataagagatgtagatttcatttatctttggtggagcgagatgaagcagtgaatcattgaagactgaaagaaagaaaaaggtcttttcccttttctttaagaagcatcattagttaaaaayatgttagttaaaaccagagaactatatttaaagggacagcaataagcaaattgattactctggtgattattggagtgacattaccttttagttgtactttcacaaaaattcacaatatttgccaaagtcaagttatccattacactattaatttgtcattcttttgtttatatagtcaatatctctatctcaattggatctatctcaactgcttctaaacaagccaccatag

SEQ ID NO: 579380 - DNA, 622 bp, Homo sapiens
gagtcagcatcgctgcacttattttttattctactctgacattagaataatccttgagtgggggaaaggttaaaaacccccctggataagtgttactaattaatgatgattgttttaaacaatgtttggataatttttccttgtcccttgacataaacttgataactgagaagtgagaaggagattagtgggttgattaaattccattcaggtacttaaagttagctccaaaaatttagctatttataaattgtcatgcattgttaatgtataagagatgtagatttcatttatctttggtggagcgagatgaagcagtgaatcattgaagactgaaagaaagaaaaaggtcttttcccttttctttaagaagcatcattagttaaaaatatgttagttraaaccagagaactatatttaaagggacagcaataagcaaattgattactctggtgattattggagtgacattaccttttagttgtactttcacaaaaattcacaatatttgccaaagtcaagttatccattacactattaatttgtcattcttttgtttatatagtcaatatctctatctcaattggatctatctcaactgcttctaaacaagccaccatag

SEQ ID NO: 579381 - DNA, 362 bp, Homo sapiens
cctcaaagattaatctgcctctcctctcactctatactatctctgttagctaattttatttgtgcacattgcttatactgggcattatatacacatatgcatgtgtgtacmtgtgcacacacacactgtatgtggacatgtatatatatgtgtgtgtatatatatatagtatatatataaattacaataacataaaggtggcattttaaattagtggaaattaccctgatttgatcactacacattctatacatgtaaagaaatatcactctgtatcccaagaatatgtacaattatggtttgtcaaatgaaaaagttcatacattgaaaaattttagataaatatcaaactttctctgaaa

SEQ ID NO: 579382 - DNA, 531 bp, Homo sapiens
aaacttgattcaatgattatttagttatttactagttgctaggcaatgtggcaaatgtgtaagtttcactgcatagattcactcataaaggaactcacaaacttttgagagaagtttgatttacagcagcctacactccagccatattaaagtatttgtacttcctggacttkcacctatatttcatatctctgcacttctacacagagatatgaatactaatcactctatacatagaattacatttcccctcttatctgttctatcttagataaaaatgcagcaggactagtttccaagacaacaggtcacaagacatcactggtaaaacaagagacagtgaaggaaactggccaaaaccagctagaaccaaaatggcaatgaaagccatctccagttaccttcactgctcattatatgctaattataatgcattagcatgctaaaaaacactccttccagtgccatgacaaatgtcatggcaatgcccaaaagttaactctgtatggtctggataggggagaaaaccac

SEQ ID NO: 579383 - DNA, 448 bp, Homo sapiens
gacatcaatcatgtccgcaggataaggagtctcgtcaccgcagccagcaaggcacgggcagcttgaaccacagcctccctttttgggagaaaacaggggtcatctgtaaatctctcagctgatactttcagagcttcacctgaaaaatacaaccccawataagttatactttaagtttcaactatgcctatttcaggatttatcagctaacctaattccaagtaaattccaagactaagcataatataaaaatattgtcagttgacaattttctctctcaataaacaatgcagtttcaaattaacatttgtttttcacaaatattttggaattaagaagcataatatcattttcctgcaagaaagttgtgctcaactgactaggaacatctagtaaaattgctgccaacttctgcatttgctgaatctcatttcttgtaaaaggtttt

SEQ ID NO: 579384 - DNA, 602 bp, Homo sapiens
tttatctgcatttccctcccactatctgctgccggattccctttttcacatctaccttagatggtcagatttactctttcttgttctcttctaacacaaaactccattttattgacgatatccaggagaaaatatacatagctacttgctcatcatgatgaatatgagagataataaacattaagcaaaaaagatcatcaaagatagtgattagatttgcagggctgaagattttatagcaaccaaaatatgatttaaatatagctcatcagcaaattaaatacttatattcagtytaagattgattaggctgtatccacctcatttgtcagaactctctctaagtcaatagtcattttgtctcattgtttggggtaaaaattaaataccagtcacccatcttgaatctcattggccagcacttgatctttaatgtcccaaagtcccttctttgatattaccatagtctctcaattctaaaatactatcaactacaacacaaaccaccaatgtaatcacttctcttaaaagtgtaaatatggatattttgtcaatattgaaccttccataaccaaggtgaagccaagagacttattgtctag

SEQ ID NO: 579385 - DNA, 509 bp, Homo sapiens
aattccagaactctaataaaaaaaaaaactggactcataaaattgctaaactaccatcaagcagaacaataattaattacatgggactgaactgataaaagactgaaatgattatttatgattttttatttaggctaattatttttatgttttgttctccagagttaaaaaaaaaacaacaactttttaaaggctacaattcccctgtgttatgcacactgaaataaattttatatgtcctttctcctattaatctgccttttctcaattgatttttcacccgaacttccagagggcaaaggagaaatttggccttcacccctacactgctttgaagccactaggacatggctaccttggcatgttcatttccagtttcccagagtaccaccagcagcagtcaccatccaccagcaataagctgaagccagacaaaactggaatacacggcagatacgctggtttggragcacaagtgagtcataattcagagacttcaaaatttggaa

SEQ ID NO: 579386 - DNA, 585 bp, Homo sapiens
ctttacttggctcagggtgggggttcatttggctccgtgctgctcccaggtggaccatcgccccaccctgcttttctttgttcttcgtgggtcaaattgtttgcctagtcagccctaatgcaagaacctggatacttcagttgaaggtgctgaattcacttgctcctttccttcctctctgagtgcgcagaccgcagctgcttctaattgtccatcttggtgccggcagcgaggttggggctccaaatctagccgccgccatctaccccaggggaggaggagaaggagtgttttttttttttaatatatttaatggacaggtaatgaggcaaataaaaattctgtacattcagggtgtacgatgtgatgatttgatgtatgtatgcaatgtgtaatgattaccacagtcaaatgaattaacacatccatctctacccatagttaccactgtgtgtgtgtgtgtgtgtgtgtgtgtgtgtgtgtgtgtggctaasacacttaaaatctactttcttatcaaatttcaagtaaagaatacaatatgttaactatagtcaccatgctacacagtagagtcccaaaact

SEQ ID NO: 579387 - DNA, 649 bp, Homo sapiens
ctgggttcacaccattctcctgcctcagcctcccaagtagctgggactacaggcacccaccaccatgcccagctgattttttgtatttttagtagagacggggtttcaccatgttagccaggatggtcttgatctcctgaccttgtgatccgcccgccttggcctcccaaagtgctgggattacaggcrtgagccaccgcgcctggctgaatgttactctgtttttaagcggttttggaaaagtttatttcttactcttgatataagagctgtgcacagtgctgctataaaaagttagtaattttttaatgtcagtaggggatcaatttgagagaagactaaagttgagaatatctaagaatgttggcatatatggaatagatgttatcaccctacattttaaaggtcttttttgtatacattctatatgtaatatgaggtcagtgaacacactctaagatcaagctcttatagtagactgaaaaacttggcaacactgaagaacaattgtgagtatttttagattaagtgaatgacactacaaatattatttttaagatatctggcattaaggcttatttattgtgaaaaccattaaacgaaagagagaaatcacacaccagaataataaaaaaaaatagttaagata

SEQ ID NO: 579388 - DNA, 496 bp, Homo sapiens
atcaccaccagaccagacctacaagaaattcccaagggaatcctgaacttargctgagcatggtggctccaatctatgatcccagcactttgggaagcctaagcagctagcatcacttgagtccaggatttcaagaccagcctgggcaacatagtgagactctggctctacacacacacacacacacacacacacacacacacacacacacacacacaagttagctgggtgtcatggtgcatgcctctggtcctagctacttgggaggctgaggtgggaggatcacttgagcctgggaggtagaggctgtagtgagttgtgatcaggccactgcactccagtctggacaacagagccacagcctgtctcacacaaaaaagagagtactaaacttgaaaggaaaaggacatttaccatcatgaaaaacattaaaagtgtaagtcattggtagagcaagctcacaaaggaggaagagaaagaaatcaaatggaaccac

SEQ ID NO: 579389 - DNA, 496 bp, Homo sapiens
atcaccaccagaccagacctacaagaaattcccaagggaatcctgaacttaggctgagcatggtggctccaatctatgatcccagcactttgggaagcctaagcagctagcatcacttgagtccaggatttcaagaccagcctgggcaacatagtgagactctggctctacacacacacacacasacacacacacacacacacacacacacacacacaagttagctgggtgtcatggtgcatgcctctggtcctagctacttgggaggctgaggtgggaggatcacttgagcctgggaggtagaggctgtagtgagttgtgatcaggccactgcactccagtctggacaacagagccacagcctgtctcacacaaaaaagagagtactaaacttgaaaggaaaaggacatttaccatcatgaaaaacattaaaagtgtaagtcattggtagagcaagctcacaaaggaggaagagaaagaaatcaaatggaaccac

SEQ ID NO: 579390 - DNA, 496 bp, Homo sapiens
atcaccaccagaccagacctacaagaaattcccaagggaatcctgaacttaggctgagcatggtggctccaatctatgatcccagcactttgggaagcctaagcagctagcatcacttgagtccaggatttcaagaccagcctgggcaacatagtgagactctggctctacacacacacacacacacacacacacacacacacacacacacacacacaagttagctgggtgtcatggtgcatgcctctggtcctagctacttgggaggctgargtgggaggatcacttgagcctgggaggtagaggctgtagtgagttgtgatcaggccactgcactccagtctggacaacagagccacagcctgtctcacacaaaaaagagagtactaaacttgaaaggaaaaggacatttaccatcatgaaaaacattaaaagtgtaagtcattggtagagcaagctcacaaaggaggaagagaaagaaatcaaatggaaccac

SEQ ID NO: 579391 - DNA, 602 bp, Homo sapiens
ctctgtgtgagggctccaacaccacatttcccttccactcttcctaacagaggttctccatgagagccctgcccctgcagcaaacttctacctggacatacaagcgtttccataaattctctaaaatctaggcagaggttcccaaacctcaatttttgacttccatgcacttgcaggctcaataccacatggaaggtggcaaggcttcagaagctgcgttctgaagccacagcccaagctcgacattggcccctttcagccacggctggagcagctgggacaaagggctccaagtccctaggctgcacacagcatggggaccttgggcttggcccatgaaactgctttttcctcttaggcttcctggcctgtgatgggaggggctgctgkgaagtcctctgacatgccctggagacattttccccattgtcttggggattaatatttggctcctcattacttatgcaaatttctgcagctggcttgaatttttcctcagaaaatgtgattttcttttctatcacattttcaggttgcaaattttccaaactttatgctctgcttcccttataaaactgaatgcctttaacagtacccaagtc

SEQ ID NO: 579392 - DNA, 505 bp, Homo sapiens
cattcctattcagcatagtaccagaagtcctagccagagcagtcaggcaagacgaagaaatgtaaggcatccaaattggaaaagagaaagtcaaattatccctgtttgctgatgatatgatcttatatttagaaaaccctaaagactccatasaaaaactcttagatttgataaatgaattcagtaaaatttcaggatacagagtcagtgtacaaaaatcagtggtgttcttatacaccaataatgatctatctaggaaagaaatcaagaagtaaatcttatttacaatagctacaaaaagatatgtagaaataaatttaaacaaggaggtaaaagatctctacaaggaacactagaattcacagataagaaattgtagatgacacaaacaaatggaaaaacatcccatgctcatggatcaaaataattagtattgttaaaatgaacatactgcccaaagcaatctacaaattcaatgcaatccttatcaaaatactaatatcat

SEQ ID NO: 579393 - DNA, 505 bp, Homo sapiens
cattcctattcagcatagtaccagaagtcctagccagagcagtcaggcaagacgaagaaatgtaaggcatccaaattggaaaagagaaagtcaaattatccctgtttgctgatgatatgatcttatatttagaaaaccctaaagactccatacaaaaactcttagatttgataaatgaattcagtaaaatttcaggatacagagtcagtgtacaaaaatcagtggtgttcttatacaccaataatgatctatctargaaagaaatcaagaagtaaatcttatttacaatagctacaaaaagatatgtagaaataaatttaaacaaggaggtaaaagatctctacaaggaacactagaattcacagataagaaattgtagatgacacaaacaaatggaaaaacatcccatgctcatggatcaaaataattagtattgttaaaatgaacatactgcccaaagcaatctacaaattcaatgcaatccttatcaaaatactaatatcat

SEQ ID NO: 579394 - DNA, 508 bp, Homo sapiens
aagcaattcccagtgcaatattattctagctgattcactacttttttcttgctataagtccttacatgattgaaggatattatcggaactcatcaactttttcttctctatatgctatagtacaaccacaagcctagcactatttagtttcattttctaagcatttcttccacaggatccctacattgttttgttgtatcctcagagttctcaagttcccagagtaagcctaagagtattttctatgtggtcagtcattatctatctagaattttattttttgttttgaaatatttgattgacaaagattgaatatattcaaagtgtgcaacaagatgattgagagatatatacacattktgtaatgactaccaccattaaattaacacgtctatcatcactcgtgctgtttattaggtccccagaacttgttcatcttataagtgaaaatgtgtacctttgatcaatatctactaatttcctccacccaccaatccctggaaagcac

SEQ ID NO: 579395 - DNA, 550 bp, Homo sapiens
cacattgaccgtttcttatcatcctcttcaaaactgtaggtaagaaaaaaaaaaaagaaaaagaaagtacagatcattcagtattcttccttcttagaggcttcgggggagaaaagtttaatgggggagaaatagtaacaaatacctaaaagatttttaatgctttatgaaggcaattgcctgtgtttttgctgtctctcataaccatagatgggtaattgagaattagcgttgcttctgtcaagtgccatggaagcattttagtytcaagctggaaagattcagtgacattttgcatcatttaaaataataaagtcttatgcatgtggtgtcattataagcagtaacttttgatatctgaaaaatgttgcattctatttataaaaggaccctgtttttacacagaattttatttttttaaagtaattctgttactctcattctccagtctaacaacaaaaccattttcagccttaatcgcccaactcaaaataccagctataatactctcatgcaatagaaagatggtttcaaagctgccctccccaag

SEQ ID NO: 579396 - DNA, 533 bp, Homo sapiens
attgaacaacatattttcattctaaatactcatttaatctaacatcttagagaacatgtgtttaaaaacataggctctatggttgactctctaggttgtaactcatgactatgtgactagtgtgactgtaagtttctttattttattttatttattattattattattatttttgagatggggcctcactgtcacttaggctggagcacagtggtgcaatcatggctcactgcagcctcgacctcctgggctcaggtgatcctcccacctcagcctcctgagtatctgagactacaggtgtgccccaccatgcctggctaatttttgtattttttgtagagactgagtcttgccatgttgcccacgctggtctcaaactcctgggctcaagcaatctgccatcctcrgactcccaaagtgctaggattataggcatgagccactgtgcctagcctccaactttcttttttttttttttaactttaagttcagaggtacacacgtgggtttgttattaatacattggtaaactt

SEQ ID NO: 579397 - DNA, 538 bp, Homo sapiens
ccacacatcacatggcccatgtttccagaactcagtcacgtgcatagtaatttgcacctttgttgtaatggcacataccttctgccttaacagcaggatcaatgagaaaactgaacaaggtgaggcaggaagtgaggatgcacatctccacatgggaagcctcaggtaccaggaccttgcacaaargtggggacagaagggtcccctggtggagagtgactcatgtactccttagaaggtactgacatttgtttttaaatggttattatcctgccagcctgcctggctttttttccccattgaggtttaggacaggttttttgaaacttcattcattcatacaccatttcatcacgtaggctgaggagtcaccctctgtctgtcactgagcacaatcactccggcacttcctggacagggcattcttccaggtatttggagataatcccattgccttcactctgcaccatgaagattaaaatagttaattgattgcagctagaacacagcctgcacatcaatgctcagtgaatgctcc

SEQ ID NO: 579398 - DNA, 538 bp, Homo sapiens
ccacacatcacatggcccatgtttccagaactcagtcacgtgcatagtaatttgcacctttgttgtaatggcacataccttctgccttaacagcaggatcaatgagaaaactgaacaaggtgaggcaggaagtgaggatgcacatctccacatgggaagcctcaggtaccaggaccttgcacaaaagtggggacagaagggtcccctggyggagagtgactcatgtactccttagaaggtactgacatttgtttttaaatggttattatcctgccagcctgcctggctttttttccccattgaggtttaggacaggttttttgaaacttcattcattcatacaccatttcatcacgtaggctgaggagtcaccctctgtctgtcactgagcacaatcactccggcacttcctggacagggcattcttccaggtatttggagataatcccattgccttcactctgcaccatgaagattaaaatagttaattgattgcagctagaacacagcctgcacatcaatgctcagtgaatgctcc

SEQ ID NO: 579399 - DNA, 562 bp, Homo sapiens
actagactgatggtccctagggccaagttacgaagggtgacttgtttttctctgtggtcaagtgtccttttactgacaactcttcagtagtacaaaattcagactttgtatcttagcatgatatttggtggctggctcgccaacacaagtgtcaggtggcatgaaatcaaaacacagcagcagasagctttggcccttgaatcatttgttcataaaagattactttttcagtagctgcagaatcaaaattgtgactttttactgatacaaggatcacatggttcactttttttttttttttggagacgaagttttgctcctgttgcccaggctggagtgcaatgccatgatcttggctcactgcaacctccgcctcccgggcttcaggtgattctcctgcctcagcctcctgagctagctgcgattacaggcgcctaccaccacgccctgctagttttgtattattagcagagacagggtttcaccatgttggccaggctggtctcgaactcctgacctcaggtcatccacccgcctcagcctcctgaagtgctgggatcac

SEQ ID NO: 579400 - DNA, 562 bp, Homo sapiens
actagactgatggtccctagggccaagttacgaagggtgacttgtttttctctgtggtcaagtgtccttttactgacaactcttcagtagtacaaaattcagactttgtatcttagcatgatatttggtggctggctcgccaacacaagtgtcaggtggcatgaaatcaaaacacagcagcagacagctttggcccttgaatcatttgttcataaaagattactttttcagtagctgcagaatcaaaattgtgactttttactgatacaaggatcacatggttcactttttttttttttttggagaygaagttttgctcctgttgcccaggctggagtgcaatgccatgatcttggctcactgcaacctccgcctcccgggcttcaggtgattctcctgcctcagcctcctgagctagctgcgattacaggcgcctaccaccacgccctgctagttttgtattattagcagagacagggtttcaccatgttggccaggctggtctcgaactcctgacctcaggtcatccacccgcctcagcctcctgaagtgctgggatcac

SEQ ID NO: 579401 - DNA, 359 bp, Homo sapiens
ctttacagtgtcgaaacctgagacagtccctgcaaactgggatgagttggtcrccctaaaacaagttggggagggaggggcgtctcttccacacagggcaattccccacaagggactgggcagagagtcgctgccaactctcacggcagtggctcagccccgagggaggatctgggcacctctgtgtcatccgccacagcaatttattcgtttcctctgagtgtttctggctgtgttcacgtgagagctgtgataggcccagacctcttttggggtgttgggggcatggtggccccttctgcctgagctgttgtggggaggggttagggtctaaggttagtactgaaggcgaaaacctt

SEQ ID NO: 579402 - DNA, 359 bp, Homo sapiens
ctttacagtgtcgaaacctgagacagtccctgcaaactgggatgagttggtcgccctaaaacaagttggggagggaggggcgtctcttccacacagggcaattccccacaagggactgggcagagagtcgctgccaactctcacggcagtggctcagcccygagggaggatctgggcacctctgtgtcatccgccacagcaatttattcgtttcctctgagtgtttctggctgtgttcacgtgagagctgtgataggcccagacctcttttggggtgttgggggcatggtggccccttctgcctgagctgttgtggggaggggttagggtctaaggttagtactgaaggcgaaaacctt

SEQ ID NO: 579403 - DNA, 359 bp, Homo sapiens
ctttacagtgtcgaaacctgagacagtccctgcaaactgggatgagttggtcgccctaaaacaagttggggagggaggggcgtctcttccacacagggcaattccccacaagggactgggcagagagtcgctgccaactctcacggcagtggctcagccccgagggaggatctgggcacctctgtgtcatccgccacagcaatttattcgtktcctctgagtgtttctggctgtgttcacgtgagagctgtgataggcccagacctcttttggggtgttgggggcatggtggccccttctgcctgagctgttgtggggaggggttagggtctaaggttagtactgaaggcgaaaacctt

SEQ ID NO: 579404 - DNA, 359 bp, Homo sapiens
ctttacagtgtcgaaacctgagacagtccctgcaaactgggatgagttggtcgccctaaaacaagttggggagggaggggcgtctcttccacacagggcaattccccacaagggactgggcagagagtcgctgccaactctcacggcagtggctcagccccgagggaggatctgggcacctctgtgtcatccgccacagcaatttattcgtttcctctgagtgtttctggctgtgttcacgtgagagctgtgayaggcccagacctcttttggggtgttgggggcatggtggccccttctgcctgagctgttgtggggaggggttagggtctaaggttagtactgaaggcgaaaacctt

SEQ ID NO: 579405 - DNA, 596 bp, Homo sapiens
tcgctctgtccccaaggctggagtgcagtggctcgatcttggctcactgtcacctccacctcctgggttcaagcaattctcctgcctcagctcctgagtagctgggattacaggtgcccaccaccacacacccagctaatttttgtattttttgtagagacagggtttcaccatgttggccaggctggcctcaaactcgtgaccttaggtgatccgcctgccttagcctccaaagtgctgggattacaggcatgagacactgcgcccagctttcgtttttgctttttgtctttattatttttacaaatctctctcactgaatatatgcctttatttcaaggtagcaaactctgaaaacagcatatagatgataaatccacatagcagttttaaaaaaaatccttattctgagtacaccgcagtaaactccaacagaggtttttgtgaccttaaaagtacttgaggtccgaaggtacttaagtgaacaagcaagyggatggagtccatttgccatgactcctggatacaatagcttaagccctcttagcacacaggtttccatggtccccccagaattagtaagagaagagcctatt

SEQ ID NO: 579406 - DNA, 601 bp, Homo sapiens
gacatgtcaggtaatttaactgatgggactaaaatctccgacttttcttccagtctcactcttcctgggacctcttgcaaaataatcaygtatccggacatacctgcaaaaaacataaaactgccagcattgccccccttgtttggggatttactgaaattagttctgtacttcctgaagttcgtacaaatatcaaaggcattttatataacaaacaattttgcctctccttccgtccccctaaataaagaccacgctgacttcactggctggctcacaggcaccggctgcctggccttcaccccaacacttgctgagatttttcctctaaagtattgccaaggaggtgtttgccattttccaaaatgcaaccctgacaggaatcaccaaatgacattcaccaaaggcaactaaatagaaaataaagtgtaagagcttaaaacattccaagttcatgaccattcatcacaaaccgactttcctcagaagaaacaagcacataaatagaatcctgctgacacaatctctccaccatccttaaatattcgtgtgtgtgtgggtgtgtgtgtgtgattgagagagacagagagagagggagaga

SEQ ID NO: 579407 - DNA, 617 bp, Homo sapiens
caggccatcagatttgccatattgtattgaaatgttctgcctatgcacaggtattctgtccaactagaactggaaactccttgagagtagggctgtatcttttctatcaccatatccccaggacccagcacagaacctggctcctcaaagcagcctacatctttttgatgtgcatgaagcttagagagcatgactcatgtgttctaaaacctttagcctctctttcgtttatccaacaaacaattactgaccacctgcatacagtttcttatcctggtgtcagtgaatttacagagtttgtgaacttggatgtaaaaaattgacatgtttcattttrgtaaccttgaactaatattcagcatttccataaattgtgaacataggcctccaaaccacagtagtgttagtagtacctgtgacttttgtcagatagtttcacgtcacattatagctgtggcaggccttgtaaatagcatttattctcatcaccaccttgaaattacaatagtgattacacccacattgaatctcactattttaagtgttaataaaagaacacatacatgtatcgcattttgtatgttttgataactgtttcaattatatttcaatctact

SEQ ID NO: 579408 - DNA, 289 bp, Homo sapiens
gcttgaacctgggaggcggaggttgcagtgagccgagatcacgccattgcactctagactccagcctaggcaactgagtgagactctgtctctaaataaataaacaaaaaagtaattatactatgatagagacatgaatgggagcagttaattctgaccaggatgtgtcaataatcaggatgaaccagtgatttctgaaacaaacacrctgaaagaagacaggggaagctgaaagtaggttgttggtatcaccgaaaccaggacgctagctaccattcctggtataaga

SEQ ID NO: 579409 - DNA, 244 bp, Homo sapiens
ccatctttttggttggcagggctttttcgcagaagaatacaygggtactatcgtccctgaactctttcttgtatcagtgtctgcctgcgagtcttttgcttgaatgacagcttgcatctttttaatatttttggattttgctttctttccttcagtacactctagacattactctattgtcttctcttaataagtctgggacacctgacttttttcccttgcaggcagcctgcaagtctgaaga

SEQ ID NO: 579410 - DNA, 536 bp, Homo sapiens
ttcttttccaccttagtttaccaaaccaaatcaaccctccccaaaatctccttgtagcatctatgaacctcatgtgtcacaggaaaaacacttgtaaaaaaagtctttatttttttttaagagccttccaaaggtcatttatcattcaatcatctgtatgctatctagaatttatgagtgagatgcattaaaagaagctaaaaaggaaacctcagcagaaatgttgcacaaaacttatacacacatggggtggctctgaattttatttttaatatttgaagcatgacaagagatcctgcaattgctgtccattggcttgagttgctagatgtgacttatcagacamccacagccaaagtcctaggtaaaacaaagtagcttttctaaatagggcattacttatttatttgggggatttataaaaatgtagccatcatgcagagcctctaggtgcatgaataatgcaaaagtacaaaacattaagacacagaaacaaacagaagctagatgcatagttccatttctctcaacagaca

SEQ ID NO: 579411 - DNA, 577 bp, Homo sapiens
actacgtctttggtgtgtattttacacttatggcacatctcaatttgccatattttcaagtgctcaatagtcacatatggctactagcagttaccatatttgacagtacaggtctagayccaccattttcttgcctgttttaggagccatgtggagaaacagctggggtcctcctgactaccagaaggctacctgcatcatgtcctccagagacctatcccaagttccaacatatctaggacatcaccagaaccacaactgccaacccaatgacctgccaatcaccaaatttcactggagtatgaaaatttatcatattatcagggaaaatctctgataattggcacatatgcctaagaggtccttttatcatagtcaaaaaaaggtaaggcaattttaaaggtatctgaggagagcaattgaactctagaagcatttcccctaccaaaaagaaatattttcattgcttgaattttgtttcctttaccctcctctactccccaaatttcacattacagactcaaaatggtttcctattggatctataggtaatcccttcccacaaccaccaatagca

SEQ ID NO: 579412 - DNA, 279 bp, Homo sapiens
aaaaaagatggaaagagtcttggtccctgatgtcatctgctggagcaatcccttaattctttaactcagtcttactcttacgtgagataatgaaakatcctccctgcttaagtcactttctcttgggtgttctcttacagcaaataatattctacctaaaacaagttccctctggttctccgatactatagctataggtccactttcctaattgtatcattccaataccctcccaaacgcttattttcctttagcttcttaaagacacaaagtagatgt

SEQ ID NO: 579413 - DNA, 574 bp, Homo sapiens
acctaaacccctgatggacaccgacctctgggaagaacagttttgtcttgaccagttaagatatccgttttgaaatgtttcaaatattggggaatgttgagtatttgaggaattaggagattatccagctggaatraggttcacatgggttctggccttttcttccccgtttttatagttccttttctttagcattcgtgatgttaaaaaacaggccgaaagccccactggtcacattgcagggagtccacctctttctacaaacacttctcagtctcaacgttttctagaagagcagatgaagcttgtgtgctcagaaataaagcattagaagcagcgttcacaagaggctgtctccttaggcagtggtgagggggtgcaggtctcatctcttcttccaaggatatggaaacttcctgacgggcaaatgcaagagatcaagtcagtgtcagtaacctgccctgggcctttcttggttttataaggctaacagacttattataaactgtgttgaacaaggcaagcgtagaagtttgcctagtggctgaaagatagaaattgttaaacccagtat

SEQ ID NO: 579414 - DNA, 574 bp, Homo sapiens
catgagtaaccaaatcatcagatcatggaagcaattgtgggtggaaacagaaagcccctgtcctgtatgtgtttcagtttgactcagtgagctatactgtatttcatgaaaatagacctgagttctagaactaaatgaaaactcaaatatatacatagtttttctctatttttttcaccaagatttcaattttaaaatgccaccacatttttatatgtctrgttgggaaagatgacttttctcaaagttctgtgtttttaaataagatgctgaggcttgggtcccaaaggttcaagataattctataggcagcagctgtgggctcattttgaaaagacaaaatgtagctttactttctgtcagtgaggttttcggtcccaagtgctgagttaacacaaatgaacaatttagctttcttctagaatatgaatcttactaattgtgggtatgaaaatgaagtctgagctctgaaccattcagtgaaggaaggaggaggcagacattttcagcaattgagacagaagcccaaacctgggctcatcttcagggaatttgaagagtgtctggtaagtgc

SEQ ID NO: 579415 - DNA, 574 bp, Homo sapiens
catgagtaaccaaatcatcagatcatggaagcaattgtgggtggaaacagaaagcccctgtcctgtatgtgtttcagtttgactcagtgagctatactgtatttcatgaaaatagacctgagttctagaactaaatgaaaactcaaatatatacatagtttttctctatttttttcaccaagatttcaattttaaaatgccaccacatttttatatgtctggttgggaaagatgacttttctcaaagttctgtgtttttaaataagatgctgaggcttgggtcccaaasgttcaagataattctataggcagcagctgtgggctcattttgaaaagacaaaatgtagctttactttctgtcagtgaggttttcggtcccaagtgctgagttaacacaaatgaacaatttagctttcttctagaatatgaatcttactaattgtgggtatgaaaatgaagtctgagctctgaaccattcagtgaaggaaggaggaggcagacattttcagcaattgagacagaagcccaaacctgggctcatcttcagggaatttgaagagtgtctggtaagtgc

SEQ ID NO: 579416 - DNA, 610 bp, Homo sapiens
cataaggaactaaaaatggacatagagtacctggacaaactgagatctgccaacgaaggactgaagtcagtggaggggcagttaggccttgcatcgccagcactcacaggtttcatagcaatacacacaaggaagttggggcttccaagattacacaggagaggcagaaggaggaaatcacattgaattcaagtcaaggaaaccagattgcatctccatcatgctcctctccaatgctatgaacttgagaagttatttcccctttctggatctttatttcctcatctgtaaaagtgagagggttgaactgactcatcgtcttacagcttttctgctcaattattatactcaattattatactcttcagtcatcaccaatcatgtaccgctaaagctaataacactatttttatgttcagagaaggtttttaataagtatcttttgtgaataaccaatcaatagttattaaagctgcttaccaaatctttccagttctcccctttttgaatgacaatgtagaatggggtcttgtgaytagttctgcccacgagctgtggcacatttaattgccaatgcaagacccttcagagctttctttccctttggctc

SEQ ID NO: 579417 - DNA, 429 bp, Homo sapiens
aatatctctcatcagaacttaaaaggcaccagattcttggttaacctcttttggatcaggaaaatacctggaaagggaagggggttctctgcaggatgtaaatttcctccacaagagatgaccttgtagggtcatttcaaaatatgtcaaataactatattttaggataaaatacttttatttcttcagggctggctacctgtcatgttggtatcttattgctataaagagtctgttctgtcagtcttaggatctctatgttaatgtcagtactgttcattgtacctgaactccaaaaggaagaggtataacaaggcctgtcccactgcctcttcccwtcagggcctgaatgagtttttcaggtttactttggagtccctgagatgggagttcattcagtcagttgggaggcttagaattttaattttg

SEQ ID NO: 579418 - DNA, 444 bp, Homo sapiens
acatgacaagtgcaggccttggggatgctgacttaagattctgaggcagaagaaaagtgtagagagcacactcctctgtttgcctcagacctgggggccaggacactgagcctgctatgaatacccagcttgaggagtttagttagcaaaccatgaggctactataatttgctttaatatctgcctctttccctttgctgttratattaattaaccttaccccaaactcaaggagaagcagagaagaagctatttacaacttcctttattattgatcaactcagaaccacattcattcagtgccacttagatgctgaacactgaggaaagcattgtggaccaatgatggagaaagccttttacaactgctgctattgctgctttttctctcgagaacttgagaatttgggtcctggaagaactcacagagatgattcagtccag

SEQ ID NO: 579419 - DNA, 539 bp, Homo sapiens
ggttcatgggccagaaggaacttaagatggaaatttggggattatttcccattccatgtttggctgtatccctgtaatattttcagtgctattttgggattcatatttgtatcagttaccagagattggttcccctaagtaaatcaattggacactattagcaagggaattgcatgctgtacattttaccctgtcttagagagaagaaaagttcctatctcctgtttgcatatcttttatgaaaacaatttaaaccgcacctgtttaaacctttccacagaaatgtctgaaaggtaaacagttggttttggagcagctataacgtggcattgtttaacatggcagctcactgatggttgtctttaattatggccgtgctgtcaacccctgaagtccctgctctttgttgtagatccgatatgacgtttgaggttttcaaagctgcagagatgaaagaatcaacagtcaaatattgctcattctgatrtgcttaaggagcgaggagggggcattgcccatgagggctgcagagccgggga

SEQ ID NO: 579420 - DNA, 593 bp, Homo sapiens
aactctttcagtggatttttgtctcctctcgattcattgtgttatgacctggtgacctgacaagagctttgcttttcttgaccacattgaattgggatcatccaggtgatgtggaccwgttctcgtgccagagtctgcctctcagcggagattgaggatgcgatagaaagaaccaatagcagacaactgcatttccagggcagaggtgattatctctgcatcggattgtttatttatgtattttgttatttatgtattttactgattatcttttaagtgtaaggccctacttactagaccatgagggacacataaggacggaagatagaaacaatctttcaaataggcccatcctttccttggggaaagtcgagcaattatcaagtaaatgtttcccatctgaaaatggtcagctgggtttctccatcattactgattttctggtccacaaatccaggggaactgctatggtctgaatattcgtgtccccctgaaacttatatgttgaaacccaacccccaaggtgatggtgttaggaggtgaggacttggaaggtgattaggtcacaagcatggagctcccatgaatgggat

SEQ ID NO: 579421 - DNA, 516 bp, Homo sapiens
ctgaattccacccttatccctgcctcccggatggacacgtggaggcttcgagtcgggggacatctttcccagggctgagaaggaaggtctgccctctctccccgaggtcctctgtctgtggcctgcctctttagtgtgtcttcaggacacagtgctaccaaagggaggagccacattttgaacccagattcgcgtgattcaaaagctgccctctgagccagggcatcaacctgggatttgctacccattccaatgacctatcratctcatgttttgcccacagttcctgccaatgaaaagtggaaaacagcaacccatgaggtcctagactttactggaaaaaccacaaacgtaaggaagcatgtgtctccaacatgtgttaacccagagagttccttagtggtgaaaagtcggtcacacagattgcttgggggtttttgacgctgaggaagcactgccggattgcttgtgaggtcgtttggcaggtctaccgtgtgagcagctcacaggcaccat

SEQ ID NO: 579422 - DNA, 492 bp, Homo sapiens
acacgtggaggcttcgagtcgggggacatctttcccagggctgagaaggaaggtctgccctctctccccgaggtcctctgtctgtggcctgcctctttagtgtgtcttcaggacacagtgctaccaaagggaggagccacattttgaacccagattcgcgtgattcaaaagctgccctctgagccagggcatcaacctgggatttgctacccattccaatgacctatcaatctcatgttttgcccacagttcctgccaatgaaaagtggaaaacagcaacccatgaggtcctwgactttactggaaaaaccacaaacgtaaggaagcatgtgtctccaacatgtgttaacccagagagttccttagtggtgaaaagtcggtcacacagattgcttgggggtttttgacgctgaggaagcactgccggattgcttgtgaggtcgtttggcaggtctaccgtgtgagcagctcacaggcaccattttgttgcaa

SEQ ID NO: 579423 - DNA, 516 bp, Homo sapiens
ctgaattccacccttatccctgcctcccggatggacacgtggaggcttcgagtcgggggacatctttcccagggctgagaaggaaggtctgccctctctccccgaggtcctctgtctgtggcctgcctctttagtgtgtcttcaggacacagtgctaccaaagggaggagccacattttgaacccagattcgcgtgattcaaaagctgccctctgagccagggcatcaacctgggatttgctacccattccaatgacctatcaatctcatgttttgcccacagttcctgccaatgaaaagtggaaaacagcaacccatgaggtcctagactttactggaaaaaccacaaacgtaaggaagcatgtgtctccaacatgtgttaacccagagagttccttagtggtgaaaagtcggtcacacagattgcttgggggtttttgacgctgaggaagcactgccggattgcttgtgaggtcgtttggcaggtctaccrtgtgagcagctcacaggcaccat

SEQ ID NO: 579424 - DNA, 516 bp, Homo sapiens
ttcatttgcattgctaccgacaaaaaccgtcggcattactgtccgtcttctgcccattagcctctctccctgtgcctctgtaaaaacagcctggtcaatagatggtaagaggccccactgagtggggtccctggagggcaagcccctgacgccactgcaaggttccacccaagccctcggccacgtccacattatgggaggatcgttcctgagcagagcagatcccagtagtcatgagcaaaaaaacctaaacagctaaaccctagagccagctgtcaaagacagagggcctccgcctggaattcttgaccggaatgtccacccaactgtgactttgcaaattgaagtgatgaatccattcttgtgaagcagacctcagaggaaggcatcccaggttatgaaaacagaggagaakcaggcagcagctttggggtgcagtggaagatgcacactcgccttgtggggagggaaccgaaagctctctcacgtcctggggtgagaaggaacagcaggcag

SEQ ID NO: 579425 - DNA, 606 bp, Homo sapiens
ctatttattgcctattatttataatccagcagtctatctgtcatctatctattctatcatcaatctattatctatctagttattatctatccctctagtatctatggatctatttatttataatatattagtctatcatttatctattctatcacctatctattatctatgcatctatctattatctgtcaatctataggacccacagactgtctgaggccagagctgggtcccatcycacttaactgtttcagctccaaagcccttccctggtcgcccttactccaggccactctcttcagcctcctctggctctgataccctgccaggtacccttattctgagacacacgtcctgcagttgcctttccaccctgcttgggacctgatggcctgcacagggcatgcaaatgccctttttacctgcctgagtcccacagccacatggactcccccttgtgtcctcttccccgcttctgtcctggctcagggttctggcgctcctcaccttggctgccacccaacgccttacttggccttgactcatggtgtttgggtctaaatgttggagagaggagcagaagatagagaaggacggggaaagggc

SEQ ID NO: 579426 - DNA, 464 bp, Homo sapiens
ttttaagaccttcggtcccatctctggcccttgctcacatgacctcatccaaactcttgaaggcccarctccacagcccatcacatgagggttagagcttcaagtctgattaggtctggagggcacaagacggcctgatgaccagacagccccagcccattccacctcccctggtgggatggacacttctccatcagcctgcatctgtgttcctaggaccagtgaatggagaggaaacatttggaccttttcatggtgaatttgttacattactggagaacctaaaaatgggctccagctgtcccatagcccatttggggtggttctgatgggcaaggatgaggtaaaatttaagggggtgggacattgttttaaaccatcaatttgtgctcaacttctttggagggaatcatggctggaggtaaagatgggtctttatagagagaggtgatggcttggctgtg

SEQ ID NO: 579427 - DNA, 464 bp, Homo sapiens
ttttaagaccttcggtcccatctctggcccttgctcacatgacctcatccaaactcttgaaggcccagctccacagcccatcacatgagggttagagcttcaagtctgattaggtctggagggcacaagacggcctgatgaccagacagccccagcccattccacctcccctggtgggatggacacttctccatcagcctgcatctgtgttcctaggaccagygaatggagaggaaacatttggaccttttcatggtgaatttgttacattactggagaacctaaaaatgggctccagctgtcccatagcccatttggggtggttctgatgggcaaggatgaggtaaaatttaagggggtgggacattgttttaaaccatcaatttgtgctcaacttctttggagggaatcatggctggaggtaaagatgggtctttatagagagaggtgatggcttggctgtg

SEQ ID NO: 579428 - DNA, 464 bp, Homo sapiens
ttttaagaccttcggtcccatctctggcccttgctcacatgacctcatccaaactcttgaaggcccagctccacagcccatcacatgagggttagagcttcaagtctgattaggtctggagggcacaagacggcctgatgaccagacagccccagcccattccacctcccctggtgggatggacacttctccatcagcctgcatctgtgttcctaggaccagtraatggagaggaaacatttggaccttttcatggtgaatttgttacattactggagaacctaaaaatgggctccagctgtcccatagcccatttggggtggttctgatgggcaaggatgaggtaaaatttaagggggtgggacattgttttaaaccatcaatttgtgctcaacttctttggagggaatcatggctggaggtaaagatgggtctttatagagagaggtgatggcttggctgtg

SEQ ID NO: 579429 - DNA, 496 bp, Homo sapiens
ttttaagaccttcggtcccatctctggcccttgctcacatgacctcatccaaactcttgaaggcccagctccacagcccatcacatgagggttagagcttcaagtctgattaggtctggagggcacaagacggcctgatgaccagacagccccagcccattccacctcccctggtgggatggacacttctccatcagcctgcatctgtgttcctaggaccagtgaatggagaggaaacatttggaccttttcatggtgaatttgttacattactggagaacctaaaaatgggctccagctgtcccatagcccatttggggtggttctgatgggcaaggatgaggtaaaatttaagggggtgggacattgttttaaaccatcaatttgtgctcaacttctttggagggaatcatggctggaggtaaagatgggtctttatagagagagrtgatggcttggctgtgaataagaatctgaggagcaagactggcagatc

SEQ ID NO: 579430 - DNA, 602 bp, Homo sapiens
caaacggtccttgggtgttcagttagcagtaagtaaattgctgtgggagctgagggcgggcatactttagcaggcaattcctctctgtctttcattctgtttgtctgtgttaaattccccctctgccctcatccattctcacatccagttccctgctttgtccatccatcaatcccctcactttgtcagtgctgacttcatcccggctctcacaatcacattgcagccatcccgaggccacgagggaccccacaccacccccccaaccgcccccacccgcccgctgccacctccctgcttccggatccgcgatctgctgacggagggcccagccggccacktgtcgttttctattgcacagaccagcaaaaacactaatactcaacctgattcctatcgtcctgcttttcacctttcctatcgaggggaatggaagagagaaagacgcacggagggagaaacaaggggggcggggagggatgaggtagggataatggagtgagatgtttgctgaattttctaaaacaatttgcacaccagtcaggtggaggctcaatccagcttcccataccacacatcaatagaaatcacagggagaaaat

SEQ ID NO: 579431 - DNA, 593 bp, Homo sapiens
cttctataaagttatttattttacttatttaggagacaacacccttttcataagtacatctctcatggttgtatcaatgactcttagaaacccagtgtgcacattttacaataccacgtatgcaaaagtcacagacaagatcaaggagctgatgatcrtaggagtcaggagagagatctccttgagcgcctggtgaccggtgaagcaaagggtccacggaacaccctgttttatatctgggactcggcttcaccagtgaacttacctgctgagaatttagcaagctgtatacttaatgatttttgtgtttttatgtatgtgagttatattttaatttttaaaatgcacctaaatatgttaaacaaattttagcatcctctaaaactacttttttgtttgtttgtttgtttgtttgagacagagtctgactctgtcgcccaggctggagtgcagtggcgcgatctcagctcactgcaagctctgcctcctgggttcatgccattctcctgccccagcctcccaagcagctgggactacaggcacccgccaccacacccggctattttttttgtattttttagtagagacggggt

SEQ ID NO: 579432 - DNA, 366 bp, Homo sapiens
tctgcccaacatttttgtcattttggaggagatgagtgcaaactgagaaagtctctctgcttgtttccctgggtggtacttatgctgtctgaatgttcctttctggaatttattagttagtgattttcttttcaataaacacttgtagcatacatactagtgtgctctcctaaagggggaaataatttggcagccttatcagcatgttattggactttcgttttgtttgtaatcttaagacacctttttcccactcagccattcagcaacattttcccttycccagccttggccccgccacctgaaacattcatgttcttcctctaagacagaataccaaccaagtgcaggcagccggttgacaca

SEQ ID NO: 579433 - DNA, 525 bp, Homo sapiens
agtcttctccattccccaaagcttatggcgtcagctgataatgaaggtgttaggtctacacacctccttgaaaaaggttcttgatgatgaaacckcttgggtctaaaatatctttaccaccccaaataatttaaatgtactatggctgctcattggggtcactggacctcttaagtcagtccatatgtttgtccctacctttcagcccttactctgtgtctccactggaaaacctttagaaatgcatgaatcagtagcaaagttttcatagtcttccactgggtggtaaaatgctccaaatctgccttctatgcagagccaatatgctggctctccagtccctccttccaggctcttagcaggaggggagtgaaagtttacagcttgtttagataaagtagtttaggaataagagggagcaaaagccagaagcacctctaaagtgtcaggagaatccttggttctctcttccttacctaagatgtgacctacaagagtaagaatcagggtttcctagattgattt

SEQ ID NO: 579434 - DNA, 412 bp, Homo sapiens
gggcaaagtatcagtcaggaatagcttgattatgtggtggtaacaaatagcccccaaaccatagtgccttaagtaggagtcagcctgctggtcaactgcagcctgctgcctgtttgtgtaaacaaaagttgattggaacatagccatgcccatgtgtgcacatatttcctatggccgttttcccactatggggacagagttgaggagtygtgacagagactgcatggtccataaactaaaagcctaaaatattttctatctggccctttatagaaaaagtgtgctgacccctggcttaaaaaccataacggtttatttctcactcctgctccatgttaatcaagagtcagctgggagttctgctccatgtcatctgtactgcaggacccagctgatggagccaactctatct

SEQ ID NO: 579435 - DNA, 633 bp, Homo sapiens
tcatcttaattgggaaagtggaagtcaaattatctctgttcactgatgatataatattatacctagaaaaccataaaccctcctagaaaagactcctagacttcagtaaagttccaggatgcaaaatcaatgtacaaaaaccagtagcatttctgtacactggtaatgattaagctgagaagcaaatcaaagactgaatcccatttacagtggctaccaaaaaaacactgaagaatgcatctaatcaaggaggtgaaatatctccacaaagagaagtacaaaacactgaagaaagaaatcatagatgacacaaacaaatagaaaaacatcttgtgctcctggaatggaagaatcaatataattaaaattaccatactgcccaaagcaatctatagattcaacccaattcctgtcgaactaccaatgtcactattckcagaatttaaaaaaaaacttaaaattaatatggaaccaaaaaaagcctgaatagccaaagcaactctaagcaaaaatataacaaagctagtggtaccatattttttacttcaaattatactacaaggctatagtaaccaaaacagcatggtactggtataaaaattatacttggaaaaatagaactgaatagagaac

SEQ ID NO: 579436 - DNA, 602 bp, Homo sapiens
aattcctgtcgaactaccaatgtcactattcgcagaatttaaaaaaaaacttaaaattaatatggaaccaaaaaaagcctgaatagccaaagcaactctaagcaaaaatataacaaagctagtggtaccatattttttacttcaaattatactacaaggctatagtaaccaaaacagcatggtactggtataaaaattatacttggaaaaatagaactgaatagagaacccagaaatattacttacctataaacaactgatctttgacaaagttgaaaaaaatatactctgggggaaaggacaccttattcagtataattttttttttcagagacagggttcttactctttcacccaaagctggagtgcactggtgagagctcaatgtagcctcaaattcctgggctcaaacagktcttcagcctcagactcccaagtagttgaaactacaggcatgcaccaccatcctggctgataccctatccaataaataatgctggcataattggagagccatatgcagaagaatgaaactggacttctatctcttaccatatataaaaatgagctcaagatggattaaagacctcaaactacaaaaa

SEQ ID NO: 579437 - DNA, 602 bp, Homo sapiens
aattcctgtcgaactaccaatgtcactattcgcagaatttaaaaaaaaacttaaaattaatatggaaccaaaaaaagcctgaatagccaaagcaactctaagcaaaaatataacaaagctagtggtaccatattttttacttcaaattatactacaaggctatagtaaccaaaacagcatggtactggtataaaaattatacttggaaaaatagaactgaatagagaacccagaaatattacttacctataaacaactgatctttgacaaagttgaaaaaaatatactctgggggaaaggacaccttattcagtataattttttttttcagagacagggttcttactctttcacccaaagctggagtgcactggtgagagctcaatgtagcctcaaattcctgggctcaaacaggtctycagcctcagactcccaagtagttgaaactacaggcatgcaccaccatcctggctgataccctatccaataaataatgctggcataattggagagccatatgcagaagaatgaaactggacttctatctcttaccatatataaaaatgagctcaagatggattaaagacctcaaactacaaaaa

SEQ ID NO: 579438 - DNA, 440 bp, Homo sapiens
catggtgaaaccccgtctctactaaaatacaaaaaattagtcaagcgtggtggtgcgcttgtagtcccggctactcgggaggctgagttgggggaaattgcttgaacctgggaagtggaggttgcagtgagccgagatcgcaccactgcactacagcctgagcaatgcaacagagcaagactccatctccaaaaaaaaaaaaaaaaggtaaatcaaatcatgtcactgtcctgcttaaaccttcaaagatttcttactgtattacaataaaatccaaatcccttattgtggtctccaaagccctataacctaacctacctacytctcatctcttctgactctgtccatcagtcgttacactgcagcctcactggctttccattcttccagtaagtcatgctcattcctgcctccaaacttttggttttgttgttcccttt

SEQ ID NO: 579439 - DNA, 606 bp, Homo sapiens
tagttagtaaggtgatgcccaggaagggaaggaattgtgccaaccaaggaaaggttctcatttgtactttcccatccagcaggaggttttcaaaacatagcatctgtcttaaaaggctcttgtgtgctctaatcatcatcattacttttataatcatgatgtgaatttttyagtcacaaactcaggtgtgcaaacagtatagttttcttcattcttaatacctcattaatttctgactctgcattcttgttctgcataatggcagacaatgcctgccctgtccagctgaacccattccttttgggtggcttcactgacaaacttggacacggtcacttctccagattcagtgatggcctttactggagcctgcttcagacttgcttattgccctctaaaagagttttgaaaatctatatacctcctttgttgacatttaaagcttttttttatcgtaagtttaaatagttaaatactaagttattacatatattgatgtttaaaaaataaactgtcactattatcccatactttcttttctatttatttttttgagacagggtcttgctctgtcacccaggctggggtgcagtggtgcgatcacgg

SEQ ID NO: 579440 - DNA, 606 bp, Homo sapiens
tagttagtaaggtgatgcccaggaagggaaggaattgtgccaaccaaggaaaggttctcatttgtactttcccatccagcaggaggttttcaaaacatagcatctgtcttaaaaggctcttgtgtgctctaatcatcatcattacttttataatcatgatgtgaattttttagtcacaaactcaggtgtgcaaacagtatarttttcttcattcttaatacctcattaatttctgactctgcattcttgttctgcataatggcagacaatgcctgccctgtccagctgaacccattccttttgggtggcttcactgacaaacttggacacggtcacttctccagattcagtgatggcctttactggagcctgcttcagacttgcttattgccctctaaaagagttttgaaaatctatatacctcctttgttgacatttaaagcttttttttatcgtaagtttaaatagttaaatactaagttattacatatattgatgtttaaaaaataaactgtcactattatcccatactttcttttctatttatttttttgagacagggtcttgctctgtcacccaggctggggtgcagtggtgcgatcacgg

SEQ ID NO: 579441 - DNA, 606 bp, Homo sapiens
tagttagtaaggtgatgcccaggaagggaaggaattgtgccaaccaaggaaaggttctcatttgtactttcccatccagcaggaggttttcaaaacatagcatctgtcttaaaaggctcttgtgtgctctaatcatcatcattacttttataatcatgatgtgaattttttagtcacaaactcaggtgtgcaaacagtatagttttcttcattcttaatacctcattaatttctgactctgcattcttgttctgcataatggcagacaatgcctkccctgtccagctgaacccattccttttgggtggcttcactgacaaacttggacacggtcacttctccagattcagtgatggcctttactggagcctgcttcagacttgcttattgccctctaaaagagttttgaaaatctatatacctcctttgttgacatttaaagcttttttttatcgtaagtttaaatagttaaatactaagttattacatatattgatgtttaaaaaataaactgtcactattatcccatactttcttttctatttatttttttgagacagggtcttgctctgtcacccaggctggggtgcagtggtgcgatcacgg

SEQ ID NO: 579442 - DNA, 606 bp, Homo sapiens
tagttagtaaggtgatgcccaggaagggaaggaattgtgccaaccaaggaaaggttctcatttgtactttcccatccagcaggaggttttcaaaacatagcatctgtcttaaaaggctcttgtgtgctctaatcatcatcattacttttataatcatgatgtgaattttttagtcacaaactcaggtgtgcaaacagtatagttttcttcattcttaatacctcattaatttctgactctgcattcttgttctgcataatggcagacaatgcctgccctgtccagctgaacccattccttttgggtggcttcactgacaaacttggacacggtcacttctccagattcagtgatggcctttactggagcctgcttcagacttgcttattgccctctaaaagagttttgaaaatctatatacctcctttgttgacatttaaagcttttttttatcgtaagtttaaatagttaaatactaagttattacatatattgatgtttamaaaataaactgtcactattatcccatactttcttttctatttatttttttgagacagggtcttgctctgtcacccaggctggggtgcagtggtgcgatcacgg

SEQ ID NO: 579443 - DNA, 370 bp, Homo sapiens
ataaagtcttactctggtctccaactgtatgctacactatttcttgctaaaactcatttyttgattttggtgtttacgtgtgtgcgtgtatgtgtgtgtgtgtgtgtgtgtggatctgtttctctctcactctctgctacttttctacagcacaactaataatctcttgaacactacacagatgttttccccattctgtggcatacttatttttcaagtggcttctgagagcagatgttcccatgtgtctttgtaacttcttttcagttgatgcttttgcaacattaaaaaaaaaaaaagtgtagaggtaaagaggaagaatactaagaagaccaattacatagctgatgttctattagaacagaaggaa

SEQ ID NO: 579444 - DNA, 584 bp, Homo sapiens
acgttataaatgtccgtcccaagccagcacgatccatcttacccttaggagttgacattttttccatacttctgtctgtaactctttaaacacatgtatactattttaatgagattatataactgcttttcaaaattatcaatataacttacacctcaggttggaaaagccatcgtctccctccctatctcagaaatcactttaaatatgcttatattttatggttttcttttcatttagatttttcaatccatttacaactggggaagttttatgtgatggtgtcacaattttatttttatttcaaagtgcttgccaatagtcacaaggcatgtaatattaataaattactataacttttcaactttgaatataactttgaagtagaatcaaaatatcatagtagcgagagggrcagaagcttatgaaaagaatcttaaacttaatcttggccagtaaccaagctacataggtgttgttttagactggaatctagtggaagtgtggaaatgtttactgagaattcctaataaagttcttaaactacattttaaaaccctatgaaactttatattccttcaaca

SEQ ID NO: 579445 - DNA, 535 bp, Homo sapiens
aaagggtgcatcctttttttccaaagtagggagtgatcagaaaatatctaaaactgaaaaatcatgaatacaaccacaatgtgtgcctgttttatagaaatgagaagatataccactccatgccctgaaacagcggattaaagcatggagaattattttattttggaagcaggcatcaaagactggatgggatggaagggagaaggcttaaaggactagtaaatttttaatattatgtacatataaatatggcttcagaactaaatgtgcttactgatgtcacactcctacagcaatgcctggcatacaccattcttacaccccacgttgccccaagtacccagtaaagattaagtctaagtctatgtaagtctaatctatacttgtatatagtctgtataagtctaatctacccatgagactacccaatatcccagtgagctmttactgcacaacccattaggaatctctctactctttctacctctacatatgtctggaacactgttcattcttttttttttttttttttttt

SEQ ID NO: 579446 - DNA, 616 bp, Homo sapiens
aagtttgtggagttttgttgttgttgttgttgttgtttgtttgtttgtttgcagactatttaatcatttccatattggagtgagttgatcacctaattgtcatttttcaatttttttatgttgttattttttctgaatgagttttggaatttgggctttaagtttcttcttcaatggaaacatcccttgaaccctacaacattcatccctctaacaggtctcttgagctccctggtccaaaaccaagtccttacagtcttatagccatagcttgggattcctattgctgtgatgttcacatctatgtagtcatgaaaccagtgggcagcccagcacagacttggcttggggactgtgactgttcttgccttttaaatttcactttatgtaagctgtaattgcaggcatcacattttgtttcccagacaaagaaggggtgccccaacctgtagttttaaaataactttgagctgggcatggtggctcatgcctgtaatcccagcactttgggaggcygaggcaagtggctcacttgaagccaggagtttgagactagcctcgccaacatggtgaaacctggtctctactaaaaatacaaaaaattagctggtgtggt

SEQ ID NO: 579447 - DNA, 512 bp, Homo sapiens
tccactcaaatccagtatgatcccatctggattcttaaataattacatctccagagaccgtatttcaaataaggtcacattctaatcttctgggtatgaatttctggggatgttactcaacccactacaaggaatcagatgaaaatgattattgcacataggtttccatcttaactacagaaacaaattaataataactcctgctataacttatgtaaatcaccaaggaagcctttactgaaatatataccttatgttatttaacaattattattgatgcccttcyatgaaggatgagagaagagagcaaaaatctggtcgggcgtggtggcttacacctgtaatcccagcactttgggaggccgaggcgagcagatcatgaggtcaggagtatgagaccagcctggccaatatggtgaaacatggtctctactaaaaatacaaaaattatccagacgtggtggcatgcgcctgtaattccagctacttgggaggctgaggcaggagaatcg

SEQ ID NO: 579448 - DNA, 628 bp, Homo sapiens
tttgctgtgcagaagcttttttagtttaattaggtcccatttatttatctttgtttttgttgcgtttgcttttgcgttattagtcatgaactccttgcctaagccaatgtctggaagagtttttccgaagttattgtctataatttttatagttttgtggcttaaagtctttgattcatcttaagttgatttttgtataagacgagaggtgaggattcattcttstacatgtggcttgccaattatcccagcaacatttgttgaataagatgtcctttccccattttacatttttgtttagctttgtcaaagatcagttgactgttaagtatttggctttatttctgggttatgtgcctatttttataccagatcagttggctgtaagtatttggctttatttctggattctgtattccattcagttggtctatgcacccatttttacaccagtatcacgctgttttggtaactatagcctttatagtatagtttgaagtcaggtaatgtgatgctccagacttgttctttttgcttagtcttgctttggctatgtgggctcttttttggttctatatgaattttagaattgttttttctagttctatgaagaatatgatagtatttt

SEQ ID NO: 579449 - DNA, 609 bp, Homo sapiens
gctatgtgggctcttttttggttctatatgaattttagaattgttttttctagttctatgaagaatatgatagtattttgatgtgtattgccttgaatttgtaggttgcttttggcagtatggtcattttcacaatattgattctacccatccatgagtatgggatgtgtttctatttgtgtcatctatgattycttttagtagtgttttgtagttttccttatagagatctttcacctccttgattaggtatattgctaagtattttattttattttattttattttattttattttattatttttgcagctgttgtaaaaaggcattgagttcttgatttgattctcagcttggttgttggtgctgtatagcaatgctactgatttgtgtacattgattttgtatcatgaaactttactgaattcatttatcagatctaggagctttttggataagtctttaggttttctatttaaacaatcatataattggtgaacagtgacagtttgactttctctttgctaatttattgccctttatttctttctcttgtctgattgctctggataggactttcagtactatgttaaatagaagtggtgaaagt

SEQ ID NO: 579450 - DNA, 641 bp, Homo sapiens
gtgaaatcaacccaaatatccatcaactgacaaatgaataaacaaaatgtagtatatccttacaatggaatattattcaccataaaaaggaatgaagtattgatctatggtacaacatgtatgaacttgaaaaataccattcgaagtgaaagaaactagacacaaaagacacagagtctcattttgcctaggactttctcagtgttcatattgaaagtcccacatcgtgagaaagcttccagtaagcccatccgccttagactcagagggctcttctgccctccactttccttcctttattaggattctggcatctaggaactccagcatcctcgaggcactctcctctctcttcccccaygctagtgtgttcctaagtctgtccctctagtcttgtgtaatttccatgcctctcccttttgctcacccaccacatttcaaacttgatctcagtgattcttactgagggaggatctctttccttctgggtaaaccttggtgacatgttctttatattctgtgttctttatattcacgacccccgtggtcctccttgcactggtctgagttaggctccagctcttatcattcaaatatctgtttcttgactcatgtgtaaattggagtttgcaatctcctcc

SEQ ID NO: 579451 - DNA, 641 bp, Homo sapiens
gtgaaatcaacccaaatatccatcaactgacaaatgaataaacaaaatgtagtatatccttacaatggaatattattcaccataaaaaggaatgaagtattgatctatggtacaacatgtatgaacttgaaaaataccattcgaagtgaaagaaactagacacaaaagacacagagtctcattttgcctaggactttctcagtgttcatattgaaagtcccacatcgtgagaaagcttccagtaagcccatccgccttagactcagagggctcttctgccctccactttccttcctttattaggattctggcatctaggaactccagcatcctcgaggcactctcctctctcttcccccacgctagtgtgttcctaagtctgtccctctagtcttgtgtratttccatgcctctcccttttgctcacccaccacatttcaaacttgatctcagtgattcttactgagggaggatctctttccttctgggtaaaccttggtgacatgttctttatattctgtgttctttatattcacgacccccgtggtcctccttgcactggtctgagttaggctccagctcttatcattcaaatatctgtttcttgactcatgtgtaaattggagtttgcaatctcctcc

SEQ ID NO: 579452 - DNA, 641 bp, Homo sapiens
gtgaaatcaacccaaatatccatcaactgacaaatgaataaacaaaatgtagtatatccttacaatggaatattattcaccataaaaaggaatgaagtattgatctatggtacaacatgtatgaacttgaaaaataccattcgaagtgaaagaaactagacacaaaagacacagagtctcattttgcctaggactttctcagtgttcatattgaaagtcccacatcgtgagaaagcttccagtaagcccatccgccttagactcagagggctcttctgccctccactttccttcctttattaggattctggcatctaggaactccagcatcctcgaggcactctcctctctcttcccccacgctagtgtgttcctaagtctgtccctctagtcttgtgtaatttccatgcctctcccttttgctcacccaccacatttcaarcttgatctcagtgattcttactgagggaggatctctttccttctgggtaaaccttggtgacatgttctttatattctgtgttctttatattcacgacccccgtggtcctccttgcactggtctgagttaggctccagctcttatcattcaaatatctgtttcttgactcatgtgtaaattggagtttgcaatctcctcc

SEQ ID NO: 579453 - DNA, 641 bp, Homo sapiens
gtgaaatcaacccaaatatccatcaactgacaaatgaataaacaaaatgtagtatatccttacaatggaatattattcaccataaaaaggaatgaagtattgatctatggtacaacatgtatgaacttgaaaaataccattcgaagtgaaagaaactagacacaaaagacacagagtctcattttgcctaggactttctcagtgttcatattgaaagtcccacatcgtgagaaagcttccagtaagcccatccgccttagactcagagggctcttctgccctccactttccttcctttattaggattctggcatctaggaactccagcatcctcgaggcactctcctctctcttcccccacgctagtgtgttcctaagtctgtccctctagtcttgtgtaatttccatgcctctcccttttgctcacccaccacatttcaaacttgatctcagtgattcttactgagggaggatctctttccttctgggtaaaccttggtgacatgttctttatattctgtgttctttatattcacgacccccgtggtcctccttgcactggtctgarttaggctccagctcttatcattcaaatatctgtttcttgactcatgtgtaaattggagtttgcaatctcctcc

SEQ ID NO: 579454 - DNA, 529 bp, Homo sapiens
tgttttctatttcttcttggttcaatgttggtaggttgtatgtggctaggaatgtatccattttctctaggttttccagtatgttagtgtataattcttcacaaacctctaatgatcctttgtattttgttggtttcagttgtaatgtctcctttttcacttctgattttatttgaggcttcttttagccatttatctattgaaaaaccaaatttcattgtgttgatcctttgtattgtgtttttagtctctgtttcatttagttctatgctgatctttattatttctttcattctaccaattttgggtttggtttattcttgcttttccagttccttgaggtgcataactgggctcttcatttgaaatatttctaattgtctgatttaggcattcattgctataaacacttccctcttagcamtgcttttgctgtatcttgtaggttttggtatgttttatttccattttcatttcaagaacttaagaaatatctcttaatatattcatcaaccttatggcagtgatc

SEQ ID NO: 579455 - DNA, 532 bp, Homo sapiens
gttgcaataaatttggacatttatgaatataaaccatagatctcccaaatttcaaatattacggagtaacaaacaactgatataattgaggtccttggcagtggctaagacccagtattttctaaattggtttagtttagaaaagctaaacttagctaggcagaaagttaattaaaccacaatctatttaaactcgcataaagtgattggtattcaaggtgctatatagacactgttgatggcaagcactgccttcaaaataygtaaatcatactcattctgtataaactgatagtctatttagaaaataaatacagcatatgaattattgtttcatagagtctgtattttcccaaatgcgatgagattatgttcaaagtaattatgttagtctaattactttttcaactttccaatttctactacaattatatttgagtgttatttttaagaaatacataatcccataatgtctgctcaatagaccctagagactatattcttcacagtatctaaatcatatctttggagg

SEQ ID NO: 579456 - DNA, 532 bp, Homo sapiens
gttgcaataaatttggacatttatgaatataaaccatagatctcccaaatttcaaatattacggagtaacaaacaactgatataattgaggtccttggcagtggctaagacccagtattttctaaattggtttagtttagaaaagctaaacttagctaggcagaaagttaattaaaccacaatctatttaaactcgcataaagtgattggtattcaaggtgctatatagacactgttgatggcaagcactgccttcaaaatacgtaaatyatactcattctgtataaactgatagtctatttagaaaataaatacagcatatgaattattgtttcatagagtctgtattttcccaaatgcgatgagattatgttcaaagtaattatgttagtctaattactttttcaactttccaatttctactacaattatatttgagtgttatttttaagaaatacataatcccataatgtctgctcaatagaccctagagactatattcttcacagtatctaaatcatatctttggagg

SEQ ID NO: 579457 - DNA, 532 bp, Homo sapiens
gttgcaataaatttggacatttatgaatataaaccatagatctcccaaatttcaaatattacggagtaacaaacaactgatataattgaggtccttggcagtggctaagacccagtattttctaaattggtttagtttagaaaagctaaacttagctaggcagaaagttaattaaaccacaatctatttaaactcgcataaagtgattggtattcaaggtgctatatagacactgttgatggcaagcactgccttcaaaatacgtaaatcrtactcattctgtataaactgatagtctatttagaaaataaatacagcatatgaattattgtttcatagagtctgtattttcccaaatgcgatgagattatgttcaaagtaattatgttagtctaattactttttcaactttccaatttctactacaattatatttgagtgttatttttaagaaatacataatcccataatgtctgctcaatagaccctagagactatattcttcacagtatctaaatcatatctttggagg

SEQ ID NO: 579458 - DNA, 563 bp, Homo sapiens
tacaatagtaatgtacaataatattaactccagattgttgaatggttacatcttacctaaataatctgagacttggtgttaaatgtaaattgagtggtaaaagctaagttacagaagtccaaagatgggtatggactcacttctccctgtaatgttgatttctaaatgacaaaaaaaacacaaaagctctgtaaatagtttatcttgaaattaactctaaaagtgccacagcctgatcttctttgttatggcagagtaggattaaaatttgtttcactctcggctgtttgtttgcttggcacactttcaaaaattggtttgcattttgctggcatgaaaggatttttactactgagcttcgctttaattaagaaatctaggccgggagcggtggctcacacctgtaatcccagcactttgggaggctcaggcaggtggatcacctgaggtcaggagttcgagaccagcctggccaacatggtgaaaccctgcttctactaaaaatacaaaaattagtcaggcatrgtggcatgtacctgtaatcccagctactaggggagctg

SEQ ID NO: 579459 - DNA, 538 bp, Homo sapiens
atcttggaatggccttcacactgacatctcatctgtatatgccttctttctccataggtttaaatccaaatcacttaaggttctacaaaatagaagagtctatcctatcatatcatatagaatgattctttcaagttatttacatttagaaatacatacattaagtttgtggttgcatttaaaaagttccagtagattataaatatgtactgagtacatagtaaatacataaagtcagaccatatttaagggagcagataaatagaatttacttctagatagaataaatgcaaatctatgctgcaaaaatatatgtgtgtatagatagatagatagatagatagatagatagatagatagatagatagataaatttctcgtgattaggcaaccaatcayattacaggaaccacagaattagttgtgattgtgaaatggtctactctcaactccaacttttggttatttaactatagtatactgagtatgaacaaaaaattatatatatatatataattggcagctcatttaaggtgta

SEQ ID NO: 579460 - DNA, 552 bp, Homo sapiens
cccagattaagggtgggtctgcctttcccagcccactaactcaaatgttaatctcctttggcaacaccctcacagacacacccaagattgatactttgcatccttcaatccaaccaagttgacactcagtattaaccatcacgccacccaaaactcatgttcaattgtaattcccagygatggagttggggcctggagggaggtcactggataatggggtggatccttcgtggttaacaccatccctttggtgctgttcttgtgatagagttctcatgagatctggttgtttaaagatgtgtggcaccgcccccacaccccttatccctgctcccaccatgtgaagcaatggctaccgctttgcctttcaccatgattgtaagtttcctgaggcttccccagaagctgagcagaagctgctatgcttgctgtacagactacataactgggagccaattaaatttttccttgtaaattacccagtatcagacatttctttatcgcagtgcaaaagtggactaatacacccatcctttcaaaatcaatgaaagc

SEQ ID NO: 579461 - DNA, 563 bp, Homo sapiens
gagtctcgctctgtcacccgggctggagtacagtggcacrgtctcggctcactgcagcctccacctcccgggttcaagtgatcctctcacctcagcctcccaagtagctgggattacaggtgcctgccaccatccccagctaccatattccaatcattttataatttttaaaatttttatttatttatcttttgagacagagtctcattccacctaggctggagtgctatggcgtgatcttagctcactgcagcctctgcttcctgggttcaagcaattctcgtgcctcagcctcccgagtagctagaattacaggtgcacactaccacgcctggctaattttcctgtatttttagtagaaacggggttttgccatgttggccaggctggtatcgaactcctgacctaagtgctggaattacaggtgtgagccactgcacctggcctccaatcatttttcttaagtcagttttatttcattaatacagactaccgcttcagtccatttttattttcatttcactgaccagccagtggtataatgtcttgcattctagtctcct

SEQ ID NO: 579462 - DNA, 406 bp, Homo sapiens
aaaagctagcaaagcacacatctttaaaataagtggtamagcctgaggcgtaaaccaataattcttatctgtaacaatggcaatagggtgaggagctggcagataaagatttcctgattacatgtggaatgagatattgagaagctgagaagtccagattgaaaaggaattaaacaaatagctcatattgactataactggtctattgttgagactggaaagaagccattcttggtttacttggtaagtaatacagtgtgatttttttgttagctgagatgaagtaatgattcaacaatcacattcatatacacagccctgttttgtgagaattatttaccttggaacaaggttataagccattccttaaaacaaactgactatgaacagctgacccaataattac

SEQ ID NO: 579463 - DNA, 406 bp, Homo sapiens
aaaagctagcaaagcacacatctttaaaataagtggtacagcctgaggcgtaaaccaataattcttatctgtaacaatggcaatagggtgaggagctggcagataaagatttcctgattacatgtggaatgagatattgagaagctgagaagtccagattgaaaaggaattaaacaaatagctcatattgactataactggtctattgttgagactggaaagaagccattcttggtttacttggtaagtaatacagtgtgatttttttgttagctgagatgaagwaatgattcaacaatcacattcatatacacagccctgttttgtgagaattatttaccttggaacaaggttataagccattccttaaaacaaactgactatgaacagctgacccaataattac

SEQ ID NO: 579464 - DNA, 590 bp, Homo sapiens
tatgttggataggtagtttaagcaagaataaacttttgttgtgtttagcaaccaatattttggaattgttactgaagcatagtctctcacactggggaggayaatattttttggtaaataaccagatagtaaatattttcagtgaaagcagccatggacagtacataaacatacatgtgtggctgcatttcaataaaactttatttataaaaacagacataagctggatttggcctgtgaatttagtttgtaaatgcttgatctatcatattctgaccatgtatcttcaagtattacaagttctttgttctgaaagctcattaaaatgactttttttttgctgaaacttaagtaacattccccatcaagttattaaaaaaacaaggaaattccctatcactttaataattcatgctcctgttccagaagtacaaatggatgcaaatgaacaagagaaaaaaatccaaaaagttcaacttgaaaaattatcgtaaaacttaacagaatttagacagatgtctgagtataaaattagtataatcaaatcagtatgtctctatatgtgaacaataattatttagaaggtataa

SEQ ID NO: 579465 - DNA, 590 bp, Homo sapiens
tatgttggataggtagtttaagcaagaataaacttttgttgtgtttagcaaccaatattttggaattgttactgaagcatagtctctcacactggggaggataatattttttggtaaataaccagatagtaaatattttcagtgaaagcagccatggacagtacataaacatacatgtgtggctgcatttcaataaaactttatttataaaaacagacataagctggatttggcctgtgaatttagttygtaaatgcttgatctatcatattctgaccatgtatcttcaagtattacaagttctttgttctgaaagctcattaaaatgactttttttttgctgaaacttaagtaacattccccatcaagttattaaaaaaacaaggaaattccctatcactttaataattcatgctcctgttccagaagtacaaatggatgcaaatgaacaagagaaaaaaatccaaaaagttcaacttgaaaaattatcgtaaaacttaacagaatttagacagatgtctgagtataaaattagtataatcaaatcagtatgtctctatatgtgaacaataattatttagaaggtataa

SEQ ID NO: 579466 - DNA, 593 bp, Homo sapiens
cattatattaagaatttgtcttagagtctgctaccaaccatcagagctctaagtcagtggagctatcattgttagaaaccatcaaatccttttgattctctcttctgaaatttatcaattccctcctgttccagtaataaactatttcagactcagtggcttaaagcaacaacagcagaggtagctaatctctccttcagggtatcctggtctcagctgggaagacttgaaggctcggggttggactcatcagcaggcaccttaattcacacgtctggcagttaayggtgtgtaccgcctgggatcacagctgggctgatggctgatgtttacatgtggcctttctgtgtgtttctccacataaagatagttggggcccccttataatatggcagctgggctccaagagctagtatccagccaggcggctgggtgttgtggctcaggcctataatcccagcactatgggagggcaaggtgggagaatcagtgaggccaggcatttgaggccagcctgggcaatgtagtgagacccccatatctacaaaaaaataaaaaattagctgcggacgttggtgcacgcctgtagtctc

SEQ ID NO: 579467 - DNA, 550 bp, Homo sapiens
ggtgtcagactgccaatttatgtactcagtatccattcttcttttccaatagaatcctgattttattggagttgaaaggtattgcagatacatgtagtcatttttccagattcttttgaactaattttgagcaatgagatggaataaaatgtttagagaatgggcttaactgggaaacattgttttctagctaaaaacggacatgtgctttcttccttcycccttggttttgctgagaaagccaagcatgcacacagatgactgaagatacacaagccggactatgaccatgagggtaagagcctcatgcttaagaggacaaagcagggtgctggacagagcctggtctttctttcttgatctgcctccctctgcatttcctgttaagtcataaaaaaaatccctttttggttaaaccactgtgatttttgtttacttgcagcccaaatctagtcatgccagtcttgactattacattatgtttttgaaaatggtgtaatgttttagtatttttgtatttatttttcattgtttactttgtttttgtatt

SEQ ID NO: 579468 - DNA, 573 bp, Homo sapiens
tttatcatgcagacttcagcaagcattgttggacacagtgtaaattcttaactattaattggaagcaccatgagycacacggtcctagcaacaatggttatgctaaagcttactgatgcatctccatcttcatatgggagtcagggagaaatctggggaattatttattcagagacatctgtggggcattttctggtgactttcagaaacagtaagaaaataagttagaaagaaagacagagattcttccttcttccctcccttcaccttatttgagttctttcttcccatcctccttcgtcatatggatacaaacatgaaaaaaataaaatatcaaaatggatcaaaaatgtttatttttaatgaaggtcctgatactatatagtatctattaatctgtttagaacattacaataataaaaccaagggcatgaatgttatatatatatatatatacatacatatatcattatatacatatacatacatatatatatatatatatatacacacacacacacacacacacatatatatatgggctgaacaaatttgctcaagcaaagacagcca

SEQ ID NO: 579469 - DNA, 600 bp, Homo sapiens
cactagtgttggagatgctataattgaagtcagcttatgacaacagggaaaaggctgagtctaaaagctctcaccattcaacactccccactcmcaatgttcccactccaaatggtacagtaatggtgtgatgataggtccatccagattctatcccgggggatctcttcctgtgtgtagccttccccctacactttttcttggtatcattgatctccttctgtttttcctttcttttcatgttttctttcaatttgattcatttatatacacatatgaatatattctcctttgataaatccaaacattaagagacaaagctaaagccctcttgactgccatccctaatctcaactcatccccaacatcgaccattcttgtgttacatgtttgttgtgtatccactcaaacctctgtctatgcattgatgtgctaatatggtctggctgtgtccccacccaaatttcatcttgaatcatagctcccataatcccacatgtcatgggagggacccagtgggaggtaagtgaatcatggaggtgggtttttcctgtgctattctcatgatagtgaataagtctcacaagatctgatggtttt

SEQ ID NO: 579470 - DNA, 529 bp, Homo sapiens
tggcacatatacactatggaatactatgcagccataaaaaaggatgagttcatgtcttttgtagggacatggatgaagctagaaaccatcattctcagcaaactaacacaagaacagaaaaccaaacactgcatgttctcactcataagtgggagttgaacaattagaacacatggacacagaaaggggaacatcacayactgggcctgtcaggggttgggggctaggggagggatagcattaggagaaacacctaatgtaggtgacaggttgatgagcgcagcagaccaccatcacatgggcatacctctttaacaaaactgcacattctgcacatgtaccccagaactgaaagtatatatataaaaaagaaaagaatcaagcaagatacggaggctaatcactgatcacaggctctcacacagggggtattagtttccatttgctgttgtaacaaattccacaagcacaacgacttagaataacacacaattattattctgcaattctgaggtcataaattctaaat

SEQ ID NO: 579471 - DNA, 632 bp, Homo sapiens
ttgtggaacatggtgtccccatgtgctaaacgttcaggcttgctgggttattcctgtaacatttgttctatatcccagtccaacttttcatggtgacatccaaagttcccagccaccaatgccagactcttctttagcatcagtaaccccacaaacaactgggaagaatacttatctaccttccccactctttcttatttatgaatcagtttgaaattacacggtaatagttgtgcctgcattttgaagatggctcttatcagtaattacagatgtatgttaaactaagtttttaatgctaagattatcttcccaggtgtttacattagaaagaattctagatttggagataagtggasacaagttcacccctgaatatttagtaaggtgctaaggtacctgtgggattgcctgagttgtgactcttaagacattgcaagtaaaaagttacaactgacatcagcatccaaccattcttctgtaagtagcaatattctatttccttttgccttggtgggtccatcagtctacgtgtctactctcccagggccaaggcgggacccaaatcaaccactcattctccaaacatttccaacacaggaggaaaaacacaaggtcagggccgattcact

SEQ ID NO: 579472 - DNA, 567 bp, Homo sapiens
cccacccttagattactcagtctagcaggacagacagaggcataaatggaccactctgaaaccaagtgttgaatgccattataaagaaagttgggttctgtggtgtaagtaggagttaacgagatgaggatggcacaggagtcccagacaaagggaaactcattaccaagaaatgagggtgtctcaagaagtgacaaccgttttaagtcatttaaacataggtcagagtggagagagacaagcctagaaggccatgaacaaagagacttatgcagtgagttaagcaatatggactttatcaacaagtaatgggttattaataggaacatgacatttatatttcagaaaaaaaaatttagcatctacaggaggatgagtgaatagaaaagcaggaggrcattagaaggttgttataatcatttaaataagaaataactggacaggtgtggtggctcatgcctgtaatcccagcactttgggaggccaaggtgggcagattacctgagatcaggagttcgggaccagcctggccaacatagtgaaatctcatctctactaaaagtacaa

SEQ ID NO: 579473 - DNA, 596 bp, Homo sapiens
gatttccacacatgcatgggaaagaaaagaaggactattgccccacagattcactgcatctagtattgctaaggggctgcagcctcttgccaaccacagacccatctcagtggacaatgcaaagggtagcattaaatcatgagctttgtgagggcagggagccctgtgcctcctatctggcatagcatcccacacctggtgggtgcctagtaattgtccataggataaatggataacaacggagagacgaagaatttattgtagttgtgtttttgcaatagtttctctcccccactgggtgattattcatgcactgcttctccacattagggcaaagtgagctcacatctctcttacctgctctctgggcctcccrgcctggactcgcacaagggcaccatcccactacccctcatacttccaatcagtgcagaccagagccaccccaaccccactatcatcactcacatgagcagcaggatggagctggcacagaagacaagcctcctacacctcctctgccaaatcttcaaatatcatcagtcacactggaaaatggccccaggccactgctgcttaatgggccatgatggatg

SEQ ID NO: 579474 - DNA, 416 bp, Homo sapiens
taagggatcagagcctatgggcctctttctgtcctctgaagagcatgctgctactggggcaaatgagtttgagtccagagccgacaatgagcaggtgatcaagccccaagtgaaatggcctacaagcccctcatcttctgaccacaaaaacaccataggaacatagagacactgccatttttttaaaaggaaccttatgaggaatacaggcaaagaaacagataatcattacacattaagataatcattacacgattaatagataatcattacacgttgttaagtgctacaatggcagcatgatagggcacttgatgagtcttggkggggcggcagtcagagaagactacctgggggctggggatcatgaaagaaggcaggaggggaaatcatttctgcacaggttacagtagact

SEQ ID NO: 579475 - DNA, 616 bp, Homo sapiens
ggacttccctttgtaacctgacctttctctctggctgcccttaacattttttccttcatttcaaccttggtgaatctgatgattatgtgtcttggggttgctcttctcgaggagtatcttgtgtttttctttgtatttcctgaatttgagtgttggcgtttcttgctaggttggggaagttctcctggataatatcctgaagagtgttttccaacttggttccattcttcttgtcagttttagtttcaccaatcaaatgtaggtttggtcttttcacatagtcccatatttctaagaggctttgtttgttcctttwattcttttttctctaaccttgtcttcatgttttatttcattaagttgatcttcagtctctgatatcctttcttccgcttgatcaattcagctattgatacttgtgtatgcttcccgaagttcttgtgctgtgtttttcagctccatcaggtcatttatgttcttctctaaactggttattctagttagcagttcctgtaaccttttatcaaggttcttagcttccttgtgttgggttagaatatgctcctttagctcggaggactttgttattacccaccttctgaagcctacttctgtc

SEQ ID NO: 579476 - DNA, 616 bp, Homo sapiens
ggacttccctttgtaacctgacctttctctctggctgcccttaacattttttccttcatttcaaccttggtgaatctgatgattatgtgtcttggggttgctcttctcgaggagtatcttgtgtttttctttgtatttcctgaatttgagtgttggcgtttcttgctaggttggggaagttctcctggataatatcctgaagagtgttttccaacttggttccattcttcttgtcagttttagtttcaccaatcaaatgtaggtttggtcttttcacatagtcccatatttctaagaggctttgtttgttccttttattcttttttctctaaccttgtcttcatgttttatttcattaagttgatcttcagtctctgatatcctttcttccgcttgatcaattcagctattgatacttgtgtatgcttcccgaagtkcttgtgctgtgtttttcagctccatcaggtcatttatgttcttctctaaactggttattctagttagcagttcctgtaaccttttatcaaggttcttagcttccttgtgttgggttagaatatgctcctttagctcggaggactttgttattacccaccttctgaagcctacttctgtc

SEQ ID NO: 579477 - DNA, 455 bp, Homo sapiens
aatagataaaaatctctgccytcgtcgatcttacatttattggagaaatggataataaagcaagataaattagtaaaaaaaatagtgtgtcaaatagtgataagtgttgaggaaaaaaacaaagcaaggatagaaagtgttggtagggagttgaaattaacagggaacgtgagacaataatgcttctgctaaaagctgcattcctgcgatgtgtttctttgtcagagaaacactataaacagacagagaagtaatagtgaaagcacaacactacaatcctgggtatcacctatgggtctacataaaaatccattaaaaattccctgaaaggttaccacattcacagaaagcataaaatccgaatctcgagttttgaggggcaggatatggattctctggatagcagtgactcaggtaaacaaagggagcatgacatggaaggaaaagactcatcc

SEQ ID NO: 579478 - DNA, 623 bp, Homo sapiens
aagctattgagtaactattgctaatatatggcataaagaaactcaaccaaagaaaagagaaagtcaaataatacatgtaccccaaagaataataggtaagttaagtagatcatggtatgttctactcaattggaacttcccctagttctcctcaactcatagatgattctaacatattatatgttgtaataaagaatgacaaatataagaaatggcatcaaataataaagcttaagaaatgaaagatgagtcctgagaagaggtgccataagttgtagtggaaagtattttctctaaaccattatgatgactattgtagtacgttaaagagcagaaccaaagacaagcctcatacaggacatttcagaaatcatcactgtgattaaaaaaatgcatgttattgttaaattgtattttacttttatggtaagttccagggtacatgtgcaggatgtgcaggtttattacataggtaaatgtgtgccatggtggtttgctgtacctgtcaaaccatcacctaggtattaagcccaacatgcattagctattttttctaatgctctccctccacaccccctccacagaccccagtgtgtgttgytcccctttctgtgtccatgtgt

SEQ ID NO: 579479 - DNA, 566 bp, Homo sapiens
aatcattcatgcacataaatgctttatactcctagaaagcacaaatcaatttaaagaaaaaaaaaagctttaaacattttgatagaccagtgatagtcagtttacagcaaaagagggagtaagattatttagttaaacaggaaacagaactctgaggcactaagctaaatggaaggacaaaagatgagaaaagacaacttgaaaataactttgattttgcatacattaataaatgttaacatgcctgtttgaaacacagtatctgagagttaygatattttatcagccaaagctgcaaatcctgacatttttccctaatgtgtaaatggcagatgtcatttatatgtgcaacattcacatgtgaatctggattcctagaatttctttggaaaacacaaaatattttgctcaatatttcagcaagtataactctaatctattttggtggggtattcatttctttaaactttaaatacatatcaagaataaaatcagacaacaatgatcctttttttcaatttatgtgaaaaataatagaagttaaaatattcaaaattgaagtctat

SEQ ID NO: 579480 - DNA, 606 bp, Homo sapiens
ctgcatggcaaaaaaggtgtccacaagtgtgaatggctcatttttaatgactagccaacagccacttgtaaaagatgtaattgaaattgttcagagattaggttccgtctgctttgtcctccttctcaaaagttttcatggatccaagctattcttaagcattgtttaatactagaaatarcctttatggactaataataagaaagaaaaaggcaaattttaaaagatattccaaattcaaagaaaataagtttggcagcctgacttttgattatctgtaaaaatcagggccaatagtttgaacggaagagtaaatatgaaggttttctaaacagttttttctggaagagagggttggaggtgagaagttctcctttattcagcagcagtgcctacaaaaaacataaatggtgtttctgtgaacctcaaaaagtaaatcagtgagtggatgtaggaattggggtaaatgagcaatagctgccttgtcatttcaagttctgtgtcttactcctatttcacaatcctttcataggagagagagagagagttttctttaaaggcaaggtttgtgggtaagaaaaattattgaaataatgtaggaataac

SEQ ID NO: 579481 - DNA, 606 bp, Homo sapiens
ctgcatggcaaaaaaggtgtccacaagtgtgaatggctcatttttaatgactagccaacagccacttgtaaaagatgtaattgaaattgttcagagattaggttccgtctgctttgtcctccttctcaaaagttttcatggatccaagctattcttaagcattgtttaatactagaaataacctttatggactaataataagaaagaaaaaggcaaattttaaaagatattccaaattcaaagaaaataagtttggcagcctgacttttgattatctgtaaaaatcagggccaatagtttgaacggaagagtaaatatgaaggttttctaaacagttttttctggaagagagggttggaggtgagaagttctcctttatycagcagcagtgcctacaaaaaacataaatggtgtttctgtgaacctcaaaaagtaaatcagtgagtggatgtaggaattggggtaaatgagcaatagctgccttgtcatttcaagttctgtgtcttactcctatttcacaatcctttcataggagagagagagagagttttctttaaaggcaaggtttgtgggtaagaaaaattattgaaataatgtaggaataac

SEQ ID NO: 579482 - DNA, 416 bp, Homo sapiens
gttggggtacaaagtgatgttttgatatttgtatacaacgtagtatgattaaaccaaattaattaacagatccaccacctcaccttcttatcatttttgtgatgaaacatttgaaatttactcccttagttattttgaattgtacaatacatcataattattggagatagtcactccactaygcaatagactccaaaggtattccatctgtttacctgaaactcttgggccatcatctccccattccctccttccttcccactcccagcctctagttactgtcattctattttctgcttctatgagtttgacattcttagactccacatataagtgaaatcatgtgatatatgcctttctttctgtccctggcttattttgcttagcataatgtcttccaggttcttccatgttac

SEQ ID NO: 579483 - DNA, 586 bp, Homo sapiens
ctgctgaagctgcgccaacagccaccccttcccccaggtactctgtcccggggagatgggagttttatctatatgcccttgactggggctgatgcatttcttgcaaagatgccctgcccagagaggaggaatctagagaggcaatctggccacaagggccttgctgagctgtgatgggctccacccagtccaaacttcctgggggctttgtttgtattgtgaggggaaaactgcctactcaagcctcattaatggcagacgcccgtcccccctcttcaagatcgagcatcccgggttgacttcagactgctatgctggcagcaagaatttcaagccagtggattttaccttgctgggctctttggggtgggattcgcataactatatcacttggctccctagcttyagtcccctttccaggggagtgaatggttctgtcttgctgacactccaagtggcactggggtatgaaaaaaaaactcctgcagctaggtcagtgtctgcccaaatggtcatccagttttgtgcttgaaacccagggccctggtggtgtagacacctgagcaaatctcctggttgtgggttg

SEQ ID NO: 579484 - DNA, 570 bp, Homo sapiens
acttaacacatttttaatattattatttatttgttgattatttttattttatacttttcccattgtactgagaaatattcatgaaagcagagatcatgttttacttgtcaaagtgtgctgsggtttcaacctagtgcatggcatttgattatatttgtgaattaataaatatatttgaatcattcaatgaatgcatgttttcatagaaaagacataactggttagttgtatactaagtgataagactcagatgactgttactgggctctctagatttaatacagggcatcccattttagttagtacaatttaaattccgagtatcctgcctagaattaattaatccttctaacattggcttggaatttttaaacaaaataaactgaaatcaaacattatacataaaaatttcttcctctattttaactctgctctttaaaaaatcaaatgtgttccttttagcctctgaagactttttgaacacattgtctacattcacctctcctcctctcaactctcacagctttcattctctataatgttactcagggcttctattttgttttgaat

SEQ ID NO: 579485 - DNA, 417 bp, Homo sapiens
gcgcagtggctcacgcctgtaatcccagcactttgggtggccaaagcaggtggatcacctgaggtcaggagtttgagaccagccttgccttcttaactaaaaatacaaaaaaattagctgggcgtggtgttgggttcctgtaatcccagctactcaggaggctgaggcaggagaattgcttgaacccgggaggtggaggaggttgcagtgagccgagatcacaccattgcactccagcctgggcaaaagaccgagactctgtctaaaaaaaaaaaaaaaaaaaagaaaagaaacacagagaagacacatgawcttttctttccattcactcttcctttttccatcattccccgtaacctcattggtgctgcatgctacatgggacacagtttaaatgtggatgaaaggaaagatctt

SEQ ID NO: 579486 - DNA, 394 bp, Homo sapiens
atttgaagaggtgccttttccaaattcattgaaaagtcctctgataaccaagctctgcaccctcagaactttgtctccttaaaggaattgaattgttagaatttgtagaaaggtacaaagccaaatcttgaggtggccctctttatctgttgtatcttaagaacttgctstatctaggtacacgttgatctgcttttggtaaaaagctaatgaaaactgtcccaaaatggaaagcgtgaagagagggagtggggagactactgagctagaaatttcctgtactctgttacaaatggtagttacatcctcaaattagagagtataggtaactaataataaaaattgtagtcatcctagtatgactaaaattaattactatatacatgtatatctt

SEQ ID NO: 579487 - DNA, 473 bp, Homo sapiens
atcacaaccctagcattccctgaaatattagtggactacagaatcatgcagtccaggtaaagaatcaggctacattacaggctgtgccacattcttagcaactgagaaggaagatactagagaaggggaacacaggggtgagttctttttctactttaaacaagtcttracacagctttttctccaattcccaatataaccatcctgccactacttccctaataccatagcttgcctaagattgatcaagcagaaaatgggtatcttacctcttaagcaaaggtaaagagtattattctctatgttctctatgtctctgttttctatgtctttatctggagcatgctctttcatgtcctttacatttaattcttcaattgcataataatacataagaaaaaactaaatatacccataagattttattctatgataatatttataaaactcaaacatatttgaaaacattgaaa

SEQ ID NO: 579488 - DNA, 592 bp, Homo sapiens
ctttatcctgcagtggtgaggcttgccagaaccactgggatgcatgattcccctctggctagggttggtcagaatgcccctccatgagtaggcatccactgagttcagcccagttttgctttctgctgtaacagggcagcactgagttcaatgcaaagcctcacaatcactgttctctccctctctcgaaagcacatattatctttctcctgctgtatgggaacgaggaagagtggcatcagtgattcaakactatctttcctagtcccttcagtgcttctttcagtgatatgaagtaaaaccagctactgtgagtgttcgcctgatttttggttcttatgaagatgctttttttgtgtagatagttgttgaatttcgtgttcccatagagtggatgattggtagggccttctatcccaccatttgctccacttctctcctctaagggtatctcctttaattacttttcatcagtaatggagatgcgacctcttttaatgatcaaccactttctctctctctctctttcttacacctgtactctctctcttttcctgcctcctttctcccttcctccctcattctcttcctt

SEQ ID NO: 579489 - DNA, 592 bp, Homo sapiens
ctttatcctgcagtggtgaggcttgccagaaccactgggatgcatgattcccctctggctagggttggtcagaatgcccctccatgagtaggcatccactgagttcagcccagttttgctttctgctgtaacagggcagcactgagttcaatgcaaagcctcacaatcactgttctctccctctctcgaaagcacatattatctttctcctgctgtatgggaacgaggaagagtggcatcagtgattcaagactatctttcctagtcccttcagtgcttctttcagtgatatgaagtaaaaccagctactgtgagtgttcgcctgatttttggttcttatgaagatgctttttttgtgtagatagttgttgaatttcgtgttcccatagagtggatgattggtagggccttctatcccaccatttgctccacttctctcctctaagggtatctcctttaattacttttcatcagtaatggagatgcgacctcttttaatgatcaacyactttctctctctctctctttcttacacctgtactctctctcttttcctgcctcctttctcccttcctccctcattctcttcctt

SEQ ID NO: 579490 - DNA, 463 bp, Homo sapiens
ctacacagcccaatataaaacctgccaatagaagtgcatagggctatgaaagcagagccaaaaacccctaaccaacattctctacagtcatacccacctgggtgggggtgaggtgtagagcaagggaaggaaaataacaccaataatattatagggaaagaaagaaaaaaawtctacccacataaaaataattgcaaaaattggctgggcgtggtggcttatgcctgtaatcctagcattttgggaggctgaggtgggtggatcacttgaggtcaggagtttgaaacctgcctggccaaaatggtgaaaccctgtctctactaaaaacaaaaaaattagcctggtgtggctgtgggcacctgcaatcccagctactctggaggctgaggcaggagaatcgctggaacccaggaggcagagattgcagtgagccgagatcacaccactgcacttcagcatgggc

SEQ ID NO: 579491 - DNA, 463 bp, Homo sapiens
ctacacagcccaatataaaacctgccaatagaagtgcatagggctatgaaagcagagccaaaaacccctaaccaacattctctacagtcatacccacctgggtgggggtgaggtgtagagcaagggaaggaaaataacaccaataatattatagggaaagaaagaaaaaaattctacccacataaaaataattgcaaaaattggctgggcrtggtggcttatgcctgtaatcctagcattttgggaggctgaggtgggtggatcacttgaggtcaggagtttgaaacctgcctggccaaaatggtgaaaccctgtctctactaaaaacaaaaaaattagcctggtgtggctgtgggcacctgcaatcccagctactctggaggctgaggcaggagaatcgctggaacccaggaggcagagattgcagtgagccgagatcacaccactgcacttcagcatgggc

SEQ ID NO: 579492 - DNA, 463 bp, Homo sapiens
ctacacagcccaatataaaacctgccaatagaagtgcatagggctatgaaagcagagccaaaaacccctaaccaacattctctacagtcatacccacctgggtgggggtgaggtgtagagcaagggaaggaaaataacaccaataatattatagggaaagaaagaaaaaaattctacccacataaaaataattgcaaaaattggctgggcgtggtggcttatgcctgtaatcctakcattttgggaggctgaggtgggtggatcacttgaggtcaggagtttgaaacctgcctggccaaaatggtgaaaccctgtctctactaaaaacaaaaaaattagcctggtgtggctgtgggcacctgcaatcccagctactctggaggctgaggcaggagaatcgctggaacccaggaggcagagattgcagtgagccgagatcacaccactgcacttcagcatgggc

SEQ ID NO: 579493 - DNA, 463 bp, Homo sapiens
ctacacagcccaatataaaacctgccaatagaagtgcatagggctatgaaagcagagccaaaaacccctaaccaacattctctacagtcatacccacctgggtgggggtgaggtgtagagcaagggaaggaaaataacaccaataatattatagggaaagaaagaaaaaaattctacccacataaaaataattgcaaaaattggctgggcgtggtggcttatgcctgtaatcctagcattttgggaggctgaggtgggtggatcacttgaggtcaggagtttgaaacctgcctggccaaaatggtgaaaccctgtctctactaaaaacaaaaaaattagcctggtgtggcwgtgggcacctgcaatcccagctactctggaggctgaggcaggagaatcgctggaacccaggaggcagagattgcagtgagccgagatcacaccactgcacttcagcatgggc

SEQ ID NO: 579494 - DNA, 456 bp, Homo sapiens
ctgaattcatttatcagatctaggaacttttttgatgagcctttagggttttctaggtagacagtcatatcatcagtaaacagtggcaatttgactccctctttaccgatttggatgccctttatttctttctcttcttgggttgattgctttggctaggacttccagtactatgttgaatagaagtagtgaaagtaggcatccttgtcttgatccarttcttagggggaatgctttcaacttttcctcattcaggataatgttggttgtgtgtttctcatagatgacttttattaccttgaggtatgtctcttttatgccaattttgctgaggttttaatcataaatcgatgctagattctgtgaaatgctttttctgcatctattgagataatcatataatttttgttttaaattctgtttatgtaatgtgtcatattcactaacttgcagatg

SEQ ID NO: 579495 - DNA, 271 bp, Homo sapiens
cagaaaaaaagaaaagtcatctagctaaatggatagggcctgcaaagcaaagacagttcttgtggtcttggcccagcattgctaagaatgtggccaaagatttcattggttgaagttccatcataatcctgttgaaaaatgaatcgagcagaagaggcctgcaatgtgccagaaatcaggcatctaataatttggcagtckctcataaagatgattatgtagagctagaaaggacctaagctacacttacatctattttactgaaatgccc

SEQ ID NO: 579496 - DNA, 515 bp, Homo sapiens
ctcagctcactgcaacctctgcctcccgggttcaagcaattctcatgccccagccttccaagtagctgggtctacagatgygcaccaccacacccagctaattttttgtatttttagtagagacagggtttcatcatgttgcccaggctggtctggaactcctgagctcaggcaacctgcctgctttggcctcccaaagtgctaggattttaggtgtgagccaccacgcctggccagagactaggtaatttttaaaggaaagaggtttaattaactcatgattccacaggactggggaggcctcaggaaacttacaatcgtggctaaaggggaagcaaacatgcccttcttcacatggcagcagcaaggagaagtacggggcaaaagtgggaaaagccccttataaaaccatcagatctcctgagaactcactcaccagaacaggatggggggactcaccaccatgattcaattatctctatctggcccctcccatgacacatggggattatggg

SEQ ID NO: 579497 - DNA, 571 bp, Homo sapiens
ttaataacacaaatatagatgaagaataagaaaatgaaaccacaaaatcatatttaattcayctacccaaccaattagcaatataatgaaagtaatatattcatatactattcataaatacaatagtttctaacattttaacagaagagattaaaataaatgggggaataattggggaagatttttaaatttataaatgtttggtgtccatgagattatatattaatattttatatactaatctaatggattttctgaaaaaaaatagaattcccataattatctcaagaattagaaaatcaaatcaaatcagaccaatgacaataaatgaagtagaaaaactaagagataaatatctctaaaataatatcttgtctctacaacttactggtaaattcacacaaacattgaacattggatatttctcaccccttacaatctcttttagaagatagatatagttggattaaattttatgtattcctcatgacataaaaaatagacaaagttagcaccaagaaaatgttacagaacataaatcatattttaaaatcccaagtggaattgaatt

SEQ ID NO: 579498 - DNA, 487 bp, Homo sapiens
ggcccagaaaactggcatctaatctgagagagatatgatacagttcgacaagctgacaggttatttataaagcataagaagcctccagaatctcactagaactcatattttttgttctacagatggaaaagccctgatgataatctcagaatagtttaagtcagtggtgaactaaagctgtaggaatgcctatacccagattaactacatatcagattgatccagcctccatctctagcaaactgaaagaaaatgtcrtatattttctggaggtaaatactacataattcagtctccactgttaaaaaagtgactaatagtcaaagaagaaatagtcaacagagaaaacatagatggcttgatgacacagttatctgaccatattagataataagaaaactaatgtatctacaggaaatgaacacatgcataataacatatgaaaatacataaaagaaccaaatgaaatgtagaaatgaaaagcaaa

SEQ ID NO: 579499 - DNA, 487 bp, Homo sapiens
ggcccagaaaactggcatctaatctgagagagatatgatacagttcgacaagctgacaggttatttataaagcataagaagcctccagaatctcactagaactcatattttttgttctacagatggaaaagccctgatgataatctcagaatagtttaagtcagtggtgaactaaagctgtaggaatgcctatacccagattaactacatatcagattgatccagcctccatctctagcaaactgaaagaaaatgtcatatattttctggaggtaaatactacataattcagtctccactgttaaaaaagtgactaatagtcaaagaagaaatagtcaacagagaaaacatagatggcttgatgacacagttatctgaccatattagataataagraaactaatgtatctacaggaaatgaacacatgcataataacatatgaaaatacataaaagaaccaaatgaaatgtagaaatgaaaagcaaa

SEQ ID NO: 579500 - DNA, 487 bp, Homo sapiens
ggcccagaaaactggcatctaatctgagagagatatgatacagttcgacaagctgacaggttatttataaagcataagaagcctccagaatctcactagaactcatattttttgttctacagatggaaaagccctgatgataatctcagaatagtttaagtcagtggtgaactaaagctgtaggaatgcctatacccagattaactacatatcagattgatccagcctccatctctagcaaactgaaagaaaatgtcatatattttctggaggtaaatactacataattcagtctccactgttaaaaaagtgactaatagtcaaagaagaaatagtcaacagagaaaacatagatggcttgatgacacagttatctgaccatattagataataagaaaactaatgtatctrcaggaaatgaacacatgcataataacatatgaaaatacataaaagaaccaaatgaaatgtagaaatgaaaagcaaa

SEQ ID NO: 579501 - DNA, 568 bp, Homo sapiens
gaaaccccatctctgctaaaaatacaaaaattagctgggcatggtggtgcatgtctatagtcccagctactcaggaggctgaggcagaagaatcccttgaacccaggaggcagaggttgcagtgarcagagatcgtgtcactgcactccagcctgggtgacagagcgagactctgcccccccaaaaaagaaactatccattttttcctttgaaaacaacttgaagttaaaaccttataacttgattgttttattggctaatattataagttaatttgcaagttaattaaaaagataacattattaattgataagttaccatttttggaatcaaccagcatggaattattttcatattctaccgtttactagcttctatgtctaagtttcttcacctaaaactgggaacagttgtactccttaccctaaggttgttttgaagagtaaatgagatggtatttacaaagtgcttaatttagtatctgcaacatagtaatctttcaatacatgtcaactcttattaattgttattgttatctcagagttgtttttatatagtcaccaaaggg

SEQ ID NO: 579502 - DNA, 568 bp, Homo sapiens
gaaaccccatctctgctaaaaatacaaaaattagctgggcatggtggtgcatgtctatagtcccagctactcaggaggctgaggcagaagaatcccttgaacccaggaggcagaggttgcagtgaacagagatygtgtcactgcactccagcctgggtgacagagcgagactctgcccccccaaaaaagaaactatccattttttcctttgaaaacaacttgaagttaaaaccttataacttgattgttttattggctaatattataagttaatttgcaagttaattaaaaagataacattattaattgataagttaccatttttggaatcaaccagcatggaattattttcatattctaccgtttactagcttctatgtctaagtttcttcacctaaaactgggaacagttgtactccttaccctaaggttgttttgaagagtaaatgagatggtatttacaaagtgcttaatttagtatctgcaacatagtaatctttcaatacatgtcaactcttattaattgttattgttatctcagagttgtttttatatagtcaccaaaggg

SEQ ID NO: 579503 - DNA, 568 bp, Homo sapiens
gaaaccccatctctgctaaaaatacaaaaattagctgggcatggtggtgcatgtctatagtcccagctactcaggaggctgaggcagaagaatcccttgaacccaggaggcagaggttgcagtgaacagagatcgtgtcactgcactccagcctgggtgacagagcgagactctgcccccccaaaaaagaaactatccattttttcctttgaaaacaacttgaagttmaaaccttataacttgattgttttattggctaatattataagttaatttgcaagttaattaaaaagataacattattaattgataagttaccatttttggaatcaaccagcatggaattattttcatattctaccgtttactagcttctatgtctaagtttcttcacctaaaactgggaacagttgtactccttaccctaaggttgttttgaagagtaaatgagatggtatttacaaagtgcttaatttagtatctgcaacatagtaatctttcaatacatgtcaactcttattaattgttattgttatctcagagttgtttttatatagtcaccaaaggg

SEQ ID NO: 579504 - DNA, 568 bp, Homo sapiens
gaaaccccatctctgctaaaaatacaaaaattagctgggcatggtggtgcatgtctatagtcccagctactcaggaggctgaggcagaagaatcccttgaacccaggaggcagaggttgcagtgaacagagatcgtgtcactgcactccagcctgggtgacagagcgagactctgcccccccaaaaaagaaactatccattttttcctttgaaaacaacttgaagttaaaaccttataacttgattgttttattggctaatattataagttaatttgcaagttaattaaaaagataacattattaattgataagttaccatttttgkaatcaaccagcatggaattattttcatattctaccgtttactagcttctatgtctaagtttcttcacctaaaactgggaacagttgtactccttaccctaaggttgttttgaagagtaaatgagatggtatttacaaagtgcttaatttagtatctgcaacatagtaatctttcaatacatgtcaactcttattaattgttattgttatctcagagttgtttttatatagtcaccaaaggg

SEQ ID NO: 579505 - DNA, 599 bp, Homo sapiens
acagtaagaatgttgctattgattaaatgaaatatgataacattttatatacagatatgctatttgcaggacattcttcaaggaactgttccttggtaaccctagagaatcccaaagccaaccatatatggataatatttctatcactctaaatcctactataagaattgtactatatttctttaaagatttaataatagaattttagtaaataaatgtagtatatctatttataaagcatatgatgagagatttttattttctaggtgccaaaataggtacaatttgagaaaaatacatcaataactacagaatagtcaattatcgttctattttccttcaaaataacattgtcttcatttacttttgaactaccctatattaataatactgcagatagagaatgaacagattagaagawgtattagactttctgacaataatttaagctatttcctctagtggaggcaactatagtagacaaaggtatatctttgtatgaatatttgtatggtgtgtgtatgtatatatacatatatgtacatatatacactgtacatacatacacatatacatatacataaatatgtgtgtatatg

SEQ ID NO: 579506 - DNA, 599 bp, Homo sapiens
acagtaagaatgttgctattgattaaatgaaatatgataacattttatatacagatatgctatttgcaggacattcttcaaggaactgttccttggtaaccctagagaatcccaaagccaaccatatatggataatatttctatcactctaaatcctactataagaattgtactatatttctttaaagatttaataatagaattttagtaaataaatgtagtatatctatttataaagcatatgatgagagatttttattttctaggtgccaaaataggtacaatttgagaaaaatacatcaataactacagaatagtcaattatcgttctattttccttcaaaataacattgtcttcatttacttttgaactaccctatattaataatactgcagatagagaatgaacagattagaagaagtattagactttctgacaataatttaagctatttcctctagtggaggcaactatagtagacaaaggtatayctttgtatgaatatttgtatggtgtgtgtatgtatatatacatatatgtacatatatacactgtacatacatacacatatacatatacataaatatgtgtgtatatg

SEQ ID NO: 579507 - DNA, 489 bp, Homo sapiens
accaattcgtgtctgtaaccagcctcctgtttctactgccatcccctcctcatgcacagatgcctcctcccttggctcctgctctgatccctgtacccagcttgtcccctgcaagcatgttcccctcccttgcccaggctctgacaccccacacatgtgtggatcccctcccctgtcccagctctgataccccttgcrtgtgtggctgcccctcacctgggtgtcctcttccctgtcccagctctgacacccacgcatgtggggctgccccgtgcctaggtgtcccctcctctgctcaggctctgtcctcctgcggttggctttcccattctggatgcacctcacacacagctttgtcatctttggatgaatttggcctcccccatccactgctggtgcagatgcttccttacggggccttgtctgatggctttagggctgaatcatgcaggaaggaaggagaaggacaagaagaaaagggaaggctgg

SEQ ID NO: 579508 - DNA, 462 bp, Homo sapiens
gagaccccatctcaaaaacaaaacaccaaacaaaaacaaaaacaaaaaaaaatggctgggcacggtggctcacacctgtaatcccagcactttgggaggccgaggcaggyagatcgcctgccaggagttcaaggccagactggccaacatggtgaaacctcatctctactaaaaatacaaaaatgagtcaggcatggtggcagagacctgtaatctcagctactcgggaggctgagggaggagaatggcttgagcccaggagctggaggttgcagtgagccgagattgcaccactgcactccagcctgggcgactgagtggagcggaactctgtctccaaaaaaaaaaaaaaaagagtttttttttagatcatcagctattgttagtgttagtgtatgttatgtgtggctcaagacaactttgtttcttttaatataggcagggaagtgaaaagattggata

SEQ ID NO: 579509 - DNA, 462 bp, Homo sapiens
gagaccccatctcaaaaacaaaacaccaaacaaaaacaaaaacaaaaaaaaatggctgggcacggtggctcacacctgtaatcccagcactttgggaggccgaggcaggtagatcgcctgccaggagttcaaggccagactggccaacatggtgaaacctcatctctactaaaaatacaaaaatgagtcrggcatggtggcagagacctgtaatctcagctactcgggaggctgagggaggagaatggcttgagcccaggagctggaggttgcagtgagccgagattgcaccactgcactccagcctgggcgactgagtggagcggaactctgtctccaaaaaaaaaaaaaaaagagtttttttttagatcatcagctattgttagtgttagtgtatgttatgtgtggctcaagacaactttgtttcttttaatataggcagggaagtgaaaagattggata

SEQ ID NO: 579510 - DNA, 398 bp, Homo sapiens
tgggtcacctccagattcattttcacagtctttcatgttttggtcatattacattgtattttgctgccatatgactgakctctttttgttaaatgtgagatacttgttaaaaaatatttagcaatgaattgaggcctagtggcatgttatcttgctgcagaagagatgggagtctacttctgggggatggtcacgggtcctccatacaggctgcaattgaggtcgtcggtgcaggctcagtccctacaaaggccagggtatttcctgtccacctctattctgatgcatgactcttctgggtctcaaccagagccagtggacttcagtacgggtcgctttcattggcagaccctcaatccacttgttttccatctaatcccacgcatgtgtgcaaaagc

SEQ ID NO: 579511 - DNA, 398 bp, Homo sapiens
tgggtcacctccagattcattttcacagtctttcatgttttggtcatattacattgtattttgctgccatatgactgagctctttttgttaaatgtgagatacttgttaaaaaatatttagcaatgaattgaggcctagtrgcatgttatcttgctgcagaagagatgggagtctacttctgggggatggtcacgggtcctccatacaggctgcaattgaggtcgtcggtgcaggctcagtccctacaaaggccagggtatttcctgtccacctctattctgatgcatgactcttctgggtctcaaccagagccagtggacttcagtacgggtcgctttcattggcagaccctcaatccacttgttttccatctaatcccacgcatgtgtgcaaaagc

SEQ ID NO: 579512 - DNA, 607 bp, Homo sapiens
atcatttattttagctcaaggacagagaggcttggaagtgattgacctttgatctcatagtccatgctaaaatcataactggaattgaggcatgctgaccccaaagtgattatgtgataaaattgtctccctgtcgattctctaatagtcttattaaggttttgctgcacttgatttggcttaaaaatttttgacccaagtaactccacatgaaaaataattgttaaatactgcttttacacaccacagttaaaatgtttcttaaatatccttaatttttcctttacaaaagaaggtcttgggagaatgtgttttcagtttacatactgagaaactgaggcattgggggataaacaaccctgttggaactctggatctgcattttctcaagtcccattatatgagwttcattcattcatttattcattatttatcaaatattaagattgcacctactatgtgtactgttcttggtactgaatataatgctgaacaaaacagactaggtttccttcttttctaatgatgcttactgtctagaaaagaaagtaacaataataaaaaagtgaataattcactaatattttcttagagactataaaaaata

SEQ ID NO: 579513 - DNA, 429 bp, Homo sapiens
tagccataatgcaaaagagaggccatagggactaagaaggaatgtggcagattggaaagtacaccttccaggtgtccaaagtatacagatctgctcagcctccactgactgttgccatgtgggaatgtgggctctgcattgtcagatcattagcaagaaatccagattttgttggtagtctctcagtgttaaacaacaactatgttgctaatttttgtctttatggttatttgttaacaccccgatggctatcattttacgtgccatgtctgggagcttcagctacacaaaaggccattcctttccctgccgtggcagaatgttctgtacagcatgaatcagagtcccagaaggaaacagacagcacactcagaccagggcagctgaggagcacgtattracaaacatgtggacagggtgtacaggaac

SEQ ID NO: 579514 - DNA, 531 bp, Homo sapiens
tctgctcctaccacttgaagttcacagcacacacaggcaaacagcacccraacatgtccaccaccttcatgggcaggtccaggccactggaggacgtgtgcagacagacacccaggtccgccgaccctgctaggcaagaggggtgggtcagagcactggtctctgccctgggaacacaaatcctcccagcacagtgaggcagcatcccccaaggagagtgaaaatcagataaggcccccaacagccccaaacacaagtggcttaagctggccaagcagccacacagcctggctgggacatctgaaaatgtaagttgacactttttatacgtaaccacaatttggtttttttgttgttgtgttgttttgttttgagacagagtctcattctgtcacccaggctggagtgcagtggcacaatctcagctcactgcaacctccacctcccaggttcacctcctgcctgtaatcccagcattttgggaggccaaggcgggcagatcacctgaggtcaggagttcaagaccagcct

SEQ ID NO: 579515 - DNA, 521 bp, Homo sapiens
gaaactactgaaaaagtagaaagcttggtatctacagattcaaatctgggctccctgccctgcctctgagcctcagtttcccccatgtcaagcagtataagaccctatggcagagctgcagtgaggattaaggagacaagatcrtgggaagcacagggtaaaggctgcgtgcccctccccctccgccatcccccaaccaaacagacacccagggtcccaggcagtacctgttatcacacagacgagagaaggaaggttgtgtccatcaagagtcagttgttcaaactctgtgtttagaaaaagaaacaattctacatggaatttctgatagaatttttttttttttctgacagactctcactctgtcacccaggctggaatgcaatggcgcgatctcagctcactgcaacctctgcctcctgggttcaagtaattctcgtgcatcagcctcccaagtagctgggatgacaggcgcccaccaccatacctagctaatttttgtatttttagtagagacaggt

SEQ ID NO: 579516 - DNA, 542 bp, Homo sapiens
acctccatctcccgggttcaagcaattctcctgcctcagcctctcaagtagctgggattacaggcgcacaccaccacatgcagctaattttttgtatttttagtagagatggggtttcatcatgttggccaggctggtctcgaactcctgatctcgtgatccgcccgcctcagccttccaaagtgctgggattacgggtgtgagccactgcgcccagccctggggattatttttaaccttccgatgttcctccctctgtgtaacttttctcttgtccatctccttttccttaagcccacaaatgacctactttaggctcttgtcatgtctatgyagtcataagaagctgaagtgaagcctttatgtgtattattttgtagctttccacagtgccagtatctagcattcaatagggcctctacaaatagtcgtttaatggaagaataagtgaatagtttactggcaggtgccagggagctaaggaattctcaggctgaagctggcaaggtctgtgtgtttgtttgcctggtctaatgcagtag

SEQ ID NO: 579517 - DNA, 582 bp, Homo sapiens
tatcctttccttgtcttcaaaattaaatttgataattcatgtcatctgtgcctcagattttaaaaacacctgggtctccacctggatctagctcttctcctcaactcctcctccttctttgttgattgtagaaaattctggaaaaaatgaaaagtacatatataacccctttaaatataaaattagaagcccacagtacacgctgatttataaatgactttatttcttgcttatcagtagattatgaacatccatgacatgaatttcacttctataattttattttaatagatttattccataattgacttacccagtaccctactttgagacattttgattgtttccaaatcttcactattataatccatrccatgataaacatcttgggagcatttgtatgtgtatattcatggttgtttttttcctttccatacaacatttcttaaagtaaaatttctggctcaaagaatacacactattttttttccttttcagaatgtatttatttattttaaaacatgctacttcagaaaattttggggaattctaaaacacagaaagaaggaaaagtaaaaatta

SEQ ID NO: 579518 - DNA, 597 bp, Homo sapiens
ctaacaaaaaattaattaataaacagcttataaagccacagaggctttaatgtgctgaaccattctgtcacgagggcttcggacgtaaggcatgactgccagcaacaagttgagaagtcaaattcaaatatcccctgtcaccaacctaagctcagtggcagggcttggccccatctctctgggctcctgttttcctatttggacaacaaggggctgacttccgacttatcagggttcttctagtgctgatcatctaggagtcaagctggtgccccacaggccactctgcccactctgattttacccccacgctctcctgcctaatcctatatataggccagaaatacccccaagagaggcctctgtaggtgaaaggtcaactttgcctccaaacaaacagaaactgcagcaaagagaatcagaaaggacagtgccccgtgctctcttggccctgggacccaaaagttaagttgagtgtaaaagctgggagccccgagactaaaaacgccacagtatttayggctgatgaatgcatcctgctcaggactgcagaaccatgtggggatctacgagcctgaaacatacaaatgggtgggt

SEQ ID NO: 579519 - DNA, 245 bp, Homo sapiens
tgacaacctatagtcaacctagatggaggttttcattctacaagattgtttccatatagtagaaatcctctttgtgaaccttcacttctctcagtactctccattgttccataaaatagatatttctccctttccaaattatttggaaaacaacttcctcccttctttttttcttccaatatttgaattaagaagtcatcatcttttgtaacytaatcacggaagtgatctcccatccctgtttc

SEQ ID NO: 579520 - DNA, 487 bp, Homo sapiens
aattccaaaaatgcactgggatggccacagctgcccagctctgggctccaggagggtctgtgggctccagcagtgtctcacaggtccagctggtgccgcatgaagtgggggcaccagcaccttccgtgggactcacttgartgtctgttttccccaagtacatccccctggggaatgggcagggcccacagcaccgcgctccttcacaggtgggagaactggggcgggaggaggatgctggagcgctgaggtcagagccagtctctggcgtccgagtcgtggctttgccacttcctcagccagatgacctttgcagagtttctcttccctaaagcaagaacacaaaaacctccctcgcaggatgtttgtgatgctaaaacaggcaaagcacacgcaggcacagcacaatgcctggcacacagtgagtgctctgtaaggtcagcagctgtcatcaccacttagtactgaccagcacgcgacagctaag

SEQ ID NO: 579521 - DNA, 613 bp, Homo sapiens
ctgcaatacaaatagaaaatgctatttaagttggattatgcatcaaggttgaacaccatcaggtagagaaggggaattgttgaaattctagaccagataaatatctttggctgagatccagagatgaagatatttggaatgtgtagctatcagaagatggcccaaggagtcaacaatgaggtgcgaagggtgagatcagcctaaattacaaaggggcatgaatgcaatgataagcagttcasacctcatcttgaaggcatcaaggacaatggcattaagttcctttaacagcatcattttaagagttgaaaggtttctcaggtctttatacaaacagatgtattattataaatgatcctctctaacacatagcatcaacatgttctctctcactgagaaaagtctcatgggattgccatagtagaaaatatgtacatttgaaaaaatccattcatttaatgatttggatgtttataaacatctgttatttaataaaaggatggctcaggttacgtagatgatatccaaattcatgtgaatttttcttctcagagttctaaatatacacacagcttttaaaaggtactcagtaatgaataattattaataattt

SEQ ID NO: 579522 - DNA, 535 bp, Homo sapiens
aatgaggtgcgaagggtgagatcagcctaaattacaaaggggcatgaatgcaatgataagcagttcacacctcatcttgaaggcatcaaggacaatggcattaagttcctttaacagcatcattttaagagttgaaaggtttctcaggtctttatacaaacagatgtattattataaatgatcctctctaacacatagcatcaacatgttctctctcactgagaaaagtctcatgggattgccatagtagaaaatatgtacatttgaaaaaatccattcatttaatgatttggatgtttataaacatctgttatttaataaaaggatggctcaggttacgtagatgatatccaaattcatgtgaatttttcttctcagagttctaaatatacacacagcttttaaaaggtactyagtaatgaataattattaataatttaaaattactgcatacttctatatgccatgcactgtctcaagtgctttatatgtatctattttatgtcatcttacttaatttttataaaattctcat

SEQ ID NO: 579523 - DNA, 597 bp, Homo sapiens
tgtatctattttatgtcatcttacttaatttttataaaattctcattgctatagcgttatcccattttacaggtgaagaaacagagattaaataatttgtccaaaggcatacagccagtaagtaaacaagctgacattttacttaggcagtctatctctccagagtgtgtactctcaatgttgagattctatgctctgtatgaactgatagataactagagttggcctttccttgcttgcctgtttgaactagaccttctttcttttagaaatctggtagactctgtcctccttgaccttccaaggccttgtctgcgcttgttgcactaggctatccctaaaattcttttttgttgttgattgttagaatttcttttacttaatggctcatttttgtcttagtccaattacagcacagaatcattggaggaccataatttcctttttctgtactgcaccgccagccygaccttttttgggctactacctgacttctttgaaacctcctccattctcacaggatatattgggcagaaggcttggatctactttgtcactacttctttaatatagaaaaaaagtttagtacataataaa

SEQ ID NO: 579524 - DNA, 489 bp, Homo sapiens
ccaggctagttccaatgtctgctttgaagttggctgctgggaattgaaaattcactgagtcccaaggtcagcccacagaacccaccacgttcctgaagtctggagctatagatttcactaacaactcacccctagttataacattgtttttatagtgaaagccaattccagctcttgttttgggaatccaggaatgccttctcctttcttcccgctactttaggtaaaagagcaactggatagggaaagggtgagatgggaatgatgggagggaggaagacggaagagcagatgaaataatatgaggctccagtgctttgttaaatctctccaggacatgtggtcatttagtcccaagtgttctggactggagaacaaaggacttttgggccttggggtccagggctcatgtgtattgtcagattggtggtggctgagactccccaaatgcctattggcttatgcagstcatcacaaatctgggtacag

SEQ ID NO: 579525 - DNA, 603 bp, Homo sapiens
aggataaaaataattcttttacratttcccagcaatctgctacctgtatctatattctaaaaacagaaccatagatgatgtaggtttatctacggcctcagagtaatgaagtgtagattcattagagtaagctgcatagatgtacaattaaaaaaaacaaaaaagctccaatgaactgaagacaatagagataaaaataaactcactcccagagctttctgattttactcttcgattagctttctgagaacaagagtaaagcaaaaaacaacacagccagccagcccttaaaaatgctttttctcttttccgggtaagaaacatcagcaggtatagtctaaggtaggagctagggaataacagatataacagcacttgcttggctacatgtaagagaaagatgccatttacacagctctaattagacagctcttagaaagactgcaagcaacctgtgaaactgctccaggtttcccaggctaagtgctatctacctttctatttaaaagaaattaagctataaaaatttgtctattcactgctactcaaaaaaaggaagtgcttttatgtatttttttaaaaagtaccacgaaataaaatgat

SEQ ID NO: 579526 - DNA, 601 bp, Homo sapiens
gatgagtgccatttttcaaattcagtgtgcataagtgtcatctgcagaactcaatataaacctcaaagattctgactcagttgatgtagagttgggtccaggaacttgaatttttaacaagcacactaagtgaatctgctccttctttgcagttccttgccctctatttggaagctcatggtgtttacattataaattcctcttttctggcatctgactttccctgtgatggagaacagggagtctgaataggaaagcacagcctgccatgagtacrttttcaggctcgttaagtctcatattcatttgccgcaaggaatgagaaaagaagagagagcaactaaagactgcatgtttcaaacatgggtgatcatcatttctcctggggtaacaggctccccttggagaaagaaattacaaattactaatagatcatatggcagaaaattgcaaattccaagcaaaataaatatattcttccatttctagagttttaaattggctataaggtaggagggtgcagtattaataggcagctatcaaatagaacagtggtgttaaattacataatcaatttaatgttctgggtcagttgacaaag

SEQ ID NO: 579527 - DNA, 601 bp, Homo sapiens
gatgagtgccatttttcaaattcagtgtgcataagtgtcatctgcagaactcaatataaacctcaaagattctgactcagttgatgtagagttgggtccaggaacttgaatttttaacaagcacactaagtgaatctgctccttctttgcagttccttgccctctatttggaagctcatggtgtttacattataaattcctcttttctggcatctgactttccctgtgatggagaacagggagtctgaataggaaagcacagcctgccatgagtacattttcaggctcsttaagtctcatattcatttgccgcaaggaatgagaaaagaagagagagcaactaaagactgcatgtttcaaacatgggtgatcatcatttctcctggggtaacaggctccccttggagaaagaaattacaaattactaatagatcatatggcagaaaattgcaaattccaagcaaaataaatatattcttccatttctagagttttaaattggctataaggtaggagggtgcagtattaataggcagctatcaaatagaacagtggtgttaaattacataatcaatttaatgttctgggtcagttgacaaag

SEQ ID NO: 579528 - DNA, 510 bp, Homo sapiens
atgtttatagtttgctttttattcttgattttaacattagtttttttttctgattttatccctttctttgatggtacatttcaaccaaattattcaacaatctaaaataaacatcaaacaggtatataaagtatgtaatttaaaaatatttaagtagaatcatcatttcaagaccaaattcaggtttgatcataaaactctaggggacttcatttcctgaaacgttatggaaatcaaaatactttttctttcatcataggctactgataacatttaagatttataatttcattgttatatggaaacacaagttcattaatkacacaaacatgattttaaacgatcaaaatcaagttttcaagaatgataaaacaggtttatacccaggtaatttttttaaaatatactctattatgttaacataatttttagcagttatttttgatgccgggtatttttcatgcctttatgtgtatatgtagaagttgggagtaaaacatacccccaaca

SEQ ID NO: 579529 - DNA, 510 bp, Homo sapiens
atgtttatagtttgctttttattcttgattttaacattagtttttttttctgattttatccctttctttgatggtacatttcaaccaaattattcaacaatctaaaataaacatcaaacaggtatataaagtatgtaatttaaaaatatttaagtagaatcatcatttcaagaccaaattcaggtttgatcataaaactctaggggacttcatttcctgaaacgttatggaaatcaaaatactttttctttcatcataggctactgataacatttaagatttataatttcattgttatatggaaacacaagttcattaatgacacaaacatgattttaaacgatcaaaatcaagttttcaagaatgataaaacaggtttatacccaggtaattttttwaaaatatactctattatgttaacataatttttagcagttatttttgatgccgggtatttttcatgcctttatgtgtatatgtagaagttgggagtaaaacatacccccaaca

SEQ ID NO: 579530 - DNA, 576 bp, Homo sapiens
attaataattatccataccttagagtctgaaaactaatataattaagggactttctagtttgctcttccagggaaatttttcatctcccttgcagaaattaattatctccaagcatgctatgagccgaaggtattgaagcattcagatgtcctggtggaagccttcaagtcamccttgaaccatgtccacacagaacagctccactcagtgatgagggcctgccttaaaaatctctcaaatttgcaatctcattgctacttcctacatccggaacattggtatctgttgtctgattgaaatcccttctctaatctcttattccaatccactcttcatactgctgccaaagttgtctttctaaagcatagctctggacaggttggctgcctgtttaataacttccactggctctgtgtgacctacagcctaaattctaaattcctacctatgcagctttcgtcatctttgcatctacactacacctggctcagtaaatggtccaacagatgttatttaagcaaatgaacagaattgatgaataaatgtttttgagaaaagttcataaagagaaatca

SEQ ID NO: 579531 - DNA, 587 bp, Homo sapiens
ttcctatgaattacatagtcttggtctcacagtacttcttcatcttttaaaactggtcttagcattcattatgttgcttgaggaattgaaagtaagccactatttagagcaattgcaatagatccctttttctaaaaccactatccttctaatcgggggatgttacataaaaataggtggactgtgcagtaagaaaatttagtgatgagtctggattttcttacctgtcctcttgaactccattttaacaatgtgggatctccagttgaattatgtactatggccatcagtaacattgaggggatcatacagagtgttctgtagattgtgaagtactcgtttgtatatttttaatttttttattgaggcccaaagcaaatgaaaagagagaggttcattgatcctgtgctgggtaagagaaaaatgacaattcctccactctgaggtcttttgaagaaagttgagaaacagtgttgtatcttgaagcatttcaatgactcatactcttccatccaaagttcagaaatttatggacaasgcactgagtccatattctagattatcagaacaaagggagcaggttagac

SEQ ID NO: 579532 - DNA, 567 bp, Homo sapiens
tattttctttgtaaattacttagcctcaggtattcctttattacaccacaaaacagactaagacaggttgcttctacacttcagctgttgtgagtaatgcttgtatgaaattgggtatacatatgcttttcaaggtcctgcttttagttcttctgggtatatacccagaagtgaaactgctagattgtatagtaattctattttttaattttttgaggaactttatcctcttttccaaagcaggagtaccactttattttcccactaatagtgcaaaagtttttaattatctgcatccttgctamcacttcttattttctgttattttgatagttgtcatcttaatgggtgtgagatggtatcttgttgtagttttgactttcaccctaataattattaatgttgatcatcttttcaagggcttattggccatttttatacatgttatttggagaaatgtttaagtcctttgtacctttttgaatcagtttttttggtagttaagttttaaaaattctttatatattctagatattaattacttatcagtatataatttgtaaattt

SEQ ID NO: 579533 - DNA, 567 bp, Homo sapiens
tattttctttgtaaattacttagcctcaggtattcctttattacaccacaaaacagactaagacaggttgcttctacacttcagctgttgtgagtaatgcttgtatgaaattgggtatacatatgcttttcaaggtcctgcttttagttcttctgggtatatacccagaagtgaaactgctagattgtatagtaattctattttttaattttttgaggaactttatcctcttttccaaagcaggagtaccactttattttcccactaatagtgcaaaagtttttaattatctgcatccttgctaacacttcttattttctgttattttgatagttgtcatcttaatgggtgtgagatggtatcttgttgtagttttgactttcaccctaataattattaatgttgawcatcttttcaagggcttattggccatttttatacatgttatttggagaaatgtttaagtcctttgtacctttttgaatcagtttttttggtagttaagttttaaaaattctttatatattctagatattaattacttatcagtatataatttgtaaattt

SEQ ID NO: 579534 - DNA, 645 bp, Homo sapiens
gtcatttcctacaagctcttggttggtttgcaaaggatgtttaataactcaatagaaagtagaaagcaaatgtacatagataaggtttgcttcttataacatgcctgagaaacaaaggatgctagaagggactttaaacctcagctaagataactgaagtccagagaaacttcattatcatagagccaaataatagaattgagattagaacacagctatcttagcccaagtctaatatttgtcctattttgagatcctgccttctatgtcgtaaagaactatagttttctttgatgtgctgaagcaaaatatattttttaataaactctctcaagagtttcaccataaaaagattagatgtcaagttgccagaaccctaaaatatattagtttaaataaaattagatgaattgcttttgttagaaggtttttgcatagcaacttccaaaaacactaaatttatggtgaatgtctsaactatttacttgctatttatttctattaacttcaatgacttgagttataaaatgctctagaaactattgaaaataattaacttgaaggtgcttcattttctgatatagcaacaattttcaagcaaattgcattttttaactgaggtaccatactaagcacttattgact

SEQ ID NO: 579535 - DNA, 574 bp, Homo sapiens
ctatatgtacaattgtgaagaaggaaaaagaaattcatgattgttctgctgttgcacctcaaactgcaaaagctacggccacagtatgtgataagcacttagttaagatgaaaaaggcattaaattttgggtgaaatacatgaacagaaacatgccatgactgatggcaagtgagcttggtactctctggggactcaggcatccactggggatgttggatcatatcccctgcggatagrgggggactacactaataatgtgctggtgatcgtctctctctagtgacctcatgtttgtagcttgaaatcatccatgggaatatttacaccaaagaaatcaggaaatactactttttttctccccagagagcaggtttttacatatttaccagcacatatgactatgctaaagcatccattcccaccatccagggacaaagaggaagagttcctaactttgttcttccatccatatttgttgtattttcatgactctgtcgcctactattccacaaacatttactgagtgcctaccatgtgctgagacatcgaagaaggaatgagcagaacaaacg

SEQ ID NO: 579536 - DNA, 430 bp, Homo sapiens
tccaagcgaagcttgggctactcaacaatatcaccaaggaattggcttttctcccatttttctgctctgccatccamtgggtcaacttcctattgtcttcgggtccaaaataatagccagtggcccccaggaccacatgcttcctcagtcatattcagaaaggatgagcaactattatttttcctagatttgctagcagatgtcctgagattggctgtggctggctcaacatacatcacatgtgcacttctggtccaggcaaccatgcaactctgaggttgggaacagagtcagcttccccagaaccacatggatccccaaattagaaattgagagctaatggcaaggagggattgggtgctgcagaggcaaccacagatgtctgctataatcagctaagccccagcaacctctgtgacagggcctgccc

SEQ ID NO: 579537 - DNA, 589 bp, Homo sapiens
gtgtgtgcctatagttccagctacttgggaggctgagatgggaggatcgcttcagcccaggagactgaggctgcagtaagctgagatcatgtcactgcattccagcctgggccaaagagcgggaccctatctctaaaaaaaaattttttaaatttttaattgacaaataatgattgtatatatatatataattttttttttttgagatggagttttgttctagtcrcccaggctggagtggaatggcgcgatctcccaggttcaagcgactcttctgcctcagcctcccaagtagctgggattacaggcatgtgccacgacacctggctaattttgtacgctagatggggtttcaccatgttggccaagctggtcttgaactcctgacctcaggtgatccccctgcctccacctcccaaattgctgggattacaattagttgctactgattgaaacagtctatatcctatgatttttttgtctgttttctaaagaaaatcagactgttaaattaaatgcagatctaatagaacaagtgaatgctggcgtgagccactgtgcctggctgattgtatatattcatgggtta

SEQ ID NO: 579538 - DNA, 644 bp, Homo sapiens
aagggttggagaataattagaactgagaagagtatggggcttttttgggagatgayaaaaatattctaaaattgattgcagagataatcacacaactctttgaatatactaaaaatgatcaaattgtacattttcaatgttacgtgaatatctcaatggagctgtaattttaaaaagcaaaaagatacatacagcattaatttataatattttaagtcaatgtattcaaaacgttgtttcgacatagtatcaagaatttaaaattatttttgagatagttacattcttttcttaaaatctagtgtgcattttacatttgcaacacatctccatacagatgctaaattttcattggaaatactatatagttagatttcataaaatttaccattgaaagagtaaattcatacgcacaagttgttccaaaaatattttaaagtcttccaacagctgaattgagtagtgttagtgaggtagtttctagatatagctgtagatataaatgggtaaatatagttattcagcacagatacatactcagagtatggtatgttaaaatttaactcctactgtgaaaatggaggtcattacgttaagtgaaataagccaggcacagaaagacaaatatcacatgttcttactca

SEQ ID NO: 579539 - DNA, 452 bp, Homo sapiens
tacaggatctgaggaacaaggggtaaggtcatccgcttccttgccaacataaaagaacacatgttaaatccatcagccacaccactccttcttcccctrtcacgtttctcccactcctgaccacttcaaaggacataggatccccacaaaatggtgacaacaaatggagccattttcatatcctattttatttttgaagtcagtgtccagaaagaaaccgacgattcactcaatcaacatgtaagcgactgaggcatccctacacaccaggtttgcaggctagggaccagagacacgatggttaaacaagccagagccctgtgatcctagggcttacaatgctggcataagaaaatccttctggactcactgtccccatgcttgtgactgtcatgtgccaagtgcgctttacacaatctcatttttccctcaacttggggataggttttgta

SEQ ID NO: 579540 - DNA, 452 bp, Homo sapiens
tacaggatctgaggaacaaggggtaaggtcatccgcttccttgccaacataaaagaacacatgttaaatccatcagccacaccactccttcttcccctgtcacgtttctcccactcctgaccacttcaaaggacataggatccccacaaaatggtgacaacaaatggagccattttcatatcctattttatttttgaagtcagtgtccagaaagaaaccgacgattcactcaatcaacatgtaagcgactgaggcatccctacacrccaggtttgcaggctagggaccagagacacgatggttaaacaagccagagccctgtgatcctagggcttacaatgctggcataagaaaatccttctggactcactgtccccatgcttgtgactgtcatgtgccaagtgcgctttacacaatctcatttttccctcaacttggggataggttttgta

SEQ ID NO: 579541 - DNA, 538 bp, Homo sapiens
tgcttttgcttctgacggctgtgtctggctattcagagggtttccttggaatgactggaggcaatttgtcatcctcatccacaaaggtagatgtgtctgaaactttgcatatcacaaagcatcccagtgaggggttgctcttagccaatgactggttgacacaaaagtgttattgacacccagctccctttcttccagttgggataattctgagatgcaatttatccttcagagcttccctgaaggatctggctgcgactgggattgcctgaattgaatctcttcttgactttattcctttccctgtcctgttttacctrtttacttactggtttttctagggagcaatttttttttttttttgagtcagagttttgctcttgttttcaggctggagtgcaatggcgtgatctcagctcactgcaacctctgcctcccggattcaagctattctcctgcctcagcctcccgagtagctaggattacaggcatgtgccaccacacccagcaaatttttgtatttttagtagagacgggg

SEQ ID NO: 579542 - DNA, 572 bp, Homo sapiens
acatgagcaggtgtgtattcatacaagatagttggaacaggattatttctgatgggcatggaaatcttgaagaatgcatgatgtcacttcatstggaccatccactagtgatacgcaggcaactgaggatgaggctgcgctgaaataaagaatcctagcctcaggaggcgtgctggctttgatcccgacttgcggggccatgatgccttcctggaatggagactgagggcataacttctgcttccttaggactcagcaccggcaattgtgctcagcactttatgctgctgtctccatagtctttgtatttccccatccttttctagaaaatttccgatgcaaactaaatttaccctcatcaagtctctcccaaggcctgaaagaaggacagtctagttcttttttgcccctctaaactgattttataaatgtaataagttctacattataattacacttaaggtgttccattttgtttatcaaaagcctaatttggaagtcacaaaatgttaatgttttcttattctttctctttcatttgtaattctgattaggtcaagagctgctcataa

SEQ ID NO: 579543 - DNA, 496 bp, Homo sapiens
tgagggtcagttgaagtttgtaaataacttcactccattccttctaacctcttttggtatccatcaaagaaggccatggattttccagatcaaaatgtgtccaaacataaattgagggcattagatacatgctaggacctgagttgaaggtatgggcttggtaacataatgtagctatttctgggtttcagacgggcataaagattagtaagattagttaaaaatgtagggccttagagtaagacaggcctggatccaaatgattgcttcaccagagcaagaaaccttggataagtacttaayttctcttgagactcagtttccccaattagaaaatgggagtattgagaatacccaaatcattgggttgttaaaaggatgaaataaaatacctggcacaattattatatttcttaatatataaacatatgttatataataaatatgatatattaatatatgtattattctgttctcatgctgctatgaagaaata

SEQ ID NO: 579544 - DNA, 561 bp, Homo sapiens
gtggggttttaaatgtataaggtttaaatatatatatataagtaccaatgacactacataaattgtaaaagaaatgaaagaagtcaaagtgtactaagttccttgtattatctaggatgtgataaaatactcattaatattagacttcagtaagttaggaatgcatgttggcatttatagagtaaggactaagagattaaagactgaataactaatacagctaaagaaaagaaagtcaaaataaacactgtataaaaaaaaggcaagaaatgaaaaaataaaacaagcagagaaaacagaacgcaaatggcaaaatgagagacttaatcccaagcctatcggcaaggacattaaatgtatatttagaaattaatactgaagattcaagaagaaatcaaaacataaaaaatatttttaaacaaatgataataaaaataaaacatatcaaaatgtatggaacrcaaggccaggcatgatggatcacacctgtaatcccagcactttgggaggccaaggcgggcacatcacctgaggtcaggagtttgagaccagcctggccaa

SEQ ID NO: 579545 - DNA, 591 bp, Homo sapiens
cagctaattttcaatttttttgcagagatggagtcttgctatgttgcctgggctggtcttgaactcctggctttaattgaccctcccacctaagcctccaaaagcactaggattatgggtgtgagccacyaggcccagcgacaacatgggttttaactgggtgggtccatttacgtgcaaaatttttcaaccaaatgtggacagaaaaccaagtattcctaggatctgaaacctgcttatatagggagggccaacttctgtatatgtgggttccagttcctgcagggctgactgccagacttgactatgtgtggatttgggtgtacatgggggtcctgggccaaacctctgaagatatcgagggaacactgtaaccagatttatgggtgaggaggtgatgggatgtgagtagaagcaaattccagggccagtcttgaaatacattcatagcagtgccaaggaccatagaggttactgagcttgatgcttagccatccaacgatatttaaagatgtggaaaatcaggctcctaggggttgaggtgcttcagagaaagactcagaactttgctccagatttcattccattata

SEQ ID NO: 579546 - DNA, 581 bp, Homo sapiens
ttcttttgtaaattgcccagtcttgggtatgtctttatcaacagtgtgaaaacagactaatacacatagtgaggccagaaaattgtcaaaagcatctggatagaaattactggaactagaattccagggtcttgtagaagattattctgtgtcctgaatcatagaaaatttcatgattcttctgttgcccagtatgccataagtgtaggtgaaaatatattttagactaacataaaaattttaaaaactgtttatataagctaagcctcccttcacatttaaacattcctcactgtcccctattatactatgatggtaacattctaaaataagcaataggagcaattctcaagaaagataggagcagctggctgtaagttacctcttgcccttaatttgaaaagtttcatccttgaatatcttatatgttcaatttgtaaacctcttatattcacatactcagsagatatttaatttatgcctactacctgcaagtggtaatcagtgttggatatacaatgatgagagtgcactgtccctcttctcatggggtgcagcactgaccaatcaatatataagtc

SEQ ID NO: 579547 - DNA, 512 bp, Homo sapiens
taggagaaaagtgtggagttatgcagaaattagactgaaggggtaaactgaggcagaccawattaattttggcagtcaatttatttataccctatattattgcacagatttaaggtatctcatcaaatatattcaataaaacagggttacaaattaggaattcaaacaaagaacaaatgtgggttggatatttgtgaaataaggttgaaattatgaataatagttaaagacagatcacctgttttgttttgagcttcctagctgccaactcaggggaaaaaaaaaaaccaaccaccatgatatctattaaataaaacgaatctaggtgcttagaagaagtaatggcccctggaatgcagtaagtgctccttcagtttcactggtaagtcactttgcagataggaggcttcagacatggtaagtagagatctggggagatctgtccttgaaaagcatgagcttgatgaagagggtaagggtggctgaaggtgaagtatagggagcatggcctc

SEQ ID NO: 579548 - DNA, 512 bp, Homo sapiens
taggagaaaagtgtggagttatgcagaaattagactgaaggggtaaactgaggcagaccaaattaattttgkcagtcaatttatttataccctatattattgcacagatttaaggtatctcatcaaatatattcaataaaacagggttacaaattaggaattcaaacaaagaacaaatgtgggttggatatttgtgaaataaggttgaaattatgaataatagttaaagacagatcacctgttttgttttgagcttcctagctgccaactcaggggaaaaaaaaaaaccaaccaccatgatatctattaaataaaacgaatctaggtgcttagaagaagtaatggcccctggaatgcagtaagtgctccttcagtttcactggtaagtcactttgcagataggaggcttcagacatggtaagtagagatctggggagatctgtccttgaaaagcatgagcttgatgaagagggtaagggtggctgaaggtgaagtatagggagcatggcctc

SEQ ID NO: 579549 - DNA, 527 bp, Homo sapiens
ttctcaacccttactaaacacaagataattcatactgataagaaaccctacaaatgtgaagaatgtggcaaagcttttaaccgatcttcaatccttagtatacataagaaaattcatactggagaaaaaccctacaaatgtgaagaatgtggcaaagcttttaagcggtcctcacacctcgctgggcacaagcaaattcatagtgtacaaaaaccctacaaatgtgaagaatgtggcaaagcctttagtatattctcaacccttactaaacataagataattcatactgaagagaaaccctacaaatgtgaaaaatgtggcaaaactttctaccgattctcaaaccttaatacgcataagataattcatactggagagaaaccttgcaaatgtgaagaatgtggcaaagcttttaaccattcctcaaaccttattaaacataagctaattcatactggagacaaaccctacaaatgtgaarcatgtggcaaagcttttaggcggtcttcacatcttagtagacataa

SEQ ID NO: 579550 - DNA, 632 bp, Homo sapiens
gtgggaccaacattaccaagtgatttttgagctcattaaagsttgagaggcaatgcttagctaagtggttatcagcctagacttctcattagcattacatggccaatttgcagaaatctctttacttgtaccctttccacaggttctgtttattgttctaggtgaaagtattcatgttgttttaattgtgtctcatgtgactctaaggtgaggccagaatcaagtgtgtggggttcaagatacattcatgagagttaagttccacctttgcactaaaaggtagtcacagggactgttctgtttggttttgatagggagaggtcagtgtcacccatatttccattactgtagcagaaattgctggtgtttgtggcaaaagcaggcacctgaagacagaaatagagaaacatatttttatattcattgagcagttcattgttcctgaatctctgctgttataaaggacagaaatgggtgtgctttttctgcagttcttagttcttttttctgtgggtgtgagactagcaggtaaacaggtggtgctgacgccttttaaggaattttttcaagacacaggtgtaacttctccagagaatgtcatctgaaaagcatttccaaagaagacgaaagag

SEQ ID NO: 579551 - DNA, 503 bp, Homo sapiens
aaaacaaacactgcatgttgtcacttataagtgggagttgaacaatgagaacacgtggacacagggaggggaacatcacacacttgggtctgttgggggatggaggactagtggagggatarcattaggagaaatacctaatgtggatgacaggttgatgggtgcagcaaaccaccatggtatgtgtatacctatgtaacaaacctacatgttctgcacatgtatcccagaacttaaagtataattaaaaaaaaaaaaaagccagaataatggagataccattagggacgtcagaaggagagcaagtttgatttcagatacactgagtttttaatgtcaaaagagatttaagctaggctgggcgtggtggctcacacctgtaatcccagaactttgggaggccgaggcaggcagatcacgaggtcaggagttccagaccagcctggccaccatggtgaaaccccgtctctactaaaaatgcaaaaattagccgggtgtggtgg

SEQ ID NO: 579552 - DNA, 571 bp, Homo sapiens
tcatatgaataaaatcatataatgtatcctcatttgtgtatgttttatttctctcaacataatatttttgagtttcatctgttttgtgctgtgcaccaatagttcccttttattactgattggtaatcagaaattcgtactgtatgaatataatacaacgtacttacccattttctcctgattaacatttggattgtttccagtttatgatatttgatgattgctgcaatatgtctattatgaaaattgcaaaaaaaattgttttgtacaaatctttttgaggacatgcagttcagttttcttgggtaggcagttcagaataaactttcagggtcataaattaggtataaatttgtgtaaaaaactattamacttgggccgggcgcagtggtgcacgcctgtaatcccagcactttgggaggccgaggcaggcagctcacgaggtcagaagatcgagaccatcctggcttaaacgatgaaaccccatctccactaaaaatacaaaaaattagccgggcgggcgttgtggtgggcgcctgtagtcccagctattcaggaggctgaggcagga

SEQ ID NO: 579553 - DNA, 571 bp, Homo sapiens
tcatatgaataaaatcatataatgtatcctcatttgtgtatgttttatttctctcaacataatatttttgagtttcatctgttttgtgctgtgcaccaatagttcccttttattactgattggtaatcagaaattcgtactgtatgaatataatacaacgtacttacccattttctcctgattaacatttggattgtttccagtttatgatatttgatgattgctgcaatatgtctattatgaaaattgcaaaaaaaattgttttgtacaaatctttttgaggacatgcagttcagttttcttgggtaggcagttcagaataaactttcagggtcataaattaggtataaatttgtgtaaaaaactattacacttgggccgggcgcagtggtgcacgcctgtaatcccagcactttgggaggccgaggcaggcagctcacgaggtcagaagatcgagaccatcctggcttaaacgatgaaaccccatctccactaaaaatacaaaaaattagccgggcgggcgttgtggygggcgcctgtagtcccagctattcaggaggctgaggcagga

SEQ ID NO: 579554 - DNA, 622 bp, Homo sapiens
ggattacaggcgtgagccactgcgcccggcctcctttccaattttcaaatgttagagtatttagaggtttggtccctttgttgtacttgattttctatttacacttactccctacatgatcccattcagtctcagggctttaatattccatctacatcycccaaaataccaaatgtaaaactctagcccatattttgttctcaaattctagacttgtacaccaactgtgtaccaacacatacacacttgtatatacactaaatgtctcaaattcaacatcttcaaatactgcactcctcatctttctccctcccctgaaacatcttatactcacagccttcttcatttcagtggatgataatcatcgaaattgtccaggccaattgcgttggagtcccccttgacttctctgtgtctcttatgcttcatactcaattcatcagaaaatcttgttgactctaattttaaacatgtctatcatctgcatgcttctccccatctgcctgctatttctcttatcgaaggcaccattatcacattaaggagttattaaagtagttgcctaactgatttttcttttatctctctgtaggttatcttcaacatattatccagagtgtcc

SEQ ID NO: 579555 - DNA, 622 bp, Homo sapiens
ggattacaggcgtgagccactgcgcccggcctcctttccaattttcaaatgttagagtatttagaggtttggtccctttgttgtacttgattttctatttacacttactccctacatgatcccattcagtctcagggctttaatattccatctacatcccccaaaataccaaatgtaaaactctagcccatattttgttctcaaattctagacttgtacaccaactgtgtaccaacacatacacacttgtatatacactaaatgtctcaaattcaacatcttcaaatactgcactcctcatctttctccctcccctgaaacatcttatactcacagccttcttcatttcagtggatgataatcatcgaaattgtccaggccaattgcgttggagtcccccttgacttctctgtgtctcttatgcttcatactcaattcatsagaaaatcttgttgactctaattttaaacatgtctatcatctgcatgcttctccccatctgcctgctatttctcttatcgaaggcaccattatcacattaaggagttattaaagtagttgcctaactgatttttcttttatctctctgtaggttatcttcaacatattatccagagtgtcc

SEQ ID NO: 579556 - DNA, 654 bp, Homo sapiens
agaatttcattcttttagggctgggcgcagtggctcatgcctgtaatcccagcgctttggaaggccaaggtgggtggattacttgaggtcaggggttcaagaccagcctggccaacatggaaaaactccatctctactaaaagtacaaaaattagccaggcatgatagcacaygcctgtaatcccagctactacggaggctgaggcaagagaattgcttgaacccagggggcagaggttgcagtgagctgagattgcaccactgcactccagcttgggtgacagagtaagactccatctcaaaaaaaaaaaattcattcttttatatgactgaaaagtgttccattgtgtatatacagcacattttctttagcctttcatctgttgttggacaccaagtttaatatgtcatggctattgtgaatagttctgcaataaatatgagagtgcagataactcttcaatagcaaaaccagacaaagagacaacaaaaaaggaaaacaactggctaatatccctaatgaacacagacacaaaaatcctcgacaaaatactagcaaagtccaacaacataaacactgatcaagtaggatttatcccagggataaaaggacagtttaatacatgcaaatcagtaaatgccatatgtcacatc

SEQ ID NO: 579557 - DNA, 617 bp, Homo sapiens
accataatgtcagcacccagggcaaaagagaaggcttgtcataagatttctgcattacagtgagggagaactcttgtgtctttggagaaaggagtggtagagctggagccatagcataaatgtctaagtttatgaagtggaataaaggatctgctgtcatgatctaaagccatttgtgcagcaagtaattacatatgacttttctcttagactatgcctatgtgatcttttggcttgtagagtagcacattagacatagttccagaaggagcagtttcatccagagagtgaaagtaagtctgcatctaaagtataaaacactaaaataagcaattacagattgagtaggaagagaaaacataggtctcaataagggaatcatagaaaattctaacaggaaaattctgacatgagattttctgtttcaaaastttacgtaggtcggccgcggtggctcagcactttaggaggctgaagtgagtaggtcacttgaagtcaggagttcgagaccagcatggccaacatgatgaaaccccatctctactaaaaatacaaaaattatccaagtgtggtggcgggtgcctgtaatcccagctactctggaggctgaggcagga

SEQ ID NO: 579558 - DNA, 566 bp, Homo sapiens
agtcatgattcctgtacagcctgtgggaatgtgagccaattaaacctgttttctttgtaagttacctagtctcaggtagttctttatagcaagatgagagtggactaatacagaaaattggtcctgagtagtggggtattgctataaagatacctgaaaatgtggaagcaactttggaactgggtaatgagtagagattggaacagtttggagggctcagaagacagaaagataagggaaagtttggaacttcctagatacttgttgaatggttgtgaccaaaatgctgatagagatatagatagtgaagtccaggctgaggtggtttcaaatggagatgagaaacttattgggaaagtaagtaaagtaaagrccactgttgctatgctttagcaagcatagctaaagcatgcttgggccttagaattatggtgggaggcaaaaggcacttcttacatggtgatggcaagagaaaatgagtattatgcaaaagcagaatcccctgataaaaccaccagatctcatgagatttcttcactaccaagagaatagtatggggaaaactg

SEQ ID NO: 579559 - DNA, 593 bp, Homo sapiens
gtctctattttattaagttctctgatttttattatttatcttttcctactaattttggtgttttttcttgcttttatatttccttgaggggtattactaggttgttgatttgaaatcttttttttaatgtagatatttattagtataaccttccctcttagcactgcttttgctatatcccataggttttgatatgttgtatttccattttcatttgtttcaatattttatttccttctyaatttcgtcattgactaagtggtcattcaggagtatgttctttaaatttctacatatctgtacagtttctaaggtttctcctgttattgatttctagtttattccattgtggtttaggaagattcttgatataatttcaatttccaaaactttgctgagatttgttttgtggcctatattgtctatcctggagaatgttccatatgccaattagaagaatatgtattgtgcagctgttgtatgaaatgttctgtaaatgtctgttaggtccatttgatttaaagtgcagtttaaatccaatgtttctttgttaatttctgcctagatgatctgtttaatgcagagagtgggtt

SEQ ID NO: 579560 - DNA, 593 bp, Homo sapiens
gtctctattttattaagttctctgatttttattatttatcttttcctactaattttggtgttttttcttgcttttatatttccttgaggggtattactaggttgttgatttgaaatcttttttttaatgtagatatttattagtataaccttccctcttagcactgcttttgctatatcccataggttttgatatgttgtatttccattttcatttgtttcaatattttatttccttctcaatttcgtcattgactaagtggtcattcaggagtatgttctttaaatttctacatatctgtacagtttctaaggtttctcctgttattgatttctagtttattccattgtggtttaggaagattcttgatataatttcaatttccaaaactttgctgagatttgttttgtggcctatattgtctatcctggagaatgttccatatgccaattagaagaatatgtattgtgcagctgttgtatgaaatgttctgtaaatrtctgttaggtccatttgatttaaagtgcagtttaaatccaatgtttctttgttaatttctgcctagatgatctgtttaatgcagagagtgggtt

SEQ ID NO: 579561 - DNA, 597 bp, Homo sapiens
tggaatttcactaagcaattcttgcaaactggatattgctaaagtcaatttaacttgtgatagttaatagacagtcttggaatcatatattaaggttgctagtggaaactagaaggtcaaaggaacagaaaasatacatgattatgcttctgtatgtgctcaacacacactctcaagaaccatagattttaaaagttcctaaaattctgagaaaaaatgaggaagcattctaataatcatcttaagaattgcaaaataattttctactgtgggtacttgagaatgactgtgaattgtttgaacagaacactgattatacgatagttctcatacgaataataattgaaaacagcccaagaataatgcagtttgtcgattagaaagtcaaatatataccatgcattttacatacataacttcttttactcaaacaccatttttatagggaacaaagctgatagcatttattattattattacttgaaaagtcagccctcacacactcaaatgcttccaagagtaaacactacccactgtaaatagaagaagtaaataaaatttgctttgcatttcttcatcaaaaaaaatatttctgag

SEQ ID NO: 579562 - DNA, 599 bp, Homo sapiens
tggaatttcactaagcaattcttgcaaactggatattgctaaagtcaatttaacttgtgatagttaatagacagtcttggaatcatatattaaggttgctagtggaaactagaaggtcaaaggaacagaaaaaatacatgattatgcttctgtatgtgctcaacacacactctcaagaaccatagattttaaaagttcctaaaattctgagaaaaaatgaggaagcattctaataatcatcttaagaattgcaaaataattttctactgtgggtacttgagaatgactgtgaattgtttgaacagaaaactgattatacgatagttctcrtacgaataataattgaaaacagcccaagaataatgcagtttgtcgattagaaagtcaaatatacaccatgcattttacatacataacttcttttactcaaataccatttttatagggaacaaagctgatagcatttattattattattacttgaaaagtcagccctcacacactcaaatgcttccaagagtaaacactacccactgtaaatagaagaagtaaataaaatttgctttgcatttcttcatcaaaaaaaatatttctgagtt

SEQ ID NO: 579563 - DNA, 599 bp, Homo sapiens
tggaatttcactaagcaattcttgcaaactggatattgctaaagtcaatttaacttgtgatagttaatagacagtcttggaatcatatattaaggttgctagtggaaactagaaggtcaaaggaacagaaaaaatacatgattatgcttctgtatgtgctcaacacacactctcaagaaccatagattttaaaagttcctaaaattctgagaaaaaatgaggaagcattctaataatcatcttaagaattgcaaaataattttctactgtgggtacttgagaatgactgtgaattgtttgaacagaaaactgattatacgatagttctcgtacgaataataattgaaaacagcccaagaataatgcagtttgtcgattagaaagtcaaatatayaccatgcattttacatacataacttcttttactcaaataccatttttatagggaacaaagctgatagcatttattattattattacttgaaaagtcagccctcacacactcaaatgcttccaagagtaaacactacccactgtaaatagaagaagtaaataaaatttgctttgcatttcttcatcaaaaaaaatatttctgagtt

SEQ ID NO: 579564 - DNA, 599 bp, Homo sapiens
tggaatttcactaagcaattcttgcaaactggatattgctaaagtcaatttaacttgtgatagttaatagacagtcttggaatcatatattaaggttgctagtggaaactagaaggtcaaaggaacagaaaaaatacatgattatgcttctgtatgtgctcaacacacactctcaagaaccatagattttaaaagttcctaaaattctgagaaaaaatgaggaagcattctaataatcatcttaagaattgcaaaataattttctactgtgggtacttgagaatgactgtgaattgtttgaacagaaaactgattatacgatagttctcgtacgaataataattgaaaacagcccaagaataatgcagtttgtcgattagaaagtcaaatatacaccatgcattttacatacataacttcttttactcaaayaccatttttatagggaacaaagctgatagcatttattattattattacttgaaaagtcagccctcacacactcaaatgcttccaagagtaaacactacccactgtaaatagaagaagtaaataaaatttgctttgcatttcttcatcaaaaaaaatatttctgagtt

SEQ ID NO: 579565 - DNA, 646 bp, Homo sapiens
ctgccctttgcggcaggtagatgaaattgaaggacatatgctttgagaaataagccagacacagaaagacaaatattgcatgagatcacctttatgtggaatctaaaataatcaaacagagtgaaacagagagtagaatggttgtggccagagtctgggaggtgtcagggaaatggggagatattggccaaagtgggaagatgttgatcaaagagtacaaaatttaagctgtaagttctagagatctaacgtataatgactataacttataataatatattttagacttgaaatttgcttaaggagtagatcttaagggtttccactatacacgaaaaaagtaaccatattaggtaatgcatatactattgtgaaaatcattttatacaaggtacacttatataaaaataccatgttgcacatgttaaatctgcacaatctcttatttgttgatcatacataaataaagctggaaaaatatatttatctcagtccayttgggatgctattacaaaataccttggactgggtaatttataaatatcagaaattttttgctcatagtttggaagctgggaagtctaagattaaggtgccagcagattcagtatctggtgagagctctgcctaaaatatgatgcctgtt

SEQ ID NO: 579566 - DNA, 539 bp, Homo sapiens
ttctttacacatttctattctcattattattactttaaagcatatccacctgagttattgcaacagtctcttcattggtctacgggcacaatcattttctctttaatccattcttcaaatctcaaacaattcacaatatgagatcagtattaccctgataataaartcagacagaagcatcataagaaaataaaattacaaaccaatatcccttatgaatgtacctatagaagtcctcaacaaaatataagcaaactgaatccaacaacatataaaaatatcagacaacatgaccaaatggggtatatcccagcaatgatgcactcattttacatacgaaaatgagtcaatgtacttcgtattaatgaaataaaggaaaaaaagtggtcatctcaattgatgcacaaaaggcatttgacaaaatccaatactcattcatgattaaaaacacttgataatactagaaatagaatacaatttcctcaatcttataaaggtatttataagttaacatcatgtttaatatgatagaacaaata

SEQ ID NO: 579567 - DNA, 605 bp, Homo sapiens
gtgatccaccagcctcggcctcccaaagtgctcagattacagatgtgagccatggtgcccagcccatggttattttcataaatgaaactagcgaatattagctagacttaaggtcacttatagataaagaataaagataaggagacatcaccacccacaaaaaggaatgagtggggctgaggcttaaccatttggtatctattgtgattactgtagctgttaaagaggggaaaatgaagggcatttaggtttgaaatgaaaaccaataatttctcataggtcaaagacaatgttattactgggtacatctagaatagtaacaggtaatggggtctcataattttgctttctacttatgtaatttctgctttggcaataaaaacttctgtgcataaagtcaatgaactatattttaagtggctctaaccaactttgtcagactgtgaactagtttattttaggttgaagttcacagtagaaatcttggttaaattaytgacaaataaaagctcatgtcatagaaaagagaaatagaaatagctagctctacacaactggtaccagatacaggcacattttagggagaatctaaaacttctaaagtc

SEQ ID NO: 579568 - DNA, 605 bp, Homo sapiens
gtgatccaccagcctcggcctcccaaagtgctcagattacagatgtgagccatggtgcccagcccatggttattttcataaatgaaactagcgaatattagctagacttaaggtcacttatagataaagaataaagataaggagacatcaccacccacaaaaaggaatgagtggggctgaggcttaaccatttggtatctattgtgattactgtagctgttaaagaggggaaaatgaagggcatttaggtttgaaatgaaaaccaataatttctcataggtcaaagacaaygttattactgggtacatctagaatagtaacaggtaatggggtctcataattttgctttctacttatgtaatttctgctttggcaataaaaacttctgtgcataaagtcaatgaactatattttaagtggctctaaccaactttgtcagactgtgaactagtttattttaggttgaagttcacagtagaaatcttggttaaattattgacaaataaaagctcatgtcatagaaaagagaaatagaaatagctagctctacacaactggtaccagatacaggcacattttagggagaatctaaaacttctaaagtc

SEQ ID NO: 579569 - DNA, 522 bp, Homo sapiens
aggtcacactgatgcaagaggtgggctcccatggccttgggcagctctgcccctgtggctttgcagggcaaagctcctccaggctgctttcacaggttgatgttgagtgtctgaagctttccaggcacatggtgcaagctgttggtggatctaccattctagggcctggagtatggtggcccttttctcacagctccactaggcagtgccccagtgaggactctgtgrgggctctgacccacatttcccttctgcactgccctagcagagggtctccatgagggctccatacctgtagtaatcttctgcctgggctttcaggcatttccatacatcctctgaaatctaggcagaggttcccaaacctcaattcttgacttctgtgtatccacagactcaacaccatttgaaagctgccagggcttggggctcgcacctctgaaaccatagcatgagctgtaccttggccccttttagctatgactggagtggctgagacatagagcaccaaggctctaagct

SEQ ID NO: 579570 - DNA, 450 bp, Homo sapiens
taagttctcattcttataatactcaaaatgtcctttaatttttaatttttgatagtcatatcattatccctaggtattttagcttctatcttaaattctaaaatgattttcaaacaagagaaagtattctttattactatatgtattaaacatcatggttttcaaatttaactgcaaatgtatcttttcattgcttcttgatgacgcccttcaccctatccatattrtcactaccaagtggtgattacttttcaggttcacatacttattctttagaaaaatcttgtctgtgccttataaagaatatgattgttggcattcaaaagccagtgaagtatacattattagcctgttgcctaactcatttctttaagaaactacactaattacccacatacttatgtttttatttcctcattatttctggaggaaacaaatactgctaacatg

SEQ ID NO: 579571 - DNA, 450 bp, Homo sapiens
taagttctcattcttataatactcaaaatgtcctttaatttttaatttttgatagtcatatcattatccctaggtattttagcttctatcttaaattctaaaatgattttcaaacaagagaaagtattctttattactatatgtattaaacatcatggttttcaaatttaactgcaaatgtatcttttcattgcttcttgatgacgcccttcaccctatccatattatcactaccaagtggtgattacttttcaggttcacatacttattctttagaaaaatcttstctgtgccttataaagaatatgattgttggcattcaaaagccagtgaagtatacattattagcctgttgcctaactcatttctttaagaaactacactaattacccacatacttatgtttttatttcctcattatttctggaggaaacaaatactgctaacatg

SEQ ID NO: 579572 - DNA, 611 bp, Homo sapiens
aatggcattgtgtttttaatttcagtgttcatgggcacattctggtatctagaatgaaaaattgattgtgttatgcttatcttgtatcttgtgaccttgttggcatcatttatattagctctgttttttgatagatcctttaggattttcaacacagacaatcatgttatcagcaaatagaaaaaaattttactttttcctttcttgtctgtataccttttgtttcctttcttttcattattgtgctagttgaggacttccagaactatgttgagaagagaagtaagagtagtcatctttaccttgtgtgctaagctgttcttatgttgctacaaagaaatactcgagaatgagtaatttataaagaaaagaggtttaattggctcacggttcttcaggctgtacaggaaacacggcactggcawctgctcagctttgggggtctctcagggagattttactccctgagaagcgggaggaggtatgtcacatggccaaagcagaatcacatggccatggtcatgtggccaaagagagagtggaaggaggtgccacaaactttaaaacaaccagatctcatgagaactcacctactaacctgaggacagcac

SEQ ID NO: 579573 - DNA, 188 bp, Homo sapiens
tgtaaaatgcttggatggtcagtgttgtttgacttgtgtctgtatttggttaggatccatttaaactctctaggataatgtcaaaatcaatttcttcctttatactttcttattttcaaagaaatggtgctaaatatttctatgaatatatggaaatatctatgcraatatgtatctgactaaaaatg

SEQ ID NO: 579574 - DNA, 507 bp, Homo sapiens
gtatggaaaaataggaattaggagaggattaagaagagaaggtggtcaacaggcagcagcaggttacttaggcaaccataattggcaaggggtctgggtctggcatctcattgtccaggtgcagttatctggtgarttgcagttccttgaaactatcttggagggctgatagttggtttcctgagaaaggaactcagataagaaaagtgtaagtttcttcagttttaatactgggagggtcaactttttatttttattttttcaaaagaaaccataaacatcagttctataggacaattgggccagtttcataaacattataacatataagcaaagtgtatgagataggtactggtccatgatcaatgttcaatgagccccttccttatttctcagccttagtaatatttaagtgcttttcttccataagttaccaggcataaggtgttatctacagtcctcgcagaagagtaagatgtctcgtcgaatctatcccctggtttatgt

SEQ ID NO: 579575 - DNA, 507 bp, Homo sapiens
gtatggaaaaataggaattaggagaggattaagaagagaaggtggtcaacaggcagcagcaggttacttaggcaaccataattggcaaggggtctgggtctggcatctcattgtccaggtgcagttatctggtgagttgcagttccttgaaactatcttggagggctgatagttggtttcctgagaaaggaactcagataagaaaagtgtaagtttcttcagttttaakactgggagggtcaactttttatttttattttttcaaaagaaaccataaacatcagttctataggacaattgggccagtttcataaacattataacatataagcaaagtgtatgagataggtactggtccatgatcaatgttcaatgagccccttccttatttctcagccttagtaatatttaagtgcttttcttccataagttaccaggcataaggtgttatctacagtcctcgcagaagagtaagatgtctcgtcgaatctatcccctggtttatgt

SEQ ID NO: 579576 - DNA, 507 bp, Homo sapiens
gtatggaaaaataggaattaggagaggattaagaagagaaggtggtcaacaggcagcagcaggttacttaggcaaccataattggcaaggggtctgggtctggcatctcattgtccaggtgcagttatctggtgagttgcagttccttgaaactatcttggagggctgatagttggtttcctgagaaaggaactcagataagaaaagtgtaagtttcttcagttttaatactgggagggtcaactttttatttttattttttcaaaagaaaccataaacatcagttctataggacaattgggccagtttcataaacattataacatataagcaaagtgtatgagataggtactggtccatgatcaatgttcaatgagccccttccttatttctcagccttagtaatayttaagtgcttttcttccataagttaccaggcataaggtgttatctacagtcctcgcagaagagtaagatgtctcgtcgaatctatcccctggtttatgt

SEQ ID NO: 579577 - DNA, 507 bp, Homo sapiens
gtatggaaaaataggaattaggagaggattaagaagagaaggtggtcaacaggcagcagcaggttacttaggcaaccataattggcaaggggtctgggtctggcatctcattgtccaggtgcagttatctggtgagttgcagttccttgaaactatcttggagggctgatagttggtttcctgagaaaggaactcagataagaaaagtgtaagtttcttcagttttaatactgggagggtcaactttttatttttattttttcaaaagaaaccataaacatcagttctataggacaattgggccagtttcataaacattataacatataagcaaagtgtatgagataggtactggtccatgatcaatgttcaatgagccccttccttatttctcagccttagtaatatttaagtgcttttcttccataagttaccaggcataagrtgttatctacagtcctcgcagaagagtaagatgtctcgtcgaatctatcccctggtttatgt

SEQ ID NO: 579578 - DNA, 430 bp, Homo sapiens
ctcagtccagttctgagcccttgctggaaaggtgttgtggtcatttggaggaaaggagccactctggctttaaaggtcaacattgctaatcattagagaaatgcatatcaaaaccataataaaataccatctcataccagtcacaatggcgattattgaaaagtcaakaaacaacatatgctgccgtggtctgaagaaaaaggaatgcttttacactgtttatgggagtgtaaattagttcaaccattgtggaagacaatatagtgattcctcaaagacctagaagcagaaatgccgttcaatcaagcagtctcattactgggtatatacccaaaagaatataagttattcttacattcttattcaaatgcccatcaataatagactggataaagaaaatatggtacatatacaccacagaatactatgc

SEQ ID NO: 579579 - DNA, 430 bp, Homo sapiens
ctcagtccagttctgagcccttgctggaaaggtgttgtggtcatttggaggaaaggagccactctggctttaaaggtcaacattgctaatcattagagaaatgcatatcaaaaccataataaaataccatctcataccagtcacaatggcgattattgaaaagtcaagaaacaacatatgctgccgtggtctgaagaaaaaggaatgcttttacactgtttatgggagtgtaaattagttcaaccattgtggaagacaatatagtgattcctcaaagacctagaagcagaaatgccgttcaatcaagcagtctcattactgggtatatacccaaaagaatataagttattcttacattcttattcaaatgcccatcartaatagactggataaagaaaatatggtacatatacaccacagaatactatgc

SEQ ID NO: 579580 - DNA, 519 bp, Homo sapiens
ttgctgcccaggctggagtgcagtggtgagatctcggctcactgcaacstctgcttcctgggttcaagtgattttcctgcctcagcctcccaagtagctggaattacagctgcataccacaacacctggctaatttttgtatttttttaaatagagatggggtttcaccatgttggccaggttagtctcaaactccagacctcaagtggtccacccgctttggcctcccaaagtgctgagaatacaggcgtgagccattgcacctggcctattttactataattgtcctgccattttaggaacaactttacattctgacttgcccttgatttgtgtgtttttctctctaatatatttcagctcaattaagaaagtaccctctaagctaaatatcaacagggctgtcattagaggtgactagaagagcaaacaaattaggactcagagtttttggacaatagagaataaatgtcccttgagcaagtaattccttaatacttaacaaaatttgtttaccct

SEQ ID NO: 579581 - DNA, 519 bp, Homo sapiens
ttgctgcccaggctggagtgcagtggtgagatctcggctcactgcaacgtctgcttcctgggttcaagtgattttcctgcctcagcctcccaagtagctggaattacagctgcataccacaacacctggctaatttttgtatttttttaaatagagatggggtttcaccatgttggccaggttagtctcaaactccagacctcaagtggtccacccgctttggcctcccaaagtgctgagaatacaggcgtgagccattgcacctggcctattttactataattgtcctgccattttaggaacaactttacattctgacttgcccttgatttgtgtgtttttctctctaatatatttcagctcaattaagaaagtaccytctaagctaaatatcaacagggctgtcattagaggtgactagaagagcaaacaaattaggactcagagtttttggacaatagagaataaatgtcccttgagcaagtaattccttaatacttaacaaaatttgtttaccct

SEQ ID NO: 579582 - DNA, 633 bp, Homo sapiens
gctgcataccacaacacctggctaatttttgtatttttttaaatagagatggggtttcaccatgttggccaggttagtctcaaactccagacctcaagtggtccacccgctttggcctcccaaagtgctgagaatacaggcgtgagccattgcacctggcctattttactataattgtcctgccattttaggaacaactttacattctgacttgcccttgatttgtgtgtttttctctctaatatatttcagctcaattaagaaagtaccctctaagctaaatatcaacagggctgtcattagaggtgactagaagagcaaacaaattaggactcagagtttttggacaatagagaataaatgtcccttgagcaagtaattccttaatacttaacamaatttgtttaccctagaagacacataaaaaaaatgacaagttgatggctgaactaagtttcttggtctacgaaagtgagtgttctagctgagtggtgaaagaatttgtggaaatataaaaaggaggaaggaaattccagggttgtggaaacaattgtcagggaaagtagagcgatatcaatccctgaaaatagtagtgaatatggatttcttattttagtctgttgaaaagtgaat

SEQ ID NO: 579583 - DNA, 619 bp, Homo sapiens
acaatttattgatcttacatcttacaaccttgctaaacttctttattagttctagtagtttttaatgcagatttgttaggatattctacaaaatgatgtcctcagggaataaaaacagttttacatcttcctttcttggtagaatgacattaatgtttgctctgatggatgtattgattgtttcattaatagatttgccttayaataatggcaagaacacctgtacaatactgagtatctttctatgtatttgtgttttattgtggatttattagattatttagaaatgtgctatttaatacctaagaatttggatatttcccgtctctcttgatttctcgtttaattacactatgtacataaataatatattacattaatttgaatcactcaaatttgttaaagtttcctttacaatatgtctgttttggtgaatgttccccatatacttgaaaaaaatatgccattcatgtgtttgagtagaatgttctataaacatccattagatccagttgcttgataatgttgttctaaattcttgcggttttctatccatttatcatttacagataaatgttgaagttctctattgtgaatctgtatgtttcttctttctctt

SEQ ID NO: 579584 - DNA, 389 bp, Homo sapiens
gttaaatttatatgtggttcttttatttatctctattctatcttaagtgggtcattttctttccttatgtatttattttttgaatgtgcataaaaagatactgatcttttgaatattatttacatctctagtgaatttactagattcccttattttttcccataaatctgccaattttgttgagttttattggcacatttatgtgcatgtttataccatttacatcaaaggtgacattacttcttcctttccaatttttatactccatttctggtgcctaatcacattggctaacttctctacaatggcgttgaattgtcatagagatggtggccttccttgtctagttccagmcaaaggaaaataacagaaaaagtaataaagaagct

SEQ ID NO: 579585 - DNA, 497 bp, Homo sapiens
ctgttctcagagctggctcaaacagcagctcctccaggaaggtgtccttggtttcaacctggtactcccacctgcaggtcttcctggagtgtctcctctttctctctgtctccccataaatctaagacgagggggatggatttgcccaccgctactcaccgtatgactcttgtgaggttgatcagtctcccctggaaggccaacagctgaagtccatcagaaagggtcctctggcccagagccagcccctgcccacccctgtcatgctgcacccagggtgcaagccccagatcaggtctgggtgacaggaggggtatagaggggctgaggctcaggggccttctagcctaacttgtctggagacagttggggaaactgagaccccaagtaggkaggtatggctccgagagattattctcattaacctggaacatttttgcaagctgttaggtataggaagtctgtcacaggtaagagaaatgctttttgagagcatg

SEQ ID NO: 579586 - DNA, 497 bp, Homo sapiens
ctgttctcagagctggctcaaacagcagctcctccaggaaggtgtccttggtttcaacctggtactcccacctgcaggtcttcctggagtgtctcctctttctctctgtctccccataaatctaagacgagggggatggatttgcccaccgctactcaccgtatgactcttgtgaggttgatcagtctcccctggaaggccaacagctgaagtccatcagaaagggtcctctggcccagagccagcccctgcccacccctgtcatgctgcacccagggtgcaagccccagatcaggtctgggtgacaggaggggtatagaggggctgaggctcaggggccttctagcctaacttgtctggagacagttggggaaactgagaccccaagtagggaggtatggctccgagagattattctcrttaacctggaacatttttgcaagctgttaggtataggaagtctgtcacaggtaagagaaatgctttttgagagcatg

SEQ ID NO: 579587 - DNA, 541 bp, Homo sapiens
gaggcagaagtcatacctgatttaacatgcttaatgcattttctttaatagtaaagtggtgttcrcagttgaaaatagaatcttacacatattttgtttttaaattcagatgatggagcagtggtatcacctgaccttggggacatgtctcctgaagggccgcagccccccatgatcctcttgcagcagctgctggcctcggccacccagccgtctcctgtgaaggccatatttgataaacaggaacttgaggtacagccatgcagccttgacagtttttaatccacagcactaaattgtgaacactttttttctagatgtatattttcttaaggatctattctgaatgttaaatgatagtacgcaaataattctaatgattcattggggtttaaccatgtttgtgcatagtctgcagaacattataatactaaagactgagagggttgaagtttaaccttattttgggtttgtgtaaattgtgaaaaaatattaactagatgcagcatgggttaaacgctcacatcttcatgaagggatc

SEQ ID NO: 579588 - DNA, 381 bp, Homo sapiens
tctctacaaaaacataaaacattagccaggtatggtggtgcgtgcctgtagtcttagctactcaggggctaaggcagaaggatcctttgagcccaagaagttaaggctgcagygggctgtgattacaccactgcacttcagcctgggtgatgcagcgagaccctgtctcttaaataaaacaaacaggctgggtgtggtggcttacacctgtaatcccaccactttgagaggccgaggtgggtggatcacctgaggtcaggagtttgagaccagcctggccaacatggtgaaaccccatctctactaaaaatacaaaaaattagcagggcctggttgtgggcgcctgtaatctcagctactcaggagtctgaggcaggagaa

SEQ ID NO: 579589 - DNA, 607 bp, Homo sapiens
tacagtatagtccttgtcaaatctatgaaaattatatgtgtatgtgttatgatatccaaagggtaagatctttttaaatattaaccacagatatgaatttcagtggttggttggctattttttttaatgtaattttcccagttacttcacccaacattctctgctctctagtataatgactcccagatattcatttgggcccaacacaaaattagcttttttgtatttcctgtgcaaaattttctaaaccgtgttatttttaaaagattaaaaataagtctattaagaaaattgaagttatcaaattagattaataaacagatataaacttgaaacatcctctaccacataatctgcacatggctgtagaaagcataatttttgtggagcctcacaacatygcaagtaagtaattttttcatcccaattggttatttagatttgttttcctatctagaaagtctgggttctaggcctttgtcctaaaaactttacacaactttaaaactgaatatctttagtcttaatgaaacctgaatgactgtgtaaatgaattcctatgtatttctacaatttcattaagagtatgatatatgaaagtatcact

SEQ ID NO: 579590 - DNA, 306 bp, Homo sapiens
tttgccttctccctggccctgcccctggcccagtcttgaccctggccctggccctgacaatccccaggccccacactggccatgcttggccctggcccctcctttggccctgcmctggccctgtgctatcttagtcctaccctggccctgaactcgccctggccctaccctcaccctacactggccctgccctaccctgaccttgccctggcctggccctgcctttggcctgccctggctctggttctgccctggcgttgcccttgccctggaccctccctggccatgttttttccatggtccttc

SEQ ID NO: 579591 - DNA, 306 bp, Homo sapiens
tttgccttctccctggccctgcccctggcccagtcttgaccctggccctggccctgacaatccccaggccccacactggccatgcttggccctggcccctcctttggccctgcactggccctgtgctatcttagtcctaccctggccctgaactcgccctggccctaccctcaccctacactggccctgccctaccctgrccttgccctggcctggccctgcctttggcctgccctggctctggttctgccctggcgttgcccttgccctggaccctccctggccatgttttttccatggtccttc

SEQ ID NO: 579592 - DNA, 306 bp, Homo sapiens
tttgccttctccctggccctgcccctggcccagtcttgaccctggccctggccctgacaatccccaggccccacactggccatgcttggccctggcccctcctttggccctgcactggccctgtgctatcttagtcctaccctggccctgaactcgccctggccctaccctcaccctacactggccctgccctaccctgaccttgccctgscctggccctgcctttggcctgccctggctctggttctgccctggcgttgcccttgccctggaccctccctggccatgttttttccatggtccttc

SEQ ID NO: 579593 - DNA, 306 bp, Homo sapiens
tttgccttctccctggccctgcccctggcccagtcttgaccctggccctggccctgacaatccccaggccccacactggccatgcttggccctggcccctcctttggccctgcactggccctgtgctatcttagtcctaccctggccctgaactcgccctggccctaccctcaccctacactggccctgccctaccctgaccttgccctggcctggccctgcctttggcctgccctggctctggttctgccctggcsttgcccttgccctggaccctccctggccatgttttttccatggtccttc

SEQ ID NO: 579594 - DNA, 548 bp, Homo sapiens
gtggtggtgcgcacctggggtcccggctacccgggaggctaaggtgggaggtttgctcaaggctgcagtgaactgtgaatgcaccactgcattgcagcctaggccacagaacaggaccttgtctataaataaagaaataagtaaaaacataaataaaaataagtaaaaagaaatataagtaaatataaatataaatacatgtaaatatacaaatgaatacatgaaaacaatttttaaatttaacatcactgagggcatcctatccatttcatttcatgattccattacgtcatttcacttagatgaaatgataatatgacttgagatgagatgaaatgactaaatgatgagatgagatgaaatgatgagatgaaattttgagatgaaatggtgagtagaaatgatgagattaaatgatgagacaaaatgacaaaattgaaaagaaattgaaaggagatgagatgagatgaaatgagatgaaatgatgagatgatggatgaaatgatgagatgaaaygagatgaaatgatgagaagaaatgatgagatg

SEQ ID NO: 579595 - DNA, 445 bp, Homo sapiens
agatgaaatgagatgaaatgagatgtaatgaaatgagatgaaatgaaatgacataatgaaatgcaataatgaaatgagatgaaatgmaataatgaaatgatgaaataaaatgatgaaataaatggaaatgaaatggaaatgatgagatgagcagaaatgatgagatgaaatgatgaaatgatgagatgagatgaaatgatgagatgaaatgagattaaatgatgagattaaatgatgagatgagatgtgatgaagtgagatgaaatgatgacaagatatgataacatgaaatcagatgaaataatgagatgaaatgatgagatgaaatgatgagatgagatgaaatgtgacgagatgaaatgacaatgaaatgaaataaatgatgaaatggaataatgaaatggaaatgatgagatgagatgcaatgagttgaaatgatgagatg

SEQ ID NO: 579596 - DNA, 438 bp, Homo sapiens
tgtcacgtgtgtgtctattctttttcccaaccaacaaaaattataattcattaattttaattttatttaacaatactcttaagagttgaaggaaaaatattatctacattatgggttacaatctaagtataaataatacataaatatattaaaacttayaaagaatatgttttggaatcgaatataccatgcttctgtgatgacagttatttcatgctggttgtcacaattttacgtgaaaaactaatgaaaaaatgtttttaactgtttctaaaaataagtttccaaaacagttttacattcgaaatatgaaaaagatgtctttgtgttccttaatctgatgagattttcacactctgcacatgataattgttagatttttattgtgttgataaattgtatatcaaataaaaaatgttattacctcttaaattagga

SEQ ID NO: 579597 - DNA, 541 bp, Homo sapiens
agccgggcatggtggcgtgtgcctgtaatcccagctactcagcaggctgaggcaggagaattgcctgaacccggcagacggaggttgcagtgagtggagatcgcaccactgcacttcagcctgggtgacagagcaagactccatctcaaaaaaaaagaaaaaaaaaaaaagaagaatcacccagccctgatggcttcctttagacactccctttaccccacctggtctgcactgttcagtacwgtagtcactacccatatgtggttatttaaatttgatccattacaatgaaataaaatgagaaattcagtgcctcagttatactaggcatatttcaagtgcccagtagccacgtggttggcagctaccatactaaacagtctggaaagttctatggaacagcattgcaaattattgccaaatatgtcggtgatgctgccatttctcatgccaccatccttccatctactctatccaatctcaattgtgcatgactcctttcaacatttacattttgtttttccttttcatctaaaagaca

SEQ ID NO: 579598 - DNA, 520 bp, Homo sapiens
gaaatccaaactccttaccatggtttgtattatgtgtgggccaccccctgactatacccatctcacacctcaatactttcttttctgactacactatagctagattctcctattttttagttcttataaaatattaagttgattctccacatcaggttttatttatttatttggagagagtctcactctgccacccaggctggagtgcagtggtgcgatctcggcttattgcagcctctgcctcccaagctcaaatgattctcctgcctcatcctcccaagtagctgggactacaggcatgcaccaccacgcctggctaatttttgttttagtagaaacaggacttcaccatgtaggccagtctggtctcatactcctggtctcaagcaatccacctacctcagcatcccaaagtgctgggattacaggggtgagccaccatacccagcccacatggagttttaaattgttgcttcctccgcgtgaatttcctctrctctttacctggttgggtcttctc

SEQ ID NO: 579599 - DNA, 562 bp, Homo sapiens
aaaaaaaaaaaatacaaaatgaataaactaagtgggctccccacattctaagttcagttaaaaagaacaatagtcaccacagggtacattaggttactccataatttaaatattatgtctgtttattaaggaacataagggctatccatcatccatagaaagtttscatactgtgttttcagctaacaggtgtgtgtgaaggatctgttcataccatacctagagtgtcacatggttcattcttccaagaacaaatatcaaatcctgttagtaagatggcatgatcatgtctcttgccattctttccaatgagggcagactgccattgacaaaaactattcagagactggtctgcatgatggttgatcaataatcctccctatgggaaacccacacaaatcaaagtgtgaatttgtcacagagatgagaatgctgaatcattccatttgtacaggcaaacacagaaacatatttctagggaaaaagatcagtaaacacttgagctaaggtaggagacaggaaaacctctattttaggtaaatgctcacaatatttaaagcaa

SEQ ID NO: 579600 - DNA, 614 bp, Homo sapiens
ccgtattatttacaaagagatagattgatgaaccggatcaattcgagagaactctatcaccagtggaggccaatcttccattcctcaaaaaaaacttttctttttttttttgttttttttgagacggagttttgttctcgtcgcccaggctggagtgcaatggcacggtcttggctcaccgcaacctctgcctcctgggttcaagaaattctccctscctcagcctccccagtacctaggattataggcgcccgccaccatgcccagctaatttttgtatttttaatagagacaagggttcaccatgttggctgggctggtctcgaactcctgacctcaggtgatctacccgccttggcctcccaaagtgctgggattgcaggcgtgagccaccgcactcggccgtctcaaaaaaaacttctaactatcaggaaaaatcttacacctggtgaaaaatcttaaagtttactttttgtcagggctaaatcatgttgatgaatgacatatagagctatgcatggattaaataaagtacgaatatgcagccaaatatgaaaaaatgctcatcatcactggccatcagagacatgcaaatcaaaaccacaataagatac

SEQ ID NO: 579601 - DNA, 428 bp, Homo sapiens
acatttataatcatttaaaataattttaaatgatttttaatccattgctaaaattacttattataaagaacaattgtttcatcatttaatattaatgtattacttagctaagaaatacacaaacaggcagggtgtggtggctcacgcctgtaatcctagcactttgggaggcagaggcagcggatcacctgaggtcaggagttcgagaccagcctgaccaacatggcraacccctgtctcttctaaaacatagaaaatcagctgggcttggtggcgcgtgcctgtaatcccagctattccgggggctgaagcaggagaatcgcttgaacccaggaggcggaggttgcagtgagcccagattgagtcattgcagtccagcctgggcaaaaagagcaaaactccatatcaaaaagaaaaaaagaaaaagg

SEQ ID NO: 579602 - DNA, 612 bp, Homo sapiens
ttttaaaatattattcctttaacattatcacttatgtaccataagaaaacttggacttgctgcaatatagtgaaaatctttgtgggaatcacaaggcaggaggtctgaatcgatttctgatactacaaagcagtatagacaaggaaagttcactcaaacaccccaggtgtcttgcggagttgattggatgatgagtctagttttaatggattatgagctcataattttatattctcattcataattctgaaacagagcagtgaagattttgacttaccacatttttaattctcatttccactataggaaaaaataaaaacccgaaaaatcattgctaatgacactagttactgaaaacatgggagaaggagctgaggtgagaaaagattgacttctcttgggttttcaaaattatgtggtaattatatagatcctgaacctgcttagaggcttcctaatccaaatatattatctctgtcccaattcttgatttgtcatctattaagggaatataacagtattttccattttkttcacagaattaccaatgtaaaataagtcaaatttctgcaataaacatgctttttgaaattttaatatgcagtagaaata

SEQ ID NO: 579603 - DNA, 569 bp, Homo sapiens
gattctgccacttgcaaaaacacagatggaactggaggacattataaatgaaataaaccaggcacagaaagacaatccacatgttcttacttacttgtgggagttaaaaatgaaaacagttgaattcatggagatagaatgtggaatgatggttaccagagggtgggaagcatggtcagggacagggaagtggggatgattaatgggtatgaaattagagttagayagaatgagtaagatctaatatttgatagcacaacagtgtgattagaatcaacaataatttattgtaccttttaaaatagctaagagagtataatggtaaagtctgtaacataaagaaatgataaatgcttaagttgatgaattctccatttaccctgatgtgattattacgcattgtatccctgtgccaaaatatatcatgtaccccaaaaaaagtacacctagtacattcccataaaatttttaaaatataaaattaccttaaaaaatagcaaatactggaaattattccaacaaaaatgtttaagatgcctatatagaatactgtaatacattacagaaag

SEQ ID NO: 579604 - DNA, 584 bp, Homo sapiens
tgcaaatgaaataattacaattccagtgttataagtaagtctcttgagtttgattagtgtgagtcagatcaattctgtgtaaaatgacaagatgcaacttctcaacctgctgatttgaggacaaggtcctgaacccacgtgacagaggactctaaaactctagagaacatgaagaaagcagccrgctgcctcccctctgccatcccattaactacagcaaatgcaaagaatatttccagtggctcacaatccagaagagtctcccaatttctcagcagagttctctttctgttagtcctgaatgtctgccatctgaaggtaaacatcaggtgtccaaatggtggggctatagaattctaagaagcatctgaaccagtgattctcagccctagctgcataagataatcacttggaatgctttcaaaaactattgtcgcctacaccacatccctgaccaattaaaggcaggatctctaggggtggggcctgggagtccgtatttttaaaaggtcccccggatgattatgatctgcagccaggattgagcacgatggatgtcaactataggaggaatatagggcctg

SEQ ID NO: 579605 - DNA, 584 bp, Homo sapiens
tgcaaatgaaataattacaattccagtgttataagtaagtctcttgagtttgattagtgtgagtcagatcaattctgtgtaaaatgacaagatgcaacttctcaacctgctgatttgaggacaaggtcctgaacccacgtgacagaggactctaaaactctagagaacatgaagaaagcagccggctgcctcccctctgccatcccattaactacagcaaatgcaaagaatatttccagtggctcayaatccagaagagtctcccaatttctcagcagagttctctttctgttagtcctgaatgtctgccatctgaaggtaaacatcaggtgtccaaatggtggggctatagaattctaagaagcatctgaaccagtgattctcagccctagctgcataagataatcacttggaatgctttcaaaaactattgtcgcctacaccacatccctgaccaattaaaggcaggatctctaggggtggggcctgggagtccgtatttttaaaaggtcccccggatgattatgatctgcagccaggattgagcacgatggatgtcaactataggaggaatatagggcctg

SEQ ID NO: 579606 - DNA, 584 bp, Homo sapiens
tgcaaatgaaataattacaattccagtgttataagtaagtctcttgagtttgattagtgtgagtcagatcaattctgtgtaaaatgacaagatgcaacttctcaacctgctgatttgaggacaaggtcctgaacccacgtgacagaggactctaaaactctagagaacatgaagaaagcagccggctgcctcccctctgccatcccattaactacagcaaatgcaaagaatatttccagtggctcacaatccagaagagtctcccaatttctcagcagagttctctttctgttagtcctgaatgtctgccatctgaaggtaaacatcaggtgtccaaatggtggggctatagaattctaagaagcatctgaaccagtgattctcagccctagctgcataagataatcacttggaatgctttcaaaaactattgtcgcctacaccacatccctgaccaattaaaggcaggatctctaggggtggggcctgggagtccgtatttttaaaaggtcccccggatgattatgatctgcagccaggattgagcaygatggatgtcaactataggaggaatatagggcctg

SEQ ID NO: 579607 - DNA, 624 bp, Homo sapiens
gctggtcttgaactccagggctcaagtgatcctcctgcttcagtgcagacattttttaaaccacatatactccaagtcttttcctttggatttgaaaagtgattgcgcttcctttgttttttggcaggtgttgcatcctggccaagtgatctgagtttccatacatattctagaaaacagtagttaattacaagagctaacatttattgagggcttgctaaatgtcaatcattwttctaagtccctaagttctctatcctgtttgaattgtatttcacttgatatctaaataaaatgtccgaaatccccattcagtgcgctgtggaaaggccgagagctctctgcaatatctgttttcaggggcctacatttttccagagaaagtgcgcaactaaatctgcttcatggctcctgcctctgtggtcctgttttcacactgcttctactctagaaatactacccccatttcttacccccaaattatcactaacatacttactgaaaattaattacatctcaatgtagaaatcaactcccaggtcaaagttcacacataactatttctaggaattaatttatcaggcaattcctgcccaaaccatttaacagttaacatggaaaggt

SEQ ID NO: 579608 - DNA, 209 bp, Homo sapiens
aaaaagaattacacacagaagggtaaagataagaatgacagcagacttccagttagaaataatgcaagctagaaaacagtagagcaatatctttaactgtcaacttagaaaatgtcattcatrctgggtgcagtggctcttacatttaatctcaacactttgggaggctgaggtgagagaattgcttgagtctgggggttcaagaccag

SEQ ID NO: 579609 - DNA, 580 bp, Homo sapiens
aatacatgctgcagttggctttgcttcgcagatctgaggagagcaaaggtttggcttctgtgtgatccaagatgattgctatcgttccaaacagtatatcacccaaagaaagctttctattcccaaatgagtgatttttattgtatttgtctattgatttatttatttttatgtatttaggggggtaaaagtacaggtttctcacatgcatatattgcataatggtgaagtctaggctttttgtgtacccattacccgaatagtgcattgtacccaataggtagtttttcaaacctcacccaccttcaccctcccaggctccatagtctccagtgtctattattccactctgtatgagcatgtatatccactgtttggttctcatttatacataagaacatgtgatatttgactttctgtgtgagttatttcattgaggacaatggccttcagttccatgttgctgcaaaagttgtgatttccttcttttttattgctraatagtattccatggtgtgtatatatgtatatgctacattttctttatctagtcctccattgatagacatttaggttgctt

SEQ ID NO: 579610 - DNA, 604 bp, Homo sapiens
atgcttctttatccaggatccttccaaataaagcatccagaaaatgtttgagtcacaaaaatatgggctttgtattgtttacaaaggaatattggtggtagagaggagggatggatttcagttctacttcactcacctcacatttggtttagcgtgtcctatttttgggctatcattacatgaaggaagcctaccaacttttgccaggcactttgcatcttcccttgttttgagtgagaagctctagattcttccccatgtcttctaccacagctttaagatggctatttggctttgactgaacactccagcggagtcttatcattttcccaaacagagcatkacatgattgtgtagttgtagatgttagaaagttcttcctcacatatagctaaaatttgactcttgggaggcagcctttgtagctagctgtagatctacctagtaatggaataagaggctatctacctcttccttcccccgcatgtcaagatcctttctcaagaaagctaagagtggcattgcttctcagctttttcttctccagattaataaaactatttcttaactgttttttaagaaagtgagcatttataggcacaca

SEQ ID NO: 579611 - DNA, 357 bp, Homo sapiens
tttatcaatagaaaaaagaaagaaaagcaaaaagaaaagaaaaagaaagcaacactgctatatagaacattttttttttctaaatggaatccagcagcaaaaaaaaagataattgaagatactattaaaagatacaatttaatattaatattgaccacatttataaattcacatamttttataaaacatatgcacttctgagtataaaacacacataatacaaaaaagattattacattttaaattgttaaaatttcctcaatagtttttccacacctgatgattactctcaatctcaacaagataattataaatgatgtttattattcaaaatagattattttgtgtgtgtgtttt

SEQ ID NO: 579612 - DNA, 357 bp, Homo sapiens
tttatcaatagaaaaaagaaagaaaagcaaaaagaaaagaaaaagaaagcaacactgctatatagaacattttttttttctaaatggaatccagcagcaaaaaaaaagataattgaagatactattaaaagatacaatttaatattaatattgaccacatttataaattcacataattttataaaacatatgcacttctgagtataaaacacacataatacaaaaaagattattacattttaaattgttaaaatttcctcaatagtttttccacacctgatgattactctcaatctcaacaakataattataaatgatgtttattattcaaaatagattattttgtgtgtgtgtttt

SEQ ID NO: 579613 - DNA, 357 bp, Homo sapiens
tttatcaatagaaaaaagaaagaaaagcaaaaagaaaagaaaaagaaagcaacactgctatatagaacattttttttttctaaatggaatccagcagcaaaaaaaaagataattgaagatactattaaaagatacaatttaatattaatattgaccacatttataaattcacataattttataaaacatatgcacttctgagtataaaacacacataatacaaaaaagattattacattttaaattgttaaaatttcctcaatagtttttccacacctgatgattactctcaatctcaacaagataattayaaatgatgtttattattcaaaatagattattttgtgtgtgtgtttt

SEQ ID NO: 579614 - DNA, 357 bp, Homo sapiens
tttatcaatagaaaaaagaaagaaaagcaaaaagaaaagaaaaagaaagcaacactgctatatagaacattttttttttctaaatggaatccagcagcaaaaaaaaagataattgaagatactattaaaagatacaatttaatattaatattgaccacatttataaattcacataattttataaaacatatgcacttctgagtataaaacacacataatacaaaaaagattattacattttaaattgttaaaatttcctcaatagtttttccacacctgatgattactctcaatctcaacaagataattataaatratgtttattattcaaaatagattattttgtgtgtgtgtttt

SEQ ID NO: 579615 - DNA, 493 bp, Homo sapiens
tattataatttttaaatttcagaaaccttctttaaaattcttactgttttatcttaaaaaattcatatagaaattgtggtcagatgtaaactgtgactctgagcacaaatcccaatgctattgccaattaaattccaatttttgtgttcacacatgaaatgtagtttttcttttattgagttttaaaaatctgtaagatttacctatctgaatatacactcaggtctagcttcatgttcctgtgacctctgtggtcacacaaggacccatgtacataatgacctcatacttggcctaatgctctgctgttgccatcttgaaacgcttaacactttgaacgaggtacaacatccacttcattttgcactgggccctgcaaatcacgtagacagtcatatatgagtccagtattttcctaccaccagacattttratgtactgaagagataaaaaaaaaaacctaataattagaagttttaaaagaatttttttt

SEQ ID NO: 579616 - DNA, 493 bp, Homo sapiens
tattataatttttaaatttcagaaaccttctttaaaattcttactgttttatcttaaaaaattcatatagaaattgtggtcagatgtaaactgtgactctgagcacaaatcccaatgctattgccaattwaattccaatttttgtgttcacacatgaaatgtagtttttcttttattgagttttaaaaatctgtaagatttacctatctgaatatacactcaggtctagcttcatgttcctgtgacctctgtggtcacacaaggacccatgtacataatgacctcatacttggcctaatgctctgctgttgccatcttgaaacgcttaacactttgaacgaggtacaacatccacttcattttgcactgggccctgcaaatcacgtagacagtcatatatgagtccagtattttcctaccaccagacattttgatgtactgaagagataaaaaaaaaaacctaataattagaagttttaaaagaatttttttt

SEQ ID NO: 579617 - DNA, 592 bp, Homo sapiens
aaacggtatctggtgctaggatatacctaattgagaatttcatgaagcacattatttgtaggtgtagacaatgctttcaaacyagacacatttaattagcacataatatgaactacatgagtggcaagttaagcagcactggcccctttgccaggcattttgaaagaattacaggatttggtcatgtgatattaaatctaattgaagtagtgttctaggaggcccatcattatgataaaaatgacttgctacttcaaatagggacactagaggaagctgtttttagaggactcagttgtagtaggaaatcagtttggtttaagacaatgcttgaaccgaagacactgaataaataatgacttccatgcttattaacaacactaggattaactttgtacctttagtcaggaaggactattggatatattaatcactatgggatattatgtctttaatgttgagttgcaggaattcataaagaaacaagctcaacgtcgggcgcagtggctcacacttgtaaaatcccagcacttaggtaggctgaggagtgtggatcacctgaggtcaggagttcaagacaagcctggtcaat

SEQ ID NO: 579618 - DNA, 592 bp, Homo sapiens
acattatttgtaggtgtagacaatgctttcaaactagacacatttaattagcacataatatgaactacatgagtggcaagttaagcagcactggcccctttgccaggcattttgaaagaattacaggatttggtcatgtgatattaaatctaattgaagtagtgttctaggaggcccatcattatgataaaaatgacttgctacttcaaatagggacactagaggaagctgtttttagaggactcagttgtagtaggaaatcagtttggtttaagacaatgcttgaaccgaagacactgaataaataatgacttccatgcttattaacaacactaggattaactttgtacctttagtcaggaaggactattggatatattaatcactatgggatattatgtctttaatgttgagttgcaggaattcataaagaaacaagctcaacgtcgggckcagtggctcacacttgtaaaatcccagcacttaggtaggctgaggagtgtggatcacctgaggtcaggagttcaagacaagcctggtcaatatggcgaaaccccgtctctactaaaaatacaaaattagccaggcatgg

SEQ ID NO: 579619 - DNA, 592 bp, Homo sapiens
acattatttgtaggtgtagacaatgctttcaaactagacacatttaattagcacataatatgaactacatgagtggcaagttaagcagcactggcccctttgccaggcattttgaaagaattacaggatttggtcatgtgatattaaatctaattgaagtagtgttctaggaggcccatcattatgataaaaatgacttgctacttcaaatagggacactagaggaagctgtttttagaggactcagttgtagtaggaaatcagtttggtttaagacaatgcttgaaccgaagacactgaataaataatgacttccatgcttattaacaacactaggattaactttgtacctttagtcaggaaggactattggatatattaatcactatgggatattatgtctttaatgttgagttgcaggaattcataaagaaacaagctcaacgtcgggcgcagtggctcacacttgtaaaatcccagcacttaggtaggctgaggagtgtggatcacctgaggtcaggagttcaagacaagcctggtcaayatggcgaaaccccgtctctactaaaaatacaaaattagccaggcatgg

SEQ ID NO: 579620 - DNA, 605 bp, Homo sapiens
aactactgaaaaactgatcaagcttgacttgtgcatttatgtttgttttaagacactgcattaaagaaagatttgaaaagtatacacaaaaatcagatttagtaactaaaggttgtacaaaattgtaaaactggttgtacaatcatgatgttagtaatagtaatttttttcttaaattaatttacccttaagagtatgttagatttgattatctgataatgattatttaaatattcctatctgcttataaaatggctgctataataataataatgcagatgatgttatataaggtrtatcagacctacaggctgctggcaggatttgtcagataatcaagccacactaactatagaaaatgagcagcattttaaatgctttctagtgaaaaattataatctacttaaactctaatcagaaaaaaagaatattctcaaaaaaatctattacgaaagtcaataaaatagataatttaacaaaagtacaggattagaacatgcttatacctattaacaagaacaaaatttctaatgctgctcaagtggaaagggtattgctaaaaggatgtttccaaaaatcttgtatataagatagcaacagtgatt

SEQ ID NO: 579621 - DNA, 570 bp, Homo sapiens
ctttaatatagaaattgataagaatagctcaagtttcccttatatctgtagatcaaacaaggtttagatcacttatgatgcctaactggttttgtctgctcagaaattcttcaggcctggactccattttaatttactttaatgattgttactttaaatttggattaaacagtggattcatatgtactgagtgaaaaaaaatggaaatagatgttataaaatttatttgaaatcattcagccaggatgttttaaacagcataaattagcagaattaccaaaaacacattttgaaaaaaccttgaagcaattttaatgtattgcaaaatgtgaaggagactagtaggacaaaaacttaaaggttgagtttgagatatgatgcagggttttttgctccttagcccagctaggcctaagttctgaagaagtaggcacatggacactcaaagggtaagtgtagtagaatttatttagtgaaaggaaagctctcagcaaagagaggggtcctgacatgaagttcttggttgcccccttaacrgttgaatacaagggcattttttttttcttgaga

SEQ ID NO: 579622 - DNA, 583 bp, Homo sapiens
accatgcccagctaatttttgtatttttagtagagagggtttcaccacgtttgtcaggctgctctcaaactcctggcctcaagtgatctacccgcttcagtctcccaaagtgctgggattacaggtatgagccaccacaccgggcctcaaaattttagtagtgtttatttggacsttctctctttttttctttattattctaggtgttggcctatcttattaattttttcaaaaaaaatcctggattcaacaatcttttgaattatttttgtgtctttgattttcttccattcagctccaattttggttatgtcttgttttctgctagctttggggttgatttgttattgcttctgtaattcttttagttgcgatattacgttgttaatttgagatctttctaactttttgagatttttctaactttttgatgtgggcaggtagtgctatgaatttccctcttatcattgccttacctgtgtcccagagattctggtatgttgtatctttgttcacattattttcaaagaacttcttgatttctgccttaatttcattatttacccaaaagtcattcaggaac

SEQ ID NO: 579623 - DNA, 563 bp, Homo sapiens
gcttctttttgtacagatgtgacacaatttatttatccattcaccgttttctgggtttttgctaatatgaataaaacttttgtaaacatttgtgtacaggcctttgtgtagaaataaattccatttctctcagacgaatacytggaagtgcgatcgccgttccattttttaagggtggatgtgtgtttgactttcttgtaaagtgtcacattattttaaaaaatgcttgtaccattctgcattcctaccagccatgtatggaccggatgacatttaatgggcaacctcagataatgactgttgttcctttgacaaatcaatgcctcatgtgtgcattcttccagagcattcttctgtttatgtttatgtttgtatgtatgtatggtgtatctataaatattgagacaggatctcgctctgtttcccaggctggagtgcagtctagagcattcttctgtttatgtttatgtttgtatgtatgtatggtgtatctataaatattgagacaggatctcgctctgtttcccaagctggagtgcagtggcacgatcacagctcactgc

SEQ ID NO: 579624 - DNA, 563 bp, Homo sapiens
gcttctttttgtacagatgtgacacaatttatttatccattcaccgttttctgggtttttgctaatatgaataaaacttttgtaaacatttgtgtacaggcctttgtgtagaaataaattccatttctctcagacgaatacctggaagtgcgatcgccgttccattttttaagkgtggatgtgtgtttgactttcttgtaaagtgtcacattattttaaaaaatgcttgtaccattctgcattcctaccagccatgtatggaccggatgacatttaatgggcaacctcagataatgactgttgttcctttgacaaatcaatgcctcatgtgtgcattcttccagagcattcttctgtttatgtttatgtttgtatgtatgtatggtgtatctataaatattgagacaggatctcgctctgtttcccaggctggagtgcagtctagagcattcttctgtttatgtttatgtttgtatgtatgtatggtgtatctataaatattgagacaggatctcgctctgtttcccaagctggagtgcagtggcacgatcacagctcactgc

SEQ ID NO: 579625 - DNA, 563 bp, Homo sapiens
gcttctttttgtacagatgtgacacaatttatttatccattcaccgttttctgggtttttgctaatatgaataaaacttttgtaaacatttgtgtacaggcctttgtgtagaaataaattccatttctctcagacgaatacctggaagtgcgatcgccgttccattttttaagggtggatgtgtgtttgactttcttgtaaagtgtcacattattttaaaaaatgcttgtaccattctgcattcctaccagccatgtatggaccggatgacatttaatgggcaacctcagataatgactgttgttcctttgacaaatcaatgcctcatgtgtgcattcttccagagcattcttctgtttatgtttatgtttgtatgtatgtatggtgtatctayaaatattgagacaggatctcgctctgtttcccaggctggagtgcagtctagagcattcttctgtttatgtttatgtttgtatgtatgtatggtgtatctataaatattgagacaggatctcgctctgtttcccaagctggagtgcagtggcacgatcacagctcactgc

SEQ ID NO: 579626 - DNA, 575 bp, Homo sapiens
agtaatacagatattaacctaggaaattgcacgcacaatggaggagtaaaataaacactaaataaattatgaagaacaatgtggacatgacatattcttacatagggatgaggccttagagaatagcagaaatggataaaatactattctttgatgtatttgttcatagaattaagataaacatgtctcttttctccttagttaagacgtgcatgtgagcacctgaaggttgaaatagtttctctgtaaaatcactaagctagttcataaaccaygacacaattgtagtatatcagatagaattgttatcacaggagtgtgtatagaggtcctatataggaataaatgtaataaaaattattctacgtcctttgcaaccagatatggaactgtgttagataagtcttatactttggcttattaaaaccaaagaaaataaataagatagatagatcaatcaaataaatttttaaaaattctaaaagaaacaacagcagaccagcacagagaatgaaaatagatccacatcaaggcatacagttttgtgaaattttatgttctggtaaaatcattct

SEQ ID NO: 579627 - DNA, 535 bp, Homo sapiens
taaaaggctgaataatatttcattatatagataacattttctttatccattcatcctttgatgggaatgaaaacaattaggttatttttatacctgagctattgtgaataatgctgcaataaacataggaatgcagatatctctttgagatactgatttcagttcctttgaatatacaccaaaaagttagattggtggattatacggtagtaacagttttggtttttcaagaaacctttgtattgtatttcataatggctctatcaatttataatctcactaacaatggtaaagggttacttttttaccatgtcccagccaacttatcatttaactttttgatatagcaggcatcctaacagatgtgaagtgatatctcattgtggttttcatttgcatttccctgatgattagtaatgttaagcaattttccatatactgatttgacatttgtatgtcttattttaaaaaatgagtattcaggtcctttttcyatttttaattgggttatttgttattttgctatttgatttct

SEQ ID NO: 579628 - DNA, 542 bp, Homo sapiens
tttcatttttttgtgtgtgaatagaatcttttttttttkttttttttttttttttgagatggagtctctctctgttgcccaggctggagtgcagtgacacgatctcagctcactgcaacctccacctcccgggttcaagtgattctcctgcctcagcctcccaagtaactgggactacagacgtgcaccaccacatccagctaatttttgtattcttagtagagatggggtttcaccatgttagccaggctagtctcaaactcctgactacaggtgatccacccaccttggcctcccaaagtactgggattgcagctgtgagccaccacacccggcagaagattttgacagagaaacggctttgtgaggagacattgagaatatgttattaaaacatgtaagaatgttgactttaaagctataaagcaggtaacccctgcagactggattactaaatttgtatataaaggtatacacagaaatatacaatatatacacttaaattatataattatatgaatatatatttataacatgtaatt

SEQ ID NO: 579629 - DNA, 548 bp, Homo sapiens
atagtttcaaatagctagagagaagatactgaatgttcccaatacaaagatatttctttgatgtttgagatgatggatatgctaattatcttgattttatcactatacaattatatgtattacattactattgcctcataaatatgcacaattattatgtgtcaattaaaaagaaagaaaaatcagtcacattatcatctcttcctggctcagaatgctgaagtgtgaatggtgtgcctttagataagctagttccagatagctgtgtaatagagttaaaaataagtatggcattcagttccatgcctgttttttccagaaaggtgaacacaatgatgaaacaggaaaattaagaataaaaggcgttttcttccaaggagagacagttacatctgyctcagttatttatcaaaaaatagatatagaaacagtcatgaaagggagtagcattttgaatttggggttgaattaggcatatgtttatgacctaatgccaagttctgtgagcctctgcttcatttatcaacgtgggtcttagaaagataaat

SEQ ID NO: 579630 - DNA, 521 bp, Homo sapiens
aaaaattagatgggtgaaagcaaaccaaacccaaaattagcagaagaaaaggaatagtaaaatcagagggtaaataaatgaaattgaaacaagaaacaatacaaaagagcaataaaatgaaaagttgtttttttraaaaaagataaacaaaattgacgtttagcctaactgagaaaagcagagagaagacccaactagaagagaagaaggagacattacaccaataacacagaaattcaaaggatcattagaagctactacaagcaactatatgctactaaactggaaaacctagaagtaacagatacatacaacctaccaagattaagccatgaagaaatccaaaacttgaacagaacactaacaggtaatgagatcaaagctgaaataaaatgtctcccagcaaagaaaagcctaggaactcatggcttatctgctgaatattaccaaacatttaaaaaaataccaattctcctcaaactgttccaaaaaataggggaggagggaatgcttccaaactc

SEQ ID NO: 579631 - DNA, 521 bp, Homo sapiens
aaaaattagatgggtgaaagcaaaccaaacccaaaattagcagaagaaaaggaatagtaaaatcagagggtaaataaatgaaattgaaacaagaaacaatacaaaagagcaataaaatgaaaagttgtttttttaaaaaaagataaacaaaattgacgtttagcctaactgagaaaagcagagagaagacccaactagaagagaagaaggagacattacrccaataacacagaaattcaaaggatcattagaagctactacaagcaactatatgctactaaactggaaaacctagaagtaacagatacatacaacctaccaagattaagccatgaagaaatccaaaacttgaacagaacactaacaggtaatgagatcaaagctgaaataaaatgtctcccagcaaagaaaagcctaggaactcatggcttatctgctgaatattaccaaacatttaaaaaaataccaattctcctcaaactgttccaaaaaataggggaggagggaatgcttccaaactc

SEQ ID NO: 579632 - DNA, 409 bp, Homo sapiens
acctcctattagatccctcccacaacacatgggaattamagatgagatttgggtggggacacagccaaaccatatgaaggacattatcaaaacatggtcttccaaattatcaggaaataaatgtgtgcccataacaaactaattcataatgcaaaacacacatgtaatgatgaagcaaaacataacatgtacattagcttaactatgtgaataaccagatgtggtctattggaatattttctaagtaatgctctgcaaacgccaatgttttgtacagattagccagtaatatttactagtcatttatttataaacaaactcctagttttgagtgtctgccatatatcatatcctgtggtaggtggatgtggaagataaagtcattcttgattcctttcctatataacat

SEQ ID NO: 579633 - DNA, 453 bp, Homo sapiens
ggtataatatttattccccttccccatcatgatttactctacaatttatagtcacacwtgaactgccagttctaaatcaaagagcatttttgagatggtaacacaattctgtagaggactactaaatctctccctacagcatacttgaactttccaggactccttggggaagactcataagatgcaacaccgtggtattcaattcactcgtgtgaaaatattacaatttttgctaattggaccattaaagcacaggtttcaataaaatctgaactattccttgaataaacttaagtatgataacttgaaataaatactttttcataccgtaccctgcaaaactgaacctatcatttcattcagccaggcaatagacagatgctagacatgaatgactaacacaaaccaatattggctatcttgtgcccactcactggactgaccaccaaaatt

SEQ ID NO: 579634 - DNA, 539 bp, Homo sapiens
tgtgccactgcaaccagcccttataagcacttttatttttgcaagattggcagcaatgtccattctcatgtgtatgactttcataattcgactcttctttgttttttttttcagttagactacttaaggttttgtcaattttgtcgatcttttgaaggaattaatatttgcttacmttgattttcttttattctactctttaatttttttctctgtttagtatttcctttgttatgtttgctacatatttagtttattctttatcttctattttctttatctgaaaattaatttatttatttgagatctttctacttttttattatagcatttacagctataaatttccctattaacacagttttagctgcatactgtatgttttggtatgtgttgctttcagtcccattcatattgaagtatttatttatataaattttttatgatcttttttctgtcttactagtttattttgcagcgtgttctttaattttcatatatttgtgaattttccaagtattcttttgttatttatttct

SEQ ID NO: 579635 - DNA, 539 bp, Homo sapiens
tgtgccactgcaaccagcccttataagcacttttatttttgcaagattggcagcaatgtccattctcatgtgtatgactttcataattcgactcttctttgttttttttttcagttagactacttaaggttttgtcaattttgtcgatcttttgaaggaattaatatttgcttaccttgattttcttttattctactctttaatttttttctctgtttagtatttcctttgttatgtttgctacatatttagtttattctttaycttctattttctttatctgaaaattaatttatttatttgagatctttctacttttttattatagcatttacagctataaatttccctattaacacagttttagctgcatactgtatgttttggtatgtgttgctttcagtcccattcatattgaagtatttatttatataaattttttatgatcttttttctgtcttactagtttattttgcagcgtgttctttaattttcatatatttgtgaattttccaagtattcttttgttatttatttct

SEQ ID NO: 579636 - DNA, 604 bp, Homo sapiens
agcattgccacacattaactgtgagtttcagtagattgtttctttaaatggtcaccttgagaccatacatgtataatatctggaacatagtaggcactgtgtaaatggtagtgttgagaaacaaattctgagtttaatcatactttccagaaagggcttaattttcccagtctcttcattcttgatttcctttcttaaatcttaattaactgctttgcaattgtcccataaaagctctatttacagtaaatcttctcagtatcttccaagaattttaatcccctgacgctatttagaattctaaattttcatgaatttgtagaaatttcaatctagttacaatggaaagataattgcaaagcactcatcttttacctggttctctccaattttagtattcttggagatagaaaaataaaatgtaatataggatcaattcataatctggacaaaaactggaaattagatcattttagaattgtaagatccacatccatgggattagccaatattctaattttgcaagtaaaaagtctgctcgagtctaaagtaatacatcacatggtttgakaaccagaatgtataggtaacctggcccccaatt

SEQ ID NO: 579637 - DNA, 558 bp, Homo sapiens
accatgcccagctaatttttgtatttttagtagagacagggtttcaccrtgttggtcaggctggcttcaaacccctgacctcaggtgatctacctgccttggcctcccaaagtgctggcattacaggcgttaggcactccacccagcctcttaaacattttttattgtcattttgattaataaatatccaagataatatttaaccaagtgttttaaagcttttgacatttttgacaaagttctcaaaattaaattctaaattaagtctttttgacccaaattaactttgagattttccagttggcctcaaataagccagttggcttatttgatatgctaaattatatgggaagcattgtcaagtaataagggatgctaaacctgtaagttatatctatggatgttattcatatgagtgtttaaaaattatgagattcctagaagtctgatatgctattattcacaatttttggttattatgttaaaatgttgtatgccacagaaatcaccaaatttccttgtcatttgctggttataatgaactcttaacagatttct

SEQ ID NO: 579638 - DNA, 586 bp, Homo sapiens
cctaattttttgtatttttttagtagagatggggtttcaccatgttggccaagctggtcttgaactcctgacttcaggtgatccacctgccttggcctcccaatgtgctgagattacaagcatgggccaccgtgcctggcctaaactttctaagtattgccaatgttgtctttaacctgttcacagtgatcagagaaatgttttttcatatgagaatgtgatcatgttttcctcttccttaaaaccttcaatagcttttcatgttcttctgataaagttcaaaattcttaatatgatccaaaaggctatgcatgatctgcccctacctccctctgtatcccaccactaatctggcaggccaggtctcactaacagctgaacaggaaggcctccatgacaactgtttcagcactgactgagtggttaaattaaatatttaaagctgatagagccagtgcccttatacgaaggctggaatgtaacgaaagcccaccaagagttttgcytaggcctttccagggccttgaagcatgatgaaataacaaaggaattcttaacagaacccgtttagtattaaacaggtttt

SEQ ID NO: 579639 - DNA, 515 bp, Homo sapiens
aagattcatctatgttgtggcatatgacacgatttttctttttaaggctgaataatattccattgtgtgtatataccatattttgttgatccattcatttgtcagtgaacacttaggttgcctccaccttttggctgttgtgaaaaatgcttctataatatgggtttggaaatatctctttgattctgtttttaattcttttggatgcataccaagcagtaaagttgctggatcttatggtaattctatttctaattttaagaggaactgcagtgctgttttccatagtggctgcatcattttaaatttccaccartgatacacaaggattccaatttcttcacatcctagccaacacttacttagcttttttgatagtagccatcctgatggttgtgaagtaacatctctttgtggttttgatttgcatttccctaatgattagtgatgttgggcatcttttcatgtgcttgttgaccatttgtatatcttctctggaaaagtgtctattcaag

SEQ ID NO: 579640 - DNA, 568 bp, Homo sapiens
acacaataaatatagtttatatatatctatatattttatatatatatagatatatggwgcttaacattctctaagcagttttgatgacacaatagtaaagagatcagtttttaatgcaatactatatatttctttctgattatcaggcagacaaattaacaaagagacataataataacaatcatattttgagtgtttctcaggtgcaaccataatttgggaccctattatatacattattctacttaatggctactaactgattttagagatattaaacaaaatcagagaggctaatttgcccacatcatgtagctctttagtactaagactgagattcatccctaggcccagcctctttcagagataatacactgttcattgtgtgagcagagaatggagttagtaagttaagtaggaacaagacaggataactgggataactgaaggtacgtgttccaaatatttttcctttattttaaaaagttgaaatacatttcagttactctgaacattatcaaagtgatataccaagtgtttcctattatttcccattttcacttgtttg

SEQ ID NO: 579641 - DNA, 568 bp, Homo sapiens
acacaataaatatagtttatatatatctatatattttatatatatatagatatatggagcttaacattctctaagcagttttgatgacacaatagtaaagagatcagtttttaatgcaatactatatatttctttctgattatcaggcagacaaattaacaaagagacataataataacaatcatattttgagtgtttctcaggtgcaaccataatttgggaccctattatatacattattctacttaatggctactaactgattttagagatattaaacaaaatcagagaggctaatttgcccacatcatgtagctctttagtactaagactgagattcatccctaggcccagcctctttcagagataatacactgttcattgtgtgagcagagaatggagttagtaagttaagtaggaacaagacaggataactgggataactgaaggtacgtgttccaaatatttttcctttattttaaaaagttgaaatacatttcakttactctgaacattatcaaagtgatataccaagtgtttcctattatttcccattttcacttgtttg

SEQ ID NO: 579642 - DNA, 518 bp, Homo sapiens
gtttaaaaacaatttacattaaaaacttaaatgaaataaaacaaacaaaaatcatagcacacctggcctctgctactccgagaggaagattgggacctaccgggacagatgtttttctggtaagggagagtctaccttgctataagtatctcgtaagttttactggtagagcactgttcctttattctttaaarttataaagtagaaattcaaattgaagcaaaagaaaagtgttttctagttaaaaaaaaaaagctagtggaaaataaaattgtagcataactaatagaaattaagttgtagtttttaggtagtttattatatgatggacttgaaaaacagctagtttcaaatcagaataattgcctttttcttatgaagttagtctggagggtgaagactggagattgctttctttctgtgtgaattagttgtttcttttaaagaaacaaaatcaacataaggaaatacctgggagttttcaatacagatgtctccaaaagtattattgctgccat

SEQ ID NO: 579643 - DNA, 551 bp, Homo sapiens
tacttgggtgctcttaaaagcattcagttttatacattcacaaagagatggtttgaaattagaacttacgtttaaaagggaagtagagcataaaattttggaaaatttgcaacctgatgatacaatagaaaagaaaaacccattttytggggagaaattaaagctggctgcaggaatttgcataactaacaaggagctgaatgttaattgccaagacaatggagaaaatatttctggggcatttcagagatattcacggcagcacttcccatcacaagtctggaggcctaggagggaaaaaaggtttcgtgggctgggcccagggcccagctgctctgtgcagccctgtgacatggcaccctgcaccccagtcactccagcttcagccatggctaaaaggggccaaggtacagcttgggctattgcttcagaggttgcaatccccaagcgttggcagcttccatgtgctgttgggccttcaggtgcacagaagacaagaactgaggcttgggagcttctacgtagatttcagaggatgtatggaaatgcct

SEQ ID NO: 579644 - DNA, 631 bp, Homo sapiens
taggctacatggtgtgtagcagactgtgataggacaaaaatgtaagtcagctatcaaaaggccttaaaataattttagtstgtatttaatggatggctatgtagggatttttgttttgttttgttctgtttttgagaaagagggcaacttaaatacacctttatttcagaaaggaattttgggtcatattacgtagaacagatgatcagtgggagcctaaatgggagggaatataaataaaccaaatatgagactgttgaattaagaagaaaggtaaggaaaactatgagatataattattaccaggtgaaagaaaaaaaatgtagaagaggagaagtggggaattactggagtgaatggtgatagtgtaactaatgtaagatttgcaggggaaggaactgagagtggtaggaaatgttaatttactttaaaaatattgtcaccttccatgtgactttggcagaaccagatctgtttattctatatgaagttggaaatttgtatctgtaactcagcatcataaatatggaggcttcagctccaataattgaaatggatgagaatgcccagagcaagagagggagagaatggagagaatgagaatagagagaaaaagagttgggaatccatt

SEQ ID NO: 579645 - DNA, 631 bp, Homo sapiens
taggctacatggtgtgtagcagactgtgataggacaaaaatgtaagtcagctatcaaaaggccttaaaataattttagtctgtatttaatggatggctatgtagggatttttgttttgttttgttctgtttttgagaaagagggcaacttaaatacacctttatttcagaaaggaattttgggtcatattacgtagaacagatgatcagtgggagcctaaatgggagggaatataaataaaccaaatatgagactgttgaattaagaagaaaggtaaggaaaactatgagatataattattaccaggtgaaagaaaaaaaatgtagaagaggagaagtggggaattactggagtgaatggtgatagtgtaactaatgtaagatttgcaggggaaggaactgagagtggtaggaaatgttaatttactttaaaaatattgtcaccttccatgtgactttggcagaaccagatctgtttattctatatgaagttggaaatttgtatctgtaactcagyatcataaatatggaggcttcagctccaataattgaaatggatgagaatgcccagagcaagagagggagagaatggagagaatgagaatagagagaaaaagagttgggaatccatt

SEQ ID NO: 579646 - DNA, 574 bp, Homo sapiens
gaatggtggttgccaggggatgggggagggaagaatggagagttattgtttaacgagtatagagtttcagtttgcaaggtgaaaagagttctggagatggatggtggtgatggttgcacaacattatgaatgtatttaatatcacaaaactatatacttaaaatagtcaagatggtaaattatgtgttatatgtattttaccacaataaaaaaaattgaaaaaaaattagtatgtctagaatggtcatacacaagmgctggaattagggttacagaaatcagtcccaggaacatagttctgatgagaagaatagaaaaagcaatgggcattgcctttaaaaaacagttttggcaggccaggtgcagtggctcatgcctctaaccccagcactttgggaggctgaagcttgagctcaaggaggattgcttgagctcagagtttaagatgagcctgagcaacatagtaagacccacgtctccacaaaaaaaaatgaaataattagcagggcatggtggtgtatgcctgtagtcccagctactcgggaggctgaggcaagaggactgcttgagcccg

SEQ ID NO: 579647 - DNA, 652 bp, Homo sapiens
tggaaccagcccaagtgcccatcaatcaacaataggataaagaaaatgtgatacacacacacacacacacacacacacacrcacacacacacaatggaataccactaagccatagcaagaaacaaaataatggcattcattgcaacctggatggaatttgagactgttattctaagtgaagtaactcagaaatggaaaaccaaacatcacatattctcactcacatgcggcagctaagctatgaggatgcaaagacataagaatgatacattgaactgtggggaaaggttgggggatggcgagggataaaatactacactttggataaagtatacgctgctcaagcaatgggtgtaccaaaatctcaaaaaccaatactaaccaaacacaactggttccccaaaattctactgaaataaaaaaaattaaaattaaaattttgtaaaaagaataaactgcctgaacatcagatggtgcctaagactcatctttgactcgaatcagactgaaggtgaaagatgtccctggggaacctggttaaataagactactggagacccccaacatgcagacatataaaataacttgaattaacccccacaacactacgctaagtaaaagcagtcaagcacagaagactacatcttataag

SEQ ID NO: 579648 - DNA, 652 bp, Homo sapiens
tggaaccagcccaagtgcccatcaatcaacaataggataaagaaaatgtgatacacacacacacacacacacacacacacgcrcacacacacaatggaataccactaagccatagcaagaaacaaaataatggcattcattgcaacctggatggaatttgagactgttattctaagtgaagtaactcagaaatggaaaaccaaacatcacatattctcactcacatgcggcagctaagctatgaggatgcaaagacataagaatgatacattgaactgtggggaaaggttgggggatggcgagggataaaatactacactttggataaagtatacgctgctcaagcaatgggtgtaccaaaatctcaaaaaccaatactaaccaaacacaactggttccccaaaattctactgaaataaaaaaaattaaaattaaaattttgtaaaaagaataaactgcctgaacatcagatggtgcctaagactcatctttgactcgaatcagactgaaggtgaaagatgtccctggggaacctggttaaataagactactggagacccccaacatgcagacatataaaataacttgaattaacccccacaacactacgctaagtaaaagcagtcaagcacagaagactacatcttataag

SEQ ID NO: 579649 - DNA, 632 bp, Homo sapiens
attctactgaaataaaaaaaattaaaattaaaattttgtaaaaagaataaactgcctgaacatcagatggtgcctaagactcatctttgactcgaatcagactgaaggtgaaagatgtccctggggaacctggttaaataagactactggagacccccaacatgcagacatataaaataacttgaattaacccccacaacaytacgctaagtaaaagcagtcaagcacagaagactacatcttataagattacacttacatgaattttctagaaaaggcagaactacagagaaatgcaaagtagattgctgtttgcctgggattgtggttgggggcagggattgactgcaggtaggcatgaaggaactttatatgatgatggaagtgttttaaaagctggattgtggtgatggtcgcataactataaatttactaaaaattttctaaccatacacttataatcagtgaattgcacagtatataaaatatacttcaacaaagctcttaaaagtgaaaaaagaggtcataataaaacactattataaatatgaacataacagtaggatgtttgtactgtgctaataataagacaaagtgaacctgccatactgactttctatttccaaatattc

SEQ ID NO: 579650 - DNA, 538 bp, Homo sapiens
accctactcaagtagttggtctcattcctatacttcaaacattcctatacttcaaacaccaaaggctgaaaaatgagcaaccgtaaaacaaaagaggaaggaaaaaaagaggatcattcataaccacaatcaagcatgaataattaccaattttgaatgtaaagatcattcaaataaatataactgatggatcctccacatagggtgcaagtcaaagtaaacagacagtccactttagaaagtgtctagcgaattgatttaacaagtttaatgcgagcatcagtgtggggctattactgatcgtaagctttactgatgttatttgttcgcttggaaaaataccgctctttggaatgagcacattaaggctaaaattgcagagaaaaccctattacaactttattgctggcaaattggaaccaaaccttgtctgtatatcaattacttagagttaccacagagataaatcctctttttccttctttttttttgtatgtgtaggctcartcttgaagacagcaatgagaaactccttatt

SEQ ID NO: 579651 - DNA, 579 bp, Homo sapiens
agaggtctagattcattcttctgcatatggatatccagtttgcccaccaccacttattgaagagatggttttttactcaatgtatgttcttggcacctttgtggaagataagttcactgtagatgtatagatttgtttctgggttctctatgctctttcattggtctatgtttctatttctagrccagtaccatgctgttttgattacagtggcctgtagcataacgtgggctcggtaatgtgcttcttccaggtttattcttttcactcaggatagctttggctattctgggtattttttggttccatataaattcttggattgctttttctatttctgtgaagaatgttgttggtattttgataggaattgcattgaatctgtagattgctttggatagtgtggatattttaacaatattgattcttccaatccatgaacatggaatatctttccattttttgtgtcttcatcaatgtctttattcaacgttttatagtttttattgtagagacctttttcttctttggttaattcctaggtattttattttatttgtagctattgtaaatgggatt

SEQ ID NO: 579652 - DNA, 513 bp, Homo sapiens
gccgtgttggaaaatgattctcattactttcatattgtgtttaaacagcacctctatgcttcctgaaatacttctatttgttattattcaatatatccttcataattcaaacacaaattataacattaaagattaaaggatgatattttgacatttctttattttgccatactcctgttaatgtcattcgcaggatgtcatctgtctttcacctagtttttccaagaaggagtctcrctctgtcacccagcctggagtgcagtggtgggatctcagctcactgcaagctccgcctcccgggttcaagcgattctcctgccacagcctcccgagtaattgggattacaggcacgcattaccaagtcctgctaattttttttttttttttaatttttagtagagatggggtttcaccatgttggccaggctggtctcgaactcctgacctcaagtaatccacccacctcggcctcccaaagtgccgggattaccggcatgagccaccatgcccgg

SEQ ID NO: 579653 - DNA, 446 bp, Homo sapiens
ataatttattggcttcaaacactcacaatattttaytattctctaagtcagaactatgaaaatcaaggtggactaaaagtgtcagcagggatgcattccttctaggggctctaggagaatctgttttcttgccttttccagcttctagaggagacttgcattccttgggctcatggcctcttcctctaccttcaaaagccagcagcatatcattttcaaatctctctcctactctgagatttccaccttcatcttattaggacacttgtgattatactcagcctaccttgattacccaagataatctttccatcttaaaatccttggcttactcacacctgcaaaatctcttttttacagaaggtaacattttacaaactttcaggcattaagatgtgggcatctttcaggggtctcattttggttatcacaacttccaaatacct

SEQ ID NO: 579654 - DNA, 446 bp, Homo sapiens
ataatttattggcttcaaacactcacaatattttactattctctaagtcagaactatgaaaatcaaggtggactaaaagtgtcagcagggatgcattccttctaggggctctaggagaatctgttttcttgccttttccagcttctagaggagacttgcattccttgggctcatggcctcttcctctaccttcaaaagccagcagcatatcattttcaaatctctctcctactctgagatttccaccttcatcttattaggacacttgtgattatactcagcctaccttgattacccaagataatctttccatcttaaaatccttggcttactcacacctgcaaaatctyttttttacagaaggtaacattttacaaactttcaggcattaagatgtgggcatctttcaggggtctcattttggttatcacaacttccaaatacct

SEQ ID NO: 579655 - DNA, 598 bp, Homo sapiens
aatagaaataaagggaatactayataatgacaaacatgaagaaatttataaagcaattgtggtatcattctaggagtaaaatcctggaaactattttatctgaaacagaaaccagactcaaatgccttccattgccatttgttcaacattgtcttgaaggttctactaaatatatcaaagtgggaaattaaataattactataaatattggggaaaagagtgaaaatatttatttttgttgattacatgattatatatccaaaagcctctataaaactcaaaagccggctgggtggggtggctcatgcctgtaatccaagcacactggtaggccgaggtgggcagataattttaggtcaggagtttgagatcagcctggccaacatggtgaaatgccatctgtactaaaaatacaaaaaaaaaaaattagctaggcatggtggcacacacctgtaatcccagctacttgggaggctgaggcaggagaatcacttgaacccaggaaacagaggtttgcagtgagccgagatcacaccactgcactccagcctgggtgacagagtcagactctgtttcaaaaaaaaaagaaaaaaaaaaa

SEQ ID NO: 579656 - DNA, 598 bp, Homo sapiens
aatagaaataaagggaatactatataatgacaaacatraagaaatttataaagcaattgtggtatcattctaggagtaaaatcctggaaactattttatctgaaacagaaaccagactcaaatgccttccattgccatttgttcaacattgtcttgaaggttctactaaatatatcaaagtgggaaattaaataattactataaatattggggaaaagagtgaaaatatttatttttgttgattacatgattatatatccaaaagcctctataaaactcaaaagccggctgggtggggtggctcatgcctgtaatccaagcacactggtaggccgaggtgggcagataattttaggtcaggagtttgagatcagcctggccaacatggtgaaatgccatctgtactaaaaatacaaaaaaaaaaaattagctaggcatggtggcacacacctgtaatcccagctacttgggaggctgaggcaggagaatcacttgaacccaggaaacagaggtttgcagtgagccgagatcacaccactgcactccagcctgggtgacagagtcagactctgtttcaaaaaaaaaagaaaaaaaaaaa

SEQ ID NO: 579657 - DNA, 568 bp, Homo sapiens
atatatgtagaatatatatagcatatttatatattatatatatatgtatatatatataatgtgctaaatgctggactgtttttaaactaatgagacataatccttgctctgaagaagttcacagtctgctggagaagactgtgaaattctgcatgatgaaattcacaattaatcatattttatttttgctacagatcctcctcagctttacaaaaaaacccaaagtaagttgaaaatattgtaagtagaaactgcatttaatacacttaacctaccaaacagcatagcttagcctagcctaccttaaatgtgctcagaacacttacattagcgtatasttgggcaaaatcatctggtaacacagtacattgtagaatattagttacttacccttgtggttttgtggctgactgggagttgtggcttgctaccactgctcagcatcatgagagagttatctatcatagggtatattgctagcccaggaaaatattcaaaatctgatgtacggtttctactgaacatacactgctttcacaccattgcaaagtcaaaaactcgtaagttg

SEQ ID NO: 579658 - DNA, 561 bp, Homo sapiens
ttctcccactctgtgggttgtctgtttactctgctgattatttcttttgctgtgcagaagctttttagtttaattaagtcccatctatttatctctgtttttgttgcatttgtttttgggttcttggtcatgaagtctttgcttaagccaatgtctagaaaggtttttccartgttatctcctagaattgttatggtttcaggtcttagaattaagtctttaatccatcttgagttgatttttgtttaaggggagagatgaggatccagtttcattcttttacgtggcttgccaattatcccagcaccatttgttaaatagggtgtcctttatgcactttatatttttgtttgctttgtcaaagactggttgacagtaaacatttggctttatttatgggttctgggttctggattctctattcagttccattggtccatatgttattataccagtaccatgctgttttggcaactgtggccttatagtatagtttgaagttcagtaatgtaatgcctctggatttgttctttttgcttagtcttgttttggttatgtggg

SEQ ID NO: 579659 - DNA, 582 bp, Homo sapiens
ccaatcacctacaaccagatccttcccccaacacctggggataacaattcaagatgagatttgggcagggacaaagtcaaaccatatcattctgcccctggtcccactcaaatctcacttcctcacatttcaaaaccaatcgtgccttttgaacagtctcccaaaatcttcactcattccagcattatctcaaaagttcaagttcaaagtgtcatctgagacaaactttcttctgcctatgagcctgtaaaatcaaaaacaagttagttacatccaagataggcaaggggtacagacattgggtaactgcttttactccactgagagaaactggcaaaaacaaagaggcaacagaccccatgcatgttcgaagaccagcgaggctgttgttaaatcttaaagccctggccggacatggtcgttcatgcctgcaatcccagcactttgggaggctgaggtgggtggatcacctgaggtcaggagttmaagaccagcctggacaacatggtgaaaccctctctctactaaaaatataaaaactagccaggcatggtggtggacgcctgtaatcccagctactca

SEQ ID NO: 579660 - DNA, 225 bp, Homo sapiens
tagacactattaggaacatttgtgattcatggaagaaggccaaagtatcaacattagtaggagtttagaacaagttgcttccaaccctcatggatgactttgaggggttcaagacttcagaggagaaagtaattgcaratgtagtggaaacagcaagagaactaggattaaaagtggagcctaaagttgtcactgaattgctgcaatcttgtaatataactaaca

SEQ ID NO: 579661 - DNA, 225 bp, Homo sapiens
tagacactattaggaacatttgtgattcatggaagaaggccaaagtatcaacattagtaggagtttagaacaagttgcttccaaccctcatggatgactttgaggggttcaagacttcagaggagaaagtaattgcaaatgtartggaaacagcaagagaactaggattaaaagtggagcctaaagttgtcactgaattgctgcaatcttgtaatataactaaca

SEQ ID NO: 579662 - DNA, 225 bp, Homo sapiens
tagacactattaggaacatttgtgattcatggaagaaggccaaagtatcaacattagtaggagtttagaacaagttgcttccaaccctcatggatgactttgaggggttcaagacttcagaggagaaagtaattgcaaatgtagtggaaayagcaagagaactaggattaaaagtggagcctaaagttgtcactgaattgctgcaatcttgtaatataactaaca

SEQ ID NO: 579663 - DNA, 578 bp, Homo sapiens
ttcaggcaagggaaggcaaaagccaaagattgaagggcaggaaaaggcaaggagaarggccacttctgtttttgtttgtttgttttctctgcttctaatgacacctacatcagagatcatatttctccctggtcccatttctcaccagcagtatttctactgtgaaatggctcattactggatctctggaactttagtttctcccattgaccttactatcatgaggaaaggattagttctctgctagtgctaatactttcatcactattccttgctttgtttcttagttattttcaccctgatgttacctgctccacataataaaatcagattgtttgttaagtcctagactagtttctgccttgctggctatatcctcaatgaagagtaaatatttacctcatgggagaaatagacctaatggatttaggagtttagcagtttacagggcacaaattaaatctcaataaatatttactctgagtaaaaaagtacaaaatagaagtacaattcttttttattgtcattgatttcagagcaaaatgaatcaacagttgacaaattaaggattaacttag

SEQ ID NO: 579664 - DNA, 225 bp, Homo sapiens
tagacactattaggaacatttgtgattcatggaagaaggccaaagtatcaacattagtaggagtttagaacaagttgcttccaaccctcatggatgactttgaggggttcaagacttcagaggagaaagtaattgcaaatgtagtggaaacagcaagagaactaggattaaaagtggagcctaaagwtgtcactgaattgctgcaatcttgtaatataactaaca

SEQ ID NO: 579665 - DNA, 401 bp, Homo sapiens
ttcgttttactgactcactattatatattttgttaagtcagaaactcatattcaatcaaaggaaataaaagttccccctaatttctaggaatataaaaaaataggtacacatagcttagataatattttctatatttgttcaagtaaatcagtttagtaattgtttgamatacttccaattgatgagtccaattttagaaggaattttagttggaaatgttattctctttatgaagatgtaaatggctgtgtttactggccaatatttacatacacatacagtcaatgaatgttaatttgcacacagtggcatatataattcaaagttcattttattagttaatttagatatggttcaataagagtttcaaactgagggcatagagtcatataacattctc

SEQ ID NO: 579666 - DNA, 401 bp, Homo sapiens
ttcgttttactgactcactattatatattttgttaagtcagaaactcatattcaatcaaaggaaataaaagttccccctaatttctaggaatataaaaaaataggtacacatagcttagataatattttctatatttgttcaagtaaatcagtttagtaattgtttgacatacttccaattgatgagtccaattttagaaggaattttagttggaaatgttattctctttatgaagatgtaaatggctstgtttactggccaatatttacatacacatacagtcaatgaatgttaatttgcacacagtggcatatataattcaaagttcattttattagttaatttagatatggttcaataagagtttcaaactgagggcatagagtcatataacattctc

SEQ ID NO: 579667 - DNA, 320 bp, Homo sapiens
gctcagatgattaacattacttagtaataaagctttttaaaattaaggtaagtacattatwtttttaaacataatactattacacactacagtacaatgtaaacgtaacctttatatgcattgagaaaccaaaaatttttgttgacttgttttattgtgatttttgctttattgtgatggtctggaacaaaacccacagtatcttcaagtatgtctcgaatatgtaaagaatttttaaaaatttttagcatattttacaaaacttattgccttataagtactcactcaatattttatttaaggagtacatcttgattttt

SEQ ID NO: 579668 - DNA, 320 bp, Homo sapiens
gctcagatgattaacattacttagtaataaagctttttaaaattaaggtaagtacattatatktttaaacataatactattacacactacagtacaatgtaaacgtaacctttatatgcattgagaaaccaaaaatttttgttgacttgttttattgtgatttttgctttattgtgatggtctggaacaaaacccacagtatcttcaagtatgtctcgaatatgtaaagaatttttaaaaatttttagcatattttacaaaacttattgccttataagtactcactcaatattttatttaaggagtacatcttgattttt

SEQ ID NO: 579669 - DNA, 320 bp, Homo sapiens
gctcagatgattaacattacttagtaataaagctttttaaaattaaggtaagtacattatatttttaaacataatactattacacactacagtacaatgtaaacrtaacctttatatgcattgagaaaccaaaaatttttgttgacttgttttattgtgatttttgctttattgtgatggtctggaacaaaacccacagtatcttcaagtatgtctcgaatatgtaaagaatttttaaaaatttttagcatattttacaaaacttattgccttataagtactcactcaatattttatttaaggagtacatcttgattttt

SEQ ID NO: 579670 - DNA, 320 bp, Homo sapiens
gctcagatgattaacattacttagtaataaagctttttaaaattaaggtaagtacattatatttttaaacataatactattacacactacagtacaatgtaaacgtaacytttatatgcattgagaaaccaaaaatttttgttgacttgttttattgtgatttttgctttattgtgatggtctggaacaaaacccacagtatcttcaagtatgtctcgaatatgtaaagaatttttaaaaatttttagcatattttacaaaacttattgccttataagtactcactcaatattttatttaaggagtacatcttgattttt

SEQ ID NO: 579671 - DNA, 215 bp, Homo sapiens
ttgttttattgtgatttttgctttattgtgatggtctggaacaaaacccacagtatcttcaagtatgtctcgaatatgtaragaatttttaaaaatttttagcatattttacaaaacttattgccttataagtactcactcaatattttatttaaggagtacatcttgatttttaagggtttcttagctttattgattatgtattaaaacctcag

SEQ ID NO: 579672 - DNA, 215 bp, Homo sapiens
ttgttttattgtgatttttgctttattgtgatggtctggaacaaaacccacagtatcttcaagtatgtctcgaatatgtaaagaatttttaaaaatttttagcatattttacaaaacttattgccttataagtactcactcaatattttatttaaggagtacatcttgatttttaagggtttcttagctttattgrttatgtattaaaacctcag

SEQ ID NO: 579673 - DNA, 465 bp, Homo sapiens
gtttattttttatattttggtttgcttttggttcttttagttctttagtkagctttttttaaaaaataaaacactttacaaatattctctctcaaatatatgtacgaactaaatgtggtttgctttcagctacagttgacccttgaacacatgtgtggactacgcaggtccacttatatgcatattttttttcaaccaaactcaataagaaatgcggtgttttctgtagggttgccttttcctataaacaggttccacagggccaactgggaaacttgagtatatgtggattttggtacatgaaggtgcccctggaattgatccccacctatatggagagataactatatgttgtgtttgctagattcaccagccagagataatatactattatggaatgctttagatttatacaattaactaatatatttggcacatttttatttatggttcacatcaagttac

SEQ ID NO: 579674 - DNA, 366 bp, Homo sapiens
  misc_feature 329: n = A,T,C or G
cttcacttgcttcaggccatctggatgtatacctgcaggtcacaggggatatgatggcttagcttgggctcagaggcctgacaggcatggtttactgatagctctgccagacaacrtgcactgggccaccattcagccagtggatggctatcttttgactgagactggacatgggcattctacccaatgggccaaactaaatgcagtggtgatggccatgcaggctacctctatcgcatatcctgccatattttcagtgacttatgggccattgccaaaagcctagtcatctgatcaggacaatggcaatggaaggattggactgttanaggatctccatgtgaggacaaggactaagaaaaacag

SEQ ID NO: 579675 - DNA, 366 bp, Homo sapiens
  misc_feature 329: n = A,T,C or G
cttcacttgcttcaggccatctggatgtatacctgcaggtcacaggggatatgatggcttagcttgggctcagaggcctgacaggcatggtttactgatagctctgccagacaacgtgcactgggccaccattcagccagtggatggctatcttttgactgagactggacatgggcattctacccaatgggccaaactaaatgcagtggtgatggccatgcaggctacctctatcgcatatcytgccatattttcagtgacttatgggccattgccaaaagcctagtcatctgatcaggacaatggcaatggaaggattggactgttanaggatctccatgtgaggacaaggactaagaaaaacag

SEQ ID NO: 579676 - DNA, 366 bp, Homo sapiens
  misc_feature 329: n = A,T,C or G
cttcacttgcttcaggccatctggatgtatacctgcaggtcacaggggatatgatggcttagcttgggctcagaggcctgacaggcatggtttactgatagctctgccagacaacgtgcactgggccaccattcagccagtggatggctatcttttgactgagactggacatgggcattctacccaatgggccaaactaaatgcagtggtgatggccatgcaggctacctctatcgcatatcctgcyatattttcagtgacttatgggccattgccaaaagcctagtcatctgatcaggacaatggcaatggaaggattggactgttanaggatctccatgtgaggacaaggactaagaaaaacag

SEQ ID NO: 579677 - DNA, 528 bp, Homo sapiens
acactttaaaatgtggcagccagactacttattaagagcaacatagtaacctaaatacgttttataatttacttcctttcatcacactaaaggtatcttgatttacaatcttgatttttaaacccaacatataaatccttaatttatgaacacctgatactcaccaaggaaaccctaaaagacagaagagccaaaatggccatcaagacagagccrggaagatcctccactgaaagagctgactatcaagaaaaccagcacactctgagcagatcttcaaaaggaaagcattgagagtggaaggagagaggatggagacactgggctaaaggatcagaaagctgggaacccagcatggggttgtggagcaccaggactcattcctggccctgagaggtgagggaaggggtgagttaaatatgatggagtggcttactctttccaaagagctccagaatcctagctttaggagacttcacaatccccatggacattcgagctagcaaggagagttgcttggagaagtag

SEQ ID NO: 579678 - DNA, 483 bp, Homo sapiens
aaccactgaattaacacttaacaataaatctgatgtgagagaaagagagaaaacgagagccagaaagacagagacagacagagaaaaagaaatccttaaaacaaccatagggaaaaaaaaaagacactttaaaatgtggcagccagactacttattaagagcaacatagtaacctaaatacgttttataatttacttcctttcatcacactaaaggtatcttgatttacaatcttgatttttaaacccaacatataaatccttaatttatgaacacctgatactcaccaaggaaaccctaaaagacagaagagccaaaatggccatcaagacagagccgggaagatcctccactgaaagagctgactatcaagaaaaccagcacactctgagcagatcttcaaaaggaaagcattgagagtggaaggagagaggatggagacactgggctaaaggatyagaaagctgggaacccagcatgggg

SEQ ID NO: 579679 - DNA, 568 bp, Homo sapiens
cttaccgcatgcctctgagtgactttggtcattattgattgtcagacctgcacagagaagggctgtcttgcccgtgggacatgccagtgtgattagatgctctcctgttgactggcctctcctggggtccccgccagtccataccctsttggagggcagctttggatgcccaacgagggtgcttctcagtggccatcaccatagcagcaaacactactctgctctcattgcagagcttctgcaaatatacctccaatagtgcacacctacttacagtcccccctcactgcattgccggcatgcactgtgcacagtctttactcactgttttgtcagtgtgcacatatgcagaggcctcactgcaactgcatgggccccactggtgtgtgtgtgtaaaccctgacaacctgccactgccagggtgagtatgagtataacatgccacactgcacccctgctgcagctggtgcacatgtgcgtaaacatggacccctcagcaaatgctccaattaagcacttttgttggcatcccccattggactattgttgccagtggactgagaatgct

SEQ ID NO: 579680 - DNA, 568 bp, Homo sapiens
cttaccgcatgcctctgagtgactttggtcattattgattgtcagacctgcacagagaagggctgtcttgcccgtgggacatgccagtgtgattagatgctctcctgttgactggcctctcctggggtccccgccagtccataccctgttggagggcagctttggatgyccaacgagggtgcttctcagtggccatcaccatagcagcaaacactactctgctctcattgcagagcttctgcaaatatacctccaatagtgcacacctacttacagtcccccctcactgcattgccggcatgcactgtgcacagtctttactcactgttttgtcagtgtgcacatatgcagaggcctcactgcaactgcatgggccccactggtgtgtgtgtgtaaaccctgacaacctgccactgccagggtgagtatgagtataacatgccacactgcacccctgctgcagctggtgcacatgtgcgtaaacatggacccctcagcaaatgctccaattaagcacttttgttggcatcccccattggactattgttgccagtggactgagaatgct

SEQ ID NO: 579681 - DNA, 568 bp, Homo sapiens
cttaccgcatgcctctgagtgactttggtcattattgattgtcagacctgcacagagaagggctgtcttgcccgtgggacatgccagtgtgattagatgctctcctgttgactggcctctcctggggtccccgccagtccataccctgttggagggcagctttggatgcccaacgagggtgcttctcagtggccatcaccatagcagcaracactactctgctctcattgcagagcttctgcaaatatacctccaatagtgcacacctacttacagtcccccctcactgcattgccggcatgcactgtgcacagtctttactcactgttttgtcagtgtgcacatatgcagaggcctcactgcaactgcatgggccccactggtgtgtgtgtgtaaaccctgacaacctgccactgccagggtgagtatgagtataacatgccacactgcacccctgctgcagctggtgcacatgtgcgtaaacatggacccctcagcaaatgctccaattaagcacttttgttggcatcccccattggactattgttgccagtggactgagaatgct

SEQ ID NO: 579682 - DNA, 568 bp, Homo sapiens
cttaccgcatgcctctgagtgactttggtcattattgattgtcagacctgcacagagaagggctgtcttgcccgtgggacatgccagtgtgattagatgctctcctgttgactggcctctcctggggtccccgccagtccataccctgttggagggcagctttggatgcccaacgagggtgcttctcagtggccatcaccatagcagcaaacactactctgctctcattgcagagcttctgcaaatatacctccaatagtgcacacctacttacagtcccccctcactgcattgccggcatgcactgtgcacagtctttactcactgtttygtcagtgtgcacatatgcagaggcctcactgcaactgcatgggccccactggtgtgtgtgtgtaaaccctgacaacctgccactgccagggtgagtatgagtataacatgccacactgcacccctgctgcagctggtgcacatgtgcgtaaacatggacccctcagcaaatgctccaattaagcacttttgttggcatcccccattggactattgttgccagtggactgagaatgct

SEQ ID NO: 579683 - DNA, 420 bp, Homo sapiens
gttcccctgtgagtttgatgtagtttccactttatgtgacctgccccttgtcgttaactgcctttaatatttttttcttttgcattcaccttcaagaatctgattactttgtgtctctgcaatggttgtcttacatagcatcttacatgggttatctgaattttctaaatgtatatgtcaatctctctagtgaaattggggaaattttttatagaatcccttatttctccaaggctttttcttttctttccyttttccttttttttttttttttttttttttttttgagatggagtcttgctctgtagcccaagctggagtgcagtggcatgatctcagctcaatgcaagctccacctcccaggttcctaccaatctcctgcctcagcttttgagtagctggggctacaggcacctgcca

SEQ ID NO: 579684 - DNA, 420 bp, Homo sapiens
gttcccctgtgagtttgatgtagtttccactttatgtgacctgccccttgtcgttaactgcctttaatatttttttcttttgcattcaccttcaagaatctgattactttgtgtctctgcaatggttgtcttacatagcatcttacatgggttatctgaattttctaaatgtatatgtcaatctctctagtgaaattggggaaattttttatagaatcccttatttctccaaggctttttcttttctttcccttttcyttttttttttttttttttttttttttttgagatggagtcttgctctgtagcccaagctggagtgcagtggcatgatctcagctcaatgcaagctccacctcccaggttcctaccaatctcctgcctcagcttttgagtagctggggctacaggcacctgcca

SEQ ID NO: 579685 - DNA, 528 bp, Homo sapiens
taatatatatgtttgaagaaaaatggctgcttaataatttatttttatatagctaaggtttaattgcttctggaatacagtggtcagtgattttagtaaaaaaaaaaaaggtaattatagataacagargctgtaattttattcatgtgctatgatatttagaggtaaccaagaatatttcagtttttttcagtgatcacattacttctagccactcttataattacaatttagctcttttgccatgtgtataaatatgtaggcctttcatgtatatttttatacatgtaccaattcatacactctaataaaaatactatatgatgtaatctgaattcattttccataaaataaggtaaacagtaactaaactaaaaatcaaaaatattgtaggcctatactatttccaagactataatttgtcaattaaaccaaacacattcatagatataatgtggggcaaaataataaattaataatcttctggtttcattgtaaattctgctactactattagtagaaatgtgc

SEQ ID NO: 579686 - DNA, 396 bp, Homo sapiens
ttgcattctctaacacatattttatttgatccaaacaatacattagtccaactaccaaacatacctcttggatcctctgtagctataacattttcaacagtcatatttacggaatccgtctccctctgttatgtttttattrttatccaaatagaggagatagatataaatgaactcactctggtcagccagggaccacacagtggcttaaaatatcttaatccaggtatctgcagactaaccctaacctaacagtgagttgctacctttgtttctttttctctaagcattaaaatacttctgtcatagctgcttgcttcttgatcataggatctcagccatggttcatatttgaataacacagaatgtcggccacagaactaaggactggacatt

SEQ ID NO: 579687 - DNA, 539 bp, Homo sapiens
gtctgaaatagctgatgatccagcttaagactattcaatatccatgcacctgccttttctaaagcttaaacttcaaaagagyaacagtaacaagtacatgatcctgtcaaatataattcaaatatatgttgtacaaattaaaatgcagtggtcctatccaaaataggtatccatgatattcactcctcttcggattcagtctcaactatgtcttaatatcctgaaataagataataaattatgaagttattcaaaccagcctaccctaaaaaataatgggaaaaatggaagataaaataagacaaacaattatatacatgacaatgcagaagagaagaaaacacaagaatgtattacatacttaattttataactgatcatggaactgtggatggtatttgtaccattctttttatattattcattccacacttctctatagtatcctaaattatccaagtttccacagcaagagcccactcttcatgaacaatgcccttagttgtcttgtcaaattggagttgttttaatcttccatt

SEQ ID NO: 579688 - DNA, 539 bp, Homo sapiens
gtctgaaatagctgatgatccagcttaagactattcaatatccatgcacctgccttttctaaagcttaaacttcaaaagagcaacagtaacaagtacatgatcctgtcaaatataattcaaatatatgttgtacaaattaaaatgcagtggtcctatccaaaataggtatccatgatattcactcctcttcggattcagtctcaactatgtcttaatatcctgaaataagataataaattatgaagttattcaaaccagcctaccctaaaaaataatgggaaaaatggaagataaaataagacaaacaattatatacatgacaatgcagaagagaagaaaacmcaagaatgtattacatacttaattttataactgatcatggaactgtggatggtatttgtaccattctttttatattattcattccacacttctctatagtatcctaaattatccaagtttccacagcaagagcccactcttcatgaacaatgcccttagttgtcttgtcaaattggagttgttttaatcttccatt

SEQ ID NO: 579689 - DNA, 539 bp, Homo sapiens
gtctgaaatagctgatgatccagcttaagactattcaatatccatgcacctgccttttctaaagcttaaacttcaaaagagcaacagtaacaagtacatgatcctgtcaaatataattcaaatatatgttgtacaaattaaaatgcagtggtcctatccaaaataggtatccatgatattcactcctcttcggattcagtctcaactatgtcttaatatcctgaaataagataataaattatgaagttattcaaaccagcctaccctaaaaaataatgggaaaaatggaagataaaataagacaaacaattatatacatgacaatgcagaagagaagaaaacacaagaatgtattacatacttaattttataactgatcatggaactgtggatggtatttgtaccattctttttatattattcattccacacttctctatagtatcctaaattatccaagtttccacagcaagagcccactcttcatgaacartgcccttagttgtcttgtcaaattggagttgttttaatcttccatt

SEQ ID NO: 579690 - DNA, 531 bp, Homo sapiens
taccctaaaaaataatgggaaaaatggaagataaaataagacaaacaattatatacatgacaatgcagaagagaagaaaacacaagaatgtattacatacttaattttataactgatcatggaactgtggatggtatttgtaccattctttttatattattcattccacacttctctatagtatcctaaattatccaagtttccacagcaagagcccactcttcatgaacaatgcccttagttgtcttgtcaaattggagttgttttaatcttccattaatgtttaccacttgacagaaaatccaaaaggcatttgaggagtccaactccaggcagaaaccctatktgtaatctttcaggcctaaccataggccattacaatggctttacctggcaggcctcatgagagaaagatactctccctataccagaattggcaaacagccagtgcattaaaatgtctaatgggagctgcagtctaggactcattccccactagccaaccatcctcctgtgcatgtctgccattca

SEQ ID NO: 579691 - DNA, 531 bp, Homo sapiens
taccctaaaaaataatgggaaaaatggaagataaaataagacaaacaattatatacatgacaatgcagaagagaagaaaacacaagaatgtattacatacttaattttataactgatcatggaactgtggatggtatttgtaccattctttttatattattcattccacacttctctatagtatcctaaattatccaagtttccacagcaagagcccactcttcatgaacaatgcccttagttgtcttgtcaaattggagttgttttaatcttccattaatgtttaccacttgacagaaaatccaaaaggcatttgaggagtccaactccaggcagaaaccctatttgtaatctttcaggcctaaccataggccattacaatggctttacctggcaggcctcatgagagaaagatactctccctataccagaattggcaaacagccagtgcattamaatgtctaatgggagctgcagtctaggactcattccccactagccaaccatcctcctgtgcatgtctgccattca

SEQ ID NO: 579692 - DNA, 509 bp, Homo sapiens
ctgcctacagtcttgtttatctattgtaatctgtttcttgtagtccctattttagatctcattaatgtcttgtcacttccattagaataaattataaacactttggatggcctgaagacatttgtaatttatcctaaactcatctctactctcatcgcttgacatctccctcttccacccacacatatatatttaagcccacataattactgcaattaccccaaattctgtacttctcaccagtgtcttgcaaaacccactccatgtaactaataagacttttcatttaactctccagctgtacttgatattctagtttcaaactctattttctgtgtgaaggctgtactgatatcacaattttgtttcttcagtgtcagcactggcagcctgtggcctatggttttggtacagcctgmaaggtaataatggtttttagagatttaaatgattgaaacaattttttaaaataacattttgtagcatataacaattgcataaagtaaaaa

SEQ ID NO: 579693 - DNA, 543 bp, Homo sapiens
atgattgtcaaagcctaacatacttaaaatctgaccctttgtagaaaaagctaacatttgatctaaagttttctgtaaagatacatctacattatgtttattgtaatttatatttatttatctgcctactggttgcagttttgaaaaaccataatcttccagaagacagaaactatgatatttttaattagacctcaagcaaaattattttaaaatgtggtctcaatttttaagaaagtggggaagaatgcttttttttcttttgttaaacttctttgcttccagtccaagaagtgactgtcatttatttttatcttgttgcttcctttctcatattagcttgataaaaagtaatgaaataatgttcaggtttcttagtagagtcatgttgtaaacctaagcttttttttcckagccactctcaaaaaatggaaagcctctgctttatgagtcacctaattaatgacattgaattatccagtaagtggactcttcaggttaattaaatatcttcattaactttttcactgcttttaaaaacaa

SEQ ID NO: 579694 - DNA, 540 bp, Homo sapiens
tttttttttttttttttttttttgaaacaatgtctcactccttcccccaatctggagtgcaggggtgcgatcacagctcactgcagcctccacctccagggctcaagtaatccttcctcccacttcarccccccaagtagctgaaactacaggtatgtaccaccatgcccagctaatttttttgttttgtacagatggggtctccctatgttgcccaggctggtctcaaactcctgggcgcatgcgatcctcctaccttggtctcctaaagtgctgggattacaggtgtgagccactgtgaagggccccagtgagccttgaattcttcttctcgtccctttctccctacactcatgaaagtgctacaatcacctcccttttttcagatgagggaataatgaggctcacagagaaggcagtgacctggccaaggtccaggtttcctcttgtggagaagatggaatctgagtcaggatctgtaactttagagcctttctcatacagagacttggattaaccattgcccagagtataaagtca

SEQ ID NO: 579695 - DNA, 363 bp, Homo sapiens
tgttgtaacaagacctccccctgaccctgatgcatggcagttgaagaagtctttccgtgtaagcaaaaagactttgaagaaaaggtggagatatgcgttgtataaacattcttttgctctggaaccacgtagagacttgggagccagttgggtggagcattcgttggatgagggtgctcgggttaggaatatcaaggtgtttctccagataatccaatcatctaattaagattccagttatgctcatctgttttaaaattccgtttgggtaaattcttttagtcagactgagaatggcaaagcctcarccccaatttccagggagggtggagagcctcaggtggagttgatcaccaatagcct

SEQ ID NO: 579696 - DNA, 388 bp, Homo sapiens
ggtcaagagatcaagaccatcctggccaacatggtgaaacctcgtctatattaaaatacaaaaaaaaaaaatagccaggcgtggtggcatgtgcctgtagtcccagctactcaggaggctgaggcaggagaatagcttgaacctgagaagtggaggttgcagtgagccgagattgtgccactgcatgrgagtctgtcgacagggcaagactccatctaaaaaaaaaaacaaaaaacaaaacagaatcgcattctcaaacattaaggcatgctaggttttctgggactccagctggttatatattatggctcatatttttaccttgctgggaaaattacatcaaggaaaattcagatctccaatagtcattatttgaaaaacctgcaat

SEQ ID NO: 579697 - DNA, 558 bp, Homo sapiens
tggttgtcattgctgtccagccaaagatcactgggaacacacctgtagtcaagcaagttggggttattactctttgctgcgggggagaatgcatggcatggggaaccgtggggtgtttcagtaagagggtgttagaaagaacttattatgggactcaggcttgtgctagggggtttgcagaagggtttaaggaagcagggtaattctgtgcgtgggtatcttaataactctcatccggaaggagggaagactgctgcaaggctaaagccagtgaagaactggtaaagaagcaccagtcattcctattagccaggacaggaggctgctcggtcattttgtggtctggacaatgtacctgttttgcctgtgttgagacatgattatagagtgatctcatttttttcttcatcattggcactgagtgtccttgtctgatgttggtgttctatgaaatcctttatgttcaataggaaaacactgaggcctggctatgagtgccaggccagctcctrtctgtcaggaaacacttttctctttcttattgtttcctcctttttt

SEQ ID NO: 579698 - DNA, 506 bp, Homo sapiens
cagagtaatcagggtgggcctctttatggaggcaatgtttaagataaagcctgactgaccagaaggacttgcaaagatcaggggaaacaactagttctccctagttgggaacaagcttggtgtatctagaaagctgaatgaaggttggtgtggctgttgctcctgagtgaggggaaagtaaaaatagtttagatagatggacagaggtcctaacatgtgaggctctgtaaatcagaacagaggatttggatttcattctaattgtaacgggaagtgataggaaggttttcatttggaaggaacaacattatctttagttttcttttcttcttttttttttaaattatactttaagttctagggtgcatgttggtttgctgcacccatcaactcatcatttttacattaggtatttctcctaatgttattccaccctcagccccccacccyccaacaggccccagtgtgtgatgttccccgccctgtgtccatgtgttgtcattgtt

SEQ ID NO: 579699 - DNA, 521 bp, Homo sapiens
tggggcataaagatgaggtggtggggggcgagatgctcaagtggaagttctccttcctctggggaaaagcagaaggtcgaagagagggcagtgaggttcctgccacacacccaggacttacctggtctacccagctgaagaaatagagaagggacatgacctccgtcacacagcagcatctgactttcagccttgtgtgccttctatcataccttgctgctgtccttgaacttggaagtaatgttggaaaaaagtgtgtaagacacatgaatgtcttccgctgcctcaagccaaccaaagcaactagagatagtgtacctttgattatgacctagtcactcagttgtcgrtgagtggattaacaggctggcaggtaaaccacaggaaaacaaataattctaaggaaaataataggaaaagcagatgtgatggtggagggggaaatcaaattgattaccaatcagagataacatctttatttaaaaagatgccaactgtttgaaactacatagttaccatta

SEQ ID NO: 579700 - DNA, 397 bp, Homo sapiens
tttccgagctccctgaaaaggccagtgcctgctcctggctatgcaaactccaggaaggtcaagcctggtagtggttgtgaagaatactcttaagcttcttttttatggtttttagaaatctttttaaagaaaacagctcaacacctttttttcttcttcttttttttttttttttttttttttttttaagaracagggtctccctatgttgcccaggctggtctcaaactcctgggctcaagttatcctcctgcctcagcctcccagagtgctggaattacaggtgtgagccaccacacccagcctagctcaacacctttctttttttcgtttttttttttgagacaaagtctcactctgtgtcccaggctggactgcagtggtgcaatctcggctc

SEQ ID NO: 579701 - DNA, 397 bp, Homo sapiens
tttccgagctccctgaaaaggccagtgcctgctcctggctatgcaaactccaggaaggtcaagcctggtagtggttgtgaagaatactcttaagcttcttttttatggtttttagaaatctttttaaagaaaacagctcaacacctttttttcttcttcttttttttttttttttttttttttttttaagagacagggtctcmctatgttgcccaggctggtctcaaactcctgggctcaagttatcctcctgcctcagcctcccagagtgctggaattacaggtgtgagccaccacacccagcctagctcaacacctttctttttttcgtttttttttttgagacaaagtctcactctgtgtcccaggctggactgcagtggtgcaatctcggctc

SEQ ID NO: 579702 - DNA, 397 bp, Homo sapiens
tttccgagctccctgaaaaggccagtgcctgctcctggctatgcaaactccaggaaggtcaagcctggtagtggttgtgaagaatactcttaagcttcttttttatggtttttagaaatctttttaaagaaaacagctcaacacctttttttcttcttcttttttttttttttttttttttttttttaagagacagggtctccctatgttgcccaggctggtctcaaactcctgggctcaagttatcctcctgcctcrgcctcccagagtgctggaattacaggtgtgagccaccacacccagcctagctcaacacctttctttttttcgtttttttttttgagacaaagtctcactctgtgtcccaggctggactgcagtggtgcaatctcggctc

SEQ ID NO: 579703 - DNA, 525 bp, Homo sapiens
atactttttaccttttgaattcatagcccaagcatgtaattcaaaaattaattttaacatgctaaagaagaactaggcaatggaccgataccatcaaaactttaaaggaaaattattttcaaccttgaatactttttgagccaaatattcaatcatacatgtccataaatgcttaggaaaaacattaaagcaccaaatgattagttgtggataggttaactctgaacaatgtaattaatcagaatcggggggcrggggggagtgaaaatttcacttttcactttgtgtgtttttgtatgttttgaaaatttaccttggctgggcacggtggctcacgcctgtaatcccagcactttgggaggctgaggcgggtggatcacgaggtcaggagatcgagaccatcctggctaacggtgaaacccccgtctctactaaaaatacaaaaaattagccgggcgtggtggtgggcacctgtagtcccagctactcgggaggctgaggcaggagaatggtgtgaacctggga

SEQ ID NO: 579704 - DNA, 562 bp, Homo sapiens
actggttccttcgctctcccacctctccaaaatgtttctgtttattctccaagatttgtccaataggagctttccaggaccactgagcctcatcagaagaggcactcatgttctaggtctttgcaggatgaattgctctttttattttcctctttctctctctctctctccaaccattcttttttgtttgttttttgtttttgagataggattgtactctgtcgtctaggctggagcgcagtgacacaatcatagctcactgcagccttgaattcctggactcaagtgatcctccacctcactgtcccgagtagctgggactacaggcatgagccaccatgccggctacttttatttttttttaaagagccatggtcttgacgtcttgctatgctgctcaggctggtctcaaactccttggcctcaggcaatcctcctacctctgcctcccaaaagtgctgggattataggcgtgagccaccacgcccagccttgacaactattcttatcaaaaagatcacacacacacacacacacamaaaaaacaaatataaggaaggaa

SEQ ID NO: 579705 - DNA, 538 bp, Homo sapiens
aatcaatgttaattattattatctaaaactatcaatcctacagaattcagccaaggaggaaaatgaaaacaaaaacaaaaatggtggaaagatgatcattttgttacacatgaatatccaataaatgtgtatagattatcactattaaaagataactcggttgggcaaatattacaaaattcagctatatgatatatccaagagccaaatatgaaattaaaccccaaagaaagataacaaataaaagaataactaaaatatatatcaagaaaattataaccaaatgagaactggcaaagtaaaacaagacaaagtagaaaatatggcaaaagacattagtagacataaaggccactacataataataataatttttgatataaaaattataaatttctatgtacccaatattgtctcaacataaataaaacsgattgggcacagtggctcatgcctgtaatctcagcattttgggaggccgaggtaggtgaatcacttgaggtcaggagttcgagaccagcctggccaacatggtgaa

SEQ ID NO: 579706 - DNA, 618 bp, Homo sapiens
ctattatgagaatacattaaataaaaactcagacacctaaaattttgttattaatgcagtatcaagagtttcagtttttgagttatgattttctttaaaagtwtaagtggatttaacttgataattttaataactgaagtttcataaaaaaagaataccttgtaaccttgaacacaaatgtgggacaatgactaaaattttactgtaatgaatgatattcaataattgatcagtaaataatttgaggttacaagctaaatccatatttatttttgtgaaattaagataatatcatttaaaaacagatttctggaatttaaactgaaacaatgaaatttagtcccaaattttgaactccttcaaggtagagtataataaacggccattcaatttcaagcatctacacgtttttcaaaaagttataactatcattggcaacatttttcaaagaagcataaaattagtctcctctcagtttcgattttcatttgagaagtttaaatccaaactaagctttaaagcaaaaagtaaatagtttctgaaatactccttttgagaaagctcagaaatatcttatttcttttgcttcttattttctcacgtcagctacagtaaaaa

SEQ ID NO: 579707 - DNA, 624 bp, Homo sapiens
atttttattgtttgtagagatagggtctcacggtattgttcaggctggtctcgaacttctggcttcaagcaatcctctcatctcagcctcccaaagcactgagactataggcatcagccatcatgcctggcctgttctcttatttttgattagaacaatsatgagcccacaggagttaattgattaggtagaggctcaatttagaattagaatgaggaactcacttccttatagtaatagctgtatattattattaatgagttttactgtatgaagagtctgttgagattttaactgctatttacaacattataacttctatggaaaaatgtatttttagttcccaataaccagtttacaaataatcttttagaaaaaaacatgttcataaattggatattgcttccctgaggcaaaagtgaaaagagtgattaaagacgtgtagaatacgagaagtgttaggagctgagtaacaactgctttggaagaaaatcacaagattgggaatttttaaatttgcaattaaaatacaaagcttctggcccccttgctttcggatacatagttgcaattggttgtaagaatttccccttcctcttctacacttgactctcaacagtttaa

SEQ ID NO: 579708 - DNA, 624 bp, Homo sapiens
atttttattgtttgtagagatagggtctcacggtattgttcaggctggtctcgaacttctggcttcaagcaatcctctcatctcagcctcccaaagcactgagactataggcatcagccatcatgcctggcctgttctcttatttttgattagaacaatcatgagcccacaggagttaattgattaggtagaggctcaatttagaattagaatgaggaactcacttccttatagtaatagctgtatattattattaatgagttttactgtatgaagagtctgttgagattttaactgctatttacaacrttataacttctatggaaaaatgtatttttagttcccaataaccagtttacaaataatcttttagaaaaaaacatgttcataaattggatattgcttccctgaggcaaaagtgaaaagagtgattaaagacgtgtagaatacgagaagtgttaggagctgagtaacaactgctttggaagaaaatcacaagattgggaatttttaaatttgcaattaaaatacaaagcttctggcccccttgctttcggatacatagttgcaattggttgtaagaatttccccttcctcttctacacttgactctcaacagtttaa

SEQ ID NO: 579709 - DNA, 624 bp, Homo sapiens
atttttattgtttgtagagatagggtctcacggtattgttcaggctggtctcgaacttctggcttcaagcaatcctctcatctcagcctcccaaagcactgagactataggcatcagccatcatgcctggcctgttctcttatttttgattagaacaatcatgagcccacaggagttaattgattaggtagaggctcaatttagaattagaatgaggaactcacttccttatagtaatagctgtatattattattaatgagttttactgtatgaagagtctgttgagattttaactgctatttacaacattataacttctatggaaaaatgtatttttagttcccaataaccagtttacaaataatcttttagaaaaaaacatgttcrtaaattggatattgcttccctgaggcaaaagtgaaaagagtgattaaagacgtgtagaatacgagaagtgttaggagctgagtaacaactgctttggaagaaaatcacaagattgggaatttttaaatttgcaattaaaatacaaagcttctggcccccttgctttcggatacatagttgcaattggttgtaagaatttccccttcctcttctacacttgactctcaacagtttaa

SEQ ID NO: 579710 - DNA, 535 bp, Homo sapiens
gctcgcctgccataaaggaacctcatctttgcttagccaaaaccaatagccctactcaaaggagaaaagggcagggaggcktttgggttctcttgacagagacaatagactttacaccaggggccatttttatttgttctgtcagtgcacaaatcatgtgtttggatggcatatcccaaagcagcatctgggaaaccagaccccagtgagctccactcaggtttgttttgtcatacttcccccgcacacaacgcctcaagggtgctaaaatcagctcaggatgacataaggaagagctgtcctcaggcttatcttcccaaaaatctgatggttgaagagaaaataatttgagggtatctccagccttctgaaagtaagagattgatggcttcttgcagttttgaggattcaccacccaccgagtgtgctctccaaaagctccctaagcaagcaacagtggaatgtggctggaaaagaacaaatgaatccaggctagcagcaacctgcttgagtaatggatcaacaagttttacta

SEQ ID NO: 579711 - DNA, 535 bp, Homo sapiens
gctcgcctgccataaaggaacctcatctttgcttagccaaaaccaatagccctactcaaaggagaaaagggcagggaggcgtttgggttctcttgacagagacaatagactttacaccaggggccatttttatttgttctgtcagtgcacaaatcatgtgtttggatggcatatcccaaagcagcatctgggaaaccagaccccagtgagctccactcaggtttgttttgtcatacttcccccrcacacaacgcctcaagggtgctaaaatcagctcaggatgacataaggaagagctgtcctcaggcttatcttcccaaaaatctgatggttgaagagaaaataatttgagggtatctccagccttctgaaagtaagagattgatggcttcttgcagttttgaggattcaccacccaccgagtgtgctctccaaaagctccctaagcaagcaacagtggaatgtggctggaaaagaacaaatgaatccaggctagcagcaacctgcttgagtaatggatcaacaagttttacta

SEQ ID NO: 579712 - DNA, 634 bp, Homo sapiens
tcaggtgtcctccagcttcatttcacattctccaaccatcgctctggtgaccctttgacctgggttcgagccccacatatgggcatgacttgctgagaccagcacagttgtggaggccctaatccagcagtgctagaggaattaaagacacacccacagaaatatagagtgtggagtgggaaatcagggggctgacagccttctgagctgagagccacgaacagagatttgcccacatatttattgacagcaagccagtgataagcattgtttctatagattatagaatagctaaaagcattccttatgggaaacaaagggatgggccaaaacaaagggatgggttctggctagttatctgcagcaagaatatrtccttgaggtacagatggctcatgctattgtttgtgacttaggaacaccttaagcagttttcagccctgggtgggccaggtgtttcttgccctcattctggtaatcccacaaccttcagtgtgggcatcatggccattaggaacatgtcacagtgctgcagagaatttatttatggccagacttgggggcctgttcccaaaagaaactaaattttgaatggaattaccattaatatatattggggttttatgggaataaa

SEQ ID NO: 579713 - DNA, 634 bp, Homo sapiens
tcaggtgtcctccagcttcatttcacattctccaaccatcgctctggtgaccctttgacctgggttcgagccccacatatgggcatgacttgctgagaccagcacagttgtggaggccctaatccagcagtgctagaggaattaaagacacacccacagaaatatagagtgtggagtgggaaatcagggggctgacagccttctgagctgagagccacgaacagagatttgcccacatatttattgacagcaagccagtgataagcattgtttctatagattatagaatagctaaaagcattccttatgggaaacaaagggatgggccaaaacaaagggatgggttctggctagttatctgcagcaagaatatgtccttgaggtacagatggctcatgctattgtttgtgacttaggaacaycttaagcagttttcagccctgggtgggccaggtgtttcttgccctcattctggtaatcccacaaccttcagtgtgggcatcatggccattaggaacatgtcacagtgctgcagagaatttatttatggccagacttgggggcctgttcccaaaagaaactaaattttgaatggaattaccattaatatatattggggttttatgggaataaa

SEQ ID NO: 579714 - DNA, 529 bp, Homo sapiens
agctcagcaaggcccactgcctctctagattccacctctgggggcagggcatatctgaacaaaaggcagcagacagcttctgcagacttaaatgtccctgcctgacagctctgaagagagcagtggttctcccagcacagtgttcgggctctgataacaaacagactgcctcttcaagtgggtccgtgaaccctgtgtagcctgactaggagacaaggggccgacaaacacctcatacgggcaggtgcccctctgtggcaaagcttccagaggaaggatcaggcagcaatatttgctgttctgcagcctccactggtgatacctaggaaatcagagtccagagtggatctccagcraacttcaacagacctgcagctgaaggtcctgtctgttagaaggaaaactaacaaacagaaaggaataatatcaacatcaacaaaaaggacatccacaccaaaagcccatctgtaggtcaccaacatcaaagaccaaaggtagataaaaacacaaacatggggagaaaccagag

SEQ ID NO: 579715 - DNA, 529 bp, Homo sapiens
agctcagcaaggcccactgcctctctagattccacctctgggggcagggcatatctgaacaaaaggcagcagacagcttctgcagacttaaatgtccctgcctgacagctctgaagagagcagtggttctcccagcacagtgttcgggctctgataacaaacagactgcctcttcaagtgggtccgtgaaccctgtgtagcctgactaggagacaaggggccgacaaacacctcatacgggcaggtgcccctctgtggcaaagcttccagaggaaggatcaggcagcaatatttgctgttctgcagcctccactggtgatacctaggaaatcagagtccagagtggatctccagcgaacttcaacagamctgcagctgaaggtcctgtctgttagaaggaaaactaacaaacagaaaggaataatatcaacatcaacaaaaaggacatccacaccaaaagcccatctgtaggtcaccaacatcaaagaccaaaggtagataaaaacacaaacatggggagaaaccagag

SEQ ID NO: 579716 - DNA, 556 bp, Homo sapiens
tccatgctagcaaagacattattgtaaaaagaatgtaaaggcaaaaaagtgtgtgtatatataaaatacagaattaaaaactaatttccagtacaattctgtaggtatagaacaaaatcacaaagggtctccaactcccaatggttcaacttatgattttttgactttrtggtgggtttatcaggacataacccccttgtacgttgagctccttaacaacttacaattgggttacaatttctgctgaatgcatatgcttttgtaccatagtaaagccaaaaaagtataagtcaaatcaacataagtcagggaccatctactatggggccagcattaaatgcatttatgacttacaatatttttttacttatgatggatttatggaaacaacctcatagtaagtcaaggagtgtgtgtatttaatatccatgaagtttgtttcctaagacaaatactctaagaactaataatttcaagaaatgtttttcttacaagtcatactcacatgtaaaggatttcaaaataataaacgattacatttttctatttatatatg

SEQ ID NO: 579717 - DNA, 556 bp, Homo sapiens
tccatgctagcaaagacattattgtaaaaagaatgtaaaggcaaaaaagtgtgtgtatatataaaatacagaattaaaaactaatttccagtacaattctgtaggtatagaacaaaatcacaaagggtctccaactcccaatggttcaacttatgattttttgactttatggtgggtttatcaggacataacccccttgtacgttgagctccttaacaacttacaattgggttacaatttctgctgaatgcatatgcttttgtaccatagtaaagycaaaaaagtataagtcaaatcaacataagtcagggaccatctactatggggccagcattaaatgcatttatgacttacaatatttttttacttatgatggatttatggaaacaacctcatagtaagtcaaggagtgtgtgtatttaatatccatgaagtttgtttcctaagacaaatactctaagaactaataatttcaagaaatgtttttcttacaagtcatactcacatgtaaaggatttcaaaataataaacgattacatttttctatttatatatg

SEQ ID NO: 579718 - DNA, 584 bp, Homo sapiens
  misc_feature 449: n = A,T,C or G
taaaatatgtacaaatcacaaactaggcatcaaaggaacattcctcaaaatactaagagtcatctatgacaaacaaccaacatcatacttgatgggcaaaaactgaagagkcattccttttgagaatcggaacaagacaaggatccctgtacaacatataaacatgttatatttaacatagtactgaaagtcataaccagagtaatctaggcaagagaaagaaataaagggcatccaaatagggaaagaaaagtaaaactatctttcttcacagatgacatgatcctatacccagaaaaatcctaaagattctgccagaagcctcctggaactgataaatgatttcagtaaaatttcaggatacaaaatcaacatatgaaaatcactagcatttctacacaccaataacattcaagctgagagccaaatcaagaacacaatcccatctnacatagccaaaaatacaataaaataaaatgcctagaactacatctaaccaaggaggtgaaagacttctatagggagaactaaaatacactgctaataaaaatcatagatgacccacacaaatgaaaaagcatttc

SEQ ID NO: 579719 - DNA, 637 bp, Homo sapiens
ttaaataatctgattcacattgttaaattaaatacaattttaaaaagacagtatctccattccttaaatacttcctctaaatgtaaagaaaaaaaaaaaaagaaaagaaaagaaaaaaagaatgctggctaatagaaaaattgtccgaggtctgtgggagtttcaagttaagatacccataacaaatgtgtctgtcactgggtttaagacactgttattcagtttttgaaatagtatccatgaaataaaaacaaaaaaacagaacaaaacaaaaaaccttcagcccaaaatatacaacaagtcttccagattggaggaggaattaaagaattcctgtaatggaagcaatgtcatagaaatccttactgatacttatcatcttcctgcattascctaacattgtaaaagaaaacattcctcacaagctgtttcttgatcagccttgttgcagtaagttccatctatgtaataagttccatctctgtcaatctgggcagcagcttttgctgtgagcttgggcttcaagtctcagagcagggctcacaacttacattactgtatcattcccctacttacactcatccatgtattcattgggaattatgtctttgagtctattctgtgcctgatactgttc

SEQ ID NO: 579720 - DNA, 637 bp, Homo sapiens
ttaaataatctgattcacattgttaaattaaatacaattttaaaaagacagtatctccattccttaaatacttcctctaaatgtaaagaaaaaaaaaaaaagaaaagaaaagaaaaaaagaatgctggctaatagaaaaattgtccgaggtctgtgggagtttcaagttaagatacccataacaaatgtgtctgtcactgggtttaagacactgttattcagtttttgaaatagtatccatgaaataaaaacaaaaaaacagaacaaaacaaaaaaccttcagcccaaaatatacaacaagtcttccagattggaggaggaattaaagaattcctgtaatggaagcaatgtcatagaaatccttactgatacttatcatcttcctgcattaccctaacattgtaaaagaaaacattcctcacaagctgtttcttgatcagccttgttgyagtaagttccatctatgtaataagttccatctctgtcaatctgggcagcagcttttgctgtgagcttgggcttcaagtctcagagcagggctcacaacttacattactgtatcattcccctacttacactcatccatgtattcattgggaattatgtctttgagtctattctgtgcctgatactgttc

SEQ ID NO: 579721 - DNA, 588 bp, Homo sapiens
aagacagaaataccattcaatccagcaatcccattactggatatatacccaaaggaatatgaaycattctattataaagacacaggtacatgcatgagatgcatgttcattgcagcactattcacaatagcaaagacatggaatcagcctaaatgtctatcaatgatagactggatagggaaaatgtgatacatacataccatggaatactactatgaagccataaaaaagaatgagatcatgtcctctgcagggacatggattgagctagaggccattatccttagcaaactaatacaggaacagaaaaccaaatactgcatgttctcataagtgtgagctaatatgatgagagtacatggacacatagaggggaacagcacacactggggcctttcagaggatggagagtggaaggagggagaggatcagaaaaaatgctaggctaggcttaatgccttggtgatgaaataatctctacaataaacccctatgacacaagttaaactatttaacaaacctgaacttgtacccctaaacttaaaataagttaaaaattaaaaataaaattccaaaaaaagcacaaag

SEQ ID NO: 579722 - DNA, 478 bp, Homo sapiens
aatgcaatagaatttaacaaaataagcacatgacctcaatgcagaaaattataaagcattagtgaggggaattatagaatatttcaataaatggaggatattctatcaccaagaatcataagatgcaatattgtaaacatgccaattttttccaagttaatttttatcagtgcaatcccaagcaaaaccccagcaggcatttttgtgaaaactaacaagctgatctttaaatttataagaaaattcaaggataccaaaaaaaagcaagagaaaattgaagaacaaatccgtagcactcatgcagtgaaatataaagacttatataaaggtatgttaagtaactattagttcaagtttagattcaaagaataatatatcattgaaagtatggaaactaactcatatatattcagtcatttaatttgtaataaatctgctactgcagggtartggaaaaaagaagttacatttatttaat

SEQ ID NO: 579723 - DNA, 597 bp, Homo sapiens
ggctgaggtgagctgagcgtcaatggcaggcacctataatcccagctacttgggaggctgaagcaggagaatcacgtgaaccctagaggtagaggttgcagtgagccarcatcatgccattgcactccagcctgggcaacaagagtgaaactctgtctcaaaaaacagctttaaagattattgataaaatacattttgtctagattatgcaggtcagatattaggtttgctaaatgctttaaggtcataaactgctttggcttttgaaaattgttcgatttattttagagacattgaagtgaggcctggggatatatggaatcatccatgtcccctaactatgcaaagaaggttataaagaaaagatattttatatgagaaaggatgttctatggtaaattcttgtcctaaagtaaaatgactggttgtttaaaaagaggaatgtttaggaaatgtcagaaagtctaaacatgttgtacatggtctgtgtaagttgtgaaagaatttatgaaaaggaatttatgccagaagtgttatataatttaaaggtgattaagcctcctaacgcttcataaaatgccactataactcttaact

SEQ ID NO: 579724 - DNA, 597 bp, Homo sapiens
ggctgaggtgagctgagcgtcaatggcaggcacctataatcccagctacttgggaggctgaagcaggagaatcacgtgaaccctagaggtagaggttgcagtgagccaacatcatgccattgcactccagcctgggcaacaagagtgaaactctgtctcaaaaaacagctttaaagattattgataaaatacattttgtctarattatgcaggtcagatattaggtttgctaaatgctttaaggtcataaactgctttggcttttgaaaattgttcgatttattttagagacattgaagtgaggcctggggatatatggaatcatccatgtcccctaactatgcaaagaaggttataaagaaaagatattttatatgagaaaggatgttctatggtaaattcttgtcctaaagtaaaatgactggttgtttaaaaagaggaatgtttaggaaatgtcagaaagtctaaacatgttgtacatggtctgtgtaagttgtgaaagaatttatgaaaaggaatttatgccagaagtgttatataatttaaaggtgattaagcctcctaacgcttcataaaatgccactataactcttaact

SEQ ID NO: 579725 - DNA, 642 bp, Homo sapiens
ggtcaggagttcaagaccagcctggccaacacggtgaaaccctgtttctactaaaaatacaraaattagccgggcatggtggcaggtgactgtaatcccagctactcaggaggctgaggtgggagaatttcttggacccaggaggcagaggttgcagtgagccaagatcgtgccattgcaccctagcctgggtgacaagagcaaaactctgtctcaaaaataaataaataaataaataaataaataaataaataaataaaaataaaaaggctatcatttatcatattcattttaaatgaaagttaatttgggctgcactacataataggcaatagaaatatacagaaaaaaataaataactagaatggtagaatatggatttatggccagatatatttgaattaaaaatccagtttttgccatctgactgactatgaacaaatattgtaatctctctggccttaacttcacctcaaaattggggtgaatgtttgctttataagcatattgtgatatgatttacataatgtactttacacattgcctgaagcccattagggtctaatatttggtgatgtttatatttttgctattttcgcttatggctagatcatatatataaatgtaggagaaagggtaaaa

SEQ ID NO: 579726 - DNA, 424 bp, Homo sapiens
cacttgcagattctgcagaaagtgtgtttctaaactgctacatcrcaaggaatgctcagctctgtgagttcaactcaatcatcccaaagaattttctgagaaagcttctgtcttctttttataggaagttatttcctttactacggtactcctcaaagagtgcaattatccccttgcagtttctacaaaaagagtgtttcaaacctgaactatcaaagaaaggttccacactgtgagttgaatgcagacatcacgaagaaggttctgagaatgcttctgtttagttctgtgcagtttatcccgtttccaacgaaatcctcagagaggaccaaatatccacttgcagtttctacaaaaagagtgtttcaaagctgaactatcaaataaaggttcagcactgtgagttgaatgcaaacatcacgaa

SEQ ID NO: 579727 - DNA, 424 bp, Homo sapiens
cacttgcagattctgcagaaagtgtgtttctaaactgctacatcgcaaggaatgytcagctctgtgagttcaactcaatcatcccaaagaattttctgagaaagcttctgtcttctttttataggaagttatttcctttactacggtactcctcaaagagtgcaattatccccttgcagtttctacaaaaagagtgtttcaaacctgaactatcaaagaaaggttccacactgtgagttgaatgcagacatcacgaagaaggttctgagaatgcttctgtttagttctgtgcagtttatcccgtttccaacgaaatcctcagagaggaccaaatatccacttgcagtttctacaaaaagagtgtttcaaagctgaactatcaaataaaggttcagcactgtgagttgaatgcaaacatcacgaa

SEQ ID NO: 579728 - DNA, 424 bp, Homo sapiens
cacttgcagattctgcagaaagtgtgtttctaaactgctacatcgcaaggaatgctcagctctgtgagttcaactcaatcatcccaaagaattttctgagaaagcttctgtcttctttttataggaagttatttcctttactacggtactcctcaaagagtgcaattatccccttgmagtttctacaaaaagagtgtttcaaacctgaactatcaaagaaaggttccacactgtgagttgaatgcagacatcacgaagaaggttctgagaatgcttctgtttagttctgtgcagtttatcccgtttccaacgaaatcctcagagaggaccaaatatccacttgcagtttctacaaaaagagtgtttcaaagctgaactatcaaataaaggttcagcactgtgagttgaatgcaaacatcacgaa

SEQ ID NO: 579729 - DNA, 586 bp, Homo sapiens
tccaaatatctacttgcagtttctrcagaaagaccgtttcaaacctgaactatcaaagaaaggttcaacactgtgagttgaatgcaaacatcacgaagaaggttctgagaatgcttctgtttagttctgtgcggtttatcccgtttccaacgaaatcctcagagaggcctaaatatccacttgcacattctacaaatagtgtgtttcgaaactgctccatccaaaggaatgttcagctctgtgagttaaactcagtcgtcaccaagagttttctgtgaatgctactgtctagcttttatatgaagctatttcctttactaccataggcctcaaagcggtccatatctccacttgcagattctacacaaagagagtttccaaactgctctgtcaaagggaatgttcaactctgtgacttgaatgcaatcatcacaaagtagtttctgagaatgcttctatctagcttttacgggaagataattccttttccaccacaggcctcaaagccctccaaatgtccacttgcagattctggaaaaagagtgtttcaaagcttctctctcgaaaggaaagttcaactctgtga

SEQ ID NO: 579730 - DNA, 586 bp, Homo sapiens
tccaaatatctacttgcagtttctgcagaaagaccgtttcaaacctgaactatcaaagaaaggttcaacactgtgagttgaatgcaaacatcacgaagaaggttctgagaatgcttctgtttagttctgtgcggtttatcccgtttccaacgaaatcctcagagaggcytaaatatccacttgcacattctacaaatagtgtgtttcgaaactgctccatccaaaggaatgttcagctctgtgagttaaactcagtcgtcaccaagagttttctgtgaatgctactgtctagcttttatatgaagctatttcctttactaccataggcctcaaagcggtccatatctccacttgcagattctacacaaagagagtttccaaactgctctgtcaaagggaatgttcaactctgtgacttgaatgcaatcatcacaaagtagtttctgagaatgcttctatctagcttttacgggaagataattccttttccaccacaggcctcaaagccctccaaatgtccacttgcagattctggaaaaagagtgtttcaaagcttctctctcgaaaggaaagttcaactctgtga

SEQ ID NO: 579731 - DNA, 509 bp, Homo sapiens
aagaaatatcagttacttggatgtttacattttgtttatggaaataatttttctagaatatattataaaatgctaagatccttaatgcttcttcacacaagtaaaaacacataaacaagrggctactgaaacacagggcatgaggttgcctttgatgtcacccaactttacattaaaattaaatgttagaactctgtaggaagtaagcatactgggtgtgcacaggttaacctaagagccagggtcaggaggaattaaagtcagcaggggccaccagatgttagagaaccccaggcatcatctcccagttggtgatctgcctctctggccccaccttgtcccagcctgtgtgcttgaatcatagcacttcccattgccctcctgactctgacttccagggttcctgaccttagtttaccaaactggctttgctctgtggtgagcctgactttgacctgacaatctgattcttatattctgttctgtttctaatcttgcttcctgtttgt

SEQ ID NO: 579732 - DNA, 552 bp, Homo sapiens
ttataagtgtggttccacaaggaagcacacaaaatattagtaacactattatcatttccaagcatactacattatgctatctatagttctcaagaagaaagctaaggcatagatacatacatctataaacaaattgtttattaaatcaagatggttttctaaaataaaataaagaaaaatctcattggaaaatagaaagtaattaatcatatcataaaacaaagaacaagggagggatcattcgttgtttggtgtgcttactgtacttaagcaaaattactagaatatcttgaatattttttaaatgctgccaagttagagtttrtaatacccttagattcctttttgataaagctaacatatattttggaatataaataccaagcaaataaacatcaaaattaaacattgctactatagtgcccagtgtaattattatcattttattcactgaaaattcaaatgctttttaaaacaatttatttattggtcttttcttgattaatgtaaataaaaccaagttatttatcatttatggccatatcccaaaaa

SEQ ID NO: 579733 - DNA, 592 bp, Homo sapiens
tggcttcttatttccctcattggttttgactatagtgatagtgttaaatgaataatttaagaaacaagtattttttgaagaaaaatcttttagttttaatttacaaaatagatttgcttagtataatacccagtgtagaattatggacacaggttgtttccttcctcaataattgaatatggtctgtttcatcagtaaggatcttcttaaaggaagtatctgctaatatctagaattcttcgcaactcagaaaatatatatttcctttcacttatttttctcttcttcttcaataaaaactttaggcttccactgtagaaaaaaagttgttgtttaataaggagattcctgggccttactatagcagcacttatttgaaatttgtgggattgaggcctgggaatwtgcattgtaaacaattatcttaggcagtagtgggctgacagatgtttaagaatttgctcaatgaaaaaaagtatatatacatgtacatgtatattataaatgctattatataaagaatgtactgtgaacagttttaaaataataaaatatacaatattatttactgtaaattccatatagccaattg

SEQ ID NO: 579734 - DNA, 463 bp, Homo sapiens
  misc_feature 309: n = A,T,C or G
aaaacaaagcagaagtggataaattcctggaaccatagagcctcccagtattgaaccaggaagaaattgaaatcctgaacagaccaataatgtgttctgacattgagttagtaataaaaaaactctaccaatgaaaaaataaaccttgagatgacacagattcacagctaaattctaccagacatacaaagatctagtaccaattctatggaaattattccaaaaaaagaggagagggttctcctccctaactcattctatgaagccaacatcattctcataccatagccttgcagagacacaacaganagaaagcttcatatctgtgatgaacatgaatgcaaaaatcctcaatgaaatattagctaaccatgtccagcagcacatmaaaaagttaccatgatgatcaagtaggctttatttctgggatgcaagttgggttcaacatacacaaatcaataaa

SEQ ID NO: 579735 - DNA, 481 bp, Homo sapiens
ccacactgtctccaacaatgtttgaactaatttttcctcccaccaacagtataaaagtgttcctatttctccacatcctctccagcatctgttgtttcctgactttttaatgatcaccattctaactggtgcgagatagcatcttaccttyactccattagctttaaatttctgagtttatgtatagacacttataggtaggacaaagggtgtatattcagatagaatcactagaattataagaattaccagaatttctgctgtaaaataaaatgaatagttttattgcttatggatactacttactattaaataatatcacagtttgcttatgcttatggtcaataactttttacccccaaccagatgtttaaatacaggattgtgcaaattcatacctaaaccttagcaacaatagctgagtgtgtgttggagcgtgtgtttgtgtgtacatgtgcgttttcccttcggaacaaaatca

SEQ ID NO: 579736 - DNA, 481 bp, Homo sapiens
ccacactgtctccaacaatgtttgaactaatttttcctcccaccaacagtataaaagtgttcctatttctccacatcctctccagcatctgttgtttcctgactttttaatgatcaccattctaactggtgcgagatagcatcttaccttcactccattagctttaaatttctgagtttatgtatagacacttataggtaggacaaagggtgtatattcagatagaatcactagaattataagaattaccagaatttctgctgtaaaataaaatgaatagttttattgcttatggatactacttactattaaataatatcacagtttgcttatgcttatgrtcaataactttttacccccaaccagatgtttaaatacaggattgtgcaaattcatacctaaaccttagcaacaatagctgagtgtgtgttggagcgtgtgtttgtgtgtacatgtgcgttttcccttcggaacaaaatca

SEQ ID NO: 579737 - DNA, 355 bp, Homo sapiens
acaagtaagggccctgatttatacaatctaattaggagaatccctagtgactggtccaggtaatccagatgtaagtcaatcagtagatagcattttcctgaacaatggaatttatgcaggtgtaagaaggggtgttgacctaggtaatcccaacaaaatgtgagtggaggttttctggagctttggggaaataaggtgtcttgtgatatattgatgcaaaccctgagctgctaagttcttgctactacatgggaggcaaactgaagatgttgctgatttcatacaggaagaatagagagaccaaagaaagccaacccttgaagatattaygaaaccgttggcagggcaggtcctg

SEQ ID NO: 579738 - DNA, 567 bp, Homo sapiens
gtcctgatccttctagatcttcccacagaaacgggtacagagcgctgcccrtagcagagatttatgcatgtgcattgaaagaggaaaaaaaaaatcagaatgaccagggtagtgtgatggatgctctaagggtagccaaataaaaatgataggaagctagaaaggaaacccaagagtgggtcagaaggaatagcagacaatgttaaaatgttttaaggctgattttatgtggcattggtagagattagcctgctcaccacagccagtttcactgtaaatcatgtaacagaccttgtagaaatgccaagatagtagacgtctgcttaaaacgcagagctctgagaaacgctcgacttcaaacattgtttactttcttcattaggaactaaagagaagcaagtacaaggcagcgggtagcaattacctaatatctttgccgaaagagagatttttcaaaatgtgcttttctcactaatccttgaggggaaatgaggtttatttatggtgtcagaagagaacaaggcattaatagtaaaagattttatatgacttcatgtttttaggaaa

SEQ ID NO: 579739 - DNA, 380 bp, Homo sapiens
ccaaagtgttgagattacaggcatgagccaccacacccagtctaaaaatattctctttgatctagagcttaaatttagatgaatgctagaatcagacgctcttaaagaatacataggaactcttgcttccattttctgtcttttattaatccatgtttcaccaaggactaccacctacatagcaaatccagtaacttttagacctgaaaaatatacatttcatagctactattgttgtgtgttctctaaatctgtattgtgattaggatccttttcttttttagcattttatttggtttgagaacctcgaacygtgccatccttacatttcactgattttacttgtcactctatagttctggtagcccacatctgaattc

SEQ ID NO: 579740 - DNA, 608 bp, Homo sapiens
cgaattcctcagagaggtccaaatatgcacttgcagattctgcagaaagtgtgtttctaaactgctacatcgcaaggaatgctcagctctgtgagttcmactcaatcatcccaaagaattttctgagaaagcttctgtcttctttttataggaagttatttcctttactacggtactcctcaaagagtgcaattatccccttgcagtttctacaaaaagagtttttaaaacctgaactatcaaagaaaggttccacactgtgagttgaatgcagacatcacgaagaaggttctgagaatgcttctgtttagttctgtgcagtttatcccgtttccaacgaaatcctcagagaggaccaaatatccacttgcagtttctacaagaagagtgtttcaaagctgaactatcaaagaaaggttcagcactgtgagttgaatgcaaacatcacgaagagggttctgagaatgcttctgttttagttctgtgcgggttatcccgtttccaacgaaatcctcagagaggtccaaatatctacttgcagtttctacagaaagaccgtttcaaacctgaactatcaaagaaaggttcaacactgtgagttgaatgca

SEQ ID NO: 579741 - DNA, 608 bp, Homo sapiens
cgaattcctcagagaggtccaaatatgcacttgcagattctgcagaaagtgtgtttctaaactgctacatcgcaaggaatgctcagctctgtgagttcaactcaatcatcccaaagaattttctgagaaagcttctgtcttctttytataggaagttatttcctttactacggtactcctcaaagagtgcaattatccccttgcagtttctacaaaaagagtttttaaaacctgaactatcaaagaaaggttccacactgtgagttgaatgcagacatcacgaagaaggttctgagaatgcttctgtttagttctgtgcagtttatcccgtttccaacgaaatcctcagagaggaccaaatatccacttgcagtttctacaagaagagtgtttcaaagctgaactatcaaagaaaggttcagcactgtgagttgaatgcaaacatcacgaagagggttctgagaatgcttctgttttagttctgtgcgggttatcccgtttccaacgaaatcctcagagaggtccaaatatctacttgcagtttctacagaaagaccgtttcaaacctgaactatcaaagaaaggttcaacactgtgagttgaatgca

SEQ ID NO: 579742 - DNA, 608 bp, Homo sapiens
cgaattcctcagagaggtccaaatatgcacttgcagattctgcagaaagtgtgtttctaaactgctacatcgcaaggaatgctcagctctgtgagttcaactcaatcatcccaaagaattttctgagaaagcttctgtcttctttttataggaagttatttcctttactacggtactcctcaaagagtgcaattatccccttgcagtttctacaaaaagagtttttmaaacctgaactatcaaagaaaggttccacactgtgagttgaatgcagacatcacgaagaaggttctgagaatgcttctgtttagttctgtgcagtttatcccgtttccaacgaaatcctcagagaggaccaaatatccacttgcagtttctacaagaagagtgtttcaaagctgaactatcaaagaaaggttcagcactgtgagttgaatgcaaacatcacgaagagggttctgagaatgcttctgttttagttctgtgcgggttatcccgtttccaacgaaatcctcagagaggtccaaatatctacttgcagtttctacagaaagaccgtttcaaacctgaactatcaaagaaaggttcaacactgtgagttgaatgca

SEQ ID NO: 579743 - DNA, 497 bp, Homo sapiens
tatgtgaagatattcccgtttcaaagacatcttcggagaggtccacatatccrcttgcagattccacaaaaagagagtttcaacactgctctatccataggagggttcaactctgtgagttgaatgcaatcatcacagagaagtttctgagaaggcttctgtctagattttatgcgaagatatacccgtttcgaacgaaggccacagagtggtccaaatatccacttgcagatcctacaaaaagagtgtttcaaacctgaactatcaaaggaaggttcaactctgggatttgaatgcaaacatcaccaagaagtttctgagaatgcttccgtttagttaggtgcagttatcgcgtttccaacgaaatcctcagagaggtccaaatatccacttgtagattctacaaaaagtgtgtctcaaacctgctccatccaaaggaatgttcagctctgtgagttaaactcaatcatcacaaagtattttctgagaatgcttct

SEQ ID NO: 579744 - DNA, 497 bp, Homo sapiens
tatgtgaagatattcccgtttcaaagacatcttcggagaggtccacatatccacttgcagattccacaaaaagagagtttcaacactgctctatccataggagggttcaactctgtgagttgaatgcaatcatcacagagaagtttctgagaaggcttctgtctagattttatgcgaagatatacccgtttcgaaygaaggccacagagtggtccaaatatccacttgcagatcctacaaaaagagtgtttcaaacctgaactatcaaaggaaggttcaactctgggatttgaatgcaaacatcaccaagaagtttctgagaatgcttccgtttagttaggtgcagttatcgcgtttccaacgaaatcctcagagaggtccaaatatccacttgtagattctacaaaaagtgtgtctcaaacctgctccatccaaaggaatgttcagctctgtgagttaaactcaatcatcacaaagtattttctgagaatgcttct

SEQ ID NO: 579745 - DNA, 497 bp, Homo sapiens
tatgtgaagatattcccgtttcaaagacatcttcggagaggtccacatatccacttgcagattccacaaaaagagagtttcaacactgctctatccataggagggttcaactctgtgagttgaatgcaatcatcacagagaagtttctgagaaggcttctgtctagattttatgcgaagatatacccgtttcgaacgaaggccacagagtggtccaaatatccacttgcagatcctacaaaaagagtgtttcaaacctgaactatcaaaggaaggttcaactctgggatttgaatgcaaacatcaccaagaagtttctgagaatgcttccgtttagttaggtgcagttatcscgtttccaacgaaatcctcagagaggtccaaatatccacttgtagattctacaaaaagtgtgtctcaaacctgctccatccaaaggaatgttcagctctgtgagttaaactcaatcatcacaaagtattttctgagaatgcttct

SEQ ID NO: 579746 - DNA, 497 bp, Homo sapiens
tatgtgaagatattcccgtttcaaagacatcttcggagaggtccacatatccacttgcagattccacaaaaagagagtttcaacactgctctatccataggagggttcaactctgtgagttgaatgcaatcatcacagagaagtttctgagaaggcttctgtctagattttatgcgaagatatacccgtttcgaacgaaggccacagagtggtccaaatatccacttgcagatcctacaaaaagagtgtttcaaacctgaactatcaaaggaaggttcaactctgggatttgaatgcaaacatcaccaagaagtttctgagaatgcttccgtttagttaggtgcagttatcgcgtttccaacgaaatcctcagagaggtccaaatatccacttgtagattctacaaaaagtgtgtctcaaacctgctccatccaaaggaatgttcagctctgtgagttmaactcaatcatcacaaagtattttctgagaatgcttct

SEQ ID NO: 579747 - DNA, 210 bp, Homo sapiens
gaaacactctttttgtagatactgcaaggggataattgcacttctttgaggcctaccgtagtaaaggaaataacttcctatagaragaagacagaagctttctcagaaaattctttgggatgattgagtggaactcacagagctgaacattccttgcgatgtagcagtttagaaacacactttctgcagaatctgcaagtgcatatttgg

SEQ ID NO: 579748 - DNA, 238 bp, Homo sapiens
ttgaaacactctttttgtaggatcttcaagtggatatttggaccactctgtggccttcgttcgaaacgggtayatcttcgcataaaatctagacagaagccttctcagaaacttctctgtgatgattgcattcaactcacagagttgaaccctcctatggatagagcagtgttgaaactctctttttgtggaatctgcaagtggatatgtggacctctccgaagatgtctttggaaac

SEQ ID NO: 579749 - DNA, 238 bp, Homo sapiens
ttgaaacactctttttgtaggatcttcaagtggatatttggaccactctgtggccttcgttcgaaacgggtatatcttcgcataaaatctagacagaagccttctcagaaacttctctgtgatgaytgcattcaactcacagagttgaaccctcctatggatagagcagtgttgaaactctctttttgtggaatctgcaagtggatatgtggacctctccgaagatgtctttggaaac

SEQ ID NO: 579750 - DNA, 523 bp, Homo sapiens
gtgtttctaaactgctacatcgcaaggaatgttcagctctgtgagttccactcaatcatcccaaagaattttctgagaaagcttctgtcttctttctataggaagttatttcctttactacggtaggcctcaaagaagtgcaattatccccttgcagtatctacaaaaagagtgtttcaaacctgaactatcaaagaaaggttccacactgtgagttgaatgcagacatcacgaagaaggttctgagaatgcttctgtttagttctgtgcggtttatcccgtttccaacgaaatcctcagagaggaccaaatatccacttgcagtttctacaagaagagtgtttcaaagctgaactatcaaagaaaggttcagcactgtgagttgaatgcaaacatcacgaagagggttctgagaatgcttctgttttagttctgtgcggtttatcccgtttccaacgaaatcctsagagaggtccaaatatctacttgcagtttctacagaaagaccgtttcaaacctgaac

SEQ ID NO: 579751 - DNA, 298 bp, Homo sapiens
tattaacttattttctagcctaatatgtggtctatcctggagggtgttccatgttctcctgagaaaattgtagggtatatcctgctgttggtgggtacagggttgtgtatttttctgtttggactaattggtttatatttttaagtcatctattttctttttgaacttctattattctagccatttttgaaagtgaagtatttaagttttcaatatttattatagaactatcaatttcttttaatttmtctcaatgtatcttcatatgttttagagttctgatgttaggaaatgtatg

SEQ ID NO: 579752 - DNA, 469 bp, Homo sapiens
cttggctatttgggctcagttttggttctatatgaattttaggatagttttttttctagttctgtgaagaatgtctttggtggtttgataggaatcacattgaatctgtaaattgggcaatatggtcatcttaatgatattgattcttcctatttatgagcacggagtgtgctccctacatttgtgtcatctctgatrttgttcagcaatgtttcgtagctttccatgtagagatctttcacctccctggttagctgtattcctaggtattttattctttttgccactattgtgaatgggattgtgtttgttaattggctcttggcttgtcttttgttggtgtataggagtgctagtaatttttgtgcattgattttgaatcctgaaacattgctgaagttatcagctgaaagagcttttgttttgagactatgggggtttttttagatacagaatcatgttgtgtgta

SEQ ID NO: 579753 - DNA, 593 bp, Homo sapiens
gtgagcagagtatccagtagtttttcaatcctggcccccttctcctttccccctacagtagtctccagtgtctgttgttgccatctttatgtccatgagtacccagtgtttagctcccactcagaaatcttttctttagccactagttggcatattaaattgaatgtaacatgggatattataacaactggatatggcataggayggattacagcaaagctataagtaacatgggagaagattaacacagcagatatccagtttctggactccctatttttgttccttgtgttacatgtctatccctgacccagcaaaacatcatcttaatccttacagcattatgaaagtgttgcatttggcacagaaagtcccccaacttggttctttttctttaaaattgtcttgttttactattcttgctcattactgatcctttgctcatcattgtaaattttaaatttacttgtacagtctcatgaagtccctgttaagactttagttggaatcacattaaatttagttggaatcacattaatcacactcaatttattttggaaaaatttggcatctggtattgagttttcccaggc

SEQ ID NO: 579754 - DNA, 584 bp, Homo sapiens
agtacaatactcttttagtatttcctcctttttagcacaatctaaaaatgagaaaaaatggcagaactagtaatgactaatgttgcaataatgtagtaagagtgggaaacatgtctattattatttacagtatatccagcacttagcacttggtgtatactaagtgctcagtaaatatcctttgaaataaggaaagagttccctctatgcaagttcatggtgcaccaaactggggactcctataaataaatttgtcttgggtaggggatgatartttaagcttatattactacagattatgctagagatgaatatacatacattcaaaacaacgaaaatatatttatttccttcaatacaatctgaaatgtacacatgtattagtttttattgctgctgtcataaattactgcaaagttagtgacttaaacaacacaaatgtattctcttacatttatggaggtcagaaatatgacacaggtttcactgggtaaaagtcaaggtatcagcagggatatgttcctttctggagaccctaagggagaatctacttccttaccttttccagcttccaaacatgacct

SEQ ID NO: 579755 - DNA, 610 bp, Homo sapiens
cacaaacaaaaattggtaaaggcaagatttgaatcgggaagtctatttatttctagagactgagaacccaagttcttcacaatgtggcctttaataataaattaatatctctcagaagtacctggcactgtcccaaacacacagaaagccttaaatattagtgagtattcttactattgcagggcagaccagaattatagtcagggcagtatgccattcattcattcacttaaccaaaatttagagaatatctacatatcctaggcactggactcagttctgaggtcataaatgtaagtaaaacgtggttcatgcccacaaggaactttcaacatataaaggaaatcaagttcataaataaataaccaaagtactctgaaaagtgtgctattgcaataatggcaataaaattacacctacctcactgaattgtcatgagaattaaattaagttgacacgtgttaaatgtttacactagtgccagaacacagtatttagcataaatgcattagctattattgattttattgtattgtaatcatctgagtggtggtaygctcataaagaaaaagcaatcagacctagaagaatgaaactgaacaccaccaat

SEQ ID NO: 579756 - DNA, 494 bp, Homo sapiens
taatcccagttactcgggaggctgagacaggagaatcgcttaaacccgggagacggaggttgcagtaagccgagatcatgccactgcactccagcctgggaaatagaatgagactctgtctcaacaatttaatcaattaattaaatatacagtgcatctgaaaccttttgcataccaaaccagggcactgacaagtaagagttgggtgacaagaggtggtgggaagagtttggactttggagtctgtcgcacctgagttcatactcactcctgcaatttctagttctgtgcccttgagctatttatttaaccttmctaagcctttttaacctcatttataaactgtttatttcaaatggctactttgcagagttatcatgaatactaaataataatgatgtgagcatataacaagcacccaagaaatagtagcaattattattatttgaaatcagaactggactaatacccctcatcccaattattttttaatc

SEQ ID NO: 579757 - DNA, 551 bp, Homo sapiens
gacaaactcttcccaggctggtggcaggttaatatttgactgcccctaaactcccccaatgtaagttagttagaagccaaacaaacaagaagctgctggaatagtgtgtcataaactccttytgggggcaaacagggagcttcatttcttaagtcccttctatgtattgctcctgggggatgaaagctctgaagtgcttaaatgcccatatctaactgcggcttttttcctgtggtctagaaagacttgcgtatgtctaatcccctctgctcccagagttggtgaattaagagccagaccatgaagaatcttaagttaggatgctatatgtggggttaaaaccctcctctccatggggagaagttggatgctggggcttcccttcccaattttatggcacaatgcccagggtggggtctggccctagcgtgcttcagtttttcctacccattcgatgaggatgtttcctcagttgccccatgggtaggaatctttcaactagtctctgactttctctgagagagaactgatccatgaatagatatttattt

SEQ ID NO: 579758 - DNA, 525 bp, Homo sapiens
tgacatataagtaaaatgtttagggrtttagtggtctgaggcctgccaaaaaagctattttaaattaaataatggttttttaatctatattataattttgcccctttctctactaagatggaaacacaatgcctggtagacttctttagattctagaagcaacatatcacatgtgtgaacatctttctctagtcgatattcctggtgatgtaaaaggctgctagtttttagtggggctttgtataagaaagagctccttaggacatccagattgcagtgaagctgtcctaatgcttggaccataagacttaccagtttttattctatctttgatggaataagatgctaaacaacataagtgaagttcatggccagccacaaaaggagatcttctggggttatagtgtatggtcatgccttctattcagcattaaaaatagcccctagcaaggtactatgccctgatagaggcagagtatctgattttgggacctcaagtgattgtgaagctataactggaagttt

SEQ ID NO: 579759 - DNA, 481 bp, Homo sapiens
tttaataccttgaacctatttgcttgctttaatgggaaatagaaataagagatacgaatattttcttccatgataagttaagaaaaaaattattatatttaaattataataataaatcagatcataaatttgaataaaatgtcaaatatatcttcgacagaaaaaatatgttggaaacaaccaatttaccacaagttatactttaaagcttatttagatggagagggcaaggaaaagtttgctaaacrctatcttaaataagagaaaaatcaaagatagtgtttcagtttatctccttcaattattaaaatatgtaccaaaatgcttttgaaatatttgaaacaataagttataattttatatatgtatatatatatatttatatctttggaagatatatatatcttcatgtattgtgtatatttatatataatatatatttctatatgttatatatatctttatatatataatattcctc

SEQ ID NO: 579760 - DNA, 454 bp, Homo sapiens
cagatgatacgatcttgtatttgaaaaaaacctaaggactccaccaaaaaactattaaaatgaataaccaaattcagtaaagttgcaggatacaaaaccaacacacaaaatcactagcatttctatatgccaacagtgaacaatctgaaacagaaaacaagaaacaatctcattttacaataacaacacataaatgtaaatatctatgaattaaagaggtgaaagatctctataataaaaattgtaaatcactgataaaagwaattgaagaggacaccaataaatgaaaagatattccatgttcatggattggaagaatcaatatcatgaaaacgtctgtatacccaaagcaatctacagtttcaatgcaatcaaaatatcaattacattctttatagaaatagaacaaacaatcctaaaatttatatggaatcacaaaagacccagaatagcc

SEQ ID NO: 579761 - DNA, 583 bp, Homo sapiens
gggtgtggcatgggagtggatagacacagcggtaacctttactcattcatttgatacatatgacttgagcacttcatgggcaagactctgttagatgctgaagatacagcaatgaaagagacagatacagcctttattctcattgagtttgtattaaaagagacacttggacattaaacaactagttacacaataatttaatcatgatagtggtaagtactaaaaaggagaaaaatagcttggcaacccggaaactcttcagaattagccccctttttaaccattgttgtcctatcctttgttcctatcatttattcctaggagagattttatttaaactacttataattaacaaactccagacagtctctagtgaatgactcaacatgaccctgcaaacttttcaaagagatcagagtacaagattttgaaatataaccaacatgttttgaccaaacttaacctatgaaattagaccaggataagttaaatataaacaggtttctctaggagtaaacatacatgagacaaayacaaaaaaatgtatggtgagcagttcccagcatagcctcccccatcttct

SEQ ID NO: 579762 - DNA, 431 bp, Homo sapiens
atttttagggcagtaaaactattctgtgtgataccataatggtgaatatctgtcattatgcatttgtcaaaagttatgggatctataacaccaagagtaaaccctcatataaaccatgggctttgggtaatgaygtgccagcgcaggttcatctattgtgataaatggatcactgtggtattggatgaccacagtaggggaggctaggcatgggtgaggacagagtatatatggaacatttttgtattcctctcaatgttgccgtgcctccaaaactgctctgaaacacaaagtttattcacattttttaaaagaccacaggaaaaaaaaactttttaatttccatggagaaatacaaacataaacaaaattttttaaataaaaaattaggaggaaagtatttgtcacatacataacagaaaaatcgttaa

SEQ ID NO: 579763 - DNA, 583 bp, Homo sapiens
taaatatggatgaaataggccatgtgataaaaatcactgttaattttacttggttgaaataatggtaatgtagttgtgtagaatgatgtccttaatcttaggaggtacccgatgaatttaggggtgaaatctcatgatgtctacaaattagttttgaatatttcagaaagaaacagagagaaagcaaatgtggcaaaatgttattacattttgaatctaaatactgggtatatgagtgtctactatattattcttttaatttttctatatgtttcaatatttcaaaataaaatgttggaaaaatcatatataatcaatggatatattataaattatattaaaattttaaacgtattattaaaattatatgccatatattaaaattatatacagatatatsaattcatatgtatgtattaattaaattatgtatttaagaatagacgcactttttaaaggacaaagtaaggcatagtaatttattttcattccattaaacgcaattccatactaagtcatctaaacacacttgttaatgcttatgtgagcgcacacacacacacacacacacacacacaatctc

SEQ ID NO: 579764 - DNA, 583 bp, Homo sapiens
taaatatggatgaaataggccatgtgataaaaatcactgttaattttacttggttgaaataatggtaatgtagttgtgtagaatgatgtccttaatcttaggaggtacccgatgaatttaggggtgaaatctcatgatgtctacaaattagttttgaatatttcagaaagaaacagagagaaagcaaatgtggcaaaatgttattacattttgaatctaaatactgggtatatgagtgtctactatattattcttttaatttttctatatgtttcaatatttcaaaataaaatgttggaaaaatcatatataatcaatggatatattataaattatattaaaattttaaacgtattattaaaattatatgccatatattaaaattatatacagatatatgaattcatatgtatgtattaattaaattatgtatttaagaatagacgcactttttaaaggacaaagtaaggcatartaatttattttcattccattaaacgcaattccatactaagtcatctaaacacacttgttaatgcttatgtgagcgcacacacacacacacacacacacacacaatctc

SEQ ID NO: 579765 - DNA, 583 bp, Homo sapiens
taaatatggatgaaataggccatgtgataaaaatcactgttaattttacttggttgaaataatggtaatgtagttgtgtagaatgatgtccttaatcttaggaggtacccgatgaatttaggggtgaaatctcatgatgtctacaaattagttttgaatatttcagaaagaaacagagagaaagcaaatgtggcaaaatgttattacattttgaatctaaatactgggtatatgagtgtctactatattattcttttaatttttctatatgtttcaatatttcaaaataaaatgttggaaaaatcatatataatcaatggatatattataaattatattaaaattttaaacgtattattaaaattatatgccatatattaaaattatatacagatatatgaattcatatgtatgtattaattaaattatgtatttaagaatagacgcactttttaaaggacaaagtaaggcatagtaatttattttcattccattaaacgcaattccatactaagtcatctaaacacacttgttaatgcttatgtgagcrcacacacacacacacacacacacacacaatctc

SEQ ID NO: 579766 - DNA, 630 bp, Homo sapiens
tctgggtgataaaattcaaattgaggtttgggggtggatacagccaaaccatatcaacatcatgttttagatttgtttctagataatttatatttttacgctattgtaaatcgtatttttattcatttcatagctgtttattacaggtatataagttcacagtttatatttcaatattgaccagtaatactataagtcatgcattaactaaagtcatgtattactaatgttatctgtacattcttttgaattttttcataaaatcatatcattttttgtaatccttttatttctcccttccaatctatataccttttttcttttggtttttctgcctctttgcactggatagcatttccagtataatgttgaagagaagtggtgatactgaggatctttctgttatttctaatctccaaagaagagcatttaaccattaagtataaaattatagtagactttttatagatatcttttaccattaggaaaatcttcctgtattcccagtttactaaaaaattcttattatgaaccaatgttaaattttattcaatgcaatttctgaacttattgaaatggtcgattttttctcgttyactctaagttaatttcactgatttcaaaggctaa

SEQ ID NO: 579767 - DNA, 572 bp, Homo sapiens
cctaattatttatgacactctgttactagttgaatggaacatttcatttattttttaatttaacttttattttaagttcagggatacgtgtgtaggtttgttacataggtaaatttatgtcatgggggtttgttgtacagattatttcatcacccaggcattaagcctagtactcattagttatttttcctgatcctctccctcctcccaccctccaccctcttctaggccccattgtatgttgtttccttctatgtgttcgagtattctcatcatttatctcccacttagaagtaagaacatgtggcatttgattttttgttcctgtgtcagtttgctaagcctaactccagctccactcatgttcccacaaaggacatgttgtcattcttttttatggctgtatagtattccgtggtgtatatgtaccaccttttctttatccagtctatcactgatgggcatttaggttggttccatgtctttgctattgtgaatagtgatgcaatgaacatatccatgcatgtgtctttgtgatagaataatttrtattcccttgggtatatacccag

SEQ ID NO: 579768 - DNA, 527 bp, Homo sapiens
tttagacttttttgtttgtttgttttacaaaggtgtcaatgcaattcactgggaaaaagtctcctcaacaaatggtgatgggacaatgggatatccatatgtgtgaaagtgaacttagaccctcaccttatacatgccatatacaaaaatgaactcaaaatgcatcacgaacttaaagtaagagctaaaacaataaaatctttggaagaaaacatagaaaaaatatctttgtgtccttcagataggcaaagatttcttagatatgacaccaaaagcactgttcataaaaaatkgataaacttgacctcattaaattaaaaattttctcctttaaaaaatgctattaacaatatgaaaagacaagaaataaatcaggagaaaatatttgcaaaacacatatctgcaaaacacataaaggatttgtatccagaatttataaaaaatcatagtgctcaaaaataagacaaacagcccaaacaaaaatggacaaaatatatgaacagacatttcatcaaagaacatgtatg

SEQ ID NO: 579769 - DNA, 564 bp, Homo sapiens
agtacctaatacaggataatttgttgcataatgaacacatgtgtgtctgggacagggggtagttgggagtgatgtgaagagtttagtgttctgcatggaaagaaagtatgatgcttgagaaaaggaaggggcaggataatgtaagatcatgggtaccatgataataagctgagactttatgctatggtcaatggtgagaaatggcagaggaatgagtgggttagatttacatgtcaaagatcactctgagagcagtgtaaagagcacctttgaaaaagaaccagactccaagtagagatatcaactaaaaaggttattatgacaacttctcttgttacagatcttaatggaaragctttctatttttcctcactcagtatgatgttagctgtgagtttatcacatatgggctttactgtgttgaggtatgttccttctatacccaatttgttaacagttttttattataaatgatgttgaattgtatcaaatgcattttcagcatctattgaaatgattctacagtttttccctggatgatctatccttggccaaaagtagagt

SEQ ID NO: 579770 - DNA, 618 bp, Homo sapiens
cccttgtcagatgggatagttgcagatattttctcctattcttcagattgtctgttcatgttgttaatttttttctttgttgtgctgaagctttttagcttgatgttatcccatttgtctattttttcttgtgttacctgtgctttataggtcttacccccaaaaatctttgtccagagaaatgtcatatagcatttccacattgttttattttattagtttcatagtttcaggtcttagatgtaagtctttaatctattttgagttgagtttygtatatggtgaaagatggaatctagtttcactcctctgtatatagatatctggccttcccagcaccattcattgaacagagtctccttttcccaatgtattttgaaaaaaataagttatctgtcaactcaccaatttatttttgggtttttattcttttctttaagtatgtgtctctgtttctgagccagatcatgctgctttggctactatagctttgtaatataatttgaagtcaagaagtgtgatacctccagcattgttttttaactcaatattgctctagctattcgaggccttttggttttatatgaattttagttttttctatttctgtgaagaatg

SEQ ID NO: 579771 - DNA, 618 bp, Homo sapiens
cccttgtcagatgggatagttgcagatattttctcctattcttcagattgtctgttcatgttgttaatttttttctttgttgtgctgaagctttttagcttgatgttatcccatttgtctattttttcttgtgttacctgtgctttataggtcttacccccaaaaatctttgtccagagaaatgtcatatagcatttccacattgttttattttattagtttcatagtttcaggtcttagatgtaagtctttaatctattttgagttgagttttgtatatggtgaaagatggaatctagtttcactcctctgtatatagatatctggccttcccagcaccattcattgaacagagtctccttttcccaatgtattttgaaaaaaataagttatctgtcaactcaccaatttatttttgggtttttattcttttctttaagtatgtgtctctgtttctgagccagatcatgctgctttggctactatagctttgtaatataatttgaagtcaagmagtgtgatacctccagcattgttttttaactcaatattgctctagctattcgaggccttttggttttatatgaattttagttttttctatttctgtgaagaatg

SEQ ID NO: 579772 - DNA, 545 bp, Homo sapiens
acttttctgtgttatcttgaatttctttgagtttcttcaacacagctattttgaattctccgtctgtaaggtcatatatttctttctccaggactggtccctgttgacttatttcattcattttgtgaggtcatgttttcctggattgtcttgacacttgcagatgttcgtctgtgcctgaacattgaagagttaggtatttattgtagtcttcactgtctgggtttgttcgtacttgtccttcttgagaaggctttccagaatttgaagttacttggatgttgtgatatattcgctttaatggggaccccaagcccagtaatggctatagttcttgcagaattgtagaggttctgccttgatggtcttggacaagatccagcataattttctggattaccaggcagagacactttttcttctcttgctttctctccccaaaatggagtctaaggtgactgttctgagctatgtggagttggagatggagtaacacaagcacccytgtggccactatcactatgactgcaccgagtcagacctga

SEQ ID NO: 579773 - DNA, 525 bp, Homo sapiens
acagcctgggcaacatagcaagacccccatctctacaataaattaaaaaaagatagctagacatggtggcacctacctgtggttccagctacttgggaagctgaacaggaggattgcttgagtgtatgaggctgaggctrcagtgggttgtaattatgtcactgcactccaggctaggtaatggagcaagatcttgtctcaaaaaagaaaggaaagaaaaaaagacactttcaaggttgctttaaagaaagataatctggtgcagaaaatgtgccctgaaatgccttatgtgcacatcatctattctggaaccgacttggggttggattagaactgcaggtagaaatcagtgtgacaattggggagaacagtgtgcctaagacatgcagaattcagaatatcaaagaactgggggcttcagcaagtgcataatggaaagcacaaagcctaatggagcaaaagattcattacattgaacagaaaaagggtaagaaatcattgaacgaatcagttggagttgcttca

SEQ ID NO: 579774 - DNA, 525 bp, Homo sapiens
acagcctgggcaacatagcaagacccccatctctacaataaattaaaaaaagatagctagacatggtggcacctacctgtggttccagctacttgggaagctgaacaggaggattgcttgagtgtatgaggctgaggctgcagtgggttgtaattatgtcactgcactccaggctaggtaatggagcaagatcttgtctcaaaaaagaaaggaaagaaaaaaagacactttcaaggttgctttaaagaaagataatctgrtgcagaaaatgtgccctgaaatgccttatgtgcacatcatctattctggaaccgacttggggttggattagaactgcaggtagaaatcagtgtgacaattggggagaacagtgtgcctaagacatgcagaattcagaatatcaaagaactgggggcttcagcaagtgcataatggaaagcacaaagcctaatggagcaaaagattcattacattgaacagaaaaagggtaagaaatcattgaacgaatcagttggagttgcttca

SEQ ID NO: 579775 - DNA, 630 bp, Homo sapiens
agaaaaaaaacatagcattaaagcaaaaaaaaaaaaaaaaactgcataaataaatgactgcagccttattgcacatctgggaggagaatgacaatgaccagtcaacagtacaactcaatacatgaccagggtgctgtgagatatggcccagcagaattagcagtagagttcaactgtagcagccaggttttccagtgcaatcgtgttcccgatgtccctgtatattgkggatgtttctaaggtgggcaaaagcatcgtaactcagtagctctgggttcaaatcttattcccactacaaatctgtagagtgactcagggcaagttcaattaacttgtctgagccttggtttcacccactgtaaattatttcccagggggctttctactggagccctgtcatgtgcatttaagaaaaatgtgaaacttgcataggtctgctatcctctgcaatacatctttattttatgttccttttcctcccaactattcttctaagaagcagcttgaatttctcttttaatcaggaagccattttttatcatcaatgaaagtgtaaaaactctatcagttagaactgtatatttatggcaggttcatatgattggaacttaactctatttcattaataca

SEQ ID NO: 579776 - DNA, 406 bp, Homo sapiens
ctgcctgatcgcctcggaagccctgtagaccatcacggacgccgagctttaggtaaytctcacagtggtgggtaagtccgtccccttcttaatcaatacggaggctacccactccacattaccttcttttcaaaggcctgtttcccttgcctccataactgttgtgggtattgacagccaggcttctaaacctcttaaaactccccaactctggtgccaacttagacaatactcttttatacactcttttttagttatccccacctgcccagttcccttattaggctgagatattttaaccaaattatctgcttccctgactattcctggactatagccgcatctcattgctgcccttcttcccaatccaaaagcctcctttgcttcctcctcctgtattccccca

SEQ ID NO: 579777 - DNA, 406 bp, Homo sapiens
ctgcctgatcgcctcggaagccctgtagaccatcacggacgccgagctttaggtaattctcacagtggtgggtaagtccgtccccttcttaatcaatacggaggctacccactccacattaccttcttttcaarggcctgtttcccttgcctccataactgttgtgggtattgacagccaggcttctaaacctcttaaaactccccaactctggtgccaacttagacaatactcttttatacactcttttttagttatccccacctgcccagttcccttattaggctgagatattttaaccaaattatctgcttccctgactattcctggactatagccgcatctcattgctgcccttcttcccaatccaaaagcctcctttgcttcctcctcctgtattccccca

SEQ ID NO: 579778 - DNA, 406 bp, Homo sapiens
ctgcctgatcgcctcggaagccctgtagaccatcacggacgccgagctttaggtaattctcacagtggtgggtaagtccgtccccttcttaatcaatacggaggctacccactccacattaccttcttttcaaaggcctgtttcccttgcctccataactgttgtgggtattgacagccaggcttctaaacctcttaaaactccccaactctggtgccaacttagacaatactcttttatrcactcttttttagttatccccacctgcccagttcccttattaggctgagatattttaaccaaattatctgcttccctgactattcctggactatagccgcatctcattgctgcccttcttcccaatccaaaagcctcctttgcttcctcctcctgtattccccca

SEQ ID NO: 579779 - DNA, 406 bp, Homo sapiens
ctgcctgatcgcctcggaagccctgtagaccatcacggacgccgagctttaggtaattctcacagtggtgggtaagtccgtccccttcttaatcaatacggaggctacccactccacattaccttcttttcaaaggcctgtttcccttgcctccataactgttgtgggtattgacagccaggcttctaaacctcttaaaactccccaactctggtgccaacttagacaatactcttttatacactcttttttagttatccccacctgcccagttcccttattaggcygagatattttaaccaaattatctgcttccctgactattcctggactatagccgcatctcattgctgcccttcttcccaatccaaaagcctcctttgcttcctcctcctgtattccccca

SEQ ID NO: 579780 - DNA, 628 bp, Homo sapiens
ttctgagggctctgttctgttccattggtctatatctctgttttggtaccagtaccatgctgttttggttactgtagccttgtagtatagtttgaagtcaggtagtgtgatgctacctgtgtatcctcttggtttatgaggatagaagagaaaggaaagaagaagagatggagggaagaaaacaatacatacgcatttcttgctggtaacttagtcattctggtatctataaccagattttaaaggagatatcttgcacactgtaaaggattggcagggaaggagggactattgmtctttttccctttactgaattgtaacttggctgagacaagaatgcagaataagattatagatagatgataaattgggatgtgcggaactccaatatagaactctactaaagcaagtacttggataggaacacctttaagggttttgccaagtgagagtttcttctaccacagtgaatacaatattagagatttgaagcctgaaaagataatctggcttttcttaataacatttataatcaaccagtatgctatttagtaggaattgataacatttatatataataaataaattatcaaatgtatttccttttgcataatttatcttagtttaa

SEQ ID NO: 579781 - DNA, 618 bp, Homo sapiens
aaagtgaccaaacagaaattccaccctaggaaagacaatgggaaaatgcatggggcagagaatgagaagacaccagttggatcaagctgcaagccttcatttttatatttattaatgtcctctgcccttttgaagtcatcatgtgacatcaatgagttcacatccaaaaaatgactgtatgaaaactacaattaagtgaatttctaaccactggtgcagtaagattgagatgtcctgtaaggcttttcctcctcaacatccttaaacatatttggcccctgatttcccctgagtcaaactttaattaattagyactctttaacatctctattattagttctttgggttgtttaacaaacagcatgccctcttttggcaagggctgacaactcctaaaagcactgagtgtgccatattccaggctcaatgtaaatactttctgtgggttatctaatttaaagacacaaagaggctcatattcttatgatcatcattttatggataagcacactgaggctcaaaaagggtaaacagtttgccaacactatgcactgttaagtgatatagttggtatttaaattcagacagccttgacttcagataatatattcttaacca

SEQ ID NO: 579782 - DNA, 618 bp, Homo sapiens
aaagtgaccaaacagaaattccaccctaggaaagacaatgggaaaatgcatggggcagagaatgagaagacaccagttggatcaagctgcaagccttcatttttatatttattaatgtcctctgcccttttgaagtcatcatgtgacatcaatgagttcacatccaaaaaatgactgtatgaaaactacaattaagtgaatttctaaccactggtgcagtaagattgagatgtcctgtaaggcttttcctcctcaacatccttaaacatatttggcccctgatttcccctgagtcaaactttaattaattagcactctttaacatctctattattagttctttgggttgtttaacaaacagcatgccctcttttggcaagggctgacaactcctaaaagyactgagtgtgccatattccaggctcaatgtaaatactttctgtgggttatctaatttaaagacacaaagaggctcatattcttatgatcatcattttatggataagcacactgaggctcaaaaagggtaaacagtttgccaacactatgcactgttaagtgatatagttggtatttaaattcagacagccttgacttcagataatatattcttaacca

SEQ ID NO: 579783 - DNA, 443 bp, Homo sapiens
ggggaggatcacctgaagtgaggagtttgagaccagcctggctaacatggtaaaactctgtttctactaaaaatacaaaaaattaactgcrcatggtgatgcatgcctgtaatctcaggtactcaggaggctgaggcaggagaaccacttgaactcgggaggcagaggttgcagtgagctgagatcgtgccattgcactccagcttgggcaacaagagagaaactccgtctcaaaaacattttcaagagaaggtaataagaacttttactggtcaggaaaggctatgctatgcttcaataacaaaataaacttgaaatctctagggtttttataatttttggttttatatttaagtctttaatccatcttgaggtaatttttgtataaaatgtaaggaaggggtccagtttcagttttctgcatatggctagccagttttccc

SEQ ID NO: 579784 - DNA, 443 bp, Homo sapiens
ggggaggatcacctgaagtgaggagtttgagaccagcctggctaacatggtaaaactctgtttctactaaaaatacaaaaaattaactgcgcatggtgatgcatgcctgtaatctcaggtactcaggaggctgaggcaggagaaccacttgaactcgggaggcagaggttgcagtgagctgagatcgtgccattgcactccagcttgggcaacaagagagaaactccgtctcaaaaacattttcaagagaaggtaataagaacttttactggtcaggawaggctatgctatgcttcaataacaaaataaacttgaaatctctagggtttttataatttttggttttatatttaagtctttaatccatcttgaggtaatttttgtataaaatgtaaggaaggggtccagtttcagttttctgcatatggctagccagttttccc

SEQ ID NO: 579785 - DNA, 443 bp, Homo sapiens
ggggaggatcacctgaagtgaggagtttgagaccagcctggctaacatggtaaaactctgtttctactaaaaatacaaaaaattaactgcgcatggtgatgcatgcctgtaatctcaggtactcaggaggctgaggcaggagaaccacttgaactcgggaggcagaggttgcagtgagctgagatcgtgccattgcactccagcttgggcaacaagagagaaactccgtctcaaaaacattttcaagagaaggtaataagaacttttactggtcaggaaaggctatgctatgcttcaataacaaaataaacttgaaatctctaggktttttataatttttggttttatatttaagtctttaatccatcttgaggtaatttttgtataaaatgtaaggaaggggtccagtttcagttttctgcatatggctagccagttttccc

SEQ ID NO: 579786 - DNA, 659 bp, Homo sapiens
tatataataatcagaaaaaaaaatctgcttttatcctgatattaaaaaatttgctgtggtggctggtgattcccgtcctaaaacattcagagggagccacctaacatggacttttataatgtagttaactttactatattaaagagataatggaaagaaaaattacacaactcaaactccttgatcactccttgctttccctgatatacaaagcttcatataaatgagagtgcttaagaaatcagaagcatatttaatgacttcaaaattagggcggataataaaatacttctgggatcatggcagccagaaggcaggactagattgcagctctggacaaagcagcatgcagaggattacgttgtgaattttagctccagtaatcacaagagcacccacagaccctctgaaggamgcagacttctcctgcaggacctgggagacaccccaaatactgtgagtgccccaacaagtgcagaagtgggaaagggagaccctccttttctgaacacacacccccactggagaagatgaaggtctgtttgcaggagaagtttctgacttcacctggtgcttagtcaaattagagagctcaccgaaatacaggggtagaggaagcagcagaaaggccccgggagctcactgggtctccaagcgcc

SEQ ID NO: 579787 - DNA, 488 bp, Homo sapiens
atcttttcaggctactatgtgagttgggcttaattatgtttattgataggactgatttttttgtgttatattattttagactttctcttttcaaggctttaaacataccatctttgcctctgctttctgtgttgttaaatataatcttatttttaaagacagtatcacaatatttactcttctaattttgctcattttttaaattattgcggattataatgtttacatttggkcctgaacttgtagccttaacatttgtttagtctttgttctatagttgaatagattcaatgatcaccacaaatttctttgctgtggcttttccactcatttcttgattggcgaaatcttgctcaccatgagattcctcaagaacagatgagaataattcttgtgaattcttgcatttggtattccttgaaatgtataggctgaaatattcttttattttagcaaagtcttaataaattatatatttaaatgctttt

SEQ ID NO: 579788 - DNA, 618 bp, Homo sapiens
gacaagtgaaaagaaagagctttcgaagctctgcttttaatcatatcagcccagacacatattaattctcatattccattggagagaatgcatcacaaggtcccaaatgaaaggggggtctgttgtaatttagcagtgtgccaagacaaataaaacctggatattaatgaaaatactgggcagtctctgctacagcagaatcccatatttctactaccataaactactattttgtgagctaagtagttctctcactttctgtattttttgctaccatccacataatccatcrtatgtatcatttcttcttcttttccctttcaaatagaaggtatttttaaaaatcttagctcagaaatcttttatttttttatttttccataagttattggggtacaggtggtatttggttacatgagtaagttctttagtgctgatagagattttggtgcacccatcatccatgtatacactgcaccatatttatagtcttttatcccttgcccccctcccactctttcctccgagtccccaaagtccattgtatcattcttatgcctttgcgtcctcataggttagttcccacatatcagtaagaacatatgatgtttggttttc

SEQ ID NO: 579789 - DNA, 618 bp, Homo sapiens
gacaagtgaaaagaaagagctttcgaagctctgcttttaatcatatcagcccagacacatattaattctcatattccattggagagaatgcatcacaaggtcccaaatgaaaggggggtctgttgtaatttagcagtgtgccaagacaaataaaacctggatattaatgaaaatactgggcagtctctgctacagcagaatcccatatttctactaccataaactactattttgtgagctaagtagttctctcactttctgtattttttgctaccatccacataatccatcgtatgtatcatttcttcttcttttccctttcaaatagaaggtatttttaaaaatcttagctcagaaatcttttatttttttatttttccataagttattggggtacaggtggtatttggttacatgagtaagttctttagtgctgatagagattttggtgcacccatcatccatgtatacactgcaccatatttatagtcttttatcccttgcccccctcccactctttccyccgagtccccaaagtccattgtatcattcttatgcctttgcgtcctcataggttagttcccacatatcagtaagaacatatgatgtttggttttc

SEQ ID NO: 579790 - DNA, 470 bp, Homo sapiens
tctcacttataagtgggagctaaatgatgagaacacatgaacacatagaggggtcaaggaataaatcataaaaaatattagaaaatactttgcagtaaatgaatatgaaaacataatataccaaaatttacggaatgcagagaaagcaatggaaagaaggaaatttataggtgttaacacatattaacaagaagaataatctcaatcaaaatcctcactggccaatttgagaaactagaaaaagaagagcaaactaaacccatacgaagccgtgggaaagaaacactaaggattmgagaagaatgaaataaaatagagaatagaaacacaacacagaaaaaaaacacaaaagtttgttctttgaaaagatatataaaattgagacacttttggctatgctgataaagaaataagagagaggagtcaagttatcaaaattatgaatgaaagaggattcattattaccaacc

SEQ ID NO: 579791 - DNA, 549 bp, Homo sapiens
tgcctttcaccttctgccatgattgtgaggcctctccagacacgtggaactgtgagtccaataaacctcttcttttttgtaaattacccagtcttgggtatgtctttatcagcagtgtgaaaatggcytaatactttcccctacgatgggaccctgctggagtatttactcccagtcttgcccattcttagcttcccattagtcaattacattttaagttttcctactttagtactggttcccactcaggtttctgctccagtagcttgtgagtctctgtatttgcctttctgtctgtcttattttggggacagtgattttccctgtgacctcacttctcatatggatttaagaagaatggatgatttttcagatttttcagcttttttacttgttgttatgacagagtggtgacctctaagttctttacatgccagactaacaactaaaagttgtaattcattattatttagtaaaacacataacgtcttagttcatcagcaacctaaaatccacaagctcattattccttccagaaacagaacaacc

SEQ ID NO: 579792 - DNA, 549 bp, Homo sapiens
tgcctttcaccttctgccatgattgtgaggcctctccagacacgtggaactgtgagtccaataaacctcttcttttttgtaaattacccagtcttgggtatgtctttatcagcagtgtgaaaatggcctaatactttcccctacgatgggaccctgctggagtatttactcccagtcttgcccattcttagcttcccattagtcaattacattttaagttttcctactttagtactggttcccactcaggtttctgctccagtagcttgtgagtctctgtatttgcctttctgtctgtcttattttggggacagtgattttccctgtgacctcacttctcatatggatttaagaagaatggatgatttttcagatttttcagcttttttacttgttgttatgacagagtggtgacctctaagttctttacatgccagactaacaactaaaagttgtaattcattattatttagtaaaacacataacgtcttagttcatcagcaacytaaaatccacaagctcattattccttccagaaacagaacaacc

SEQ ID NO: 579793 - DNA, 611 bp, Homo sapiens
gaagctttttagtctagttaagtcctatatatttttgtttttgttgcatttgcttttgggttcttggtcatgaagtctttgcttaagcctatgtctagaaaggtttttctgatgttatctttttaaatttattttattttattttgagatggagtcttgctctttcgcccaggctggagtgcagtggcacgatctcagctcactgcaacctccacctcccaggtgcaagcaattctcctgttycagtctcctaagtaactgggactacaggcgcccaccagcatgccagctaatttttacatctttagtagagacaggatttcaccatattgttcaggctggtcttgaattcttgacctcaggtgatccttccgcttcggtctcccaaagtgctgagattacaggcgtgagccactgtgctgggtctctgatgttatcttctagaactttttttggtttcaggtctgattttatggtttcaggccttgatacatcttgagttgatttttgtataaggtgagaaacgaggatgcagtttcattcttccacatgtggcttgccaattatcccagcaccatttgttgaatagggtgtcctttcctcagtttata

SEQ ID NO: 579794 - DNA, 364 bp, Homo sapiens
tggtggatatttagaaaattcctttctgcttgacagacaagacagcaaacacacagttttagggcagtgaagtaagtgctatggacaaaagagtgtgcatggctccaggggattgtagtggaggragcttatggctgcctagagtggtcaaggaagtcttccaaggggaggagttgtgagttgagaggattttcttcaacatctggagctgcagagggagccttccaagcagtagaatgaaatgtacaaagacacatcagctggggaagttttgcagtgtacatgtaccaggagtggcttctggactgtttttcactagaccttactgactagtctgagatatcccatgtatgtgaggggtggt

SEQ ID NO: 579795 - DNA, 622 bp, Homo sapiens
gctttctctgcctcctctcagatggggcctttctccaacaaagaggaggcgtgacgggaaaagtaagacgaggaggagaaggtgaaggaggaggaatggaaaagtaagactgagatctgacagctttgttcagaggccgaatcctcaccttctctaaagcactgtctctcctttatgggcccatgccagggttccagttctcaacccccacggtggagtggtgtagcagcttctaagaacaagccaggcctgagcccaggaaaacgttgctgcgggatcggctttgtggccttaggcattgatggatttgtatgtgtaaaaatggggataatgatacttatcattccattaggtgcatatagttcctaatatayatatagagggaactaatggtattatgataattgttattctggtgggtccttggggacaacggagctggtttctgaatcagactcatgttacagagctcaatgctggtcctttccaaactgcctgtgacacgtgctcctccagccttagactagtggccacttgccatatgagctcgataaaccttgaattggtctatatcccagtcaatgagatgagtcatgcactcccagtcaatgagatgagtcca

SEQ ID NO: 579796 - DNA, 575 bp, Homo sapiens
gttagttatttgtgaaacttgcaaagtaccaatcaaagggggagactatacccatcagcacatattgttccatgataatgctgattcactctttcaaacatttagagtcaagaaattataggggccaaggatcatattttatagaaaagggaggacacagaattgatcgtagcaagcatatttattagaagtctttcttcattcctctctcttctttcaaatcctctttcttcttcatggcctctttccacaccccactgcatctacaaagcattccctgaccactaggcctaaccatgttkccttactctttgaaaatctgtgaagacagattctctgctctttttagggctgtttcatgtagtaaagtattggctctggatgtcagactccctggattgaatccccagcacttgctaattgtaaaaaatcttaggtgacattatttaaattgtttttttttttagattcctattattattattattgttattatactttaagttttagggtacatgtgcacaacctgcaggtttgttacatatgtatacatgtgccatgttggtgtgctacac

SEQ ID NO: 579797 - DNA, 575 bp, Homo sapiens
gttagttatttgtgaaacttgcaaagtaccaatcaaagggggagactatacccatcagcacatattgttccatgataatgctgattcactctttcaaacatttagagtcaagaaattataggggccaaggatcatattttatagaaaagggaggacacagaattgatcgtagcaagcatatttattagaagtctttcttcattcctctctcttctttcaaatcctctttcttcttcatggcctctttccacaccccactgcatctacaaagcattccctgaccactaggcctaaccatgtttccttactctttgaaaatctgtgaagacagattctctgctctktttagggctgtttcatgtagtaaagtattggctctggatgtcagactccctggattgaatccccagcacttgctaattgtaaaaaatcttaggtgacattatttaaattgtttttttttttagattcctattattattattattgttattatactttaagttttagggtacatgtgcacaacctgcaggtttgttacatatgtatacatgtgccatgttggtgtgctacac

SEQ ID NO: 579798 - DNA, 575 bp, Homo sapiens
gttagttatttgtgaaacttgcaaagtaccaatcaaagggggagactatacccatcagcacatattgttccatgataatgctgattcactctttcaaacatttagagtcaagaaattataggggccaaggatcatattttatagaaaagggaggacacagaattgatcgtagcaagcatatttattagaagtctttcttcattcctctctcttctttcaaatcctctttcttcttcatggcctctttccacaccccactgcatctacaaagcattccctgaccactaggcctaaccatgtttccttactctttgaaaatctgtgaagacagattctctgctctttttagggctgtttcatgtagtaaagtattggctctggatgtcagactccctggattgaatccccagcacttgctaattgtaaaaaatcttaggtgacattatttaaattgtttttttttttagattcctattattattattattgttattatactttaagttttagggtacatgtgcacaacstgcaggtttgttacatatgtatacatgtgccatgttggtgtgctacac

SEQ ID NO: 579799 - DNA, 550 bp, Homo sapiens
aaaaaatggtgctgggataattggtaagtcacatgtaggagaatgaaactggatcctcatctctcaccttatgcaaaaatcaactcaagatggatcaaagacttaagtctgagatctgaagccatgaagattcatcagaaaaacccttctagacactggcttragcaaggacttcatgaccaagaaccccacagcaaatgtaacaaaaataaagataaataggtgggacttaattaaactaaaaagcttctgcacagcaatagaaataatcagaagagttaacagaacccacaacccacagaatgggagaaaaatcttcacagtctatacatctaacaaagtactaatatcccaaatctacaaagaacacaaacaaatcagtaagaaaaaaaaatctcatcaaaaagtgggctaaagatatgaatagacaattctccaaagaaggtatacaaatgaaaaaaagtatatggaaaaatactgaatatcactaattatcagggaaatgcaaatgaaaatcacaatgcaataccacctcatttctgcaagaatg

SEQ ID NO: 579800 - DNA, 550 bp, Homo sapiens
aaaaaatggtgctgggataattggtaagtcacatgtaggagaatgaaactggatcctcatctctcaccttatgcaaaaatcaactcaagatggatcaaagacttaagtctgagatctgaagccatgaagattcatcagaaaaacccttctagacactggcttgagcaaggacttcatgaccaagaaccccacagcaaatgtaacaaaaataaagataaataggtgggacttaattaaactaaaaagcttctgcacagcaatagaaataatcagaagagttaacagaacccacaacccacagaatgggagaaaaatcttcacagtctatacatctaacaaagtaytaatatcccaaatctacaaagaacacaaacaaatcagtaagaaaaaaaaatctcatcaaaaagtgggctaaagatatgaatagacaattctccaaagaaggtatacaaatgaaaaaaagtatatggaaaaatactgaatatcactaattatcagggaaatgcaaatgaaaatcacaatgcaataccacctcatttctgcaagaatg

SEQ ID NO: 579801 - DNA, 598 bp, Homo sapiens
ctcagtagtcagcttgtactgaatactccaaggcctcctttaaggacagtttggtgccaatctggccaaggtctggtccataaatgccatccaggagccaaggcttgggatcagggaacccaggagcccacttgatattctacatcactgtggctgagctcgtacgtgagctgaaagacaaagtcccctttactctttcctctcctttcctcaaacatacggagtaactctccatggccactatgtctaggaatgccctggatcacatatgaaatcagcacagcattgggtctcacccaaggcctgccgtgagtactacctggaaaccactgatatttatagaaggttcaagtgctctttagtcagtagacaataaatccttccaagactgtgtccttcccctcaaggcagtcatttcccctgttgcccagggttgtctagaaatggcatccaagagctagggcctgaaatgagggcttcaggactctgcctgatgccctaatttactttgtctgagcaggtatccaagttgttaggcaaagtgctctttactttccccctctcctcttctcawatggaaggaagagtctttcccaga

SEQ ID NO: 579802 - DNA, 528 bp, Homo sapiens
tgcttcttcaaataagcaatgtcaatactggcaaaaatgtcagaaacaaagttttctgcactctggaaattaataaaaggtttgtaacaacctgaggagggttatttcaagaaaattgatatgtcttaataagaacagtaagcctattggtgtttttacttaccctattcccatctctctttcctcaaccttgaaaaccaacagactttcaactacagtagctgtgaaaagcagcagtccagcagactttggaaagttcarcattttcttaaaagctccatctccagcaaatcgtcactctttaacctatcagaaaatacctgaagagctatatttaactcaggtcttgatctgtcttaacatccctgtattcagtacatttgtcaaaaataatcattggcaattggttaacattgcagctttttgaggtggcagtatcagctgtagctaaaagaggctggccaaaagaactcagagaaattagagaatgagatgtccctagggtgctctgaaaaggtctgacatatt

SEQ ID NO: 579803 - DNA, 518 bp, Homo sapiens
ggtacaagtacaggtggtttgttacctaggtaaatttgtgtcatggcggtttgttctacagattatttcatcacccaggtattaagcctagtatccattagttatttttcctgattcctttcccttctcccatgctccaccctctgaaaggccccagtgtgtgttgttcccctgtaagtgtccatgtgttctcaccttttagcttccacttataagtgagaacatgtggtatttggttttctgttcttgtgttagtttgccaaagataatggcctcaaaggaatataaattattctactataaaggcacatgcatgagtatgttcattgcagcactattcaygatagccaagacatgaaatcaacctaaatgtccatcagtgagagactggataaagaaaatgtggtacctataaccatagaatactatgcagctgtaaaaaagaatgagatcatgtcctttacagggacatggatggagttggaggccattatccttagcaaactaacacaggaaca

SEQ ID NO: 579804 - DNA, 470 bp, Homo sapiens
ttgcagctcgcttcacagaccacactttgagtagcaagactaattatatccagcccaatcattttctagaagctcttcagcagttccttaacctgttttctgctgtaatcctctcttcatgtccatcattcctccaaaaagmaattattatgtgctggttactgcgtgctaatgctttacaagttctatcatccacattttacagaagagaaaacagaagcactaatagattatgtaacttgctcaatatcacccagctagtaattagtggagttgggatttgaaaccaactagcctgcttccagaatccagtgtcttaaccaaccattatttgtttatatatctgtctcttctacttaagatacatctagctcttcaaagatatatagcttatacatcttttttctacaactatttaatacagtaaatgtttttgtaaagaagggagggagggatggcttcatttgtgt

SEQ ID NO: 579805 - DNA, 470 bp, Homo sapiens
ttgcagctcgcttcacagaccacactttgagtagcaagactaattatatccagcccaatcattttctagaagctcttcagcagttccttaacctgttttctgctgtaatcctctcttcatgtccatcattcctccaaaaagaaattattatgtgctggttactgygtgctaatgctttacaagttctatcatccacattttacagaagagaaaacagaagcactaatagattatgtaacttgctcaatatcacccagctagtaattagtggagttgggatttgaaaccaactagcctgcttccagaatccagtgtcttaaccaaccattatttgtttatatatctgtctcttctacttaagatacatctagctcttcaaagatatatagcttatacatcttttttctacaactatttaatacagtaaatgtttttgtaaagaagggagggagggatggcttcatttgtgt

SEQ ID NO: 579806 - DNA, 567 bp, Homo sapiens
tttctgcaaactctgagagacawacattattctcatttgacagaaaggaaaactgaggttcaaagataaatgactttttaaactaaagtgttacaatttgacagaaaggaaaactgaggttcaaagataagtgactttttaaactaaagtgttacaagccagtttgacaaagcttgtatgctattataatttcagattcaaattccaatgctccctctcctaaatttttattgttttgaggaaaattaaactaaacattaaaaaagttcatttacttccatttttatgcctcccttgaaatgcaaatttagcacaagccaaccatctctctctaagcatttccaagcacttgaggcatccacttctttgcactcagcagatggtcataaaatatgaacaaatgaagacagttcatctttagactctagggagtcacagagtcacataagcttaggatttgaatgggcttagaggatttctaaataatgctctctggtttataaataaaaaagctaaggcactacgtcctagagctagtaaaaaaaaccagatatcctcactcccaaa

SEQ ID NO: 579807 - DNA, 554 bp, Homo sapiens
atgttaaatgacctccaatgaagttcaatgagcaaagaatcaagattaagctatgatggaaggaaaacaaggagggcaggggatagaaaatacaaagtctcataaatacctggaaaaatgagataaacacattcatattgctatcrtatattaagaaattaacgcattctgagatgacatggatatgccctgttcagtatgctctgaggtttgaaattcaaccacaatgtgagagttacctatcttctacccttggaacccagtggtttttacccactgattatgcccaaacactagagaagaaagttggctgctttcagatgtttaaggggaaagggaaacgtacatgtaagcactgagtgtcctaactggcacactctaagatggctcccagtgatccctccttcctttgattcacacctttgtgtaatcatttgccttgaggtggcaggatttggtgacttacttctagtgaattggacacagcagagttgactggatgtcaattcaatgaacatgtcctgcaatagattgtgcttccgtgttgggttttt

SEQ ID NO: 579808 - DNA, 519 bp, Homo sapiens
cagcagttattcatataggaaaactaagaagtcaaattatttctcttcactgatatgattctatacctagaaaaccctaaagacccatccaaaaggctcttggaagtaataaatgacttcagtaaaggttcaggatacaaaattaatgtacaaaaattaatagcatttctatacattaataatgtccaagcagagagccaaaccaagaatatattcccatttacaacagtcacaaaagaaaagacctaggaatacacctaaataaggtgtaagatctctgcaaggagaactgcaaaatactgctgaaagaagtcagagatgatacaaacaaatggaaaaatattccatgctcatggattggaagaatcagtatcattaaaatggccatactgcccaaagcaatcaacagattcattgctattcctatcaaattaccaatgtstttttttatagaattagaaaaaaactattctaaaattcatatggaaccaaaaaaagagcctgaatagccaaagaaat

SEQ ID NO: 579809 - DNA, 276 bp, Homo sapiens
cctctcaatcctgctcttcttttaggaaatttgctctcctccaatgtctgtggtcttggtgaagctagaaattatcaagtctcmttctcccttacccatgaaggggcagacacaggatccacactagaccaatgggacacttcttgggactttacatcttaaatgaaactaggctaagataaaaattggagctgaccaagtggtggtgttttttacttatttatttatttttttgagacggagtctcactctatcgcccaggctgaagtgcagtgg

SEQ ID NO: 579810 - DNA, 607 bp, Homo sapiens
gatacaaaagccagcttgtattagtggggataaacgagattgtgctaaagtaatgaataaacacctaactctcagtttttaaccaaaggtctatttttaggcaatggtctagatacaaagctagtaaactggggactctcttccacaaaatcactcagggactttagtgcaatgaatcaccatttctggccgcagtgttggaacttgggaacttcaccgtcactggggcagaagagaccgcatgaagatctcacaccgactgaggccatgccagccaaatgtcacatcttgcagaccactagttgcaactagacttgtgacttgtcaaatggctaggttgtgtagtcttccttgtgcctgaatggagaattgcattttggtaacccatagcagccattaacatatttctatgtttgtcatgctctaaaagaattgtaataacttatagtgtctacctcctagaaattctgtaggattaaatcggttaatatgtctggggcctggcacatagtgtgcactaaaacctgtctatttctataattattatactawttagtagtacagctgtcctacatatccatgggggatacattttagatcccagcgg

SEQ ID NO: 579811 - DNA, 588 bp, Homo sapiens
caaaaagaaaataagaatattaataacatattattaatgcataatagtcmagaaaagggagtgcaagtaattaaacacacatatatatatatacagtattgcttttgactcttcttgtttctgactactgatgtatttcctttctcgttttcttctcttttttatctctgagcagttaaaaaggtatgctttatttttggggggatcttttcagttgaagacagtgcgaaatgaccccttttggttcaaatattggtgtagccctgctccaccattctccagagagataatgagctgctaatatctccacaggctgatgaccaggagcatcatttctttgttatattacttgactcactcacttctctgacctgttacagaaacgcctttcttttacagctcctgtccactgaagtgggaagatccatttccttagccttatcccaggaatgtttaatgtctaagggctctgtgttaaaggtagctgggtgaagaaggtgtttggaaagtcagagaaagaagagaaaggatggagggggagagagaaagagagagattagatttgtactaaatatatcattaatgaag

SEQ ID NO: 579812 - DNA, 588 bp, Homo sapiens
caaaaagaaaataagaatattaataacatattattaatgcataatagtccagaaaagrgagtgcaagtaattaaacacacatatatatatatacagtattgcttttgactcttcttgtttctgactactgatgtatttcctttctcgttttcttctcttttttatctctgagcagttaaaaaggtatgctttatttttggggggatcttttcagttgaagacagtgcgaaatgaccccttttggttcaaatattggtgtagccctgctccaccattctccagagagataatgagctgctaatatctccacaggctgatgaccaggagcatcatttctttgttatattacttgactcactcacttctctgacctgttacagaaacgcctttcttttacagctcctgtccactgaagtgggaagatccatttccttagccttatcccaggaatgtttaatgtctaagggctctgtgttaaaggtagctgggtgaagaaggtgtttggaaagtcagagaaagaagagaaaggatggagggggagagagaaagagagagattagatttgtactaaatatatcattaatgaag

SEQ ID NO: 579813 - DNA, 588 bp, Homo sapiens
caaaaagaaaataagaatattaataacatattattaatgcataatagtccagaaaagggagtgcaagtaattaaacacacatatatatatatacagtattgcttttgactcttcttgtttctgactactgatgtatttcctttctcgttttcttctcttttttatctctgagcagttaaaaaggtatgctttatttttggggggatcttttcagttgaagacagtgcgaaatgaccccttttggttcaaatattggtgtagccctgctccaccattctccagagagataatgagctgctaatatctccacaggctgatgaccaggrgcatcatttctttgttatattacttgactcactcacttctctgacctgttacagaaacgcctttcttttacagctcctgtccactgaagtgggaagatccatttccttagccttatcccaggaatgtttaatgtctaagggctctgtgttaaaggtagctgggtgaagaaggtgtttggaaagtcagagaaagaagagaaaggatggagggggagagagaaagagagagattagatttgtactaaatatatcattaatgaag

SEQ ID NO: 579814 - DNA, 588 bp, Homo sapiens
caaaaagaaaataagaatattaataacatattattaatgcataatagtccagaaaagggagtgcaagtaattaaacacacatatatatatatacagtattgcttttgactcttcttgtttctgactactgatgtatttcctttctcgttttcttctcttttttatctctgagcagttaaaaaggtatgctttatttttggggggatcttttcagttgaagacagtgcgaaatgaccccttttggttcaaatattggtgtagccctgctccaccattctccagagagataatgagctgctaatatctccacaggctgatgaccaggagcatcatttctttgttatattacttgactcactcacttctctgacctgttacagaaacgcctttcttttacagctcctgtccactgaagtgggaagatccatttccttagccttatcccaggaatgtttaatgtctaagggctcwgtgttaaaggtagctgggtgaagaaggtgtttggaaagtcagagaaagaagagaaaggatggagggggagagagaaagagagagattagatttgtactaaatatatcattaatgaag

SEQ ID NO: 579815 - DNA, 461 bp, Homo sapiens
ttgtagaagctgagcttgtattgaatattccaggctggcataataaccataaggtgttaattaattcatgcttgaaagacataagaattaatcaatagatgctcacacatacaggcatgctcaatttcaagaactatttccaattaaatccgcaaattcccctttccccaatctgtgactttaccgtcaacctaggtaaacgtacccttgccaaaccccaaaaacaagagactaaacagtaatccagtcagagctcaaaaattatattttaaccacaaataccccaatagctacccctcgatttaggtaattttctaaaaaattytaagaccctcctaccaaataaatcctcctttgtgtaataaatataactaaatatctgccctaatactaatataatatcttgagcatattcctctgaaagcactgccccaatatatcataccctaaataaaccatat

SEQ ID NO: 579816 - DNA, 574 bp, Homo sapiens
ctccagtgagccatggttgtgccactgcactctggcccgggtgacagagtgagatgctgaaagaagaaagaaaaagaaaaagaaaataaggagagatactgggtatggtggctcacgcttgtaatcctagcactttgggaggctgaagctggtggattgcctgagctcaggagttagagacaagcctggacaacaggcaaaaccccatctctattaaaaatacaaaaaattagccgggcatggtgtcacatgcctatagtcccagctactcgggaggctgaggcacaagaatcgtttaaacccaggaggcagaggctgcagtgagccgagattgcgccactgcactccagcctgggcaatakagtgagaccctgtttcaaaaaaaaaaaaaaggagagagaaagataaaattacagggccagcataggagctccaacacctgaataacaagagttatagaaagaacagaggaaatgaagggaagaaaagcatcaattaaatatttcagcttgaagtacctgagcttccagatagaaagcatccatcaggcatcttgctcaaaggataagaatgg

SEQ ID NO: 579817 - DNA, 590 bp, Homo sapiens
atttttatatttttagtagagatggggtttcaccattttggccaggctggtctcaaactgctgacctcaggtgatcctcccatctcagcctcccaaagtgcgaggattacagacatgagccactatgcctggctggtatatggcttttgatgaggagactatgactatctggcaagtcatttgtaggagaaagggaatcacargtaaattaaatagttatagctgaaattaaatagatgaaagagcattacaacaaggcttatggcatagaaaattaaatagatgaaagagcattacaacaaggcttatggcatagaaaattaaatagatgaaagagcattacaacaaggcttatggcatatggtgttgtgctttttaatatgagtggttgacaagtattaagttccttcggtgaaagtacaccagatttagagtagaaaaatctgagtttgaatcttcattcttggacaagtgacttaaattatttgagacacaaagaattattattatttgttgttctaatgtagatattactgtctctcaaggctatcatgagggctaaatgacatatctgccccacagaaaagcta

SEQ ID NO: 579818 - DNA, 603 bp, Homo sapiens
ttgtggggtggggagagcggggagggatagctttaggagagatacctaatgctagatgacgagtcagtgggtgcagcgcaccagcatggcacatgtatacatatgtaactaacctgcacattgtgcacatgtaccctaaatcttaaagtataataataaaataaataaataaataaataaataaataaataaataaatgtctcctaattggtctctgattaggttctattctccacaacagcaaccagagtagaatttgtaaaacctaaaccagataacatccatcttatgtgcacagctctctaagggcttcccaacatatttagaataaaatccagactccctacccaagcctacaagtcagccttcacccacctcctcaaccccatttctgcctcttctgcccattcatcagtggttttcttasgtatccttgaatgggctgtttattcccttctttagatctttgtgactgatgtcccctctacctattccctcctcccttgatagtcacatggcacagtcctttaccttattcaggtctctacataaacttcatctactcagagagagttctatattgaaaataacagcattcttcca

SEQ ID NO: 579819 - DNA, 656 bp, Homo sapiens
cgtgacccgaacagtgtgcactgtacccaatatgtcgtcttttatccctcgccccacctcccagcctttccccaagtccccaaagtcctttgtatcattcttacacctttgcatcctcatagcttagctcccacttgtgagtgaggacatacgatgttgtttttattcctgagttacttcacttagaatattgatctccaattccatccaggttgctgcgaatgccattattttgttcctttttatgactgagtatgattccatggtgtatatatatatatatatatacacacacacacacacatacacatactacattttctttatccactcattgatcgcatttgggatggttccatgtttttgcagttgcaaattgtgctgctataaacatgcgtgtgcaagtatctttttcgtatgatgacttctttttctctgagtagatacccagtattgagattgctggatcaaatggtagatctacttttagttcttyagggaatctccatgctgttttccatagcggctatactagtttacattcccaccaacagtgtaaaagtattcccttttcactacatccatgccaacatctattattttttgcttttttgattatggccattcttgcaggagtaaggtggtatcacattgtg

SEQ ID NO: 579820 - DNA, 584 bp, Homo sapiens
tgtgtgactagaatcaagggaatgcaaattgcacctataaagagacaacagtaaatcccatcagaatagcaagaatttaaaataactgataatgccaagtgttgacaaggatgcagaccactatttgtgatttacaatctccttgggaaaaccgttctgcatctataaaatttgaacaagttcatactctatgacccagcaattacattcctaggcaaatatccaacataaatttatatgcatgctgaaagacattcaagaatgttcagggcaatrtcatttgtaatagcctctaactggaaacatttcaaactgtaaagaattgaatgaataaacaaattgtggtgtatttatacaatggaataatgcacaacaatgaggatgacacctctatactcaacaatctggatgaatctcaggaacataatgttgagtcatataactcatatacagagtattacatggtttataatttcatttatataaaattcaaaaaccagaaaaattattctgtggtgttaaaattcagggcagttaatattttttgagggtggaggggatatggcttgaaagagacatgacgt

SEQ ID NO: 579821 - DNA, 584 bp, Homo sapiens
tgtgtgactagaatcaagggaatgcaaattgcacctataaagagacaacagtaaatcccatcagaatagcaagaatttaaaataactgataatgccaagtgttgacaaggatgcagaccactatttgtgatttacaatctccttgggaaaaccgttctgcatctataaaatttgaacaagttcatactctatgacccagcaattacattcctaggcaaatatccaacataaatttatatgcatgctgaaagacattcaagaatgttcagggcaatgtcatttgtaatagcctctaactggaaacatttcaaactgtaaagaattgaatgaataaacaaattgtggtgtatttatacaatggaataaygcacaacaatgaggatgacacctctatactcaacaatctggatgaatctcaggaacataatgttgagtcatataactcatatacagagtattacatggtttataatttcatttatataaaattcaaaaaccagaaaaattattctgtggtgttaaaattcagggcagttaatattttttgagggtggaggggatatggcttgaaagagacatgacgt

SEQ ID NO: 579822 - DNA, 427 bp, Homo sapiens
aacgacatttttcacagaattagaaaaaactatcttaaaatttgtatgaaacaaaaaatgagccckaatagccaaagctactttaagtaaaaagaacaaagctggagtcatcatactacttgactccaaactatactacaaggctgcaggaaccaaaactgcattgtactggtacaaaaacagacacatagaccaatggaacactttagaaaacccagaaataaagccacacacttataaccatctgatatttgtcaaagttgacaataacaaataatggggaaaggaaggacttcctattcaataaatggtggtgggataactagctagcctagccatatgcagaagattaaaactggactctttcctctcaccatatacaaaaatcaacttatggattgaagacttaaatgtaaaacctacaact

SEQ ID NO: 579823 - DNA, 507 bp, Homo sapiens
tgcactagagcaacaagcaatattcttattttttataaacttttagttttaggacaatgttagtacatatagttcccatataccccataacaagtttccctattataaatatgttatattagtatgatatattcattaatgaaccaaaattsatgcattattattagctgaaatccataatgtattcagattttgtttgtttttttttttttttaaaaaacctaagccatgtttttctggtccaggatcccattcatgacaccacgttatatgtagttgtcttatctgcttaggctccttttggctgtgacaatttattaaactttgtttttgatctttacagttttgaggaatagggttaggcatgtttagaatgtgcctcatttggggtttttctcatgattatcctggcattatgggtttttggaaggaagatcacagaagaaaagggcagttttcatcgcatcacatcatgggtacatactctgaacattatttaccactatt

SEQ ID NO: 579824 - DNA, 590 bp, Homo sapiens
tacaataaacacctctatgcaaataaactagaaaatctagaagaaatggataaattcctggatacataaaccctccaaagactaaaccaggaagaagttgaatcctgaatagaccaataacaggctctgaaactgaggcaataattaatagcctactaaccaaaaaaagcccaggacctgacggattcacagccaaattccaccagaagtacaaagaggagctggaaccataccttctgaaactatttcaatcaatagaaaaagagggagtcctccctaactcattttatgaggccagcatcatcctgataccaaagcctggcagagacacaacaaaaaaaaagggaattttagaccaatattcctgatgaacatcattgcaaaaatcctcaataaaatactggcaaascaaatccagcagcacatcaaaaagcacatccaccacaatcaagttggcttcatccatgggatgcaaggctggttcaacatacacaaatcaataaacataatccatcatataaacagaaccaaagacaaaaaccacatgattatctcaatagatgcagaaaaggtctttgacagaattcaac

SEQ ID NO: 579825 - DNA, 590 bp, Homo sapiens
tacaataaacacctctatgcaaataaactagaaaatctagaagaaatggataaattcctggatacataaaccctccaaagactaaaccaggaagaagttgaatcctgaatagaccaataacaggctctgaaactgaggcaataattaatagcctactaaccaaaaaaagcccaggacctgacggattcacagccaaattccaccagaagtacaaagaggagctggaaccataccttctgaaactatttcaatcaatagaaaaagagggagtcctccctaactcattttatgaggccagcatcatcctgataccaaagcctggcagagacacaacaaaaaaaaagggaattttagaccaatattcctgatgaacatcattgcaaaaatcctcaataaaatactggcaaaccaaatccagcagcacatcaaaaagcrcatccaccacaatcaagttggcttcatccatgggatgcaaggctggttcaacatacacaaatcaataaacataatccatcatataaacagaaccaaagacaaaaaccacatgattatctcaatagatgcagaaaaggtctttgacagaattcaac

SEQ ID NO: 579826 - DNA, 543 bp, Homo sapiens
aaaaaaactcttttagacattggcttaggcraagatttcatgaccaagaacccgaaagcaaacacaacaaaaacaaagataaacagatgggacttaagctaaaaagtttctgcagagcagaacaaataatcagcagagtaaatggaaaacccagagtgggagaaaatcttcacaatctacacatctgaaaaatgactaatatccagaatctacaaggaactcaaacaaatcagcaagaacaaagcaaacaatcccatcaaaaagtgggttaaagacttcaatagacaattctcaaaggaaaatatacaaatggccaacaaacatatgaaaatattctcaacatcactaattatcaggggaatgtaaatcaaaaccacagtgcaataccacctcactcctgcaagaatagccataatcaaaaaatcaaaaaataacagatgttggtgtggaagtggtgaaaaaggaacactgttacactgtggatggaaatgtaaaatagtacaaccactatggtaaacaatgtggagaatccttaaagaacta

SEQ ID NO: 579827 - DNA, 550 bp, Homo sapiens
aaaaagcttctgcacagcaaaggatacaatcaacaaagtgaaagagaccacccaaagtmtgcgggaaaatatttgcaaactacctctctgacaacagattaataaccagaatatataagcagctcaaacaactctataggaaaaaatataataatctgattaaaaatgggcaaaagatttgaatagacatttttcaaaagaacacatacaaatggcaaacaggcataggaaaaggtgctcaacatcaatgagcctcaaagaaatggaaatcaaaactttaacaagatatcatttcaccccagccaaaatggcttatatccaaaagacatactataacaagtgctgatgaggatgtgaagaaaaggaaatcctgtacactattggtgaggatgtaaattgggacaatctctatggagaacagtttgtaggttattcaaaaaactaaaatttgagctattgtatgatccagcaatcccattgctgggtatataccccgaagaaagaaaaacaggatattaaagtgatatctgtacttctgtgtttgttgcag

SEQ ID NO: 579828 - DNA, 550 bp, Homo sapiens
aaaaagcttctgcacagcaaaggatacaatcaacaaagtgaaagagaccacccaaagtatgcgggaaaatatttgcaaactacctctctgacaacagattaataaccagaatatataagcagctcaaacaactctmtaggaaaaaatataataatctgattaaaaatgggcaaaagatttgaatagacatttttcaaaagaacacatacaaatggcaaacaggcataggaaaaggtgctcaacatcaatgagcctcaaagaaatggaaatcaaaactttaacaagatatcatttcaccccagccaaaatggcttatatccaaaagacatactataacaagtgctgatgaggatgtgaagaaaaggaaatcctgtacactattggtgaggatgtaaattgggacaatctctatggagaacagtttgtaggttattcaaaaaactaaaatttgagctattgtatgatccagcaatcccattgctgggtatataccccgaagaaagaaaaacaggatattaaagtgatatctgtacttctgtgtttgttgcag

SEQ ID NO: 579829 - DNA, 423 bp, Homo sapiens
tcaggattttttagtttttagggtttgtgggaaagagatccttgatcaggaggttaaaatcctcaggctttggttttagtcattcctgagttactctttctgggccagtgaattactgttggctgtttcmgaacttattttggacccagcattttactaggatcttagagagacatcataatgatatagtacttggcagtagatctctagaaagttttcttctatatctgagaattagaatgtaacagaaggaaaatggtctattacttggctaaattgtgtggcatgaatttgtgcttcctctttcatgggctgtgaggatacacagtgaaggaaatggtacagtgtttatgcctatgggatttttaaatttcttatggaatgcagaaagcacaactactatcatgtggggatgagatcatg

SEQ ID NO: 579830 - DNA, 276 bp, Homo sapiens
cttgagcccaggagttcaagaccagcctaggcaacatggcaaaatcttgtctctaccaaaaatacaaatattagccgggcatggtggcatgcacctctggtcccagctacttgggaggctgaggcaggaggatcgcttgagcatcagaggtagaggctgcagtgagccatgagtgtgccattgcaccccagcctgggtgacagagcaagacactgtctcaaaaaaatttwaaaaaaatataggaaatcactacttacaatgtgaattatgttctat

SEQ ID NO: 579831 - DNA, 514 bp, Homo sapiens
tgcaggtttttatataggtaaaatcacgtcactggggttttttgtacagattgtgtcacccaggtactaagcctagtatccaatagttattttttctgatcctttccctcctcccaccctcaagtaggccctagtgtctgttgtttctctgtgtgtgtccatgtcttccatcatttagctcccacttgtaagtgatagcatgtggtatttggttttctgttcmtgcgtggttttctaagtataatgatctccagcttcacccatgttcgtgcaaaggacattgtcttattctttttatggctgcatactattccatggtgtatatgtaccacattttctttctctcatctgtcattgttgggcatttaggttgattccatgtctttgctataatgaatagtgctgcagtgaacatatgcatgcatgtgtctttatggtaggatgatttacattcctttgggtatatacccagtaagggattgctgggtcgaatggtagttctgtttttagctct

SEQ ID NO: 579832 - DNA, 549 bp, Homo sapiens
aaattgttttcataattcaattttgttttacataaccttgctcccccaaatgttagtaatttaactcaaagagctgttagtggtattaaatagtcactaaatgttgcagaggcagctcagcaaaattcacgaatggggaaaccattttatgaccatcgtttcacctccggggggggctcactggcttttgttccaggcccctatggcccagagggaataacatctgtatttttaagaccagctttgcaccacacctgcatatcaattcccctttctgacttctgcctctaaaccaaagccaaatgtttggctacggatttggtttccagggttcggctgagtatgaaaggcagcagctccaagacttcactggtcccaccaaaaaattgtttaagtgatgttaattgagtcctgggaaagtttaaaaaattgaaatccttagaggaaayggagatgaagggaaagaaagggagaagaagaaaaagagaaggcaatgagaaatgactgataaaaacagaagttaaatcaaatgatgatattaatttaaaa

SEQ ID NO: 579833 - DNA, 549 bp, Homo sapiens
aaattgttttcataattcaattttgttttacataaccttgctcccccaaatgttagtaatttaactcaaagagctgttagtggtattaaatagtcactaaatgttgcagaggcagctcagcaaaattcacgaatggggaaaccattttatgaccatcgtttcacctccggggggggctcactggcttttgttccaggcccctatggcccagagggaataacatctgtatttttaagaccagctttgcaccacacctgcatatcaattcccctttctgacttctgcctctaaaccaaagccaaatgtttggctacggatttggtttccagggttcggctgagtatgaaaggcagcagctccaagacttcactggtcccaccaaaaaattgtttaagtgatgttaattgagtcctgggaaagtttaaaaaattgaaatccttagaggaaatkgagatgaagggaaagaaagggagaagaagaaaaagagaaggcaatgagaaatgactgataaaaacagaagttaaatcaaatgatgatattaatttaaaa

SEQ ID NO: 579834 - DNA, 558 bp, Homo sapiens
aatgatataatgccttgggtttgctttaaaataatccagagaagaataaaacgacatagattatgaattaatagctattgaagatgagtgacaaatacatggaggttcattacactattcctttaaaaaagtttaaaaatatcttaagtaagttataggttataattagtggtattatgtatacatatgtgagtgtagatatatacacattcataaacactttaacttaattttcaattaacttaaattttctatacctttatttctttttatgtcagtttaacctattaaaagctgagataggagtgtaatgtctctcaaaacaattgtgtttggttaatttttttctaaggatttttatcctttcagtctttcttgccttaagttctttttcttttctttctttctttttttttttttttttttgagatggagtcaygctgtgtcacccaggctggagtgcagtagcacaatctcaactttctggcaacctctgcctcccaggttcaagggattctccttcctcagcctcccgagtagctgggactacaggggggt

SEQ ID NO: 579835 - DNA, 647 bp, Homo sapiens
ccttctcctctgtgttacaaatgaaaaagagaacctgctcctggagacatgactggaaaagcatgtatttatttctgtgtgtctgctcatgattcaagatgatcacaggaggaaacgttgcaggttaagggaaagttgacaagaagtgctgttaaatctttatgcggctgttatgtgtcagtgcttcctcatcattaaaccactctccagggtgcctaaatagctgccacacagtgctacctgcaaagataaaaaaggttgaagttgctgaaaggaaaaaagaaaaaaaaaaaagatgatgacagtgacagagtgggatgttagttcctgggtaaatataaagctccagtttgaggcagagctctgtattatgctctgtcaggttccttacaatttgctgtgtctcttatatttttaaaattctwtgtgcttttccagtttatttcaaaatgttcaatatataactgcagaacatgtgcgatgtttactataaggccggtggtcacagccttaatttggaaactctgctctatcactggatgtacggagtttgcatttctaggtcaccatgaggataatttaatttctgaattcaatattgtaattaagaattatgagcagcaataataatggtaacagcaaaaata

SEQ ID NO: 579836 - DNA, 647 bp, Homo sapiens
ccttctcctctgtgttacaaatgaaaaagagaacctgctcctggagacatgactggaaaagcatgtatttatttctgtgtgtctgctcatgattcaagatgatcacaggaggaaacgttgcaggttaagggaaagttgacaagaagtgctgttaaatctttatgcggctgttatgtgtcagtgcttcctcatcattaaaccactctccagggtgcctaaatagctgccacacagtgctacctgcaaagataaaaaaggttgaagttgctgaaaggaaaaaagaaaaaaaaaaaagatgatgacagtgacagagtgggatgttagttcctgggtaaatataaagctccagtttgaggcagagctctgtattatgctctgtcaggttccttacaatttgctgtgtctcttatatttttaaaattctttgtgcktttccagtttatttcaaaatgttcaatatataactgcagaacatgtgcgatgtttactataaggccggtggtcacagccttaatttggaaactctgctctatcactggatgtacggagtttgcatttctaggtcaccatgaggataatttaatttctgaattcaatattgtaattaagaattatgagcagcaataataatggtaacagcaaaaata

SEQ ID NO: 579837 - DNA, 549 bp, Homo sapiens
gtgtatgtatcgagtaatttatccatttcttctagattttctagtttatttgcgtagacgtgtttatagtgttctctgatggtagtttgtatttctgtgggattggtggtgatatcccctttatcattttttattgcgtctatttgattcttcttcagggcatccacatttcaatgaccagaggtgtgtaggctgcctctggcaaaggttcaatgaccagaggtgtgtgggctgcctctggcaaagggacagtgctcctgaggattcaagtggtggaaatgcttaagggaaaagattaacccttccattccttcttgttaggcatcatgcatgtagtcgacttttgcattaaaaaaaattgctcttcattagttgtgaacatgtattttctggcttctctttatgttccaatttgtggattgagaggtattaatgaactagtgtggtattcaaaatatacccattagcattttgcagattaaagcaatccgtgttattcttaaaaatgcatgtacgagcttagacrtaacatgcatgaagggtgatatc

SEQ ID NO: 579838 - DNA, 490 bp, Homo sapiens
tgggtttgtgtgacaagaagcctcctctcaactggatagtgaaatcatcagaagttcccaagcccattctacttccactgaagggatgacacgacaggagtggcctgcccctcagaaccccaggtactgcagctgtcggctgtggaggcccagctcactggttggctcttaacaccctcatgcccctgaagctactgcatggacatgcctgaagataggcataccayaccaagggccacacactccaaactttgaagaccaacagcctccttcccagaattgtcatcaaaggttaagggatgtcaccctgagttaggcaacctctaaactgtagccccagctttgaaagagaaagagaagggtttgtttgccccagaggctcctggaaaagcaagctcttcaggcttctcctgcacaaaggcattcaagatctttgaaggatgatggggcaaatttttgctataaggcccaattccctcagagcatctca

SEQ ID NO: 579839 - DNA, 576 bp, Homo sapiens
gaaagaagtaaaataggaaagaaggaagggaaataaaagaagagggaaggagaaagaggaaaaagaaataaaaaaagagagagaaaccaattcttgccattttcttgcttaaaacagtctaatggtttcccttaccttgctcatcatgccttaggtgattttgtcytctctctgcctcctttgtcttatttttctctgcctctctcattcattactctttacccataaagagtcaaatatttttatcaggatatggcccaattattcttccttatgctttatagaagcatttccctctttatttcttcagttcttcttatggtctgctccttcccatcattctggaaagcaacaggtgcccaataaatatgtattgcacaaatgacattctttgtaatcctcagtttctattctcccaaagtgagatattcacatcattttttaaaaagaaaatgcttaaagggaaattgcttgaaacctcctccatcaagaatgatcagcttgtaaaacagaatgccagtatcacttttaaaagagtgtactctgttttttaaatttgttagatgtgtaaaataa

SEQ ID NO: 579840 - DNA, 578 bp, Homo sapiens
aaaacaaaacacatgcacttcatttggacttactttcaagaaaatattcggaaagaaacttaccaaaagggacataatgttttcttccactacttctaaaaatagtagagctctaaactttcctcttttcttcttccaagataaaagtgttaacagatatatacaagccataggcaggttttgagatttgwtgtggttgtttctgtttgtttgttttttaaaatgagagatagaaggggaaagaagagagaaatttggcacttttctcagcagtggtttagtgttgtgccttcttcccattctttggcttatgatttgggaaaggcaaaagcagctagccagaaggacttgacactcaattccattcatagcagcagctgctgcagaccccaggtgagagaaattttcatttctatgctgactctgtattagtccattttcacgctgctataaggaactgcctgaggccagtgcagtggctcacacctctaatcccagcactttgggaggctgaggcaggcagaacacatgaggtcaggagttcgggaccagcctggccaacatgatgaaaccctgtc

SEQ ID NO: 579841 - DNA, 578 bp, Homo sapiens
aaaacaaaacacatgcacttcatttggacttactttcaagaaaatattcggaaagaaacttaccaaaagggacataatgttttcttccactacttctaaaaatagtagagctctaaactttcctcttttcttcttccaagataaaagtgttaacagatatatacaagccataggcaggttttgagatttgatgtggttgtttctgtttgtttgttttttaaaatgagagatagaaggggaaagaagagagaaatttggcacttttctcagcagtggtttagtgttgtgccttcttcccattctttggcttatgatttgggaaaggcaaaagcagctagccagaaggacttgacactcaattccattcatagcagcagctgctgcagaccccaggtgagagaaattttcatttctatgctgactctgtattagtccattttcacgctgctataaggaactgcctgaggccagtgcagtggctcacacctctaatcccagcactttgggaggctgaggcaggcagaacacatgaggtcaggagttcgggaccagcctkgccaacatgatgaaaccctgtc

SEQ ID NO: 579842 - DNA, 632 bp, Homo sapiens
attcaacatgagatttgggtggggacacagagccaaaccatatcaagcacattatgagaaaaaagagtactggtaaagtccaggatgcctctggccctgggaggaagaaamacatcttgggaaatagaaaaataaaaggcagtggcatgcaaatctcacttatccattcaggaggcatgttgtttttctgaaatgaatattcagaatgcttcaaaaggcctgccaagatgaactcatttgatgatagctatctacttcccttgattcacatgggacttagtaatataagaagggcagaaagaaggaagtcccttctgcactgggaaattttgggcagaaaagtgagggtctcctgggtacacaagtgctgtgttttactctttcttccaatcaaagaatgaatctacttcatagttattataatctttaacaatgattgaggatcatagtgtatgtttggagttagagcaattgctttaaatatattgcctcatcatccaccacactccatttatgaaatagaaactctgattatcccctttctacatgaggaacctaaaagacctcgtgtttaagtatattatatgaagctggactgagtatgcagagaatccaggatttaaatccagcca

SEQ ID NO: 579843 - DNA, 506 bp, Homo sapiens
cctttccttcttcctacccttcaccctccaacaggccccagtgtgtttttcttctctttgtgtccacatgttctcatcatttagcttctacttattagtgagagcatgtggtatttggttttctgttcccactttagtttgctgaggataatggcctctttcagattttccaacttattggcatatagttgctggtagtagccactgatgatcctttgaatttctgaagtatgagttgtaatgtctcctcagttctgattttatttatttggatattctcttttttcttagttagtctggctaaatatttgtccattktgtttaacttctcaaaaaaccaactttttgtttcattggtcttttgtattgttttgttcatttcagtttcatttatttctgctctgatttttatttcttttcttctactaatgttggatttggcttgtttttgcttttctagctctttaagattcatcattagattatttatttgaagtattttcttc

SEQ ID NO: 579844 - DNA, 498 bp, Homo sapiens
ttctacttgattctttttaattatttcaattgctttgttaaatttctcttgtagaattctgaattccttctctgtttatcttgaatttatttgagtttcctcaaaacagctattttgaattctctgcctgaaagatcacatatctctgtttcctccaggattggtccctggtgccttagttaggttgtttggtgaggtcatgttgtcctggatggccttgatgcttgtggatatttgttggtgtctcrgtattgaaaggtcaggtatttattgtagtctctgcagtctgggcttgttggtacctgtcctccttgggagggttttgcagtgcttcaaaagtacttgggtgttgtgatctaagctctatctgcattagggggcaccccatgcccagtaatgctgtgcttcttgcagacctgtagaagtagtaccttggtaatcttgaataagacccagaagaatcctctggattaccaggcagagactcttgttctcttc

SEQ ID NO: 579845 - DNA, 623 bp, Homo sapiens
gaaattggaaatcatcattctcagtaaattatctcaaggacaaaaagccaaacatcacatgttctcactcatagatgggaattgaacaatgaraacacatggacacaggaaggggaacatcactttcatgtgcgtccgtgtgaaaagaccaccaaacaggctttgtgtgagcaacatggctatttatttcacctgggtgcaggtgggctgagtctgaaaagagtcagcaaagggagataggggtggggctgttttataggattagggaaggtaatggaaaattacagtcaaagggggttgttctctggtgggcaggggcgggggtcacaagatgctcagtgggggagcttctgagccagaaggaaattcacagggttaatcactcagttaaggtggggcaggaacaaatcacaatggtggaatgtcatcagttaaggtggggcagggccttttcacttcttttgtgattcttcagttacttcaggccatctgggcgtatatgtacaagtcacaggggatgtgatggcttggcttgggctcagaggcctgacaatcacactctggggtctggtggggggacaggggagagatagcattaggagatatacctaatgctaaatgac

SEQ ID NO: 579846 - DNA, 593 bp, Homo sapiens
atttgtccttctgtgcctggcttatttcatttaacataatatcctccagagttatccatggagctgcaaatgacaggatttcattctttttttatggccaaataatattctattgggtacatatatccattaatattttgtttttccattcatctgtcaatggacacttaggttgattctatatcttggctactgtgaataatgctgcaataaacatgggagtgccaatagctctttcctttcctttggatatatacccaccaatgggattgctgaatcatatcgtagttctatttttattcaaggaaactcaatatgttttgcataactgctatattaatttacatccccaacaaaagtatgtaataattccccttcatctggatcctcaccagcatttttwatttatttatttatttatttatttatttatttatttatttatttattttttctgagacagagtctagctctgtcgcccaggctggagtgcagtggcatgatcttggctcactacaacctctgcctcccgggttcaagtgtttctcctgcctcagcctcctgagtagctaggattacaggtatccaccacc

SEQ ID NO: 579847 - DNA, 681 bp, Homo sapiens
gacttgctttgccatccaggctggagtgcagtggtatgatcagggctcactgcagcctcaatctcccaggctcaagtgattttcctacctcagcctcctgagtagctgggactacaagtatgcaccaccaggcctggcagggttttttttgtttgttttttgttttggtagagatggggttgggatgttgcccaggctggtctcaaactcctgaaatcaagtgattctcccaccttggcatcccaaaatgctgggattacaggcatcagccaccttgcccagcctactttttaaaaaaacttctgttgggagacatcaaaccatgagactctctagaaccatgggaccagggagtttgtacctatctcattctctgttctactccagcaccaagaacagtacctgacacaccataattgtttaataaattggttgaaagaaagaagggaagttaagaaatacttaagttgaggaaattaagggaacttaatattttggaaaaggaaggatcaaattgttttgtgagagctattaatataataatagaggtttgctgtggtgctagcctggaagattaaatgctcttttggccatgatattttgatcataagcttacttcttttaggacccatgaggagctctttggggmcacattcattcactcattcaccaaacatttat

SEQ ID NO: 579848 - DNA, 621 bp, Homo sapiens
ttgcccttaaaacctttgtaaaatactgcatttccatgattctgttttggtcattaataccacaatccccagtgtcctggaggtgtacttagttcccacaggtaattagttattatattttcttatttctacctttcagatatattttgtttctaccttcttctgccagcatcaacttgtccagttcctactagcttcaaatatggacttaaaaaatgacatttatgtaatgaaaacaatgatggcygtgactacttcataggtttgaggatcaaaccaaataaaatatattaagagctatgtaagcattaaaattattattatattattcttattaaataatacttttggccaggtgtggtggcttacacctgtaatcccagcactttgggaagctgaggtgggcagatcacttgaggtcaggagtttgagactagcctggctaacatggtgaaactcgattctactaaatatacaaaaaaagttagtcggacgtggtggagtacgcctgtaatcagctactcaggaggctgaggtgggatggtcccttgaactcaggggagggaggttgtagtgagctgagatcttgccactgcactccagcctaggtgacagagtgag

SEQ ID NO: 579849 - DNA, 563 bp, Homo sapiens
acatcagcctgagccacatgacttgctttagtcagtaaaataagccataggcatggacatgtatgtgagcaaaaaatgggctttaggcctaagaagttgaagacctttgatatgtagcagaccttgcctatcctgactgataacacctatactaagtgctaccccaacatcgacctagcttattggatttcaaattctccagttcttatttacaccataccaagctgctactggcaaacctactctccaagtcttccagtgcatctctgaaaaataagaatcctatcaaaacacaaagcaaaataaaacaaaaaaccctggtctcatggcaaatcctgggtaaagctaggakgactgatgtaaattaaagtgataacactgttaataacaactaatattaacatccagtaagaggcaacctttatgtgaacaggggcctaggatgttttgcttaatgttttgtcctaagaagttagtgcagtgtctggcacatcataaaactcaataaatatttgttcagtgttaaaagaaatagttactatttgccagattttgtactaaat

SEQ ID NO: 579850 - DNA, 432 bp, Homo sapiens
accctttattttcctagttattaatatcaggttgggtgcctatgttgatactaggtacctaaccattttactctaacaaacgagtatccaaactgctcagtccttagaattactaaggaaaccttttcaaatctgattctgatactccattcccagagattcagttgtattagttctaggatagagtataggaatcttaatkcataaaaactcttccttggtggttctcaaacttggttgcacattaaaatcagcttgagaggttcattccaacatctgtgctacactctcaacacatcaaatgaaaattctgaccaagggaaccaggcatcaacacatttcttaaggatttttttaggagggagaggttctcactctgtcaaccaagctagaatgcagtggagtgatcatggctcactgcaacctcaacct

SEQ ID NO: 579851 - DNA, 619 bp, Homo sapiens
attagatttttagttttatggtggtataattcacaaattaaaattatatatattcaacgtgtacaatgtgaggttttgagttttttttaattagccctagttgagaaaggcaaatgcttaatggtacatactaaaaagtattcaggacaaggctgcttaacataaacttgctaattaccaatcaatagactactcaaatgcttttttgataaacaaaagctacaattgtaggtagcgtatttttactggtttcctttacactgaagcattttttcaacgtaatatatatcttacaaatagtaaaatacataaatcttaagcatatagcattataatttttatgagtgtatatatccctatcaccaccacccaaatcaagcgagatatggacgatttccagctcccacacccctgsgtctcgcactttctcaaccagttactcaccaatggtcatcattatcatgaaatctatcacgatggatttccctactcctcaatttcatataaatggaaacttgctgtatgtaatcttttgagtctgactttttcactcagttgaaatttgtgagaatcatctatgttttgtgtagcagcagttcattgtttaattgctgtgtgg

SEQ ID NO: 579852 - DNA, 619 bp, Homo sapiens
attagatttttagttttatggtggtataattcacaaattaaaattatatatattcaacgtgtacaatgtgaggttttgagttttttttaattagccctagttgagaaaggcaaatgcttaatggtacatactaaaaagtattcaggacaaggctgcttaacataaacttgctaattaccaatcaatagactactcaaatgcttttttgataaacaaaagctacaattgtaggtagcgtatttttactggtttcctttacactgaagcattttttcaacgtaatatatatcttacaaatagtaaaatacataaatcttaagcatatagcattataatttttatgagtgtatatatccctatcaccaccacccaaatcaagcgagatatggacgatttccagctcccacacccctgcstctcgcactttctcaaccagttactcaccaatggtcatcattatcatgaaatctatcacgatggatttccctactcctcaatttcatataaatggaaacttgctgtatgtaatcttttgagtctgactttttcactcagttgaaatttgtgagaatcatctatgttttgtgtagcagcagttcattgtttaattgctgtgtgg

SEQ ID NO: 579853 - DNA, 617 bp, Homo sapiens
tggcacttgcccagagcgaacttcaggctctgaagtctaaagaataactcaaggggaatgcaggcttgaagatgggktgttacccatgcataaaaagaggggagtagaaggtgtcccttagtctcctttcaacttttgaagtgacccaggttgaagagaaagattacaggggtgtccctcttctctttcctcccatctcctttgggtcctggcaaccatcataggtgcagcccatggatgcaagcatgaattgcacccatgtatctggaggtgctagttggcaggggtagtcatgcttaccagcacaatgcctcatctcactgcccttctgggttcctaggcctcccaggagattgtacagtagataaagttgggtgagacactttaacagagggagtgttttaaccctattcctgcttcctctagctatggccctggaaaagcagtgcattcccagaaaattttacccattgccttttaaacacaaaatcccctttctgattaaatgccaatgttgttggaagcagaacaggtgcctcaaaagaacatatggatttaatggctgtcctccttctgatgggaacagcactgaggctagaatttgtctctcaagggtg

SEQ ID NO: 579854 - DNA, 512 bp, Homo sapiens
  misc_feature 499, 500, 501, 502, 503, 504, 505, 506, 507, 508, 509, 510,511, 512: n = A,T,C or G
catgttcagtgataccatgttgggaatatgtagaccaagaaattgtcaaatgctacagatcaaggctgttttattttgggagagatggttgttaaacacttaacagcatactactagatacagaggtgaccagctctgtgctaattgtaatggtggggacagaagcaccagggacaggagatcagggagctatttcttttctactcctgtcccctcatttccactgaaagtgttctatttgccaatcaggtagaaataaagtctgagtcaaaatgttccacagttgtctgtayaggcttgatggtaagctttaaataattatataggccaggtgtggtggctcaggctgtaatcccagcattttggaggcccaggcaggaagacagcttgagcctaggagttcgagaacagcatgggtagcatgcaagaccttgtctctacaaaaatacgacaagttagctcagcatggtaggtgtgtgcctgtagttcaagctacttnnnnnnnnnnnnnn

SEQ ID NO: 579855 - DNA, 548 bp, Homo sapiens
gtttcattgattttttttttctatttttatagtttcaatttcattgatttttctcttttctctgttatttttattgmtagagggctgtgctgaaatccccactcgaatggtggaattgcctgtctctgttctgtcagcttgtgcttcatatattttgatgttctctagtttggtacatacacatgtagaattgttacgtcttcccagtgaattggtcactttgcaaatatgtgatgtccctagtagtatctctagtaatgttttcttttctctgaaatctactttgtctgatgttaattcagctactctgcttttttttaaaaaaaaaaataatgtttgtatggtgtatctttttcaaacttttacttccaatctacatatgttgttgattttaaagtgagtttcttgtaaatagagtataattggattttttgtttgttttgctcactttagctgccaacctgtcttttgattaatctatttagactctacatttagggtaattattaatatgttagagcttaagtctgtcaatttattatttttct

SEQ ID NO: 579856 - DNA, 497 bp, Homo sapiens
tatagtattacagatttgcagcctgactacatggtagaaaaraaaaacccattttggaggaggaattcaagtcatctgcagaaatttgcataagtaaagtggagcctaatgttaatagccaagacaatggggaaaataactggaaggcacttcagagaccttcacacagcccctcccatcacaggcccagaggcctaggagggaagaatggtttcatgggccagacccagggctctgctcccctgcacaacctcaggacactgctccctgcatcccagctgctccagctccagcggtggctaaaagggcctcagatatgtttcagaggtgctgctctgctccaaagggtgcaatcaagaagccacaaaggctttcacatggcattaagcctccaggtgtgcagagggcaagaattgaggcttgggaacctccacctagattccagaggatgtatggaaatacctggttgtccagccagaagtctgctgcaggggcag

SEQ ID NO: 579857 - DNA, 511 bp, Homo sapiens
gccactttctcctgatctgttaggtttccactgagaagactgctaccagatatattgaagctccattgtaygttattcatttcttttctcttgccacttttaggatcctttctttatctttgacgttgggggcctcagcctcccaagcagctgggactataggtgcacatcaccatgcctggcattttttttttttttttgtatttttagtggagacggggtttcaccatgttggccaggctggtcttgaactcctgatcttgaatgatccgcctaccttggcctcccaaagtgctgggattacaggtgtgagccaccatgcctggcccattcttttttcttcttctttttttctgtctcccctggctatttccaaatagcctgccttcaagcccactaattatctcttccacctgatttattctgctgataagagactctgatgcattcttcagtatttcaattgcagttttcagctccagaatttctgcataattcttttttaattatt

SEQ ID NO: 579858 - DNA, 619 bp, Homo sapiens
cctgttacaacatggatgaaccttgaaagcactatgccaaatgaaagacatcagtcacaaaataycacacgttgtatgattccatttatacgaaacatccagaataagaacattcatagagacaaagagtagattagtggttgccagggaatgggagaaaggagaaaagggggaattaagaggtaaaggtttcttttcacagtgctgaaaatgttctggaattagaaagttgcaatgattgcataacattgtgaatatagtaaaggcctgtttgtatactttaaaatggtcaaatagtgaattttatattatgtgcattttatatctataattttttaagcaaatttccttgcagtggccaaagttcctatgtgatcttgtcctctattatcttgctgactttatctttttctacccttcatttcattacttgtgtaacagccacactgcatcactggcctttgtgctttccttcaagcattccaagcatgctcccaccttagaaactttgagtttcctctcaataaattaggtattgatgggacgtatctcaaaataataagagctatttatgacaaacccacagccaatatcatactgaatgggcaaaactggaaac

SEQ ID NO: 579859 - DNA, 619 bp, Homo sapiens
cctgttacaacatggatgaaccttgaaagcactatgccaaatgaaagacatcagtcacaaaataccacacgttgtatgattccatttatacgaaacatccagaataagaacattcatagagacaaagagtagattagtggttgccagggaatgggagaaaggagaaaagggggaattaagaggtaaaggtttcttttcacagtgctgaaaatgttctggaattagaaagttgcaatgattgcataacattgtgaatatagtaaaggcctgtttgtatactttaaaatggtcaaatagtgaattttatattatgtgcattttatatctataattttttaagcaaatttccttgcagtggccaaagttcctatgtgatcttgtcctctattatcttgctgactttatctttttctacccttcatttcattacttgtgtaacagccacactgcatcactggcctttgtgctttccttcaagcattccaagcatgctcccaccttagaaactttgagtttcctctcaataaattaggtattgatgggaygtatctcaaaataataagagctatttatgacaaacccacagccaatatcatactgaatgggcaaaactggaaac

SEQ ID NO: 579860 - DNA, 619 bp, Homo sapiens
cctgttacaacatggatgaaccttgaaagcactatgccaaatgaaagacatcagtcacaaaataccacacgttgtatgattccatttatacgaaacatccagaataagaacattcatagagacaaagagtagattagtggttgccagggaatgggagaaaggagaaaagggggaattaagaggtaaaggtttcttttcacagtgctgaaaatgttctggaattagaaagttgcaatgattgcataacattgtgaatatagtaaaggcctgtttgtatactttaaaatggtcaaatagtgaattttatattatgtgcattttatatctataattttttaagcaaatttccttgcagtggccaaagttcctatgtgatcttgtcctctattatcttgctgactttatctttttctacccttcatttcattacttgtgtaacagccacactgcatcactggcctttgtgctttccttcaagcattccaagcatgctcccaccttagaaactttgagtttcctctcaataaattaggtattgatgggacgtatctcaaaataataagagctatttatkacaaacccacagccaatatcatactgaatgggcaaaactggaaac

SEQ ID NO: 579861 - DNA, 574 bp, Homo sapiens
tcttctcaattagattccctcataaacaatctgttttattaaatacaaattactwtaaaaattgttattggaaaagttcttatttcagtccacttgttttataaatttgaaaaagattaaactcatacattttattaaacaaataaaaaaatgttagcttgacatggagcatgattaatgattgcatcagtgtaacaggcataaattggaagtatttcaggcaaactagaatgactaatcagactacctaaaaatgacccataactttcaatggcactaagagttgatgttatgcatctctttttttccttctaattgcacctgtctctttcataccttatccttggattgtattaatgatcacatgctatttttaaaaagtactagaaatatttgagcttcttatgagactagcctgaaactggacgtcaagttttttacttcatcccattctacatccttgacccctttccccctgtaagtaccccttcagtaacaaagaactttgctgagaagcccattttgggctctgcttctagaggacctaacctaagacaatgggatttggtgtggc

SEQ ID NO: 579862 - DNA, 574 bp, Homo sapiens
tcttctcaattagattccctcataaacaatctgttttattaaatacaaattactataaaaattgttattggaaaagttcttatttcagtccacttgttttataaatttgaaaaagattaaactcatacattttattaaacaaataaaaaaatgttagcttgacatggagcatgattaatgattgcwtcagtgtaacaggcataaattggaagtatttcaggcaaactagaatgactaatcagactacctaaaaatgacccataactttcaatggcactaagagttgatgttatgcatctctttttttccttctaattgcacctgtctctttcataccttatccttggattgtattaatgatcacatgctatttttaaaaagtactagaaatatttgagcttcttatgagactagcctgaaactggacgtcaagttttttacttcatcccattctacatccttgacccctttccccctgtaagtaccccttcagtaacaaagaactttgctgagaagcccattttgggctctgcttctagaggacctaacctaagacaatgggatttggtgtggc

SEQ ID NO: 579863 - DNA, 574 bp, Homo sapiens
tcttctcaattagattccctcataaacaatctgttttattaaatacaaattactataaaaattgttattggaaaagttcttatttcagtccacttgttttataaatttgaaaaagattaaactcatacattttattaaacaaataaaaaaatgttagcttgacatggagcatgattaatgattgcatcrgtgtaacaggcataaattggaagtatttcaggcaaactagaatgactaatcagactacctaaaaatgacccataactttcaatggcactaagagttgatgttatgcatctctttttttccttctaattgcacctgtctctttcataccttatccttggattgtattaatgatcacatgctatttttaaaaagtactagaaatatttgagcttcttatgagactagcctgaaactggacgtcaagttttttacttcatcccattctacatccttgacccctttccccctgtaagtaccccttcagtaacaaagaactttgctgagaagcccattttgggctctgcttctagaggacctaacctaagacaatgggatttggtgtggc

SEQ ID NO: 579864 - DNA, 462 bp, Homo sapiens
ctctttaaatagagagcttgtattctgagggcgagcttacgtcaagccacctgatcagtyttgtaaccactggagagatgagcagtgtttagtcatgtccctaatactgttattgtcagtcacccttttacatctgtctttttctgttggcttctttctttttaggttgtaggggagacccattgtctagagagaatatacgctttgacttgatgaaatcccagtttaatctagaaaggtccattttgaggttaagaacatttcggagatgtggaggttgaagatataaagtaggtctcagctttggctggccaatatgggatcctacttatctcctcaggggactggacaattcgtgtcaagactctgtgcttcaggagcctctgcttcttcctccttcatggtccaactttcctgccccttcttcatctcattagcttaaccctcagttgcctgacccaa

SEQ ID NO: 579865 - DNA, 577 bp, Homo sapiens
atttcctgaaacttctctatctaaaaattaagaaaactatgctataaagccattaagcttctttctgattatgattctacaaagtaacttgaatgatgcaccatttgttgactggttataattctgtttttcttaaagtaataaactttaactctagaatagttttagatttgcagagaagattcaagaatatatcagaaagttcccatataccctgcatcaagcttctcttattgttaacatctcacattaatgttgtacatttatcacaactaatgaatcagtattcayacattagtttaactaaagcccattctttatttgattttccaagtttttacctaatgttcttttgccctagaatctcattcaggatcccatgttacactgatttctcatatttccttaggctcctctagactgtgatagttctgcacactttccttgttttgatagccttgctagttttgaggagtactggtcaggaatttgataaatgtccttaagtttaggtttgttttctgtttttctcatggttagacaggggttacgatataggaagcccacagaggtaatt

SEQ ID NO: 579866 - DNA, 536 bp, Homo sapiens
  misc_feature 61: n = A,T,C or G
tggcctatagctgtttacaaaatgaggacccattcaaggagcaagtggtatatttatttanggtatctctttaaatctcttttaatttatctaggacagttccttaaactaattatgtgtcttttatgacattgacagtttttgaagtatccaggtcagttgttttacagaatatccctcaattcagttttgtccaacagctttctcatgattcagctagtaatacataggcgatattttagccatttcagtgtaatgcaagaagaggcacatgatatcaagtttgcccagttatttttggtgctaggttgatcatttggtaagctgttttctgctgtgattytctatatcctgttctccatcaaacttacatccagcagttttagtatccattgataattatagcctgaatcagttattatttttgtggttataaatggtgactttctatttctatcatctttctatacttatttgttggcgtgctttcatcttcctttccccctttctgacgtgtccccattagttttttgagc

SEQ ID NO: 579867 - DNA, 414 bp, Homo sapiens
gaagtcagcagttttttcagaatttgtcctaaggatcaatagtattttttaaagtaactttttatattaagttataatgaccaaattgaagaaatcaattatagaaagtaggaacaaaatggaagtctttactttcagttaaccacaccttcctggtctcctgattaatatttttcttttgtgctttttaaaattgtttaacactcagttctatggtttggcctttttttttmttttctttcttttttgtttttttttgagacattcttgctctgtcgcctagtctgactcggctgtggcttgatctcggctcactgtactctccgcctcctgggttcacaaaattctcatacctcagcctcccgagtagctgggactacaggcacggcttactcagggcactcaaatagatct

SEQ ID NO: 579868 - DNA, 490 bp, Homo sapiens
tttagtcatcattaatcaatgccaarcgaaaaaatcttaagatgtatttaaatttgtgatgccagtgtgattcagaaatttgaaaaatggatttcaaagtaatgctgtgagcagataggtcattgtataaacataactaatggttcattcattcattcctacaataatgattcagtgtcagattttgggtgttgaaaatacagcagagaacaaacacaacagaaggtccatatttgcggagcctacattttgtgggggaagagagatgataaacaaaatgaatgagttaagtagatagcacgttagatcatccaaaatgctatgggggggaaaaaccctgggaatagggagatggcatgtgaagtggaagaaggttatgattttcaatagagtgatcagagaaagcctcattgagaagacacgctaaggaggccatgtggctggaggggactgagttagggggtgaatagtaggtgagaccagagggggc

SEQ ID NO: 579869 - DNA, 475 bp, Homo sapiens
tggctcacacctgtaatcctagcacttgggaggccgaggcaggtggatcacttgaggtcaggagttcgagaccagcctggccaacatastgaaatccctgtctctactaaaaataaaaaattagctgggcacagtggcgggtgcctgtaatcccagctactggggaggctgaggcagaagagtcagttgaacccgagaggcggaggttgcagtgagctgagattgcgccactgcatgcgccactgcactccagcctgggtgacaagagcaagactttgtatcaaaaagaaaaaaaagaaatgtagacagttgcatgacagttctagtattaataacatttatcatcagtgctcttgttcttgatgtatactgatcaccaggtgatgtccactgtttaccagaggaatatcagactctggaaacataacggtaagaagcaaaggagagggggcaggtgatttgtggaggatgctcc

SEQ ID NO: 579870 - DNA, 610 bp, Homo sapiens
aatggtgccccccctaccaacgttatgtttaggtcctaatttccagaacctgtcaatattacttaaatggcaaaagtgtgaatattacctaatatggcaaagatgtggttaatataaggatcttgagaggagcttattctagattatttgggtgagggctaaatgcaatcacatgtatacttgtaagagatggagaggrggattcagcataagacacacagaagaggaggcagtgtgaccacagcagaagcagctacagtgatgcatccacaagccaaggagctaaggccaccagaagctggaaaaatcaaggaacagattcttaagagcctttgaagggaacacagccctgccaacaccttgattttggactttgggcctccagaacagtgagagaataaattaatgttgttttagccaccgaatttgtggtaatttgttaatatagttacagaaaattaatgcagaatggaagaataaaacagacttggccatgcatactgaaaataacaagtcaaagcaaccttgaaaatttttctcagaaacacaaaggtgaagaatagaggtcaaaatatatatgaaaaaataaaggaaatatgtatggcatata

SEQ ID NO: 579871 - DNA, 656 bp, Homo sapiens
ttaatataaggatcttgagaggagcttattctagattatttgggtgagggctaaatgcaatcacatgtatacttgtaagagatggagaggaggattcagcataagacacacagaagaggaggcagtgtgaccacagcagaagcagctacagtgatgcatccacaagccaaggagctaaggccaccagaagctggaaaaatcaaggaacagattcttaagagcctttgaagggaacacagccctgccaacaccttgattttggactttgggcctccagaacagtgagagaataaattaatgttgttttagccacygaatttgtggtaatttgttaatatagttacagaaaattaatgcagaatggaagaataaaacagacttggccatgcatactgaaaataacaagtcaaagcaaccttgaaaatttttctcagaaacacaaaggtgaagaatagaggtcaaaatatatatgaaaaaataaaggaaatatgtatggcatataaatctacaaattggtgtttctaaagaatagagaagagccaaggaaagagaaataataaagaaaagaaaatgttcctaatctacaaagatatctgtataaagattagaatactttataatgtatcagaaaaaaactgaaactatattacatataa

SEQ ID NO: 579872 - DNA, 610 bp, Homo sapiens
aatggtgccccccctaccaacgttatgtttaggtcctaatttccagaacctgtcaatattacttaaatggcaaaagtgtgaatattacctaatatggcaaagatgtggttaatataaggatcttgagaggagcttattctagattatttgggtgagggctaaatgcaatcacatgtatacttgtaagagatggagaggaggattcagcataagacacacagaagaggaggcagtgtgaccacagcagaagcagctacagtgatgcatccacaagccaaggagctaaggccaccagaagctggaaaaatcaaggaacagattcttaagagcctttgaagggaacacagccctgccaacaccttgattttggactttgggcctccagaacagtgagagaataaattaatgttgttttagccaccgaatttgtggtaatttgttaatatagttacagaaaattaatgcagaatggaagaataaaacagacytggccatgcatactgaaaataacaagtcaaagcaaccttgaaaatttttctcagaaacacaaaggtgaagaatagaggtcaaaatatatatgaaaaaataaaggaaatatgtatggcatata

SEQ ID NO: 579873 - DNA, 584 bp, Homo sapiens
atgggattaagagattaaagacaggcataggaaattataagagtattgattggggaagtgataaatgtccatgaaatcttcacaatttatgtccagagattgcagtaaagacagatgtaggaaattataaaagtattaatttggggaactaacaaatgtccatgaaatcttcacaatttatgttattctgccgtggcttcagctggtccctccatttgggttccctgacttcccacaacaagaaagaatatcctattggaatttataataattttaaaaatttagccatcataattatcttaggataattggtatcagaagaggattgtttaaagcaaatatactttttaaaaataacttcaacttttagattcaaggggtatatgtgcaggtttgtttcatgagtgtattgtatgatgctgagatttagggtatgaatgatcctgtcatccaagtagtgagaatagcactcaataggtagtttttcaatcatccccctyctctctttctcccccactctagtattccccagtgtctattgttcccgtctttatatccatgtgtaccgaatgcttagctcccac

SEQ ID NO: 579874 - DNA, 628 bp, Homo sapiens
acatactatattttctttacccaatctaccattgatgggcacccaggttgattctatgtttctgctattgtgaacagtgctgtgattaacttactagtgcatgtatcttttcttgcagaatgatttattttcctttggatatatatccagtaatgggattgctgggtgaaattatagttctaaggtctttgagaartcaccgaactgctttccacagtggctgaacaatgtattaagtgttcccttttctccacagcctcactagcatctgttgtttttcactttttaataatagccattctgactggtaagccacccggttcttcctgtgaagaggttgtggtgcagtggggacctctacacaccacatccaagcatatctccaggcctctggagcacccactctcctagattagaagtttaggctgcaaccccctctcggtacacagaacttggggccaaggaggtttcccagctccaagcctagagatacctctaagtgcttgggggctgctccctggattctccctcagcactggttcttgtgcctgccattggggaatctgtaggcaggccttcccattctggcaccacccatctttccccacttccagacactaagcaggga

SEQ ID NO: 579875 - DNA, 628 bp, Homo sapiens
acatactatattttctttacccaatctaccattgatgggcacccaggttgattctatgtttctgctattgtgaacagtgctgtgattaacttactagtgcatgtatcttttcttgcagaatgatttattttcctttggatatatatccagtaatgggattgctgggtgaaattatagttctaaggtctttgagaaatcaccgaactgctttccacagtggctgaacaatgtattaagtgttcccttttctccacagcctcactagcatctgttgtttttcacttttyaataatagccattctgactggtaagccacccggttcttcctgtgaagaggttgtggtgcagtggggacctctacacaccacatccaagcatatctccaggcctctggagcacccactctcctagattagaagtttaggctgcaaccccctctcggtacacagaacttggggccaaggaggtttcccagctccaagcctagagatacctctaagtgcttgggggctgctccctggattctccctcagcactggttcttgtgcctgccattggggaatctgtaggcaggccttcccattctggcaccacccatctttccccacttccagacactaagcaggga

SEQ ID NO: 579876 - DNA, 625 bp, Homo sapiens
aaaaaaaaaaataaagtgtggactttargttaatgataatgtatcaacattggctcattaatcatgaaaaatgttcaatgtaagatgttaacaataggggaaagttggtatgaggtatatgggaactctgtactataaaattttctgcaaatctaaatgtgtcctaaaatatagaagtttcttaagaacattttgtaaaaagtgtattttatggcacatgaaaattacataaaatttaaattacagtggccatgaaaaaagttttattatatcacacacacacacacacacacacacacacacacacacacacaataaatggcagaggaaacaggagtagacagaaaatgctttataccacaatgtatatctgatacttttgaaggggagtggggctgggggaaggacagagattcaggaggaagaggctctaattgcaactctgaaaaaatctgagcccacgcaagggaaagttgtggcacaaaaatcctcagtggagatcttttgtgtcgggagaagtatgtgttgggcaaaaatgtcttagtacagtgtcatgcttagtcattgagtggggctggccaggaaaagagtggccttggctgaaatgctgtggcagatttcaaag

SEQ ID NO: 579877 - DNA, 625 bp, Homo sapiens
aaaaaaaaaaataaagtgtggactttaggttaatgataatgtatcaacattggctcattaatcatgaaaaatgttcaatgtaagatgttaacaataggggaaagttggtatgaggtatatgggaactctgtactataaaattttctgcaaatctaaatgtgtcctaaaatatagaagtttcttaagaacattttgtaaaaagtgtattttatggcacatgaaaattacataaaatttaaattacagtggccatgaaaaaagttttattatatcacacacacacacacacacacacacacacacacacacacacaataaatggcagaggaaacaggagtagacagaaaatgctttataccacaatgtatatctgatacttttgaargggagtggggctgggggaaggacagagattcaggaggaagaggctctaattgcaactctgaaaaaatctgagcccacgcaagggaaagttgtggcacaaaaatcctcagtggagatcttttgtgtcgggagaagtatgtgttgggcaaaaatgtcttagtacagtgtcatgcttagtcattgagtggggctggccaggaaaagagtggccttggctgaaatgctgtggcagatttcaaag

SEQ ID NO: 579878 - DNA, 621 bp, Homo sapiens
aaggcagttgtggaatttatttcttcccagtgctctgattgtcaaaatttgaataaagctcagtgaaaggaggacagtaattaatgacttgatagccaaacatcgtaatgatgatttagtgatatactagactggatgaaagagaggtcactgtcttttcactatggattcatcataaacagtatcattcttctcaggaagaaacttatttttagaactayattttaataaatttctcacattctaatatttaatttttattttttaaattttattacctgctaggtatgatgtgtaaaatgattttccatttatagtaatggtatagtttcctttttataaaaggtttataaagaagtttatgtaaaaagtcaacttaaaaataccaagttaattcagtcagttcaaaaagttttgaataattaaacttggaaagtcactgcaataaagccaaagcaagttaatggtcataattataagacttagctttttaaaaataaaactctcaactgtgtctacccttttaattttttttctttcttccccctaactttacagttaaccgacagcgagaccaagtcaaacgtacgtacatcaatcttaaattgtttcattaagagc

SEQ ID NO: 579879 - DNA, 558 bp, Homo sapiens
agcaaggtacagtagcacatttttaggtgattcttagtaactccagtagccttcattagttaaaaacattattattttttgcatgctgcttcgactctaaatatctggttttccctgtctttttggtttactacttccccagattcagaacagaggagtaactaggggatctgattttagaggccttaattttctgttcatggactgttaaaagtaaaaccaaactttcaaaagggataaacctaaatatttacttgttatcattagagagggaacatcaaatgctgggacatcattactaaccaatagcatcagacactggatttaatggataatcacaatggtcgtaatgtatacaaagacwtatataccactttctagtataaatttttcaaaaaatacaataataatataatttataaagaacactcttctatgaacaaccaccaccaccaaaaaaaaaaaaagccctcagaaaatttctcacaaataaggcaactaatgcctgatatctcaaaatcctttacaaaaggagatagttctagtcaaggagttttg

SEQ ID NO: 579880 - DNA, 452 bp, Homo sapiens
attaatcttaagatttcaccatgttattctaataaagtagggaattttcattttctaaacatgtttccatctctgtgttttaaatagtaaggtgcttaagatcattccaagttcataacaaccattgaataaaatttgtatttttttgtttttactgttactgtcatagtttttattggtggtagtggtattttcatgtgatattaaggtatctaatattattatttgtctttgtggtttttggaatagtttaagtggtacctgtacatcctgctaggatgcaaacttattatttataattaatgttsaatatttcattaaagacttgctgtaattttctgccaccaagggctaataaatgccataattttaattagttgtggtagaggaatctgggtgcttccaaatttatatgataaaataaataaattttttaaaaactattaacttgt

SEQ ID NO: 579881 - DNA, 452 bp, Homo sapiens
attaatcttaagatttcaccatgttattctaataaagtagggaattttcattttctaaacatgtttccatctctgtgttttaaatagtaaggtgcttaagatcattccaagttcataacaaccattgaataaaatttgtatttttttgtttttactgttactgtcatagtttttattggtggtagtggtattttcatgtgatattaaggtatctaatattattatttgtctttgtggtttttggaatagtttaagtggtacctgtacatcctgctaggatgcaaacttattatttataattaatgttcaatatttcattaaagacttgctgtaattttctgccaccaagggstaataaatgccataattttaattagttgtggtagaggaatctgggtgcttccaaatttatatgataaaataaataaattttttaaaaactattaacttgt

SEQ ID NO: 579882 - DNA, 607 bp, Homo sapiens
gggattgaatttcagatctgtggctttaagctggtttttaacctttctgaacttcttaggatatgggctgttgtggttatggaataatgttgtgaaacacggcacacactattttgcccacaattagccttcagtgaaatgtcagttttcctcacttagattctaaattccatgaaactaaattgtcacgtttcctaccagccctactcagtgcttgaagaccatatttatagaggactcatatgcagtggtatcttctctccttatctcacctcgttttccattcaaattcccactgtactcaccccagttacatttyagatgaaccccctattgtttaatgtttatttttgcagacttgggacccagcactagcccaaattgcaaaagcatgggccagcaattgccagttttcacataatacacggctgaagccaccccacaagctgcacccaaacttcacttcactgggagagaacatctggactgggtctgtgcccattttttctgtgtcttccgccatcacaaactggtatgacgaaatccaggactatgacttcaagactcggatatgcaaaaaagtctgtggccactacactcaggtaag

SEQ ID NO: 579883 - DNA, 581 bp, Homo sapiens
ggtggatcacttgaagccaggagtttgagaccagcctggccaacatggtgaaaccctgtctctactaaaagtacaaaaattagcctggtgtggtggtgtatgccttagtcccagctacttgggaggctgaagtgggataatcacttgggcctgggaggcagaggctgcggtgagccaggatygcaccactgcactacagactaggtgacagactctgtctcagaaaaataaaataaaggtacagcaaaacctatttgatcattccacctttgaaaatagatctttaatctctctaatattttggtcacatttcaaacacatgtagccctctctggcctcatatagttctttgaaacacctcttgcagtccttcatgagccttttaaattctagcacttctttcttgccatccagctttcatagcactcctaggtacagaggcattgcaactcactagtacccaccaggtggtaaaatggaggcttctcagtctgctttgccagactggaatgtcaccctagccctcaaggccgctgtccagatggtgctcagggtgaagtaggggcttctggaaggagatg

SEQ ID NO: 579884 - DNA, 298 bp, Homo sapiens
ttgtttttttttttttttttttttttttactttcaaccaactccaaaraaattttttgggtttgttgttaggcacaaatttatagtttacacaccgtctattttactgcatttgaatataactttaacacagaaatgtattatttttaaataattgggtttaaaaccaaagaacaagaaactgtgaaaagactacttattatcagaggattattactgaaaataattttgtcatagagaggaggggagggttaaaaaatgatcctctccaggtgtcctccaatgtcactgtttcccag

SEQ ID NO: 579885 - DNA, 553 bp, Homo sapiens
aaaaaaaagaatttcatgctttgatagattgcacttacgttaggcaggtataggacttaagagcatgaggatcatgcttatatttatgactaaactatttttcttctgttccttcctccccccatctagtatatcwactttggtattttaaatataatatgttttatatttacacagtttctttcttatggtctggagagaaagctaattttctaaaacatttttggcttttttataggttggtcaaagaaaaagtgatgtatgaaaaagaggcaaaacaacaagaagaaaagattgaaaaaatgagagctgaagacggtgaaaattatgacattaaaaagcaggtaaaattatatcataaataacaatagctaacatttacagaatgccatattaactaatgtagtttttacagtagtcctctgactgagattatattattatttacttctttactattaaaacttccatttaaagataaggaaactcaaacacaggttaaataactgcgcaaatcacatagttgttaagtgacacagctgaggttttgttt

SEQ ID NO: 579886 - DNA, 565 bp, Homo sapiens
gggttaagtaacttgcctgaaggtggtagagaaatgatttaaatccaggctgtctccagatctgctctcttaaccacagcatcacagcctctggacccacatggaagaccctgtggctgaatctgcaggtgggtcacctcagattcatccttcatcctttcctctttaactrtttttcttctgttttgatcacctcctcttgaagagtgagggattcccatcctagggatgcaggcatggctgaatgaaacatgatacctgacactggacagatggtatgaacggtggtttattggtacatatgtctgctcaaagccccgggaggaggacacctcatgccgtgcaaggccacatggctgctgcgcttggaaacggagggaacaagcagagagaggcaagctttgtagcatcaggagagtggtgtgccccctggtttgtgagggagaatgtatttaccttgtttgaataattccttggtctggcagggaactgaagccactgctcaggggtaagcaggaactgtgtctggctgctgctttttttttttttttttttgagatggagt

SEQ ID NO: 579887 - DNA, 565 bp, Homo sapiens
gggttaagtaacttgcctgaaggtggtagagaaatgatttaaatccaggctgtctccagatctgctctcttaaccacagcatcacagcctctggacccacatggaagaccctgtggctgaatctgcaggtgggtcacctcagattcatccttcatcctttcctctttaactatttttcttctgttttgatcacctcctcttgaagagtgagggattcccatcctagggatgcaggcatggctgaatgaaacatgatacctgacactggacagatggtatgaackgtggtttattggtacatatgtctgctcaaagccccgggaggaggacacctcatgccgtgcaaggccacatggctgctgcgcttggaaacggagggaacaagcagagagaggcaagctttgtagcatcaggagagtggtgtgccccctggtttgtgagggagaatgtatttaccttgtttgaataattccttggtctggcagggaactgaagccactgctcaggggtaagcaggaactgtgtctggctgctgctttttttttttttttttttgagatggagt

SEQ ID NO: 579888 - DNA, 565 bp, Homo sapiens
gggttaagtaacttgcctgaaggtggtagagaaatgatttaaatccaggctgtctccagatctgctctcttaaccacagcatcacagcctctggacccacatggaagaccctgtggctgaatctgcaggtgggtcacctcagattcatccttcatcctttcctctttaactatttttcttctgttttgatcacctcctcttgaagagtgagggattcccatcctagggatgcaggcatggctgaatgaaacatgatacctgacactggacagatggtatgaacggtggtttattggtacatatgtctgctcaaagccccgggaggaggacacctcatgccrtgcaaggccacatggctgctgcgcttggaaacggagggaacaagcagagagaggcaagctttgtagcatcaggagagtggtgtgccccctggtttgtgagggagaatgtatttaccttgtttgaataattccttggtctggcagggaactgaagccactgctcaggggtaagcaggaactgtgtctggctgctgctttttttttttttttttttgagatggagt

SEQ ID NO: 579889 - DNA, 552 bp, Homo sapiens
tacagttgattgcctttctattcaaatttaatctgagcaatatataattttaattacagaaattagaggctacaaatcagaaatatccttacatttcttgagttaacaaaaatgatcttcctttacttgtgtaaaatttcatttggaaaaagggaaaagagagtaaagagatggagtaaaaagatgtgcatctgtaatgttggctctgtgcaatcagtatcttgataaycatattttatacaaactctccggcaaaaccagagtcaagatgttttaggaattactcctcctcactcctccacccccacattccaccactgggagtcaaattgtctgtggaaaaatacatcctaatattaaaaacggctttctgattgaactgtggcatattcttgaagctgccgtgcaagagtctcttgcaagagtttaaaaattctatagatcaggtacttaatgatttacagaataggaaaaataacgctggtggtttgagctgaaaagcactttgtcaggactgcctatgatcttcttaatactgacaaagaataatga

SEQ ID NO: 579890 - DNA, 568 bp, Homo sapiens
aatagaaatgtagttaatttacatcagaattaatccttgcctgctgccagccttatttgtgaagaccaagcagattgccacttacactgggtgatttcagaggtacaggaacttctctgctcctttccctccaggactcttatgatcctttgacatttaagtgtatttgcttgaggtaagactttgtaccaaaggacatcttgttagatggcctagagtaacaataagatcttggaaaaatgggacccatcttgttgctgccagaaaacaytgtgcagtagacacagtttccttctctgatggccattatgccatgttgtagatgttaggtgttgcaaaatgtattttaagataaagggaaccatttctgtctttggctaactcattctatggcgtttcttcccctcaaaaaacttattcaatgatattttacattgataacacagagagattaaaacagattttgtagaaacaaagcatgtattgaatcaagatataggaaatatattaaggttttagattagtaacaagagattattattttctatattgaaaaaaaaaacctgaa

SEQ ID NO: 579891 - DNA, 503 bp, Homo sapiens
cccacacacccagtgctcaataaattgagggctcccaacccctgaccttttccagctggagcctttccacctggcctgcgctgtgtaattgtgcttgcgtgcccaccaggcactctcttattatctcctccatttatcaggcatgatgttttgggatcatttttgcckgtttttttttttttttttttttttttttttttttttgcttcttctcagcctacctgaatatgactttggcattgccattgatgaaatgcagtgtgtgctggatgtgaggatccaactcaatgcagggccattccctctttgtggacaaggccatgtttttgcagtgaagggcttgaggacgtgggttatgctctggtgaagctatcggggaagtcatcaattcaggccaagctccgccctccatgtgctccttcaggaagtgattaaaacactagaactgacagtaaaatgagtcattaggttcacagaaaagttaggcagcagcgatgtagtta

SEQ ID NO: 579892 - DNA, 529 bp, Homo sapiens
gctaagtttctggagaaagaaattacaagtgagcagagggatgagtctagaatgaacctggtgcttttggattgatgttgcaggtttcagtgtgaacttatttatatatacatatagagagacgcaaaaatcaatatagactatctcttcatacatgtatgagtatacatatatgtgtatatttcctaactttgtcagttgtgtcatgccagaagcaatgagcatatctaggatgcatatgtcagcttctaaagaccttagttttttaataaaakatccagaaatccttagagaagtggttgatccagagctggatcaaggacaaaacaaaacatgcctcactgaagaagttgtcaattaaaaacaaaacaaacaaacaaacaaaaaataggtgcatgaagaaagaatgtcagtactcactcagaagaactcctaagggccaaaactggaacaacttgaacaacaaaatacataattatagtgttgaattataaaccaccccccaaataaaacaatactcctgagtcca

SEQ ID NO: 579893 - DNA, 659 bp, Homo sapiens
ggtcaatataaatagtgatccatctgtaaaaaataatatttctttctctggatagaacgaaattgttaatatgaatctttattttctattattatgattctatttatctatattttttaaaatgtgggctaactccaactagttttagagtttagtctttagaatgcaccatttctatgtacatttctttactaaatactctgaaaagagagtaggcttacacctatgtaaataatttggcatttatataaatttggagatttatttcaatttttaaattattaaaaattttaagaggacaataaggaaaattatttggagcttttgccaacacttagaggtgaagatactarcattaataactaagggttgaaaggcaacacaatgaaatgataatcatgacaataactatatttgaaatttcttgattatttgtaatctaaagaaatcatttgccttttacaatatactgtcctataaactgctataacgtggcagtcaatattttagtggagcgtgaatactacggagtagcatcacatcactgtatgtcaccatggataagatacattgcaaatctaattggctatgtcactaacatcatctgttctacttgtttccagagaatttatttgtgaccacttttacctaatagacag

SEQ ID NO: 579894 - DNA, 613 bp, Homo sapiens
tgcttatatgcatgttttattccccatccttccaccctgaaataaattgtaaaacccctaggtcttattcagcttttcatttcctaattaacactgaaatccaggaaatttggggtgttttggaacaatagtttctaactcagcaaatacacatattaaaagtatataatacattatacattaaaagtctgcaaatatgaaataaccaaaccatgctgaagttaaacatactatatttttaaaatttttaactgaatgcaatatactttcctttttcgtgaaccagagttaaaactaataacaataatatagacaactcaatacaaaactgtctacaaatagagaaacatatttttaagagattcaccagacaatgcagttactaggtaaacatgtcctgtccagttaaataacccctgacataaatcatatatatggatgtagacagagtgtatatatctatagatacagatacaggtatatatataaatagattgtggataattcaaaggattatcattactatgttctctggcagtawataaacataccaacattaaaaacagttttttgagcatttactatgtgataggcattctggattattgcatta

SEQ ID NO: 579895 - DNA, 574 bp, Homo sapiens
aattccccaactggggaagggttttcccctctgagccatgccaggaaagtcatggcgtgattcttgtcagtaccccttctgcccacctctgccatggctaacagacctgaagtctaacttgttaacgctttggattgctcatcttattcctggcatgagtcacttggtgttttggttcacccatctggggttttcttttcaggttaacatgtttgttgaaggattccacgatgccatcctcctctacgtcttggctctacatgaagtactcagagctggttacagcaaaaaggatggagggaaaattatacagcagacttggaacagaacatttgaaggtggggattccatctataaggcaattacatggggccaaatgagctgctgcttttctggttctgtatttctcagttgcagctgtggggcctttccagcktcttgcttttctcagctctaaagcagcccatctcataggcttgttgtaccaattaaatgagataatacacgtgaaagtgctttgaacaagccccactgaaagaggaaaggccttgtctcctgattatttaggtaatag

SEQ ID NO: 579896 - DNA, 617 bp, Homo sapiens
aatagttgtgtggggtaaaaaatattatccttacttatttacaatgagaaactgagctgagagaggttaagtagcttaagtttacacaactagtcagagatgacaacttcagtttcactgcaaagcctatacccctaaccattatgatatgttgactttacaatttacagagctgtattgtggtcaaatgagacaatatatgggaaaacactgtaagactgtaaaaatgtaggacactaagaagggaccataaaaaaaaagttggccaggtgcagtggctcatgcctgtaatcccagcactttgggaggctgaggtgggawgatcacctgaggtcaggagttcaagaccagcctggccaatgtggtgaaaccctgtctctacaaaaatacaaaattagctgggcatgacagctgttgcctgtaattccagctacctgggaggctgaggtgggagaattgcttgaacccgagaggcagaggttgcagtgagccgagatcatgccactgcgctccagcctgggcaacagagtgagactccatctcaaaaaaaaaaaaaaaaaaaaggttgaatctgtgagtgagaataaaggaagtcattgtaccatttgagaaagtat

SEQ ID NO: 579897 - DNA, 617 bp, Homo sapiens
aatagttgtgtggggtaaaaaatattatccttacttatttacaatgagaaactgagctgagagaggttaagtagcttaagtttacacaactagtcagagatgacaacttcagtttcactgcaaagcctatacccctaaccattatgatatgttgactttacaatttacagagctgtattgtggtcaaatgagacaatatatgggaaaacactgtaagactgtaaaaatgtaggacactaagaagggaccataaaaaaaaagttggccaggtgcagtggctcatgcctgtaatcccagcactttgggaggctgaggtgggaagatcacctgaggtcaggagttcaagaccagcctggccaatgtggtgaaaccctgtctctacaaaaatacaaaattagctgggcatgacagckgttgcctgtaattccagctacctgggaggctgaggtgggagaattgcttgaacccgagaggcagaggttgcagtgagccgagatcatgccactgcgctccagcctgggcaacagagtgagactccatctcaaaaaaaaaaaaaaaaaaaaggttgaatctgtgagtgagaataaaggaagtcattgtaccatttgagaaagtat

SEQ ID NO: 579898 - DNA, 578 bp, Homo sapiens
ggtttcatgagaaggtccctgaaaacatcacatttctctgaagaaccatcaacttgtcttttcttgaaccacaggaatggttctacagaccctactataattcttcacatttcagaacccatgtttaatggagggaagagagaaatgcatgggaaaagaacacctccttttctcctttctcttaaattcaaagacgtttgctttggaatgccctcacttctccctattcacaggcttctaaaatcattaatttactcaaggcacatgtgccttctttgccccaaatgcatcactttccttttagttatggctgattttgggtgtgtgtgtgtaagacatgcagtcaacaaygagatgaaggccattgcatagatctcatgcagatagtgatggattcagaaagtaggttccagtggcgtcactaccttcttgtaagccagtatacactggctatttgtggaaatctctttgggagatcaaatagagtattatgccactgtgagtgtttataaactggaaggaacaagtacctgtgtttcttgggacacaaagcactcagatcctgagtggatgcagac

SEQ ID NO: 579899 - DNA, 608 bp, Homo sapiens
gcctttaaggcaaaaggaatttctactgttgaaagccgggcagcccacatttctttcttttcaatttggcttgatgacaagttgcctcgacctcttggaggatgagatgaaaggcaagaggtcccttttctgtacaccgcccctctctaaagggtcccgataagggccgagaaagggacagtgatagccacattgcctctgaagctttcagagggcctgcgcagctttactcaaatctgggttccctccttagagtgtaggcgccaatcctggagcagtaggccatacatgctgtacctgccttccaccccctgctttctcccctggctgagatgggtctggggactgctctttggagttcatcacctcactgctgtgattggtcagagcagttcctgccatgacatagaggactcgtgtgtcctaaagaagagcctcccacctcggtgccctcagccccaggtctttcccgakaatgctggcattttgtcctaaatgcaagagtagcacctcattaagggtgttggtgggcaggggatttcctagtgtagacaaaggaggtttttattccactgctactccaatggctcaagagagaccaggcatca

SEQ ID NO: 579900 - DNA, 559 bp, Homo sapiens
tggatgcctctagctgaaaagaaggttacatacagggaagttcaaatgcaaaaatcattttaataaacatcaaaaatagcatccccattacattagcaaggaaataaaaattggaacctaattgtgtcatccaaattatttgctaactttctgattcatccataaatttgaaaaacttgtcttttgtatcttcatggagtcactgataaaacggagaaaattaattaatgacatagrggatagagccctgagaaacatgactagaaacttatttgcaaattaacagtaattcacagtgaaaattctgtttgcctgaaatttattcctgttagcccaagtaaatcactggtttggggtcatggtgcagagatcctaagatcctcatgttctagtatttatgttcccatataatctcttctccttgagtttgggtgctacttgtaacttgcttctaactgataaaatatggcaaaggtgatgcaatgttttccccatgattatattaagatatataagactccatcttgctagatagagagtttcactcttgcaggctttg

SEQ ID NO: 579901 - DNA, 656 bp, Homo sapiens
gcacttcttacatggtggtagcaagagaaaatgaggaagaagcaaaagcagaaacccctgataaacccatcagatcttgtgagacttattcaggatcatgagaatagcacggagaacggcccccatgattcaattacgtccccctgggttcctcccacaatatgtgggaattctgggagataaaattcaagttgagagttggatggggacacagccaaccatatgatgatctcataccaayttattcacaaagcaccagcagccaatgagctgcaaggtcagaaatattcagctgtgttggactaaaatgtttaattgtgtttggtcaagcatacattggcacaccatgttgcctttgggctatctcccaacaaaataaaatattcactaattatgagtcatacattctctccttgctatgtactttgctgtgttgaatgcatgcagggctttaacttgagatcatgaaataaaaggaaatataagaagtatgatttttaaaattttagtgccatgtattagaggagagtcactctggatagaaaggcaatatgagatattcaatggtgtgtctctctttccctccttgggaatggtatgatgttgacagaagcacaaggttgctaagctaaatactgcaggttctgattcaatat

SEQ ID NO: 579902 - DNA, 603 bp, Homo sapiens
atatgcaatgcatatatttcagtttgcagtttacaatacatttcacatatttagcatatccagtaggcaaggtggaactcccttccccaggtaggaggcaaatcacttacactcaagcttttcatggtccctgagctgtgtawcttccatttgccacccaagctccattctcctcccttctccctctccctttttctgtgctcctttgtgcctagaaagttgatcccattgcagcaaggattccctgggcttctggtttctcactagactcatcaatgagagacactggtgggagaaggagggcagtggagagtcaacactgggcatttttttcctttcttctcttcctactacgtcttaagtcctctaggcatacaacagttcctttctggcagcccctcagagtcccagacttggcctccttccatttgcccctttgggcctggagatggcaaccaaagtgtgaaagaaaaagaggaagaaatgtcaacaatagtcccaaatgttgcactatgacttcttggtttccctgaacctagccttcagtttgtaaatagcccctttattacactctcttcaaatcacctgatttgagtgtaccat

SEQ ID NO: 579903 - DNA, 586 bp, Homo sapiens
gctgctggttgcccatttttatggttatttcttgatgatatgctaaacaaggggtggattattcatgcctcccctttttagaccatatagggtaacttcctgatgttgccatggcatttgtaaactgtcatggcgctggtgggagtgtagcagtgaggatgaccagaggtcactctcattgccatctttgttttggtggrttttaaccggcttctttactgcaacctgttttatcaacaaggtctttatgacctgtatcttatgccaacctcctatttcagtctgtgacttagaatgccttaacaatctgggaatgcagcccagtaggtttcagcctcattttacccattcattatggagttgctgtggttcacatgcctctgacaattccagcactttgggaggctgaggcaggtggatcacttgaggtcaggagttcgagactagcctgggcaacatgctgaaaccccatctctactaaaaatacaaaaattagccagtcatagtggtatgcacctgtagtcccagctacttgggaggctgaggcatgggaattgtctgaacccaggaggcagaggttgcagtg

SEQ ID NO: 579904 - DNA, 618 bp, Homo sapiens
ggggactacaggcacatgccaccatgcctggctaattttagtttgttttttttttatagacggggtcttgccatgttgcccaggctggtcttgaactcctgggctcaagtcatccacccacctcagcctcccaaagttctgggattacaggcatgagccactgtgcctggcccaagaaattttacttctgtaaaggttaagtctctttgccatattcagatgctgggtggaaaggtctccagcagcaacctctgtccttccagggtctggatcagaagagcacatcaagaactaaaaggtagtaagcactgcagcataattatgcttgaagccagcccaggcctcaactctgttatggtgtgggatactaagtgacttgtttcagtgggccttgcaagcatttcgtcaaactgtgatggtagcctgatgcttactctgctggattccctttagatggtggtgttgcccatgtagactcaggrctgtgaggagcaaggaaccttcctgatactgtgtgtgtaacatttagtgtgttgcaatttacttatgatatggtcaagattttgttacactatcaaacttgttttgggtattatgtagcttcattataccatacac

SEQ ID NO: 579905 - DNA, 452 bp, Homo sapiens
aaattctagaggagccaggtggagaaaaatgaacatgctccaaattttgttcacagtagtataccttacttaattattaaaggccataaatagcttaaaataagtttccttcactctgaaaaacaaaagaaggattagcaatattccaagcaaaagttaaaaaggttgcttaaactttctgagtgcagtccacttagttcacttttgttttgcttggtatttgtgaacatgtcagttttttaggagtcccctrcgttctttttctattccaatgttacaatcttcaaagctattaaaaacctgcatttgaaaacacctgttaaagtccttaatatagcttgatgataaaccatcctttgagaagtaacatagcaagacaataattgtctgcaaatggcaacatttccaggatagttacagttaaaaacatgactgacaaagaagttatctct

SEQ ID NO: 579906 - DNA, 546 bp, Homo sapiens
gtttttctaaatataacccaatgtgaaatagagttgagacataattccattaaaacttcctctgcatgggtggaaagctgttcctgaagccaaagcatagagaacactccccagaaatcccagtttgggctggattgtgaagactgctttttctcttttttggaaaatgtggaggaatctaaaacaacatatacttcttatgaaggtaataaccccaagtcagagaccatgggttgcaaagcacagttttcccagatctgtgggctatggtatgtggagcccaggctcaggtgaagctgctgagtgttgcccttcacactatgctctcccagatgtgtgcctacaggaagcgggaggcatgcgtcaggaagtgccaggcacatcttgtcctcagttttttcagaagcactctcagggatacaaacccaaagagaacatggaggatttcctgcctggcattgacccatcaaggcaatcgaaggccttccaaagcccctcttctgtcactcatcacattcctrcaatttggaagaagaatccagatca

SEQ ID NO: 579907 - DNA, 457 bp, Homo sapiens
cctcatttgatgcctgtgcagcctaaattccaggcagcaggtgggaggaccgcatatctgcagtggagagggacacaacgtgtaggcacgatgggagcagctcagatctttggatatcccaggttcagttggagcttcctggaaatccaaagtcagtggcctagcagggaatgccaggcagccactcagacctggacaggcagcctgggcaaaggccccatgtggctgaagcagggctgggtcaggaaacagagacyggaaagaaataacctaaaggggccgggcgctgtgactcatgcctgtaatcccagcagtttgagaggccaaggtgggcggatcacctgaggtcaggagttcgagaccagcctggccactatggtgaaaccccgtctctactaaaaatacaaaaattagctggacgtggtggcacacacctgtaatccccactacccaggag

SEQ ID NO: 579908 - DNA, 457 bp, Homo sapiens
cctcatttgatgcctgtgcagcctaaattccaggcagcaggtgggaggaccgcatatctgcagtggagagggacacaacgtgtaggcacgatgggagcagctcagatctttggatatcccaggttcagttggagcttcctggaaatccaaagtcagtggcctagcagggaatgccaggcagccactcagacctggacaggcagcctgggcaaaggccccatgtggctgaagcagggctgggtcaggaaacagagactggaaagaaataacctaaaggggccgggcgckgtgactcatgcctgtaatcccagcagtttgagaggccaaggtgggcggatcacctgaggtcaggagttcgagaccagcctggccactatggtgaaaccccgtctctactaaaaatacaaaaattagctggacgtggtggcacacacctgtaatccccactacccaggag

SEQ ID NO: 579909 - DNA, 457 bp, Homo sapiens
cctcatttgatgcctgtgcagcctaaattccaggcagcaggtgggaggaccgcatatctgcagtggagagggacacaacgtgtaggcacgatgggagcagctcagatctttggatatcccaggttcagttggagcttcctggaaatccaaagtcagtggcctagcagggaatgccaggcagccactcagacctggacaggcagcctgggcaaaggccccatgtggctgaagcagggctgggtcaggaaacagagactggaaagaaataacctaaaggggccgggcgctgtgactcatgcctgtaatcccagcagtttgagaggccaaggtgggcggatcacctgaggtcaggagttcgagaccagcctggccastatggtgaaaccccgtctctactaaaaatacaaaaattagctggacgtggtggcacacacctgtaatccccactacccaggag

SEQ ID NO: 579910 - DNA, 469 bp, Homo sapiens
agtaaccaaaacagcatggtactggtataaaaatagacacatagataaatagaacagaatagggaggccagaaatacatttatgcacctatagccaactgattttcaataaagattccaagaacacacattaaaaacagtctcttcaataaatgcatcaaggagaattggatattcatatgaagaagaataagactagacccctacctctggccatataaaaaaaaaaacaaacctaaaatgtatgaaagacctaaaggtaaactccaaaactatgaaactactggaggaaaacaaaggagaaactgcacaatattgggctgagcaaatattttctgaataagatctaaagagcamaaacaaaagcaaaatgtacaaatgaaattctatcaaactaaaatgctcttacagagcaaaggaaattattaacggagtaaagaggtatgggagaaaatatttgcaaactatac

SEQ ID NO: 579911 - DNA, 517 bp, Homo sapiens
caagtgaaaaccacaatgaggtattatctccccccagttagaatggctgttaccaaaaagacaaaggaaaataagtgttggcaaggatgtgaagactacaaaacacttaatgcactattagtggtagygtaaactagtacagtcattatggaaaacagtttgcaggtttctcaaaaaattaaaaatagaactatcacttgattcaggaatctttctactgggtatatatccaagagaaagaaaatcagcacattgaagaaatatctgcactcccatatttcttgaagcactatttacaacagccaaatatggaatcagtccaattgttcaacaatgaataacagtatagagaatgtggtaaatatctgcaatggaatactattcagtcataaaaaagagttaaatgttgtcatttgaaacaacatggatgaactgagaggacatactattaagtgaaataaatcagacacagaaagacaaatactgcatgatctcacacatacactgaatatttttt

SEQ ID NO: 579912 - DNA, 509 bp, Homo sapiens
aaatgtatctcttcccaatcagaattgcctctttctgaataaagtgaatcttagtatttactttttccccctggttctgcactaatgtatccatcaaactattatctagttgcttttttttgcttttgaatttttttaaggggaatcatctatattgtttgcggaatttatttatttatttatttatttatttatttattatttttgagacggagtcttgctctgtcgccaggctggagtgcagtggcacgatctctgctcactgcaacctccacctcctgtgttcaagggattctcctgcctcagcctcccaagtagctgggactacaggcatgcattatcacacccagctaacttttgtayttttagcagagacggggtttcaccatgttgatcaggctggcctcaaactcctgacctcaggtgatccatctgcctcggcttcccgaagtgctgggattataggtgtgagccactgctcctggaaggaatttattttttttaattct

SEQ ID NO: 579913 - DNA, 414 bp, Homo sapiens
ggagaaaaggcagtacaatgcaacaaaaagtcttttcaaaaaatggtgctgaaacaactggacatccaaaaataaaaaaaaattaatctagacacagaacttgcactcttgtgtgttctgagttaacacaaaaattaacttaaaaatcatagaacaaagtgtgaaactcctagaagctagaaacaagcaaaactgggyggcacggtggctcatgcctgtaattccagcattttgggaggccaaggcaggtggatcacctgaggttgggagctcgagaacagcttggccaacatggcgaaaccttgactccactaaaaatacaaaaattagccaggtatggtggcgcacacctaaaattccagctacgtgggagcctgaggcaggagaatcacttgaacctgggaggcggaggtt

SEQ ID NO: 579914 - DNA, 617 bp, Homo sapiens
tgtccatcaatcaacaagtggataaactgtggcatgcatatatatatatatatatatatatatatatatatatatatatatgatggaatactactcagccacaaatagcaatgagttaatggcatttgcagcaacttggacgggactggagacttactctaagtgaggtaactcagtatatatagatatatgatggaatactacctcagccataaaaaggaatgagttaatggcatttgcagcaagttggatgggactggagactattagtctaagtgatgtaactcaggaatggaaaaggaaacatcatatgttctcacttataagtgggagctaagctatgaggatgcaaaggcgtaagaatgacacaatagaccttggggactcagagggaaagggtgggaatggggtgagggataaaagactacaaatcaggtacagtgtacactgcttgggtgatgggtgcaccaaaatctcaaaaatcaccactaaagaacttactcttgtaaccaaataccacctgtgcccccaaaacctacagaaataataaaataaaataaaacctatgttcacatcaaaactgtacatgaacrttcacagcagcttttctcacaaca

SEQ ID NO: 579915 - DNA, 641 bp, Homo sapiens
taaaatctgtagatgttatagtattctatagatgataaatagatactagaagataaaagcacagcataaacaactttatactatttaggttgacaatttagatgatgtgaaaaactttcatggaaaacacgaatcaccaaacttcactcaagatgcaatgtatataaccagaatagctccattgaaaaaaattaatttgtacttttaaacctatgaagaaaaatccagaagcagatggattcattgatgaacaccagcatctttaaatactgttttaaaagtagaaataatgcttaattctgtacaaagtctgttgaagatgaggaaatgcrtctcagctcattctgtgaagcctgtcctgctctcactggaaaagtagacaacagtataagaaacaagggaaaacaataaaccaatctctctcatgaacacggataggaggagcaatacattactgataactcaaatccaacaatatattaaaatgctaatacatcattaccatgtggggtttgctctagagattcaaggttgtttcaacatttaaaatcaatcaatgtaatttaccacattaataaattaagatggaggagccatatgctcaataaaagcataaaactatttaattatttgataaaatg

SEQ ID NO: 579916 - DNA, 492 bp, Homo sapiens
gtttcaacatttaaaatcaatcaatgtaatttaccacattaataaattaaratggaggagccatatgctcaataaaagcataaaactatttaattatttgataaaatgtaatattcattaatgatgcatactttgcaaaccagaaagaaaaatcaatcaccttcctgaacttgaaatgacacctacaaaacatttgcatgtaatatcatatttaatgttgaaagaagtaacactatgtttctaagatcaggaatcataggaggatgcatgctacccaccatttctatccaaacttatactcgaggttttagccaatgcaataataaaaacatggaaaataaaaggcatacagactagaaggaaagaacaaacttaattctcagatgccatgattatcaacgtagaaatttggtagaatctataaaaaataataagactaataaattagtctatcaaggtaatagcataaaataaaaatatatgaaaaactaa

SEQ ID NO: 579917 - DNA, 545 bp, Homo sapiens
gttactcttgtcgtggagtatctttgtggtgttctctgtatttcctgaatttgaatgttggcctgtcttgctaggttggagaagttctcctggattatatcttgaagtgtgttttgcaacttagttccattctccccatcactttcaggtacacmaatccaatgtagctttggtcttttcacataggcccatatttttggttgctttgttgttccttttccttcttttttctctaatcttgtcttcatgcattatttcattaagttgacattcaatctctgacatcgtttcttctgcttgatcaattcagctatttataattgtgcatgcttctcgaagttctcatgctgtgtttttcagctccatcaagtcatttaggttcttctctaaactggttattctagttagcagttcctgtaaccttttaccaagattcttagcttccttacattgggttagaacatgctcctttagattggaggagtctgtaactacccaccttctgaagcctacttcagtcaaactcattctccatccagttttgt

SEQ ID NO: 579918 - DNA, 644 bp, Homo sapiens
gaattctagtattttcctgaaagtgacaaataattagaataatttagaatggggctaggtgcaggttgttaagggatcatatgaactttattaccatattgtaaagatcactcagaagagattgaaggaagttggactagaggcaataagactagtaaacaaactttccacatgatctagtttgggtaatttggcactattaatcaaaggagacattgtaaaagaagaaaaagcaggtttggaagttttgaacaacttcagtttgaaatgggctttgtattactctgttttcrtgctgctgataaagacatatccaagactaggtaatttataaagaaaaacaggtttaatggactcacagttccacatggctaaggaggcctcacaatcatggcggaaggagaaaggcacttcttacatggcagtgacaagaaagaatcagagagccaagccaaaggggtttccccttgtaaaaccatcagatctcatgagacttaatcactaccacgagaacagtgtggggaaaccgcctccatgatttaattatctcactaagtcctccaacaagacatgggaattatgggagctacaattcaagatgagatttgggtggggatacagccaaaccatatcaggcgtacagg

SEQ ID NO: 579919 - DNA, 644 bp, Homo sapiens
gaattctagtattttcctgaaagtgacaaataattagaataatttagaatggggctaggtgcaggttgttaagggatcatatgaactttattaccatattgtaaagatcactcagaagagattgaaggaagttggactagaggcaataagactagtaaacaaactttccacatgatctagtttgggtaatttggcactattaatcaaaggagacattgtaaaagaagaaaaagcaggtttggaagttttgaacaacttcagtttgaaatgggctttgtattactctgttttcatgctgctgataaagacatatccaagactaggtaatttataaagaaaaacaggtttaatggactcacagttccacatggctaaggaggcctcacaatcatggcrgaaggagaaaggcacttcttacatggcagtgacaagaaagaatcagagagccaagccaaaggggtttccccttgtaaaaccatcagatctcatgagacttaatcactaccacgagaacagtgtggggaaaccgcctccatgatttaattatctcactaagtcctccaacaagacatgggaattatgggagctacaattcaagatgagatttgggtggggatacagccaaaccatatcaggcgtacagg

SEQ ID NO: 579920 - DNA, 520 bp, Homo sapiens
agaaaaattcagcagatggtacactgagttcccagatataccatcttccctaattattatttcccctaattattatttccaatttttattcccctaattatcatttcccctaattattatttccyctattattaacatctcaccctgttgtgcatttgttaccattagtggatcagttattgatttgttattacaactactttatacattaatatccactctttgcattatatagttcttttagttttggtatcactgtagtaccatacacagtagttttactgacctagagatcctctgtgcttcacatttccacctgcaactccaaacctgtggcaaccattgatcttttttactttttctagtttttccttctccagaatttcatctggttggaatcatacggtatgtaaatcattttaggctggcttctttcagtaatcgatatgcacttacagtttctacatgtctttttgtggcttgctaactcatttctttgtattgctgaataatgtaacat

SEQ ID NO: 579921 - DNA, 441 bp, Homo sapiens
aaatatatgtttttataactagtagctgaatttcagccaatcacagcctgccaaatgattacactaggcccaaattgggcacatgccaagttgtaatccatgaagcgtttctgtatgtcactacctttttttaagtatgtaaatactgcctgcccatgttgctgggtagagctctctgaaccactcctggatatgaatgctgcctgatgcatgacttgttctttgctcaaataaaccctgtcaaatttaacttatctaaagttattcttttaaaatttaggcatcagaggtcacatccaaagtaaatctcccttgacccccaggaacagtaggtgaccaatggaagatacctactgggcccgttttgcccattcatatcttgcggcrgctggagtcaagggttagttttctctctgattctagatccacaaacttacatgt

SEQ ID NO: 579922 - DNA, 441 bp, Homo sapiens
aaatatatgtttttataactagtagctgaatttcagccaatcacagcctgccaaatgattacactaggcccaaattgggcacatgccaagttgtaatccatgaagcgtttctgtatgtcactacctttttttaagtatgtaaatactgcctgcccatgttgctgggtagagctctctgaaccactcctggatatgaatgctgcctgatgcatgacttgttctttgctcaaataaaccctgtcaaatttaacttatctaaagttattcttttaaaatttaggcatcagaggtcacatccaaagtaaatctcccttgacccccaggaacagtaggtgaccaatggaagatacctactgggcccgttttgcccattcatatcttgcggcggctggagtcaagggttagttttctctctsattctagatccacaaacttacatgt

SEQ ID NO: 579923 - DNA, 516 bp, Homo sapiens
tgttttactaaaaactttaatgaacactaatgaaatgatacaaatagatggctaatgtttctcctaacttctgttgttatattttcccttttaaaggggtatagtttgttgcaatgctggaaaagctccatcagcccgccaaatgggggtctgtcccacaggcttgagatgcctctgcagtccccacactaagggaccacctggtgacaagcagaaaaatgcactgttgaayggcatgcaaacactggaggattttcctcagcaatgtacctgtaaggcttgccctttgcctatgctaatacttaattaaaatctgttgtctccaaaagggtgaggagagaaagatgacttagtttaggttgatggggtaaatttgcatttacagtcaatttgtatttcttattagcaatttgtttctaactatattttacatactaagagagaaaaaaaccatcccaaaggagatgctaaatctttagaggttgaggtaggaaaagattgaagtaaccttatcaa

SEQ ID NO: 579924 - DNA, 652 bp, Homo sapiens
cagaagaaaaccatacagatttattatccaaattaaaggcccatgtcatggacataaaaaagaaaaaccagagttgacaatgaatgaacatagatgtgcaatttgaccacatcatcaagttctctgactcaacataaaattgtctcctgaggaacatgctgggacattctaatcttaaatgaagtggagagatgataatgcaaccttggaaactcttgcctgtgagacctatcatgctgatctggctttaatatcagagacctgtcccrtctctaagaagtgaataaccacatgttagacatgtattttccctaatcctatagaaatagtctctctttaaaggaaaaacatcccagaattgtttcaccattaatctttctctgcttccacttatttaataattctacttttctttttagcaattaacctgtagaatttttctttggaaaagctcaaaaaaataccttaaaactcaagtaaaaaatgaaaaattgagttaggtgtattgtacatatagcaagatggatatttcttaaaatagtattaagtaaaggatgaaaagaaaaaggaaggaagaaggaggaaaacaagaaggaagacagagaagaaaggaagggggagaaagaaaaggtagcagaggaggtgggcgagg

SEQ ID NO: 579925 - DNA, 652 bp, Homo sapiens
cagaagaaaaccatacagatttattatccaaattaaaggcccatgtcatggacataaaaaagaaaaaccagagttgacaatgaatgaacatagatgtgcaatttgaccacatcatcaagttctctgactcaacataaaattgtctcctgaggaacatgctgggacattctaatcttaaatgaagtggagagatgataatgcaaccttggaaactcttgcctgtgagacctatcatgctgatctggctttaatatcagagacctgtcccatctctaagaagtgaataaccacatgttagacatgtattttccctaatcctatagaaatagtctctctttaaaggaaaaacatcccagaattgtttcaccattaatctttctctgcttccacttatttaataattctacttttctttttagcaattaacctgtagaatttttctttggaaaagctcaaaaaaatacctwaaaactcaagtaaaaaatgaaaaattgagttaggtgtattgtacatatagcaagatggatatttcttaaaatagtattaagtaaaggatgaaaagaaaaaggaaggaagaaggaggaaaacaagaaggaagacagagaagaaaggaagggggagaaagaaaaggtagcagaggaggtgggcgagg

SEQ ID NO: 579926 - DNA, 595 bp, Homo sapiens
ggtttgtctctgtgtcaccacccaaatctaatgaattataatcctgagtgttggaggtaggacttgatgtgagaygactggatcatgggggcagacctgcccttgctattcttgtgataatgatttctcatgagatctggttgtttaaaagtgtgtagcacttcccccttcactctctcctgctccaccaatgtaggatgtgcttgcttcccctttgccttctaccacaatttttaagtttcttgaggcctcctcagccatgcttcctgtacagcctgcagaactgtgagtcaattaaacctcttttttattattatactttaagttataaggtatatgtgcacaaagtgcaggtttgttacatatgtatacatgtggcatgttggtgtgctgcacccattaactcatcatttacattaggtatatctcctaatgctatccctccccacttcccccaccccacgacaggccccagtgtgtgatgttccccaccctgtgtccaagtgttctcattgttcaattcccacctaggagtgagaacatgtggtgtctggttttctgtccttgcgatagtttgctcagaatgatggtttcc

SEQ ID NO: 579927 - DNA, 595 bp, Homo sapiens
ggtttgtctctgtgtcaccacccaaatctaatgaattataatcctgagtgttggaggtaggacttgatgtgagatgactggatcatgggggcagacctgcccttgctattcttgtgataatgatttctcatgagatctggttgtttaaaagtgtgtagcacttcccccttcactctctcctgctccaccaakgtaggatgtgcttgcttcccctttgccttctaccacaatttttaagtttcttgaggcctcctcagccatgcttcctgtacagcctgcagaactgtgagtcaattaaacctcttttttattattatactttaagttataaggtatatgtgcacaaagtgcaggtttgttacatatgtatacatgtggcatgttggtgtgctgcacccattaactcatcatttacattaggtatatctcctaatgctatccctccccacttcccccaccccacgacaggccccagtgtgtgatgttccccaccctgtgtccaagtgttctcattgttcaattcccacctaggagtgagaacatgtggtgtctggttttctgtccttgcgatagtttgctcagaatgatggtttcc

SEQ ID NO: 579928 - DNA, 595 bp, Homo sapiens
ggtttgtctctgtgtcaccacccaaatctaatgaattataatcctgagtgttggaggtaggacttgatgtgagatgactggatcatgggggcagacctgcccttgctattcttgtgataatgatttctcatgagatctggttgtttaaaagtgtgtagcacttcccccttcactctctcctgctccaccaatgtaggatgtgcttgcttcccctttgccttctaccacaatttttaagtttcttgaggcctcctcagccatgcttcctgtacagcctgcagaactgtgagtcaattaaacctcttttttattattatactttaagttataaggtayatgtgcacaaagtgcaggtttgttacatatgtatacatgtggcatgttggtgtgctgcacccattaactcatcatttacattaggtatatctcctaatgctatccctccccacttcccccaccccacgacaggccccagtgtgtgatgttccccaccctgtgtccaagtgttctcattgttcaattcccacctaggagtgagaacatgtggtgtctggttttctgtccttgcgatagtttgctcagaatgatggtttcc

SEQ ID NO: 579929 - DNA, 628 bp, Homo sapiens
atgcttctcttttcacgctgtcattttgacaatagaaccatcgggcaattcatcgttagactagatggctggaacaaagtgcataccagtaagtgaaatcagattggctaatggtattgtttaaaatgcagtaacatttctcttctgaaattcacccagatttcaaatgatatgtcatgcctgtgggatgctctgcaacaattagctactggtgattcatcaaagagccccagggtagggatttctttttaacttttttctcaacatgctttagaaacataaattagtccctgrattggatcggtgtggatttatcactcaagtttcctgtctttaccctctttcttctttcatctggcagatgtttgtttcatcttcagatttactgaaagtggtgccggagtctgagagcatttagcaatactaaaaagccatttcttttaagactctgcttaaatgttaaatgtcacctcctggagaggacttcttttgacctctctacttaacataaacccactcctgttagtatctatcctctttatcctgctttctttttctttataacacctctcatcacctgtcacatgatatatttattcatggttgacagtctgttcccaccactagt

SEQ ID NO: 579930 - DNA, 427 bp, Homo sapiens
cttcataatctattcctgaaaacttgtttttaatgtggtttagaggatacattgtgcatgtatattttagcctatggaattttaactggatgctctttcttcttccctttctaccatttctgttagatttctttctactttcaascaatgttctttttccacccaggtctattggtccctaggccttgagacccagagtcaataacaccttccctacagaaacacacccagaagtgtccaccacctcaggtcccagtgaaaagaggtccaaggagatactaagctacgttcaatgtttccctttggttaactgcctgcttcttacatttccacatgatttcctttacatttgtatctactgctacaatggcttatagatgtagtaccgaaggagaaaaactaataatagataattttctcaaattac

SEQ ID NO: 579931 - DNA, 427 bp, Homo sapiens
cttcataatctattcctgaaaacttgtttttaatgtggtttagaggatacattgtgcatgtatattttagcctatggaattttaactggatgctctttcttcttccctttctaccatttctgttagatttctttctactttcaaccmatgttctttttccacccaggtctattggtccctaggccttgagacccagagtcaataacaccttccctacagaaacacacccagaagtgtccaccacctcaggtcccagtgaaaagaggtccaaggagatactaagctacgttcaatgtttccctttggttaactgcctgcttcttacatttccacatgatttcctttacatttgtatctactgctacaatggcttatagatgtagtaccgaaggagaaaaactaataatagataattttctcaaattac

SEQ ID NO: 579932 - DNA, 373 bp, Homo sapiens
aaaaggtgccttgcttcccctttgtcttctgtcatgattgtaagtttcctgaggcttcccgagctatgcacaactgtgagtcaattaaaactctttccttcataaatwacccagacttgggtatttctttatagcagcatgagaatggactaatacagtatgactatccaaatggcatcttcttccaatataaacttgtttcatccacactgaaaatccagtgtttagtgtagctgccttcatacattagctggattttctagatagcttcctgcagctgctacatcaacccttgctgcttcatgttacatttttatgtcattaagatggcttctttcccaaaaccttgtgaaccaacctctgctagcttcaa

SEQ ID NO: 579933 - DNA, 508 bp, Homo sapiens
ttctcttgcctttaaaaaattcctacttcattttaagtaccatccgactctaaagtgtcattaaataagtatgaattctgttgcagttacacacgtttaatggccaatacaatgtcttttatgggatgcattatttagtaatcttacattaagacaataacttcaatcattatgccttcaaatagcaataagcatggtaatggctttgctgagctgcttcctggctctatcattgtgttttccctttaatattagagcactgtttttatttttatcccaagagtgtgttccatcccctacccccaattyctgttttctgagagtggaagcacctttgcagtagggaataaaacatcaaagtccatctaataggtaaaattctgctccaacccagtgtcaagattaatgaagcactgataatgttagctttttttttttaatcaatgtttgttttaagcaagtctattctatcctcccaggaggaagaagtgcctcgtagtcactctgc

SEQ ID NO: 579934 - DNA, 583 bp, Homo sapiens
caaaactggactcatctgtcactgagtcatcaatctgtgcagtgatttaaagtttctaaagtttaggaggatatataatatctcatagtagcctcacattcataaaatgtagaacacaaaaatcttcagcactatagcagttatgccaaataaaaaatgatattcttaaaatccagtgtgttttatagaccatcattgtaattgtcaaccacaggccatactttggtcttaggaatattgtaaaatacacaatatarggaactcccttatcagctgtttgaaaaactataattctcttttccctggagaaaaaaaagctcatccacaaatactataccttctttcctcttagaaagtggtatttaaaccatttgtctctacttgtaaagtggagctcctgggtcattcctgatgttctttctgagttcttggaaccccaatcaagtgacaaaaggcgaaactagggaaaaataactcagtaccaggaagcagtgaaacaataaaagggaagtataaagcacgcaggaactgacatacatagctattattaacaataaaaacgccatgtattttgaaattaaag

SEQ ID NO: 579935 - DNA, 590 bp, Homo sapiens
aatatacatatataatttaccagctttaccattttaaagcatacagttcagtgataacaaatacatttatattatttttcccttgtcatccctcctttctgcctccccttcctggcctctagtaaccaccaatctactgtctatcttcatgtcattcacttttttaactcccacgtgtgagtgataacatgcaatatttgtccttctgtgcttggcttatttcacctaacataatggtctccagtgtcattcctgttgctgcacatgacaggattttattcttttttatacctgaataatatgttgtgtacaaataccacatgttctttatctattgatgcattgatgggcacttaggttgattccacattttggctattgtgaatggcactgcaatacataagggagtacaggtatctatctccttgatatattgatttcagttctttcggatgtaaacccagaagtggaattrtatagttttttgaggaattttcatactgtttttcatagtggctgtactaatttgcattcccaccaacagtctacgtccttgccgccatccattattatctgtcttttggataaaa

SEQ ID NO: 579936 - DNA, 401 bp, Homo sapiens
tagccgattctctcctagagcctcsagaatgaacacaaccccaccaacagccttgattttaagacctctgatctccagaaatataatctgttattttaagccactcagtttgtaatgatttgatatagcagcagtaggaaacgaatatagccgttattttgacttgtttttaagatgacttaggtaatagtgtagagaacagattggaaaggtaagaaattacaggcaaggggacctgatttggaggctactgtcatcattcatagctcagtgagttactgagctagaacagtggttatggaaaggcagaggcgaacacgtgagactctgatggcggcttaaagggacttggttctgattggctttggggtgcagtgagggagaggcaggaagcaataatg

SEQ ID NO: 579937 - DNA, 537 bp, Homo sapiens
  misc_feature 486, 531: n = A,T,C or G
ccttacagtttatatattacttccacatttaytctttcacataattctccctgtgataccttgggaggacaaaagatggtaaacaaatcatcagaattcacttgaaaagctgtcaatatcgtaaatgcagagtcagatgctatgtttctaaattatttcagactcatcacaacttcaaatatgttcttaagtgtctggcaaatcaaagattttgctattaaacaaattaactatactgcttgtctaggactatggattaaccatcacaaaaagtgtcttatcatcaagtcaggtagaaccttcacattccacagagcaatggtgaaaaatccacccactcaaaatggtcattcaaagtcggtaaactttctgtacacactgaaaaatgtccccctctactaaacattattgtaaaatacttgaaaatctaaattgaaatagtttctataagagcagatataaaggattaaaataaaaatggcaagngacaactgcaagcaaaagcattgcagagtcagcaaatattacatnttaact

SEQ ID NO: 579938 - DNA, 584 bp, Homo sapiens
ggattaaacattcaagacatttcacaggagaaatgcctgtgggagaaaacagaggggatgctgggaggggctgagcgagctctcagagagagaaggaaggaaggaaggagggttaagggggaatcctccagccaaattacccatcggaggagcctctactcttccaggaatggctgtgcttagtattcctgccgtgtttagtaattgggaacgggctgtcagaagcagaggctaggtgccaatgcagccgctctatgtttcagcacagcagccaggagagcagagaggctcctgttcatgatcaccacaaggacacatggcttttattggattctcaaagaggtccatggccaaaaggggttaaaacctttctagaaactgttgaggcaaaactaacaacatgtaaataacttatctgcatayctaggagaatggtgatgatgctacctgttctatgacatgtagcatgaggcactgtgccagggagtgtgttttgtttctgccatgttgtgtttgagatgccagaagctcagaggacacagttcgagttgcagctctgtgaaagagtgttttcatagagaaat

SEQ ID NO: 579939 - DNA, 584 bp, Homo sapiens
ttcaccatggctggggaggcctcaggaaacttataattatggtggaaggggaagcaaacatatccttccttacatggtggcagcaaggagaagtgcagagtgaaggtggggggaaaacctccttataaaaccatcagatcttgtgagaactcactatcatgagaacagcatggaggtaactgcccacatgattcaattacctcccaccaggtccctcccaccacatgtggggaatatggaaactacaattcaagatgagattggggcgtagacacagtcaaaccatatcagaccaaaagggagctgaacaatctggatttaacacatttattgttttcagtataaattacttactaaatacatatttaattgcgatttaacttttgcaactttgcaggatttttacataaatgtattcataaataaaaaatagtttgtcattttcttcttgatttatgataaagacagaatatatttttcacttaaagtagatrgtaaagtacttatcgcataagagatgttcaaaaattggtgaaaatgggctcaatccttaatatactactaatatattttaatactataac

SEQ ID NO: 579940 - DNA, 473 bp, Homo sapiens
tgctacccctgtctcccaacccaaatctgattccccaatataaaatagccttcccagccctgacccttggtgtctctcattcccatctccatttttcttcatcaccctgacactgcctgaaaactgctcatttattgcttaccttagttctttcttactgcgatgcaaactgtaggagaagagaggatttgtctctgttgctcactgttctgtctccagtgtctagaacagtgaccagcaaacaagggcacttcaataactatttaatgaataaaagaatgcacatgtcatacttaacaacaaattgtaagcacaatgctttgattttctaaygatttaccaaaattttgagatgtttgcatagttttagggctgaagactaaacccaaaagaaataatgagagactcgattaacactcacttttggtaaatctctattcttaaagctaacctgattgcttgtcagtttgctt

SEQ ID NO: 579941 - DNA, 654 bp, Homo sapiens
ggagtctcgctctgtcgcccaggctggcgtgcagtggcgcgatctcgacttactgcaagctccgcctcccagggtcacgccattctcctgcctcagccttccgagtagctgggactacaggcgcccgccaccacatccggctaattttttgtatttttagtagagacggggtttcaccgtgttagccagggtggtctcgatttcctgacctcgtgatccgcccgcctcggcctcccaaagtgctgggattacaggcgtgagccaccgcgcctggccataagttttaactakatgtaatttactaaagccttttactgaatcatctgaatttaaaaaaatagctttatctacattaaagtcttatgaaaaatgttatagtcaaattcggacatcatagaatttagctagcatagtagatgaagtaaataataaaatctaataacaataaaatctacctataattaatcccttgcaatgcgatagacctcttagtaaatcgaagcattttttttcccctttggattctttgtcagaccagtgctaaacaccagtgtatattttggtgttaactttggttattacaattgttgcctctgctgcatttctttatagcaagcttgaattaaaagtgcttgaacattgaaaaattcttaa

SEQ ID NO: 579942 - DNA, 633 bp, Homo sapiens
atttagataatttatagtctttatagtcagcttaatggtctcagcatagttttgctgcatttgtgttaaattttcccaaatattatttgaactcttgaccactctgatcataaggttaacattcaaatcaacttaaaaaattatgttttacatgaacttcattaaaatttaatattaatgagaatgaataatgtgcttaacttactttaaggcaaatatccattgttacctttacttaatataagtgaagcaaaatatgtagatttgctttcaaatattatgtctcttctatctggttccttactattttgaaaagttcactcttttattrgtgagacacataagattttaaatgattaagatctctttgtcatgcttattgtttgcttacattttatatccttatctgtcattatggagtcaaatgtatcagccctgaaggaggaatgtagcttatcttaaatatgttttcaaagttgcataagggtaagaaatatttttaggtcatggatcttctgctgaagagttgaacaggtatttaaaatccttcacatttgaaaattttgtaagataaaaaaagtttctttaaaaaaaaataaataaaattatctttgtcataaaaaattgtcttaa

SEQ ID NO: 579943 - DNA, 562 bp, Homo sapiens
gctctcctctccagacttaaacagaacccatcctctgctcccaggaaggcttgttggccactgcctctgcattcaaaatactgccctcagaattattactcttttttattgtaaaggggcacayatttgcaggcaaattactctattatcctttttctgcttgtagaattttgggagttcagaaacattcttttattttatccaattcctttcagccaaaactgttagaatttctcttggtataacattctcaaaaatgttgtgagtctcctttgtaattcatagggttccacatgattagacaagaggatactcaacagatccttccttgaacacttcatctctattgctggattctcctgagacattttattggctccataagtcacacccaatctcttcaggaaaaggttgtccagccacacatttggccctgtccccagagaatgcttttctagcagcaaattttctaactttggcatcctttacaatgtgaatagaccaagaactgtccaaattatcaagtgctcattgcttttttgcatgagttccttcttccatt

SEQ ID NO: 579944 - DNA, 562 bp, Homo sapiens
gctctcctctccagacttaaacagaacccatcctctgctcccaggaaggcttgttggccactgcctctgcattcaaaatactgccctcagaattattactcttttttattgtaaaggggcacatrtttgcaggcaaattactctattatcctttttctgcttgtagaattttgggagttcagaaacattcttttattttatccaattcctttcagccaaaactgttagaatttctcttggtataacattctcaaaaatgttgtgagtctcctttgtaattcatagggttccacatgattagacaagaggatactcaacagatccttccttgaacacttcatctctattgctggattctcctgagacattttattggctccataagtcacacccaatctcttcaggaaaaggttgtccagccacacatttggccctgtccccagagaatgcttttctagcagcaaattttctaactttggcatcctttacaatgtgaatagaccaagaactgtccaaattatcaagtgctcattgcttttttgcatgagttccttcttccatt

SEQ ID NO: 579945 - DNA, 562 bp, Homo sapiens
gctctcctctccagacttaaacagaacccatcctctgctcccaggaaggcttgttggccactgcctctgcattcaaaatactgccctcagaattattactcttttttattgtaaaggggcacatatttgcaggcaaattactctattatcctttttctgcttrtagaattttgggagttcagaaacattcttttattttatccaattcctttcagccaaaactgttagaatttctcttggtataacattctcaaaaatgttgtgagtctcctttgtaattcatagggttccacatgattagacaagaggatactcaacagatccttccttgaacacttcatctctattgctggattctcctgagacattttattggctccataagtcacacccaatctcttcaggaaaaggttgtccagccacacatttggccctgtccccagagaatgcttttctagcagcaaattttctaactttggcatcctttacaatgtgaatagaccaagaactgtccaaattatcaagtgctcattgcttttttgcatgagttccttcttccatt

SEQ ID NO: 579946 - DNA, 488 bp, Homo sapiens
taattacttttcaaattaataattatattttaattctctcttcaagtttaagaaagaaacatacacataaaaatgtatctggatttgtctgagttgagcttctcctttagtaggcagggatttgcagktgtccccagaggtgatgactcccttcatcattgtaattacacacccttttcttaccatcatttccaagtacatgtcactggtctcggagcaggaaggctccttctcccaattcagtgtctgtcagaagtcttccctgttcatcagatttagtcactcaatgccgcctaacagttggagaaaacattgagagccagacttagccagacttagccagacttgtgggccacagctgctaaggttctgaaaagcattgcactgaaaattaaaacccactaactgaaaaagaaaataaaaattcacagaaattagtttctaaagatcatggcacttggttgaggagatatttagagaatcgaccc

SEQ ID NO: 579947 - DNA, 569 bp, Homo sapiens
ggaattcttttctctgcatgctccctctcagaatccagccaccatagagccaaggctcctgagagggttcatgtataggtgcttttgtcaagagccccaactaatctgagtcatcccagccaggcaccaaacatatgaataaggaagcctccagctgatttcagtttccaagccatttgagtgttcacagctgagaacccagacattacacaacagacataagaccactgkgttgtgtcttatttcctaactcacagaacttgtgagcacaatcaaatgatagctgttttaaacaaattttggggtggtttgttataaagcaactagttgaccggaacaaacaggttgggcttgtttgttaccacaccgtaatttatcccatcataatagaaaggtgtttttcagaaattcacaaagggtacataacaaagtaagatgaaaaatactattttcagttttttggtgttaatatcttagtggtatcaaccttctagggaagttatacaggtataatccgcgtgatccattctccttaactataaaccacatttccaatgtctcattcacgt

SEQ ID NO: 579948 - DNA, 569 bp, Homo sapiens
ggaattcttttctctgcatgctccctctcagaatccagccaccatagagccaaggctcctgagagggttcatgtataggtgcttttgtcaagagccccaactaatctgagtcatcccagccaggcaccaaacatatgaataaggaagcctccagctgatttcagtttccaagccatttgagtgttcacagctgagaacccagacattacacaacagacataagaccactgtgttgkgtcttatttcctaactcacagaacttgtgagcacaatcaaatgatagctgttttaaacaaattttggggtggtttgttataaagcaactagttgaccggaacaaacaggttgggcttgtttgttaccacaccgtaatttatcccatcataatagaaaggtgtttttcagaaattcacaaagggtacataacaaagtaagatgaaaaatactattttcagttttttggtgttaatatcttagtggtatcaaccttctagggaagttatacaggtataatccgcgtgatccattctccttaactataaaccacatttccaatgtctcattcacgt

SEQ ID NO: 579949 - DNA, 618 bp, Homo sapiens
tggtgggaatatatactattccctattctcacttatctctgcattcctaccaacaactgttattttttgacatttttaaagagagatggtgtcttgctctgttatccaggctggagagtaatggtgcaatcatagctcactgcacctttgaattcctgggctcaagtgatcctcctgcttcagcctcctgagtagctggcactatctgggcatgtgccaccatgtgcaaatatatatatatgtatattttgtatatttatatattttaagatggagtcttgctctgtcacccaggctggagtgcagtggcatkatctcggctcactgtaatctccacctcctgggttcaagcgattctcctgcctcagcctcccaagtagctgagactacaggtgcgtgccaacatgcctggttaattttttgtatttttagtagagatggggttttaccgtgttagtcaggatggtcttgatctcctgacctcatgatttgcccgcctcagcctcccaaagtgttgggattacaggcgtgagtcactgcgtccgaccgccccaaataattttttaagaattattttttgtagagacagagtcttactatgttgcctaggctggtctc

SEQ ID NO: 579950 - DNA, 469 bp, Homo sapiens
tgttggagaaggatgtcagggacaagggacttccctcggagctggctgtggcccagccatttgttcygtccctccaggagagagctgagcttggggcctgtgaatctagggaatggtcgtcacagtgcccaagcacagtgatggtcaagcacagtaatgtctcaaatcaggattgtagctgggacatactggaagaaggaggtagagctaatgctcattcattgatgataaagaggagaagataattcaggggaatgtagttccagcttagctacattgacacagaacaaaaataccacacactttttctttctttcttttttttttttttttgagacaaagtctcactctgttgcccaggctggagtgcagaggtacgatctctgctcactccaacttccgcctcctgggttcaagcgattcttctgcctcagcctcctgagtagctggggctacaggcgtgcgccac

SEQ ID NO: 579951 - DNA, 469 bp, Homo sapiens
tgttggagaaggatgtcagggacaagggacttccctcggagctggctgtggcccagccatttgttccgtccctccaggagagagctgagcttggggcctgtgaatctagggaatggtcgtcacagtgcccaagcacagtgatggtcaagcacagtaatgtctcaaatcaggattgtagctgggacatactggaagaaggaggtagagctaatgctcattcattgatgataaagaggagaagataattcaggggaatgtagttccagcttagctacattgacacagaacaaaaataccacacactttttctttctttcttttttttttttttttgagacaaagtctcactctgtygcccaggctggagtgcagaggtacgatctctgctcactccaacttccgcctcctgggttcaagcgattcttctgcctcagcctcctgagtagctggggctacaggcgtgcgccac

SEQ ID NO: 579952 - DNA, 608 bp, Homo sapiens
aattgtaatagccataatccccacgtgtggtggaaaggactcagtgggagataattaaaccatgggactggtttccctcatgctattcttgtgatagtgagtaagttctcatgaaatctgatggttttacaagcggcttcctgctttactcagctctcattcttctctctcctgccaccatgtgaagmaagacatgtttgcttccccttctgccatgattgtaaatccccttagacctccacagccatgctaaactgtgagtcaattaaacctcttttctttagaaattacccagtcttgggtatgtctttattagcagtgtgagaatggactaatacattgggtcaatgaagaaattaaggtagacagtttttaaatatcagaaaaaaagaaaattgaaacacaacataccaacacttgtgggatacagcaaaagtagtagtaagagggaagtttatagcaataaatgtctacatcaaaaagtagaaatatttcaagtaaacaacctaatgatacaccccaaggaactagaacagccagaacaaacaaaatccaaaattagtagaaggaaagaagtaataaatatcagagaataactaaataaaata

SEQ ID NO: 579953 - DNA, 344 bp, Homo sapiens
acacctgggaaattcattgcaaaaagatcattgcctgggcacatrctcatcaggttatctaaagttaagaaaaatgaaagaatctaaagagttgcaaggaaaaagccttgggtaatctataaaggaaaacctatcagtttaacagcggatttctcagcagatccctacaagctaaaagggaatggggtcctatctttaacctcctaaacaaaatgattatcagccaagaattttagatccagcaaaactaagcttcataaatgaaggaaagacacagtcttttttagacaaacaaatgctgagcaaatttgccattaccaagccagcattacaagaactgctaa

SEQ ID NO: 579954 - DNA, 559 bp, Homo sapiens
tttcatgctcatgggtgggtagaatcaatattrtgaaaatgagcatactgccgaaagccatctacaaatccaatgaaatacccatcaaaataccaatatcattattcacagaggtataaagagcaatcctaaaattcttatgaaactaaaaacaagaccacatagccaaagcaagactaagcaaaaagaaaaaatctggaggtatcacactacatgacttcaaacaaaaacataaagcggggaaaggacaccctattcaacacatggtgctgggatcattggcaagccacatgtaggagaatgaaactggatcctcatctctcaccttatacaaaaatcaacttaagatggatcaaagacttaaatctaagacctgaaatcataaaaattctagaaaataacactggggaaatgcttctagaaactggcttaggcaaagacttcatgaccaagagcccaaaagcaaatgcaacaaaaacaaagataaatagatgggacttagttaaaccaaaaagcttctgcacagcaaaagaagcaatcagcacagtaacacagacaa

SEQ ID NO: 579955 - DNA, 503 bp, Homo sapiens
aaaacttaacccgaatgttactttcttcatgatatttgcatgcctcaaaataattttttctcagtgctcaaataaaatttcttagagctctccttgaataatagcattctttgttgataaattctttgatattacataatgaaatctcttgtgatgggattaaaatgtatttctcattatatctctaacatgatgtatgtgatttagaagttgtttaatgaatgtttgttaaaatagtaactaaatgtcaaacaattatgtactaatctcagactatcaccaaatacataccacttataagcaaggaaattctgcaatacttatttcacagttaatagggactaaaaataattttgaggatcaataaattagttaattatgtgaytggggtgaaatatggaaacagtatactgtttaaagaaaaaagcatggtctttgaactagacaattagattttcatctgaatttctccacttttggttgtgaagtcaatgagtaattat

SEQ ID NO: 579956 - DNA, 516 bp, Homo sapiens
aacgcaatggcattctcatagatcctctttcttttttatgatcacttgtctaaccagagctgctatgtcaggcctgatgacttcaatgggctcctctggcytccagaacttcacaacttgaccctcagggttgacaagatacttccaaaaattccaccttggttccttctttgaagaatctaaaatatccagaacatattttcatgagcataattttattctttgtcaagattttcacttctattagtatctgcataaatgataactttagtatcaagttctaggactgtcataatataaaaaacaaaacacccaaacgaagtgaaactcaaggttagagtaaccagatttcaatatacttgatgacttcacctatgagtctactcatctagtatgtgatcttagtatcaagaaatgaagcaaagtaggctgggagccgtggctcagtctgtaatcccagcactttgggaggctgaggcgggtggatcacctaagatcaggagtttaagaccagcc

SEQ ID NO: 579957 - DNA, 450 bp, Homo sapiens
ctagtggtaaagggtgtaagtggtgctaagccagttgtcactaatggatactgtgtattcaaagactgagattttgccagctctcaacactgatcacatttagactctatacctggaatctcatgtctaggatgtagattttgaagacagcaaatacatgtattaatgcagatacatatttgcatagctctgaagctggctgggcatccataattatgcatactgtcaggaaagaagaacaataaaggagccaaaaataaagaaagacggatatggggacagcagagtcaaatgaagaatctggtgcgagagactggcaccatgcccgaccggtggggtgacctcaaaccaagcatgggaagtgcctgatgcagaggyttcccttgaatcaagcaattaaaaacagcagacagtaaatctatttatttcaaaaaggtgtgtggaattcca

SEQ ID NO: 579958 - DNA, 616 bp, Homo sapiens
agcaattcccctgcctcagcctccccagtagctgggactataggcgtgcaccamtacgcccagctaattgtttgcattttagtagagatggggtttcaccatgttggccaggatggtcttaatcgcctgacctcatgatcggcctgcctcggcctcccaaagtgctgggattataggcgtgagccaccactcccagcctctaaagttttatgtaatattttgcccctgaacctgttctcttttttattattctgttccattattatgattttcccttattttcttactttaaacatatttattttgtagcattctacatttcatattgcctaagttttgcgatataaacttttctgctttttgttctatcattttgttctgtggcatggggtggggtgtattttgtatgttgggaattgtaaaaaaggacatagagagtgattttgagacttcatctaaaagaagcccccatgttttcatcaggccatagtcagtttctacattaatttctcagcttgggattccccaacatacccgtagggtaaatttggattccacacccatgcatggcacacttgtgaagtttccatttatcatgggaagtattttttccatc

SEQ ID NO: 579959 - DNA, 540 bp, Homo sapiens
gctattttcccagcacagagagtacctggcatatagttggtgctcagtaaatatttgctgaataaagaaattattaaagaaacttgcccaaggccagcttttaattggtggacccagtatttgcagctggactgttgccctgaagccacacattttggttacttgaggtcacttagcgtcttagtccatttgggttgctatacaagataccatggactgggtggtttataaacaacagacatttatttcttacagttctggaagctggaaagtccatgatcaaggcactggcagattaggcgactaatgagggcctcctttctggttcatagatggtgycttcttgcttcttgatgatagaagggatgaggagtctttctggggcctctgttgtaagcactagtcccattcataagggctctaccctcatggcctatgtacctccaaaggctccacttactaatactagcactttgggggctaggacttcaacatatacatttgagggagacacaaaaacttcagtccattgcgcttaga

SEQ ID NO: 579960 - DNA, 630 bp, Homo sapiens
cacagctacatcaggtgcatggagagccaagtctaaggcaggaagaagaaacagagttgctactatctccaagccttgaccaagatcggttcaggcacccgatctattggtggaaatctcctcaatattttagtagagctggagacactgagagaaatcagggactggcttgagatgtgttgattggggaaggatctcagcatgctggcgttcagtaactgaaaggcccagggggaaagaaaatgtattgaaataaccatgagagttattaaaccttggcattctatcctagcccaaggaccagtggaaaactgcttttaaacacttttgtgttttctgaaagtgagcacttgtgtgaaaaacaatactcaatccctcggtatgtctttgctgtcaataggtagagaacataacttctcgggggccaggcctggatattgtgtctytagatataaaggatattaggggcccggttctatgtgaaggtgccctccaaaaccagaagagcatactgaagaccagaaattgtagcaagtggtcatcttgacactttccagtgaagccagtggttgcatctgcttctggccagaactttcctaaccagctcctggataaatgcttaattaacat

SEQ ID NO: 579961 - DNA, 313 bp, Homo sapiens
tactgtataccaacgaaaattaaaaactaaaaaaaaaacaaaamaacaacaacaacaaaaaaacaacaaactgacccaaaatggattaggaaacctactttggatcccttcttctccatcaagggtctccatccaggtcaactcagggcttgatttgtaaccagaaaatgctacaagagcctcgagattttctccaaaggagtcatccctgagatgctcattaatcactgaaaacaagtagttgtttcatgccaaggctgggagcaatctgttcctaagcagtcctctcatctctctgatcttccaggaaaga

SEQ ID NO: 579962 - DNA, 621 bp, Homo sapiens
tttctgggctttgcatcctatttttttaaaagctgcctctttttggctcctatgtgttctctttataattattgtcttaattttgtatttgagccaacatataaaatcatttgctttgcttttattaatactttttacactaaattaattttcttgatgtacacctgtacttttgtcagtttattacaataaaatcacttttcaccatatttattatagttttccatttaacttcttaaaatacttaaaaattgtatgtactaaaagtacatacagtatattttcactacttaatgaaaaataaaaaatgacacccatgtccctcacactgtgctctgatccatgcagagggcttatgtgctgctttctgatctgtccatttctatgccctcagcagtatcctacattgaaatagcactgagcattcccttgcttttcttcatagttttaccacctgtgtttcctccaagcaatatatcatttcatttgccttgtttcaacttttcttaacgaaatcattctatatttttgtaacttccttctgtggttcagcatcatatgtgtttacatatacagatagaatacagcatgttcatttayttttactgctacatggtagta

SEQ ID NO: 579963 - DNA, 602 bp, Homo sapiens
gaaaaactcagaacaaataacttctccaatcgtgttggaatatagtatgtacttcagatatgaaatgatttcacagatcctaattttaacgatcatgtcatttttatgaatggggaaatctaaggtgtagtgaggggagatatttaaaaatatctaaggaaccaagagttgaacagaccagaaccccttagcaaccaatgttatttttttaagtgtatatgagaatgtctgtgcaaggattccctgctcattaggagtaggtagaactattattgcaaagttgtcattttcaagtgaatagtgygtgggtagcttcctttatgtctggacaaattagagctgtgcaggaatttgctaattagtatgtgttgatggctcagttcagtagccctgcctcaggactcagatcaggataccataagtatttttaaacttcttcaagcataataactataggaaaagatgaacagaattagaattattcgacttggaagaaagaatatcaaaagctaaacgtgctactttctaataggtcagaagaattacaactttgtatgacccacaaaaaggaaaattagataattgcaacaggaattggttaa

SEQ ID NO: 579964 - DNA, 556 bp, Homo sapiens
ctatcatagagggaattttaaataactgcttaatataatatcttacatgctgtagtggaaaaggcaagtagtacataaaaatagatgagaaattttagtggagcaataagtgctatagaaaaaaattgaaaatgctaaaaatgacacacatcataacagagataaagaatgccttcaactagctgatygagagactcaacaagccaagaacaaaatcaatgaacttgaaaatagataaacagaaattcctcaaacagaaacacaaaggaaaaaaaggaatgaatgacaaatgacaaaaaaataaaaaaacacagagcatacaagagctgtgggtctaatatatgtgtagagtaggagaaatatttgaagagatgacagctgaaaaatttccaaaaaataatgaaatatattaatccacaggtccaaggagttcagagaagcctaaagagattaaacaacaaggtaaagaaaaaggaggagcaggaggagggaggagaaaaatgaaacccatacactcccacacccatctagatccatcatagtcgagtggcttaaa

SEQ ID NO: 579965 - DNA, 592 bp, Homo sapiens
cagtacaacagatttcactgagaccaaatcttctgaaaaattataaattacagcaagytctctgtcttaaagataaaaaaaaaatctggaaagtggtatcttgaaatcattgtggtaaacatttctctttggccctaagaccaattttgagacaattacatttttattttaccaggtggtaaggcagttaagagtggggacctgccagcacccattcttttgtcctacagagcatatagctgtgctgtgtacagaaaagccaattgtaaatatttgtcaaattgaatttccaagtcagggcatattaatatactctgttaattatcacattaaaacctaaacaggtggtaaatttagatgagatgcagagaaaaatgcaaaaccagctaagagctcaaacggactaggaaatacctaaaagattggggagaaaagcaaaggtttgctcagaagagatgaacaggaagttttaggaaacttcaaatatctaaaacacagggatgatttctttgcacatacctggaaaaccaaattaggggaaatcaacttaaggtgtagaaggagcgatttcgataccaaggcatttggaatg

SEQ ID NO: 579966 - DNA, 568 bp, Homo sapiens
cttctttgccctcattcttctctgcctttcagagaccagccagaaaaatcacaacattcaactgaattagcatccttctacttccaaatcctgtagtgaggaggacggttaagttccacagacagctgcaaaaagactagaaaatgcccttgtggaaaaasgcctgatgtggtttcttagttttcaaggagtccattaacatggggaaagggcttcatggcgtaagactgccaatccatagtacttatctgaattttatcttccatatttactcatagatcttccacttcaaaatcctctttcaaaatttccaggagaaaatatgattcttctccaaggccacccccttcctcccaggaagaaaaggcaggcttgagggcagcagccttgaaagacccctgacttggctaagaggaactgaacaatgtatgacaatgtgtgacattcgtatggccctgcccttataaagctccttcacatgcatcatctcaagtttctgaagaggtatgaattgtgtttaattaaagcccgagtgatggaagcggacagaaagttatttcgaggctgt

SEQ ID NO: 579967 - DNA, 607 bp, Homo sapiens
gtttcaaaccacacactcagtaatatcagtcttctccatctcctttggcttttattttgtgattctgctgatttgaacacccaatcttaaaccaaagagagaagratataagcaaaaattcagagcagctcaccaaggaaacatgcaacagtatcttgctaggctttgcagggccttaattttctcttcccccgtggggttcccgttcctcagtcacccattataatcaagagaagttgtataatgcaaaaatgctccgaattagtagaataacttgtattattttccattatgaaaactcccaatagagggaaaatggctaaactccaggcttaaaattcaatttgggattttcatatcagtcactgacttcctgggaccacatcagcgatgtttctgtcaggagtctatggccatagagatattagtcttgcccattcctgaacagcctctccagattgtttccctccaaaatgcaggaaaatgtccactgtacaattttttaaaaccataaaacctagtagaaaggaccagaggcatctccttaaggtataggcatcctccagagcaagaatgattctaggggtaaggctgaaggtgcctgtgg

SEQ ID NO: 579968 - DNA, 566 bp, Homo sapiens
attaacgatttattttcttctcaggttttgtgtgtgtgtgtgcacacgcatgtgtgtgtaattttattttattttctagctggaaagaggctgtttctcttggggctagtcaattcttagagatggcaaagggctcagcctttcatatgaaaatgagccaatccagcctttcataagaaaactacccagtcttgcctgtgcacccaaggaggcaatattcctctgccttaattaacccagggccaggtatcaggcaactaggggccacccctmtatcttagaggctgccccaaataattcaaactagccaatcctaaactgtctaccctgccctgcctttctcatgaaaaccccatttattgggggcactggccaaatcttcccccagttcctatcttctgcttcctaccaccctggtgtttttccatgtgcccctgcatggcacgaccatgcctcctgtcacgaggacctgtgagcataaactttgttttgctgagcttctcctctgtctccttttgtggccacagctaactaagcatctcataaaaaagtgcaaaatatcaggt

SEQ ID NO: 579969 - DNA, 510 bp, Homo sapiens
actccaggccatctgaagctgcacttctgaggatgcctcgcagggctcagctgttcctaggaactactcaggtgattgtgatgaatggcgagggctaagaacctctgcccaaccaaaacaggatgtcagtgtacagccccaggccccacactccaagggcaggccatgtgcaagatgaattgctgcagaatccttcaaggcataccaaaaattcccataaggagtgaccycaattcaccgttaaaggggaaaatgtccttcctcagctcatctagaaataaaatctacaggactcatttctacttggggtcactgaaggcctgatcctacactccagccaacatcacaccctgagtgcacatcttatctggctgaacactgcttccagcctgtcctcatgagtacacccacataactccagttcactgcagattaagtcagagagaaccttgctatggttggagctctgcaggagagctcagggactaccagcagagttctctctaagca

SEQ ID NO: 579970 - DNA, 454 bp, Homo sapiens
tctttctctctctctcgccatacctgggtatcagcttcatcctcgtgctggtagtgagactgctgttgcatctccaggcatcacattcagacacaaagaatccggaagaaaaggaggaagactccccagaagatgtcccttcacatagtattggccattattgagtcacatgtgccaatatctgaataaatcaccagaaaggagaccctcaagaggtgatgtttcagcctctcctgggagtacaaaagcrgaagaaaacagaacaaaatcacaattctgtgtggaaggaaaattgggagaattgctgctagacagaaaatgtatagtgacctctattctctcaaaggtatttccagctctaaaaatttcatatattgaaaagcatttgttgcctaacatggtttaaacccagaccaccaattcacatgcctacatataaccaagcactgtgcta

SEQ ID NO: 579971 - DNA, 562 bp, Homo sapiens
ggcgcgatctcggctcacttcaagctccgcctcctgggttcacgccattcttcttcctcagcctcccgagcagctgggactacaggcgcctgccaccacgcctggctaatttttttgtattttagtagagacggggtttcaccgtgttagccaggatggtcttgatctcctgacctcgtgatccgccagcctcrgcctcccaaagtgctgggattacaggcgtgagccacactgtgcccggcggtaaatatttctcataaaagctgtttctctgatgtagtagacatctccttccctctgtccttccctccccacttccctccctccattcctctatttctctcttctttcctcccttcctttacctgccttatgtcactttagggaatatcctcttccctgttccacgtgttttagatggggctgacaatcaagtgaatcttatctcacctgccacttggtagccacttaatgcaggctgaccaatcaaattgtcccactccctggatacagtgattggtccaaaaattctagcagggttgctgaaaatatttggagttgg

SEQ ID NO: 579972 - DNA, 556 bp, Homo sapiens
gctttggctatttgggctcttttatggttctatataaattttgaaatagttttttctagttctgtgaaaaatgatgtttgtaagttgataggaatactgttgaatctgtagatcactttgggcagtagggccattttaacaatattaattcttccaatccatcagcatakaatatttttccatttgtttgtgtcatctctgatttctttcagctgttttttgtagttcttcttgtagagatctttcatctccttagttagaggtattcctaggtgtttcatttgtgtgtgtgtgtgtgtgtgtatgtgtgtagctattgtaaatgggattgtgttcttaatttggctctcagcttgaatgttattggtgaatagaaacaataataattttttatacattgattttgtatcctaaaactttactgaagttattgaatagttccagactccatggagtctttaggggtttccaggtacagaatcttattggcagcaaagagagataatttgacttcttcttttcctatttagatggcttttatttctctcccttgctt

SEQ ID NO: 579973 - DNA, 514 bp, Homo sapiens
tcctccaaactaattttgcataaaatttagaacttctttaaattcaaaattggggaagaaaacattaagacatggaaaaccatgcaaagataaagattgttataccctttcctttaaacatgattattcttttttatacatgtgttggaaataaatcagtgttgtatctaggcagaagaaagtaagacattgcagtatttatgttcttcatgtttttatcctcctataatagtcacattaatccaaatttaaaagatgccaatagctgggcttaagagacatcatcacactgaaaargtggactctgttgtaaccacttattaaaaacaaaccaagccaaacttgtggtttaaaaattgagaacagatgatgcttaataagcatgaaatgcttttggtgttgcaaacgagaaccaggtgtggagataagcagcttggagctgagcacggccacctacaagcaggactcatcctcctcccagggggtgatggttggtcatcaactatgtagctca

SEQ ID NO: 579974 - DNA, 571 bp, Homo sapiens
tttgctgtgcagaatgtttttagtttgatatgattccatttgtttatttttgcttttattacctgtgcttttgaagtcttatttataaaatctttccccagacaaatgtcctgaagaatctcccctatgttttcttatagcagttccatagttttgggtcttacatttagatttttgatctatgttgagttgatttttgaatagggtgagaggtgagggtctagtttcatycttctgcatatagatatccatttttcccaacatcatttattgaagaagctgccttctcccaattagtgttcttggcacctttgtcaaaaatcacttggctgtagatacctggatcaatttctgggatctctattctgttccactggtctacgtgtctgttttttatgcctgtaccatgatgttttggttactataattttgtagtgtattttgaagtttggtagtgtgatggtgtctccagctttattcgttttccttaggattgctttggctattaggggtcttttgtggttccatacaaatttcaggatttaaaaaaatttctgtgaagaatgtcatt

SEQ ID NO: 579975 - DNA, 385 bp, Homo sapiens
ctttttcttttttgctgaagtcactatcctttattgaaggtaaattttttaaaaattttataacgaatatcttccagctcttctttgtctcttgctgagaatccagtgtgattgactcaccagcatctgatcctgagcaaattgttttgtattggggaaatgcttttgttttgtttttgtttttgttttttgttttttktttttttttgcctcttttttatgtggagtacccagttacacatattttgttcatgcaattgatcttaatcatatgataaatttcttattattgtctattgtaatagatctgacttttattcctgagtctgccttactattatgaactggacttaagcctctacagactcatggcccaacttcatcc

SEQ ID NO: 579976 - DNA, 512 bp, Homo sapiens
cactgcaacctctgcctcctgggttcaagcaattctcctgcctcagcctcccacgtagctgggattacaggctgctgccactgcacccggctaatttttgtatttttagtagagacagggtttcaccatgttggccaggctkgtctcgaactcctgaccttgtgatcctcccgcctcggcttcccctagtattacaggcgtgagccaccatgcccagccgggaatattttttaatgacaaactcagtgattagattttagttctttaaagtttctataaatttaaagtagtatgaacatttaacatattgaattatgaaaacactagtcaaagcagcacagtatgttatagttggatcgtggagaaagtccggcaacacatgtcagtaaaattgtattgctcaggaatattccaagtgtccagatgaattataaagcagctccacataatcaaaataattttgtcacacgttctaacagagtatccttaatattctgctctcttgaacaacc

SEQ ID NO: 579977 - DNA, 615 bp, Homo sapiens
tagtaggctgggctcagtggctcacgcctgtaatcccagcacttcgggaggccgaggtgggtggatcacctgaggtcaggagtttgaggctagcctgaccaacatggtgaaactcatctctactaaaaatacaaaaattagctgggagtggtggtgtgtgcctgtaatctcagctactcgggaggctgaggttgcagtgagccgagatcatgccactgcactccagcctgggcaacagatcaagactctgtctcaaaaataataataakaagaagaaaagaccactagtaacaccaacaatgagacaactggctcctagtaacaccaacaatgagacatactacattaggaatgtacagttaaaatactgtgtcttaaagtcaccagaaataataattcttcatggaattataccaaaattttacatatattaaaatcacttattttgttttttggggggaagagtaaattttttctccttttgaattgcttttagtacataaaaagatttacatggctcccctaaaattgctcttctttctcaggtttcttctagttctccttgctttttttattcttttaaatggcacaaaatgcaaaacacaaaataaacac

SEQ ID NO: 579978 - DNA, 664 bp, Homo sapiens
tgcaggtaacaattaggttataaaagtttcattcccttcctagcttgctaaaagcttttaaaatcatgaacgggttctgattatcaagagctttttctgcatccatagaaatgattacctgatttttttctttaattatatcaatgtagtgaatcacacattcaaatgctaaatcaatttgtgattctggaactaaattcaatgtagtcatgttgttttatcctctgtatgtattactgaaattggactacctaaaatgttaagatttttacatttattttcatttaaaaatactaacctataatactgcttttgtataatgcccttgttaggctgttataaaaattaaaataggctcataaaataaggcaaagaagttaaagtttttctatttcctattagatgctaagtattatttcttctttaaatgtttggaaaaatttaccagtgaagccacatgggtctgaatttytaaatgaaaaggtttataattacagattcactttcttttctagatattggcttgtgcagatcttctgtttgtgtgtgtatatgccagtttggttttttttttttttttccaaggaatttgactaaaacttcaaacttacttgctttaagctttccataccatctcccttattagcattttaaaaatgtttgc

SEQ ID NO: 579979 - DNA, 418 bp, Homo sapiens
ttaatacggtatcagtcaaagcaaatcaggcaacatgcaccaaatctgtgttcctggattccgtsaaacctttcctctctgtaatatagctttgtcttttcttcaacttatttcattctgtagaacaagcactgcagtgattcttctgcatcaaaagcaaacattgtatcctgaagattaaagtttcttctttatattcttaacctccagaggtttaaaaaaaaaaaaagttgagcaaatggcagttagatgatatatgccgtaacaggtttgtcctgtagaatgtctaagaatctccaaaattgtaattattttctctattcacatgcactgtttacagctctgcagcactgttccttattctaatgtatcagtaaaacagcactgttgatttaagtctagcttttctggttaaaca

SEQ ID NO: 579980 - DNA, 602 bp, Homo sapiens
gttatggaggacttccatgaattttctgaaccagattgtgaatgggcccacaatactccccaatctttactagatgttatccccttagttttccaaagaccagtgattagaataaaacacaacaatgctaacacgatcttgataagcctgtaatgtcacactgtgaaagatttgaaaaattatttaaacaatattcaggtctattagaagaaaggtatgctaatcactaaaattacactctccttaactcaaactttttaagtagattagattaggaattttaagtagattagtttgagaataattaagagacagagcctcagctgagctacctcttaagctcatgatctagtcaattttgctgatcaatgtcctgtactctaaccaagcaagaaaaagaaaaacgaaaactaaacagaaaggaaatcaaataagatcatgagcttaccactaaaacaattggcccacccatttgtaagccctaaacatcctaataagttctaaaaccaacccaatctccmactttgcaattactgcaaaaggcctgggcatttaaaaagaattgtagaaaattaaaatgtaaagaacagttggaggccaaa

SEQ ID NO: 579981 - DNA, 602 bp, Homo sapiens
gttatggaggacttccatgaattttctgaaccagattgtgaatgggcccacaatactccccaatctttactagatgttatccccttagttttccaaagaccagtgattagaataaaacacaacaatgctaacacgatcttgataagcctgtaatgtcacactgtgaaagatttgaaaaattatttaaacaatattcaggtctattagaagaaaggtatgctaatcactaaaattacactctccttaactcaaactttttaagtagattagattaggaattttaagtagattagtttgagaataattaagagacagagcctcagctgagctacctcttaagctcatgatctagtcaattttgctgatcaatgtcctgtactctaaccaagcaagaaaaagaaaaacgaaaactaaacagaaaggaaatcaaataagatcatgagcttaccactaaaacaattggcccacccatttgtaagccctaaacatcctaataagttctaaaaccaacccaatctcccrctttgcaattactgcaaaaggcctgggcatttaaaaagaattgtagaaaattaaaatgtaaagaacagttggaggccaaa

SEQ ID NO: 579982 - DNA, 426 bp, Homo sapiens
taaaaacaaataaactttaaaagttgttaaaaacttccaaacactttaagccttgagagagatgtgactgtgatctcagccacgtcacatgtagttgtaacttctgtttcttagaatatagattggctcccctactcttcatgcttgttctgtaagtgagagaccagagaccagacatcctcccctttcaatcactaatatttgttatagattaactgtctcctttactgtcctgtacctaactcagactgatagcacaaaagaccccatgatggttatatcttcactgtggaatgttaaatatacctttcccaaaataaaaaaaaagaccactctgactaatagattactgtaactatgtattatgccttatatagaaaaatgycaaaattcagttaagcttcccaaaccttatctatataaacg

SEQ ID NO: 579983 - DNA, 590 bp, Homo sapiens
attgccgttttttgtttttgagtcagagtctcactctgtcgcccgggctggagtgcagtagcgtgatcttgactcactgcagcctccacctcccaggttcaagtgattctcctgcatcagtctcccaagtagctgggaccacaggcgcgtgccaccacagctggctaatttttgtatttttagtagaaatggggcttcaccatgttggccaggttggtctcgaacttctgacctcaagtgatccacccaccttggcctcccaatgtgctggaattacaggtgtaaaccaccatgctgggtcaacattgcctttttaatgtagtcaaataagggtaatgcagattgagcacatcgagtttgtatgtttttttctaattatgctttattcctactttgattattttttaaaagtcaggtttgttgaagttgaagttgcataacacagaatttatcattttaagagtttaatttcataaactttgasatgtgtatatggttaggaaaccactaccacaattaacatagagaatatttccttcaccccaaaatttccatgtgctcctttggagtcaaccattcctcaactcccc

SEQ ID NO: 579984 - DNA, 582 bp, Homo sapiens
tctaaaagattaggtgactaccagaagccctgatgtgtgctttaataaccttaaccattgtggggaaatggcttttccacagactatgaaatctcatagcaagcttgtgtccattatatgtttcctattatatattgacttgaggaaaactttctgttgttttttgttttgtggtttttttttttaagtagaccctgtgttttgtcttcatgagwtagataataccaaagcattctagaaagtttaaaaaaaagctgaaaactaatgtgtttgtctgttacctagtttaacactttgaacaggtttttcttgctttgcaattaaggaataatgacccaattcagatttaactgaaaagtgaggaagcccttgttaaactgttacaggctattgttaaaagttccatccttcagggaaagaaaaagaaaccaaaatttattttccctctgaggatgtttttccttatcaattcaaaaaaggattatatagatatctattaaatgcttaatttccataataaagtcataagtgctgcttttcttttttttcctttttcttttaaatagagctgttaatatgctg

SEQ ID NO: 579985 - DNA, 582 bp, Homo sapiens
tctaaaagattaggtgactaccagaagccctgatgtgtgctttaataaccttaaccattgtggggaaatggcttttccacagactatgaaatctcatagcaagcttgtgtccattatatgtttcctattatatattgacttgaggaaaactttctgttgttttttgttttgtggtttttttttttaagtagaccctgtgttttgtcttcatgagatagataataccaaagcattctagaaagtttwaaaaaaagctgaaaactaatgtgtttgtctgttacctagtttaacactttgaacaggtttttcttgctttgcaattaaggaataatgacccaattcagatttaactgaaaagtgaggaagcccttgttaaactgttacaggctattgttaaaagttccatccttcagggaaagaaaaagaaaccaaaatttattttccctctgaggatgtttttccttatcaattcaaaaaaggattatatagatatctattaaatgcttaatttccataataaagtcataagtgctgcttttcttttttttcctttttcttttaaatagagctgttaatatgctg

SEQ ID NO: 579986 - DNA, 582 bp, Homo sapiens
tctaaaagattaggtgactaccagaagccctgatgtgtgctttaataaccttaaccattgtggggaaatggcttttccacagactatgaaatctcatagcaagcttgtgtccattatatgtttcctattatatattgacttgaggaaaactttctgttgttttttgttttgtggtttttttttttaagtagaccctgtgttttgtcttcatgagatagataataccaaagcattctagaaagtttaaaaaaaagctgaaaactaatgtgtttgtctgttacctagtttaacactttgaacaggtttttcttgctttgcaattaaggaataatgacccaattcagatttaactgaaaagtgaggaagcccttgttaaactgttacaggctattgttaaaakttccatccttcagggaaagaaaaagaaaccaaaatttattttccctctgaggatgtttttccttatcaattcaaaaaaggattatatagatatctattaaatgcttaatttccataataaagtcataagtgctgcttttcttttttttcctttttcttttaaatagagctgttaatatgctg

SEQ ID NO: 579987 - DNA, 582 bp, Homo sapiens
tctaaaagattaggtgactaccagaagccctgatgtgtgctttaataaccttaaccattgtggggaaatggcttttccacagactatgaaatctcatagcaagcttgtgtccattatatgtttcctattatatattgacttgaggaaaactttctgttgttttttgttttgtggtttttttttttaagtagaccctgtgttttgtcttcatgagatagataataccaaagcattctagaaagtttaaaaaaaagctgaaaactaatgtgtttgtctgttacctagtttaacactttgaacaggtttttcttgctttgcaattaaggaataatgacccaattcagatttaactgaaaagtgaggaagcccttgttaaactgttacaggctattgttaaaagttccatcyttcagggaaagaaaaagaaaccaaaatttattttccctctgaggatgtttttccttatcaattcaaaaaaggattatatagatatctattaaatgcttaatttccataataaagtcataagtgctgcttttcttttttttcctttttcttttaaatagagctgttaatatgctg

SEQ ID NO: 579988 - DNA, 548 bp, Homo sapiens
ttctagggacctgactgaggctacaggatcagaaatctttatatttctactaaaattacattttaaatgtttttattaaagcataatatacacaaaagtgcaaagatcataattgtagcacctgatgaattcccacaaatttgacatagctatttgaattagcaccagatatggaaacagcacattacctcactcagaagctccctcatgtttttttacagtcattatccttctcttctgacttctagcagcatatattaattttgtcttttaagccagaagtggaagctggcttattttgctcaacattatgttacacaattaattcatattattgcatgtagtcacagattgttctcattgttgcatagtacaccattatgtaaatataacccaatttttaaaaaatttctcrttaaaatttcatatctggaaaaaacagtcctaaaatatatctttatctatctatctatctatctatctatctatctatctatctaggatgctgtataactgaacagaacacagatacataaatgtttcaaaag

SEQ ID NO: 579989 - DNA, 521 bp, Homo sapiens
agttggcttgagcccaggagtttgaggctgcagtgagccatgattgcaccactgcactccagcctggcacaataatagtgtaaacagacaytctattattagagaatatttaataatactctttaaaatgataaataaaatttattggcaacctgctatatgacagaaactgtgataagcactttattaatttcatttacatttcccaacaatcctatgagatagataatgacatggtttggatctatgtccccacccaaatctcaccttgacttgtaataatccccacatgtcaagggtagtacctggtgggaggtaattgaaccatgggggtggtttcacccatgctgttcttgtgatagtgagtgagctctcacaagatttgacagttttataagaatctggcatttcctctgcttgtgctcattctctctcctgccaccctgtgaagatatgccttccaccatgattgtaagtttcctgaaacctccccagccatgcagaactgtgagtcaattaaa

SEQ ID NO: 579990 - DNA, 521 bp, Homo sapiens
agttggcttgagcccaggagtttgaggctgcagtgagccatgattgcaccactgcactccagcctggcacaataatagtgtaaacagacattctattattagagaatatttaataatactctttaaaatgataaataaaatttattggcaacctgctatatgacagaaactrtgataagcactttattaatttcatttacatttcccaacaatcctatgagatagataatgacatggtttggatctatgtccccacccaaatctcaccttgacttgtaataatccccacatgtcaagggtagtacctggtgggaggtaattgaaccatgggggtggtttcacccatgctgttcttgtgatagtgagtgagctctcacaagatttgacagttttataagaatctggcatttcctctgcttgtgctcattctctctcctgccaccctgtgaagatatgccttccaccatgattgtaagtttcctgaaacctccccagccatgcagaactgtgagtcaattaaa

SEQ ID NO: 579991 - DNA, 521 bp, Homo sapiens
agttggcttgagcccaggagtttgaggctgcagtgagccatgattgcaccactgcactccagcctggcacaataatagtgtaaacagacattctattattagagaatatttaataatactctttaaaatgataaataaaatttattggcaacctgctatatgacagaaactgtgmtaagcactttattaatttcatttacatttcccaacaatcctatgagatagataatgacatggtttggatctatgtccccacccaaatctcaccttgacttgtaataatccccacatgtcaagggtagtacctggtgggaggtaattgaaccatgggggtggtttcacccatgctgttcttgtgatagtgagtgagctctcacaagatttgacagttttataagaatctggcatttcctctgcttgtgctcattctctctcctgccaccctgtgaagatatgccttccaccatgattgtaagtttcctgaaacctccccagccatgcagaactgtgagtcaattaaa

SEQ ID NO: 579992 - DNA, 407 bp, Homo sapiens
agtttgggccagtttcattaaaactcttcattcatcatactgaaatgaggcagtatttgttattgcacgggtgccgttctagcacgaaagctattccaatactaagcagtaattcaagaaaggcagagtagcaggtgggaaaggagactgaagaaaggaagaccagcatgcattggtgtttgccccattctctccctcagccctgcacccagcagtacataggcatgtggaaaaggcccagaacctccatcatggtgaagagccaggaacccacattccactctaaagccactcccatgggacaaaataatcagamtgatcatcatctggcttctcagtagggaagttacggaggagcagctgcattttcatatgttgccttaatgtgctcatggaagaataagttt

SEQ ID NO: 579993 - DNA, 540 bp, Homo sapiens
ggttgggggagcagggataggaagtctaatcacaaccaaacctgtcaacaccagtgttgtgttcacgaaatactcaggatgccacgtgcccaccccagccccaactccgcaaagttctatttccagatatggattgtttttagtttgaaatrgttgaaggcctctccctggcctctcccacttcattaaatgctacaaattaaaacaaatgtccatgaatactgtcctcccttggtgtttcatttgtcacagcgttgggcaacggtgccagctccggagttttcatgataagaccggggtggccatggattttggggcagtggcgttacctctgtgcatatcaagaagctgtttatacttcaattttatgctcatctggggcgactctggtgggaactaagctatatcccatccccaggtgctctgtcttggagtccccttgctgcctgttccaaagagtggagcctgtatcttgagggcagtgctaggtgccagcaacaggcactggtgtttaggtatagctggtgacattccagagaa

SEQ ID NO: 579994 - DNA, 540 bp, Homo sapiens
ggttgggggagcagggataggaagtctaatcacaaccaaacctgtcaacaccagtgttgtgttcacgaaatactcaggatgccacgtgcccaccccagccccaactccgcaaagttctatttccagatatggattgtttttagtttgaaatggttgaaggcctctccctggcctctcccacttcattaaatgctacaaattaaaacaaatgtccatgaatactgtcctcccttggtgtttcatttgtcacagcgttgggcaacggtgccagctccggagttttcaygataagaccggggtggccatggattttggggcagtggcgttacctctgtgcatatcaagaagctgtttatacttcaattttatgctcatctggggcgactctggtgggaactaagctatatcccatccccaggtgctctgtcttggagtccccttgctgcctgttccaaagagtggagcctgtatcttgagggcagtgctaggtgccagcaacaggcactggtgtttaggtatagctggtgacattccagagaa

SEQ ID NO: 579995 - DNA, 593 bp, Homo sapiens
gacacttcgtctctgagtgattttcaaggtgtgaagacttggactcaactctaactgcaggcagaggagtgggagacgttcccaggccactgaggataaggttcaagtgttggaggttgcagtgtctttgcatgctgctgagtcaagctggattttgacacagcctggttttatttaagaaaagctggaataaataacagggtcaggggtgcattcgggtgtcaggagttatggakaaacaaccacaatcctggtattcactcgatttttatcgggagaccacagcatctcctatgctgtgttaaatatactctagaagatcttgggccagaagccagaaacaaacatttctggtgagagcaaatggtgtaaaaatgggaggggaataaaggaaaaggaaagggaaattctcatgacacctttgaacttgaatttcctgctttattcacctgatgtaactgaaaccgatgtctcctttctccctaaaggttccacatgtgtggaaccagggcattttctttttctaagagggtaagactgcacgacctcctctcctttctaaggaacatctaaggtaactttttaccttagtg

SEQ ID NO: 579996 - DNA, 593 bp, Homo sapiens
gacacttcgtctctgagtgattttcaaggtgtgaagacttggactcaactctaactgcaggcagaggagtgggagacgttcccaggccactgaggataaggttcaagtgttggaggttgcagtgtctttgcatgctgctgagtcaagctggattttgacacagcctggttttatttaagaaaagctggaataaataacagggtcaggggtgcattcgggtgtcaggagttatggagaaacaaccacaatcctggtattcactcgatttttatcrggagaccacagcatctcctatgctgtgttaaatatactctagaagatcttgggccagaagccagaaacaaacatttctggtgagagcaaatggtgtaaaaatgggaggggaataaaggaaaaggaaagggaaattctcatgacacctttgaacttgaatttcctgctttattcacctgatgtaactgaaaccgatgtctcctttctccctaaaggttccacatgtgtggaaccagggcattttctttttctaagagggtaagactgcacgacctcctctcctttctaaggaacatctaaggtaactttttaccttagtg

SEQ ID NO: 579997 - DNA, 593 bp, Homo sapiens
gacacttcgtctctgagtgattttcaaggtgtgaagacttggactcaactctaactgcaggcagaggagtgggagacgttcccaggccactgaggataaggttcaagtgttggaggttgcagtgtctttgcatgctgctgagtcaagctggattttgacacagcctggttttatttaagaaaagctggaataaataacagggtcaggggtgcattcgggtgtcaggagttatggagaaacaaccacaatcctggtattcactcgatttttatcgggagaccacagcatctcctatgctgtgttaaatatactctagaagatcttgggccagaagccagaaacaaacatttctggtgagagcaaatggtgtaaaaatgggaggggaataaaggaaaaggaaagggaaattctcatgacacctttgaacttgaatttcctgctttattcacctgatgtaactgaaaccgatgtctcctttctccctaaaggttccacatgtgtggaaccagggcattttctttttctaagagggtaagactgcacgwcctcctctcctttctaaggaacatctaaggtaactttttaccttagtg

SEQ ID NO: 579998 - DNA, 460 bp, Homo sapiens
tttttattttccataaaaacgatttagctcatctttctcactgaaagtaggcaaataaaaccccaactccatgccttggctatagtagataataaatatcagctgacttttattgcttgaatacttttagaattatttcttttctttttttttttttttttttttgagatggagtgttgctctgtcgcccaggctggagctggagtgcagtggcacaatctctgctcactgcaacctccaccttccaggttcaagcaattctgtctcagactcccaggwggctaggacgacaggtgcgtgccaccatgcccacctaatttctgtgtttttagtagagaccgggtttcaccatgttggccaggctggcctggaactcctgacctcaggtgatccacctgcctcagcctcccaaagtgctgggattacaggcatgagccaccccgcccagcctcttttcctc

SEQ ID NO: 579999 - DNA, 528 bp, Homo sapiens
  misc_feature 42: n = A,T,C or G
atggtgccaggcacttaccaagttctcagttgagattagctnttactgttggtagtgtcagcatcatacccattcatccctgtatttatgaaacaagtatttattgagtgcactgtcttccaggggccattctaggtgctggcattccacagggaacaaggtgaaatccctgcattgcagtgagaggagacagacaataaacaaatgactattggccgggcgtggtggcttacrcctgtaatcccagcactttgggaggctgaggctggtggattacctgaggtcaggagttcgagatcagcctgaccaagaaggtgaaaccccatctctactaaaaatacaaaaattagctgggcatggtggcaggcgcctgtagttccagctacttgggagactgagatgggagaattgcttgaacccgggggacggaggttgccgtgaaccaagattgagccactgcactctagcctgggtgatggagtgagattccgtctcaaaaaaacaaaacaaaacaaacaaacaaacaaa

SEQ ID NO: 580000 - DNA, 564 bp, Homo sapiens
gatgaacagaaatctctcagtaataagaaggcagcattggccaggcgtggtggctcacgcctgtaatcccagcactttgggaggccaaggcaggtggatcacgaggtcaggagttcaagatcagcctggccaagatggtgaaaccctgtctctactaagaatayaaaaaaattagctgggcatggtggcaggtgcctgtaatcccagctactcgggaggctgaggcaggagaattgcttgaacccgggcagcaaaagttacagcgagccgagatcatgccactgcgctccagcctgggtgacagagtgagactctgtctcaaaaaaaaaaaaaaaagaaggcagcatcctgggtcgtgtggcagagaaatcatggcaaggatgggtgatgaaaagaaaatcagggcccggcatggtggctcatgcctgtcatcccagcacatttaagaggccaaggtgggaggatctcttgaggccaggaatttgggaccagcctgggcaacatagcaagaccccatctctttaaaaaataaaaataaaaaaagaaagaaagaaaaaaaatagc

SEQ ID NO: 580001 - DNA, 348 bp, Homo sapiens
tcaagacatgaaaacatttgctttgggaacacgggtgtgcwgggtggctggcaagaagtggagggaaggttgcaagaaggaaatggaaagaagagggaggaaaaacacacatgacaactctgtgcccacggctccctttcatttgcatcctgcttggaaataaatgaacccccaaacaccagtgaactttctactctcactctctttaattgaaacccagtacgggaaatagtaatggatattgtgctcaaattgagaaaacgtgtctggggctacgaggggagagttagttcagcagatttggaggagctgatctttctttggcctgtcaaccttcctgacagtgtg

SEQ ID NO: 580002 - DNA, 575 bp, Homo sapiens
tcactctttctttctctagaacaataggagtaagtcttcttttttttccttcaacttttattttaagttcaagggtacatgtgcaggatgtgcggctttgttacataagtaaacatgtaacatggtggtttgctgcacagctcatgccatcaccaaggtattaagcccagcatccatcagctgttcttcttgatgctccccctcctcccacccaatcttgttgttcctgccaccccatgtgtccatgtgctctcaccattcagctccaacttataagtgagaacatgcagtgtttggttttcygttcctgcattagtttgctgaggatactggcttccaactccatccaggttcctgcaaaggagatgatccttttcctttttatggctgcataatattccatggtgtatatctaccacattttctctatccagtctatcattaatgggcatttaggttgattccaggtctttgctattgtaaatagtgctgcaatgaacatatgtgtacatgtatctttataacagaataatttatatttctttgggtatatacccagtaatgggattgctggg

SEQ ID NO: 580003 - DNA, 575 bp, Homo sapiens
tcactctttctttctctagaacaataggagtaagtcttcttttttttccttcaacttttattttaagttcaagggtacatgtgcaggatgtgcggctttgttacataagtaaacatgtaacatggtggtttgctgcacagctcatgccatcaccaaggtattaagcccagcatccatcagctgttcttcttgatgctccccctcctcccacccaatcttgttgttcctgccaccccatgtgtccatgtgctctcaccattcagctccaacttataagtgagaacatgcagtgtttggttttccgttcctgcattagtttgctgaggatactggcttccaactccatccaggttcctgcaaaggagatgatccttttcctttttatggctgcataatattccatggtgtatatctaccacattttctctatccagtctatcattratgggcatttaggttgattccaggtctttgctattgtaaatagtgctgcaatgaacatatgtgtacatgtatctttataacagaataatttatatttctttgggtatatacccagtaatgggattgctggg

SEQ ID NO: 580004 - DNA, 646 bp, Homo sapiens
acattttaacaatactgattcttccaatccatgaatatggaatatatttccttttttgtgtcctctgcaatttctttcatcagtgttttatagttttcattgtagagatctttcacttctttgattaattcctaagtatttaattttacttgtgactattatacgtgggactacttttttgatttattttttaagttgttcactgttggcatatagaaatgctactagtttttgtatgttgattttgtatcctgcaactttactgaatttgtttattgattctaatagtttttttggtggmgtctataggtttttctaaatataagatcatatcttctgcaaacaaggataatttggcttctttctttctaatgtggatgacctttctttctttctcttgtctgattgctctagctaggaactccggtactatgttaataacagtggtgaaagtgggcatccttgtcctcttccagatcttagaggaaaggcttccagatttttttcacaatctgtatgatactagctgtgggtttgttttatatggcttttattatgttgaattacgtccatgtatgcccaggtttttgagggcttttatcataaagtgatgttgaactttatccaatgctttttcagtgtcaat

SEQ ID NO: 580005 - DNA, 583 bp, Homo sapiens
tctataggatgacatacctttgtttcacatgctactttttaaaacagttttattaagatatcattgatataaaattgtgtatatttaaggtgcataagttgatgttttgatatacatataatgtgaaatgatcatcacattctagctaacatgtatatatatacacacacgtatatatagatgtrgaatatatacatatcacgtatatatagatgtggtatatatattctgtgtgtgtgtgtgtgtgtgtgtgtgtgtgtgtgtgtggtaaaatagcttaatagctatgctgttagcaaatttcatgtatataataaaatattgttaactatcatcaccatgctgtattttagatctctagaacctttatctgaaactttatgtcctttggccaacagcaccttatggtatggtttggctctgtgttcccacccaaatctcatgttgaattataattttcagtttaggggagggagctgttggaaggtgattggatcatgggggcagatattcccctttctgttctcatcttagtgagtgagatatcacaagatttggttgttttacagtgggtagcacttcc

SEQ ID NO: 580006 - DNA, 583 bp, Homo sapiens
tctataggatgacatacctttgtttcacatgctactttttaaaacagttttattaagatatcattgatataaaattgtgtatatttaaggtgcataagttgatgttttgatatacatataatgtgaaatgatcatcacattctagctaacatgtatatatatacacacacgtatatatagatgtagwatatatacatatcacgtatatatagatgtggtatatatattctgtgtgtgtgtgtgtgtgtgtgtgtgtgtgtgtgtgtggtaaaatagcttaatagctatgctgttagcaaatttcatgtatataataaaatattgttaactatcatcaccatgctgtattttagatctctagaacctttatctgaaactttatgtcctttggccaacagcaccttatggtatggtttggctctgtgttcccacccaaatctcatgttgaattataattttcagtttaggggagggagctgttggaaggtgattggatcatgggggcagatattcccctttctgttctcatcttagtgagtgagatatcacaagatttggttgttttacagtgggtagcacttcc

SEQ ID NO: 580007 - DNA, 604 bp, Homo sapiens
gttcacaatagcaaagacttggagtcaacctggatgaccatcaayggtagattgaatagagagaatgtggcacatgtacatgatggaatactatgcagccataaaaaataatgagataatgttatttgcagaaacatgggtccagctagaggccattatcctaaacaagttaatgagaagcagaaaaaaataccacatgttctcacttacaagtgggagctaaatattgagtacacatggacacaaaaagggggacaatggacactggggtgtacatgagagtggaggatgggaagagaatgaggaaaggaaaactgcctattgggtactatgctcactacctgggtggcaaaaccatttgtacaccaaacctcaatggcatgcaatttacccatgtaacaaacctgcacgtgtaccccctggacctaaaataaaagttggaagaaaaaaattaatttgaattttacaaaagaaaggtaagctaaagttaaagtgaaaacaaagcagtgaactcatcttatataattattaaaatgtaatttctccaaaataaaaaagtgccttatccaaggccatgaagtaagttggcaagaaagcccaaggc

SEQ ID NO: 580008 - DNA, 604 bp, Homo sapiens
gttcacaatagcaaagacttggagtcaacctggatgaccatcaatggtagattgaatagagagaatgtggcacatgtacatgatggaatactatgcagccataaaaaataatgagataatgttatttgcagaaacatgggtscagctagaggccattatcctaaacaagttaatgagaagcagaaaaaaataccacatgttctcacttacaagtgggagctaaatattgagtacacatggacacaaaaagggggacaatggacactggggtgtacatgagagtggaggatgggaagagaatgaggaaaggaaaactgcctattgggtactatgctcactacctgggtggcaaaaccatttgtacaccaaacctcaatggcatgcaatttacccatgtaacaaacctgcacgtgtaccccctggacctaaaataaaagttggaagaaaaaaattaatttgaattttacaaaagaaaggtaagctaaagttaaagtgaaaacaaagcagtgaactcatcttatataattattaaaatgtaatttctccaaaataaaaaagtgccttatccaaggccatgaagtaagttggcaagaaagcccaaggc

SEQ ID NO: 580009 - DNA, 604 bp, Homo sapiens
gttcacaatagcaaagacttggagtcaacctggatgaccatcaatggtagattgaatagagagaatgtggcacatgtacatgatggaatactatgcagccataaaaaataatgagataatgttatttgcagaaacatgggtccagctagaggccattatcctaaacaagttaatgagaagcagaaaaaaataccacatgttctcacttacaagtgggagctaaatattgagtacacatggacacaaaaagggggacaatggacactggggtgtacatgagagtggaggatgggaagagaatgaggaraggaaaactgcctattgggtactatgctcactacctgggtggcaaaaccatttgtacaccaaacctcaatggcatgcaatttacccatgtaacaaacctgcacgtgtaccccctggacctaaaataaaagttggaagaaaaaaattaatttgaattttacaaaagaaaggtaagctaaagttaaagtgaaaacaaagcagtgaactcatcttatataattattaaaatgtaatttctccaaaataaaaaagtgccttatccaaggccatgaagtaagttggcaagaaagcccaaggc

SEQ ID NO: 580010 - DNA, 604 bp, Homo sapiens
gttcacaatagcaaagacttggagtcaacctggatgaccatcaatggtagattgaatagagagaatgtggcacatgtacatgatggaatactatgcagccataaaaaataatgagataatgttatttgcagaaacatgggtccagctagaggccattatcctaaacaagttaatgagaagcagaaaaaaataccacatgttctcacttacaagtgggagctaaatattgagtacacatggacacaaaaagggggacaatggacactggggtgtacatgagagtggaggatgggaagagaatgaggaaaggaaaactgcctattgggtactatgctcactacckgggtggcaaaaccatttgtacaccaaacctcaatggcatgcaatttacccatgtaacaaacctgcacgtgtaccccctggacctaaaataaaagttggaagaaaaaaattaatttgaattttacaaaagaaaggtaagctaaagttaaagtgaaaacaaagcagtgaactcatcttatataattattaaaatgtaatttctccaaaataaaaaagtgccttatccaaggccatgaagtaagttggcaagaaagcccaaggc

SEQ ID NO: 580011 - DNA, 447 bp, Homo sapiens
acccatgacaaagaaagtgtcttgcttttggaggagtacacggtgatgccatccggtgaggcttccgagcatcacatattagcctgtctaacagcagagatcatcagtgaacaagaaacaaaactacttctccacatytttcttcctcttcattcctccaaaacatactcctttctcccaagttctgggcaggtctaaagcactcatttttatgtgcagctcagatatttgagactcagatttaccagaagatgtatctcaagctcaacttaatttcaaaatataaagtcactctgaggacttttcttgtgattaattcacaatactgaagaaaatcaaagtccatacccaagtttgaggcatatataaagctcttgagagccagcaaaatgccaacttctgaaatttccttcttatcctatccaagcatcaccacttgggaacttg

SEQ ID NO: 580012 - DNA, 571 bp, Homo sapiens
caatacattgttgttaactatagtcaccatgtcatacaatagatctcttgaatatattccttctacctaactgaaaatgttgtgttctttgaccatctccccaaccccctaacctctctgttcttaatgatcagtagagttttcgttaaaacacagattctcaatcccactcccagagagtcaytgaatagacatgaggtgggatacagtcatctgcattttaacaaacaccacagtgattcctcaaccaaaatctgagaaagccctacagtactaagaagtatttgaggcaaaaattcagactacagtactaaatcagactacagtactaagaagtatttgaggcaaaaatttacacttattatttttacacttattagaaagtctctagccatttttatccaccctattcagccagcatgtgtaatttcagggacaagtaaacaaatatttggctcttctacagatccaagaatttgctttaaaaacattcagcttaacctgcaactgtccattacaataccatttaccgtggcgatgtttactttggaataaaaatcagcagaatgtc

SEQ ID NO: 580013 - DNA, 625 bp, Homo sapiens
caacattactgatcattagagaaatgcaaatcaaaaccacaatgagatatcatctcatgccagtcagaatggccattattaaaaagtcaaaaaacaacagatgctggtgaggttgtagagaaataggaatgctcttacactattggtgggaatgtaaattagttaaaccattgtagaagatggtgtgaaagaatgatcaagcaaaataaaaattaagaatacttgtttacaaaaaaaaaaaaaatgtgtgatgatggaaaggttcaacactatgytgttcaacagggtagctcctagccatctgtgtttattgcacactttaaaagtggctaatgcaactgaggactgaatttttaatttaattccattttaattaattttaattttaaaatagccatatatggctactggctggcttagtgaacagcacagctctagaatcaaaatgaatatatccacagcctatttccaccactttcaagttatttaaacacaagtacatttctgaatgcctcaatttcttcacctatggaatctggatgataggaatattttactagcaaagttgttgtataatctcctcagaactatacttatatattgatataattatttcacctcttat

SEQ ID NO: 580014 - DNA, 599 bp, Homo sapiens
gggtttcaccgtgttagtcaggatggtctcgatctcctgaccttgtgatccgcctgccttggcctcccaaagtgctgggattacaggcatgagccaccacgcccggccgaatttttgtatttttagtagagacggggttttgccatgttggctaggctggtctcaaactcctaacctcaggtgatccacctgcctcggcctcccaaagttctaggattacaggcatgagccacaatgccaggccaagaaaaaytaaatacaggtgttcctcagtacccttgggggattggttccagagccccttgattccaaaatctgcagatgctcaagtcccttataaaatggtgtagtatttgcacatagcctactcacttcctccagtatactttaaatcttccctagattacttagaacacctaatatacaacgtaaatgccatgtaaatagttgttatattgtattgtttttatctgtattattattgttgtgtattatttttattttttttttaattttcaatttgcgagtggttgaaactgaggatgccaaacctgtggacatcgagggccaactgtatcaagaaataggagtttgttggg

SEQ ID NO: 580015 - DNA, 377 bp, Homo sapiens
acgtgcagtcagggaggtttcacatcaccaagattcctatcccagaaaagcagatgttcatagctctgggaatggaatgagacccttgtggagagcctataaacggacgcatgaggggcacctgttcatatggataagatagggctataaacgccctgatcttgccatgactcttctaggcctctttrgggttaaggcgtactccgttctgagaatttctggtctaaccggttgtctagcttcacgtcctgtttctatggattgtttgtaaccagcttttgctgcaactgttactgctgattaatatcttgctaatcacaggttatggaaagactgtgcttctgttttaaggctctgttagaaattacagatgcaca

SEQ ID NO: 580016 - DNA, 377 bp, Homo sapiens
acgtgcagtcagggaggtttcacatcaccaagattcctatcccagaaaagcagatgttcatagctctgggaatggaatgagacccttgtggagagcctataaacggacgcatgaggggcacctgttcatatggataagatagggctataaacgccctgatcttgccatgactcttctaggcctctttagggttaaggcgtactccsttctgagaatttctggtctaaccggttgtctagcttcacgtcctgtttctatggattgtttgtaaccagcttttgctgcaactgttactgctgattaatatcttgctaatcacaggttatggaaagactgtgcttctgttttaaggctctgttagaaattacagatgcaca

SEQ ID NO: 580017 - DNA, 377 bp, Homo sapiens
acgtgcagtcagggaggtttcacatcaccaagattcctatcccagaaaagcagatgttcatagctctgggaatggaatgagacccttgtggagagcctataaacggacgcatgaggggcacctgttcatatggataagatagggctataaacgccctgatcttgccatgactcttctaggcctctttagggttaaggcgtactccgttctgagaatttctggtctaaccggttgtctagcttcacgtcctgtttctatggattgtttgtaamcagcttttgctgcaactgttactgctgattaatatcttgctaatcacaggttatggaaagactgtgcttctgttttaaggctctgttagaaattacagatgcaca

SEQ ID NO: 580018 - DNA, 555 bp, Homo sapiens
atagaggaaaaagtcattaattagagaaaaactaagactatatatgcaataggaagaaaaatgaaacattgttaagtaacattggaaaaaaacaaagcacgaaaaatgcaaagaraatggtagtggccaatggtctcagattctactgtgaagtctagaggaatgaatattgaaaaaatataaatggacttgtgattggtgaccttggggaattcaaattcaatacaattgttgaggtgagataatacgcttaggaagtaaaggaattaaggaaaagagaaataagatggaggaagactgcatagtaaagtgaaatccttttaaaaatggacaatactggagaactatgtagacaatggtaaatgttcagtggttggggggacttcaacattgtagaaggaagagggtaattgatggaggagaaaggacaaaattatggactcgacagtcagtttaaatgttaatggagagttcctgagtgtgtaggagcagctgctgacaggagctaaggatatgtcagttttaactagcacccctaggcagaagagtcccaaa

SEQ ID NO: 580019 - DNA, 605 bp, Homo sapiens
tgtggcagtcatactttctcccataaggtctgagtcttggcattaagagagaattcctcttttaagttcattcttagtttcttcttgttccctctcccttagccttagatatagtagctgctttctgcatttactgtttcacttgaygtggagtccttttttaatcgcatttattagttaacaaattctttattttatatataccctgttcaaattacaggtatggttttcatctcctggctggactctgactgatatatttcttggcacaattctgagtatggattgagagccaagtaaattggggttagatttctgacataatgatcattgaaaggtgctaaaagtctaaactgctaagtcagctggaagggctagatgtgaggatcattgagaattcaggctttactgaagatggtagctgactacagatgaggggcaagatggagccagtgacaaccagcaccaagacttcgaggctgagacactgggaaaatggccttacttttaaaagaaagaaagaagcaactaaggagcagaatttctttagagaaaaagatggtaattttcagtgacttattttttaaataacatgcttatttttt

SEQ ID NO: 580020 - DNA, 575 bp, Homo sapiens
tcatgcctgtaatcccagcacattgggaggccgaggtgggcagataatgaggtcaagagatcgagaccatcctggccaacatggtgaaaccccgtctctactaaaaatacaaaaattagctgggcgtggtggcacgcgcctgtaatcccagctactcgggaggctgaggcaggagagttgcttgaacccaggaggcagaggttgcaatgagccaagattgcaccactatactccagcctggtgacagagagagaytgcatctcacaaaagaaagaaagaaagaaaaagtccctcctcccttagatatcaactctttccattgagataaacattattgaacatttggtgcattcgttattttcctgtacatataaaaccatgctttctaataacctatgatattatacacaccataaattttgcaagaaatgttcataatttgctttcacccaatggatattcttgacatacatagttgctttttgtgtttaaaaaatcaattttattcaacttgaatgttttttaaataaatgtacacagaattgtatacaacaggccatccatcatccattctt

SEQ ID NO: 580021 - DNA, 551 bp, Homo sapiens
actccagcctggtgacagagagagactgcatctcacaaaagaaagaaagaaagaaaaagtccctcctcccttagatatcaactctttccattgagataaacattattgaacatttggtgcattcgttattttcctgtacatataaaaccatgctttctaataacctatgatattatacacaccataaattttgcaagaaatgttcataatttgctttcacccaatggatattcttgacatacatagttgctttttgtgtttaaaaaatcaattttattcaacttgaatgttttttaaataaatgtacacagaattgtatacaacaggccatccatcatccattctttactattggttcttatgctttaattcttggttttggaatttttctacagccctttctgcctcctaaataatcctttcttagscagtttttgcctattgcctaaacatcaggaggcaagtttacccaaaagtcacaaaactttggaattaggtaagcttttcaagttgaaagacggtcttcctcctctattcccagtctttcctga

SEQ ID NO: 580022 - DNA, 594 bp, Homo sapiens
tcagggttatttatgctgcttgtgacagcaaaacattgaactgtaagcatttagtggaaagaacatacattgaagagatcatgaaaatgatgactggtttctatgcaaaactgatgttcttgtgaattattttgcttaaggaaagtattatttttccattagcaaatgaagagaggaaaaaattaaattaaattaaattaaattaaattcaaaattaatttggaatttcatcttttgtaaatctttagaaatgggagatttacccatttgcacatggtcctcacttgttgatgaagaaagtcttacaattacatgctatgacaatggagagaaagggagactcaactaaaatccctctactcaatcactctacacttttacaggcagtatctaygttttactctcctcattcaccagggcctgacagcagagaccagagctagggaggtgggggacagtggagaagtaaagatataacctgctggaatggaggtatagacattagagaatgtgttttcctgtctgtagtggcatttgacagaaaaattagagcaggcaccatcttcacttttatccttcccctcaaataacctc

SEQ ID NO: 580023 - DNA, 635 bp, Homo sapiens
ggcacatggtgcaagctgttggcggatctaccattctgggttctggaggatggtggccctcttctcacagctccgttaggcagtgccacagtggggactctgtgtgggggcttgtatcccacattttccttccttactaccttagcagagattctccatgagggctctgcccttgcagcaaacatctgcctggacatccaggagtttccatacatccttggaaatctaggcagagattccccaaccttaattcttgacttctgtgcatccccaggcccaacaccatgtgtaagccaccaaggcttggggcttgcactctctgaagcaatagcctgagctataatctggactcttttagccatagctggagctgaagcagctgggattcagggcaccatgttccaaggctgcatagcagccrgtgaaacaatttttccctcctaggcctccaggcctgtgatgggagaggctgccatgaaggtctctcacatgtcctggagacattttccgcattgtcttggtgattcaatggagaaatctccattgaattcagctcctgttacttatgcaaatttctgcaccaggcttgaatttctccccagaaaatgggtttttcttttctatcacatcatcag

SEQ ID NO: 580024 - DNA, 646 bp, Homo sapiens
  misc_feature 27, 28, 29, 30, 31, 32, 33, 34, 35, 36, 37, 38, 39, 40, 41,42, 43, 44, 45, 46, 47, 48, 49, 50, 51, 52, 53, 54, 55,56, 57, 58, 59, 60, 61, 62, 63, 64, 65, 66, 67, 68, 69,70, 71, 72, 73, 74, 75, 76, 77, 78, 79, 80, 81, 82, 83,84: n = A,T,C or G
  misc_feature 85, 86, 87, 88, 89, 90, 91, 92, 93, 94, 95, 96, 97, 98, 99,100, 101, 102, 103, 104, 105, 106, 107, 108, 109, 110, 111,112, 113, 114, 115, 116, 117, 118, 119, 120, 121, 122, 123,124, 125, 126: n = A,T,C or G
cttaaaggacatttagattgatttccnnnnnnnnnnnnnnnnnnnnnnnnnnnnnnnnnnnnnnnnnnnnnnnnnnnnnnnnnnnnnnnnnnnnnnnnnnnnnnnnnnnnnnnnnnnnnnnnnnnnttatgtgcatgtctaaattagacacatattagcacactgcatttttagaggctatacaaatttgcacttcactggcaatgaaaaataatgactatttacactattttatgactagtgtactcgttttcagtaatcatctccaatctgtttggcaaagataaaaattccttgtttttttttttaattgacaatcctcaatgaaaatagtttagattggtgctgtttgtaaaaagcagttcttctggtttggatttgttttsatcatctacttctataggaatgtgtctgatttaactttgtttctaccttttaaggtaagatttggtaaattatgtacttttagaaaacagatttcattgaggtgatctacttcgtttctatagcattatcaaactaatatgtcatggccaagtgtggtggctcatgcctgcaatccaagaactttggaaggattcttgagcccacgagttcaacaccaaccttggcatcatagcaatacacagtttctacagaaaaataa

SEQ ID NO: 580025 - DNA, 589 bp, Homo sapiens
caaataatacagactgatggggagaaatcaaaagggaaatgtaagggttactaaaattaggaattaaagggagaatatctctgtagagcattgaaatattaaaatattaactgaggataatatagttagctttatatcactaacttcaaaaaaaagctcagaataattcctcctcaatgatacattaaaacatttgacaaaattgartatatccattcatgataaaaaactctcacaacagtaggtattgaagaaaataccatcaaacttttaaaggctatctcaaaaaccgtatggcaaatatcaaccttaatagagaaaaagtgaataactttttcccaagatcataagctagcaaaaaatgctctctctcttcaaggatatccaatcatgcaagtaggtttacttactgtaccatactgtagagaagggtctaggtagtctattaaagttaaaaagaaattatacatattggaaaatataaacgtaaaattttctttatctcagatgacatggctgtttttgtagaaatgaaaagcaacaatcataactgtattcgtctgttctcatgctgcaaataaaaacatac

SEQ ID NO: 580026 - DNA, 415 bp, Homo sapiens
ttctaccacttcaaatatactatttccacycaccttattttcattgtagttgttattgtttgccaccacatgggtgagctggagtgagagtaatcagtattccactgtccttggatacacttggaatagagcctccttactataagtgggggatcgatggaaaaaggaaactgtaattttgtagcaatagttgtcagattatacatttcaacttagaactagggggatgagaaatgatgcttacttgccctattctcatgagatgctcttttcttttataaggagccaaagggagatggagcctaattttttttacttgttttagtggagcttctctcatgcaaatatgtttgagaaaagaggataggtggaagtggaaagaagtgcatcatggctcaagtgaagcagactttaa

SEQ ID NO: 580027 - DNA, 541 bp, Homo sapiens
gataataataatgaataataacaraaacctgactgtatccatagtatctttctaggcagttagctgagtacaaagttatattttgagcaggtaggcaaaaattttaataacatatgactttaatttgattatcaacactaaaagggaaaagttatacctattaatttgctttattaaaacaaattggccaggtgtggtggctcatgcctataaccccagcattttcagaggccaaggcggaaacatcacctgagcctaggaatttgagaccagcctgggaaacatggcaaaccccatctctacaaaaaataacaaaaaatgctgggcatggtggcacacacctgtagtcccagctactgtggaggctgaggagggaggatatttgagcccgagaggttgaggttgcagtgagcagtgatcatgccactgcactctagcctggatgacagagtgagactgtctcaaaataaacaaataaacggaataaactaaactaaaataaaacaagtttcttaatttcaaattctttagtggctttttg

SEQ ID NO: 580028 - DNA, 541 bp, Homo sapiens
gataataataatgaataataacagaaacctgactgtatccatagtatctttctaggcagttagctgagtacaaagttatattttgagcaggtaggcaaaaattttaataacatatgactttaatttgattatcaacactaaaagggaaaagttatacctattaatttgctttattaaaacaaattggccaggtgtggtggctcatgcctataaccccagcattttcagaggccaaggcggaaacatcacctgagcctaggaatttgagaccagcctgggaaacatggcaaaccccatctctacaaaaaataacaaaaaatgctgggcatggtggcacacacctgtagtcccagctactgtggaggctgaggagggargatatttgagcccgagaggttgaggttgcagtgagcagtgatcatgccactgcactctagcctggatgacagagtgagactgtctcaaaataaacaaataaacggaataaactaaactaaaataaaacaagtttcttaatttcaaattctttagtggctttttg

SEQ ID NO: 580029 - DNA, 544 bp, Homo sapiens
catgccactgcactctagcctggatgacagagtgagactgtctcaaaataaacaaataaacggaataaactaaactaaaataaaacaagtttcttaatttcaaattctttagtggctttttggtcatagagattataaatcaaatgtaaatggtatttgatttaggaaattatggtttatatatgtaatgtgctctgagaattaagaaactattaggaagagtaaatctcatcagtatgtagggagaaatattgaacctcagatggctagtagaaaaacaaaactatcaagagccataaaataaaaagaatgtattaactatatatatatatatatacacacacacacacacacacatatatgtgtgtgtgtgtatacaattttacaactaaatatgtatatataggcacacaatttttttcaaattttattttaggttcagggaatagatatacaggtttgttaatgggtcaattgtgtgtcactgggatttgkcatacaaattgttttgttactcaggaagtgagcacagtaaatgataggt

SEQ ID NO: 580030 - DNA, 535 bp, Homo sapiens
agtgcacagaaatacaaggggccctaataaaccattatgaacacctctatgcacacaaactagaaaacctagaagaaacagatagattcctgaaagcataaaacctcccaaaattgaaccaggaagaaacaataccaggacagaccaacaatgagttccaaaattgaattagtaaaaaaaatacctaccaaccagaagaagccctggaccagacggagttacagctgaattttaaccaacatataaaaaaragctgataacaatcttactgaaacttttcccaaaaatccaggaggaattcctcccaaattcattctatgatgctagcttcatttttatattaaaaactggcacagatacaacaaaaagaagactttatgtcaatatccctgatgaatataaatgcaaaacttctcaacaaaatacttggagatcatcaaatctagcaacatatcgaaaagataattctctatggtcaagtaggcttttttcgtgggatgcaaggttggttcaacatacacaaatcaataaatgt

SEQ ID NO: 580031 - DNA, 547 bp, Homo sapiens
cattaccactgaagtgcacagaaatacaaggggccctaataaaccattatgaacacctctatgcacacaaactagaaaacctagaagaaacagatagattcctgaaagcataaaacctcccaaaattgaaccaggaagaaacaataccaggacagaccaacaatgagttccaaaattgaattagtaaaaaaaatacctaccaaccagaagaagccctggaccagacggagttacagctgaattttaaccaacatataaaaaaaagctgataacaatcttactgaaacttttcccaaaaatccaggaggaattcctcccaaattcattctatgatgctagcttcatttttatattaaaaactggcacagatacaacaaaaagaagactttatgtcaatatccctgatgaatataaatgcaaaacttctcaacaaaatacttggagatcatcaaatctagcaacayatcgaaaagataattctctatggtcaagtaggcttttttcgtgggatgcaaggttggttcaacatacacaaatcaataaatgt

SEQ ID NO: 580032 - DNA, 560 bp, Homo sapiens
tttaaaaaacacatttattatgattttgactaaaatcctctgaaattaaattattcaagagttaatatgtgactgggtggtttaaatagcagaaatgtgtgtatcacaattttggagacaagaaattcatgatcaagataccagaaaatttggtttttggtgaggaatcattcctggcttgtagatagctgcatccctctatgtcctcacataaactttccctgtgcatgagcatggagagtgagagcaagatctctgatgtctcttctaaggacatcaggccttactaccctgggcattttttttgcagagaaaaataggttttaattagtatttaattttttaaaaaattattttttccctcgaatctgggctttacrcttatgacctcattttttaaaattttattccttgagaagctccatctacaaatacagccacactagatgtgaggtctttaacatataaatattaggggcatgaaaactttccactctgtagcagtggagatcatgataagacaactgaattccatgacaagagcccattgttacactgaa

SEQ ID NO: 580033 - DNA, 332 bp, Homo sapiens
catctttgaaacacacacaaaaaaacataaagcagggaaaggataacctatttaacaaatggtgctggaatacttggcaaaacacatatataagaatgaaattggatcctcatctctcaccttatacaaaactcaagtcatgatggatcaaagacttgtatctaaggcctraaaccataaaaattatagaagataacatcaaaaaatccttctttacattggtttaggcaaagactttataaccaagaacccaaaagcaaatgcaacaataacaatgataaatagatgagaattaattaaactaaaattcttctgcacagcaaaaaaaatca

SEQ ID NO: 580034 - DNA, 433 bp, Homo sapiens
tttgagaattgtctattcatgtccttttcccactttttgatgggattgtttgtaagtaatttttcttactgatttgtttgaatttgttatagattctgtagtcctttatcagatgtatagattgtgaagattttctcccacttagtgggttgtctgtttactctgctcagggttccttttgyggtgcaaaagctctttagtttaatcaggtgccacctatttatctttgtttttattgcctttgcttcggggttcttggtcatgaaatccttacctaagccaatgtctagaagggattttccaatgttattttcaagaaattttatagtttcaggtcttaggtttaagtccttaatccatcttgagttgttttttgcataaggtgagaggtgaggatctagtttcattctcctacatgtggctagtcaattat

SEQ ID NO: 580035 - DNA, 433 bp, Homo sapiens
tttgagaattgtctattcatgtccttttcccactttttgatgggattgtttgtaagtaatttttcttactgatttgtttgaatttgttatagattctgtagtcctttatcagatgtatagattgtgaagattttctcccacttagtgggttgtctgtttactctgctcagggttccttttgtggtgcaaaagctctttagtttaatcaggtsccacctatttatctttgtttttattgcctttgcttcggggttcttggtcatgaaatccttacctaagccaatgtctagaagggattttccaatgttattttcaagaaattttatagtttcaggtcttaggtttaagtccttaatccatcttgagttgttttttgcataaggtgagaggtgaggatctagtttcattctcctacatgtggctagtcaattat

SEQ ID NO: 580036 - DNA, 544 bp, Homo sapiens
ggctagtcaattattctagcaccatttgtggaaaagggtgtcctttctctactgtatgttttagattgctttgacgaagatcagttggctgtaagtatttgggtttatttccggattctcccttctgtttcattcatctatgtgtctatttttttataccagtaccatgctgttttgatgattgtggcattatagtatattttgaaatcaggtagtgtgatggctccagacttgttctttttgcttagtcttgcttggctatgcaggctcttttttggctccatatgaattttagaatttttttttctaattctgtgaagaatgaaggtggtattctgatggggattgcatttaatttgtagattactttggcagtattgtcattttcacaatattgattctacccgtccatgagcatggaatatgtttccatttgtgtcatctatgattcctttcagtagtgctttgtagttttccttgtagargtcttttgattccttggtgaggtatattcctaagtatttgtgtttttttgcagctattg

SEQ ID NO: 580037 - DNA, 612 bp, Homo sapiens
atatgaatgtaggtaggactgtttttataaaaatatcacaaatattataaaaataaagaaaaataaaatattatttaaatagttaatgttttataataatttctctattcttagttacactgaactcagcccccatctgtttgcaattttctttcctctgccttactyttagtatgttaatgttcataattaattcaaatcctaatgatggtcatatacattcctctagttttaattcttaagtccttttttgtatattgtcatttaagatatcctgttggtgtttcaagtgtaatataatgagctcagcatattccagctcattccactgaccaatccactgtgggaagtcagggacctgaacggaggaccagctggagctgtggcagaggaacataaattgtgaagatttcatggacatttatcagttcccaaataatatttttataatttcttatgcctgtctttactttaatctcttaatcctgttatcttcgtaagctgaggatgtgcatcacctcgggaccactgtgataattgtgttaactgtacaaattgattgtaaaacgtgtgtttgagcaatatgaaatcagtgcaccttgaaaaagaaca

SEQ ID NO: 580038 - DNA, 626 bp, Homo sapiens
tcttagttacactgaactcagcccccatctgtttgcaattttctttcctctgccttactcttagtatgttaatgttcataattaattcaaatcctaatgatggtcatatacattcctctagttttaattcttaagtccttttttgtatattgtcatttaagatatcctgttggtgtttcaagtgtaatataatgagctcagcatattccagctcattccactgaccaatccrctgtgggaagtcagggacctgaacggaggaccagctggagctgtggcagaggaacataaattgtgaagatttcatggacatttatcagttcccaaataatatttttataatttcttatgcctgtctttactttaatctcttaatcctgttatcttcgtaagctgaggatgtgcatcacctcgggaccactgtgataattgtgttaactgtacaaattgattgtaaaacgtgtgtttgagcaatatgaaatcagtgcaccttgaaaaagaacagaataacagcgattttttagggaacaagagaagacaaccataaggtctgactgcctgtggggttgggcaaaaagagccatatttttcttcttgcagagagcctataaatggatgtgcaatta

SEQ ID NO: 580039 - DNA, 482 bp, Homo sapiens
ttggtatagaaagttagaagttggaacttctaagattaaaataaagcagttaaaaaaatacagcaatagacaatccatgctgaaaagtcacttcaactaaaaaagtcactaaaccaaagctctactgaaaaggccgagactgactttgcatttctccacaactaggaaattcactagaattttgtrgcacagcaacaaaattcagaccaatgctgaaggcactgacctcagttctatgtgtttatgtattaaccaaacactaaaactgacctctgttatgacatctcagaaaaaagctaattctggagctgtcctttaaagaccgggtgtggtggctcacacctgtaatcccagcactttgggaggccgaggtgggtggatcacttgaggtcaggagttcaagatcaacctggccaacatggcaaaaccccgtctctacaaaaattacaaaaattagccaggcgtggtggtgcacacctatc

SEQ ID NO: 580040 - DNA, 482 bp, Homo sapiens
ttggtatagaaagttagaagttggaacttctaagattaaaataaagcagttaaaaaaatacagcaatagacaatccatgctgaaaagtcacttcaactaaaaaagtcactaaaccaaagctctactgaaaaggccgagactgactttgcatttctccacaactaggaaattcactagaattttgtagcacagcaacaaaattcagaccaatgctgaaggcactgacctcagytctatgtgtttatgtattaaccaaacactaaaactgacctctgttatgacatctcagaaaaaagctaattctggagctgtcctttaaagaccgggtgtggtggctcacacctgtaatcccagcactttgggaggccgaggtgggtggatcacttgaggtcaggagttcaagatcaacctggccaacatggcaaaaccccgtctctacaaaaattacaaaaattagccaggcgtggtggtgcacacctatc

SEQ ID NO: 580041 - DNA, 552 bp, Homo sapiens
taatttctcctttatctttgaagcatagctttgcgatatatagaattcttggtagacattttcttttctctcagcaccttgaatatgtcatcctattaccttctgttctctgtggtttctgattagaaatcagctgtaatctaaataagaattccttgtacatgatcaatcgcttctctcttgatgctctcaagattatctctttgtaatctaaataagaattccttgtacatgatcagttgcttctctcttgatgctctcaagattatctctttgtatttgggttctggcaggttgattatgaatacttgtggatctctttgartttatcttgcttgcaattcactgagctacttggctgtgtagctaaatgttttctatcgaattggaaaggttttcagccattatttcttcaaatattctttctgcccctttatttctctccagttcttctgagtttcccattattcatatgttgttggtaatcttaacggtgttccacagatctctgaggctctgttcatttttctttgttctgttttctttccgttc

SEQ ID NO: 580042 - DNA, 413 bp, Homo sapiens
ggtaattttatatttttagtagagacagggtttcgccatgttgaccaggctgatctygaactcctgacctcaggagatctgcctgcctcagcctcccaaaatgctgggattacaggcgtgtgccaccgcgcctgaccttgattgcatcttttaagctgcgatcggatgaccctgttacacaagatcttcatttattattaatcttacatctatttcctagcacctatataacataactgtcctgaatgccagcatgtcaccaacaagacaaagctcttgccattgggaaaatacaacctaaacaaaattattatcactgaggaagaaagaaaatattggtctagcaataagaatgttatccctcggcatttctcagggagttagtcaccagatgggaaatccagcccatggcg

SEQ ID NO: 580043 - DNA, 504 bp, Homo sapiens
aacctgcttttgcaagttgatatttcagcaaacttacagaggaccaaggggaatccttggactttacaggtatttccttgatggacagcaaaaagataacttgagttattaatatataattcaaacatatgtcctaacgcatatgacatattctaattaggaatcactaacatatactttgtaaataggawccatagaacccatgcgatttgacatagtgtgtctatttagagtctagtatatttcatcatctcagaatcgagcatgttaagacagaataacagtaatatcaccaaaaatgagttttagaaatataaatatcctcagcgctccccccctcaatattttattggtggtcttgttatttatagtgaactactatcatgtaacaaaagccaccaatgaaaaaggaatacatggatgttgttatcttctcaggaaaggttttcaggtaaggctggtgtctacactgcagttttatttcatgacctcctcatccctgtc

SEQ ID NO: 580044 - DNA, 504 bp, Homo sapiens
aacctgcttttgcaagttgatatttcagcaaacttacagaggaccaaggggaatccttggactttacaggtatttccttgatggacagcaaaaagataacttgagttattaatatataattcaaacatatgtcctaacgcatatgacatattctaattaggaatcactaacatatactttgtaaataggaaccatagaacccatgcgatttgacatagtgtgtctatttagagtctagtatatttcatcatctcagaatcgagcatgttaagacagaataacagtaatatcaccaaaaatgagttttagaaatataaatatcctcagcrctccccccctcaatattttattggtggtcttgttatttatagtgaactactatcatgtaacaaaagccaccaatgaaaaaggaatacatggatgttgttatcttctcaggaaaggttttcaggtaaggctggtgtctacactgcagttttatttcatgacctcctcatccctgtc

SEQ ID NO: 580045 - DNA, 504 bp, Homo sapiens
aacctgcttttgcaagttgatatttcagcaaacttacagaggaccaaggggaatccttggactttacaggtatttccttgatggacagcaaaaagataacttgagttattaatatataattcaaacatatgtcctaacgcatatgacatattctaattaggaatcactaacatatactttgtaaataggaaccatagaacccatgcgatttgacatagtgtgtctatttagagtctagtatatttcatcatctcagaatcgagcatgttaagacagaataacagtaatatcaccaaaaatgagttttagaaatataaatatcctcagcgctccccccctcaatattttattggtggtcttgttatttatagtgaactactatcatgtaacaaaagccaccaatgaaaaaggaatacatggatgttgttatcttctcaggaaaggttttcaggtaaggctggygtctacactgcagttttatttcatgacctcctcatccctgtc

SEQ ID NO: 580046 - DNA, 424 bp, Homo sapiens
gtggataaggaggcaggactggatgtcagaaggagattttattcatagtcttcaaaggtaaagcatagctgctcttttaactactagactaaatgcatactcatagaacacctaatatcstaagtccaagattttatttaggagtgagagattcaactttgcagtaatagaaactgattccaaagtggtcaaagtcataaagctgatttgtagtaaaatcacacaaaatattaatttgccctggatccctagtctagaaaatttttgactgcactatgttgcacttaaacaggaaatattaattggcactctgataggtgaataaattcagggacaagaactgaggtgcagcgattcccctatcactagacagagctaggatgaaattcaaatccagatcataagtgttggaccccatgagctt

SEQ ID NO: 580047 - DNA, 548 bp, Homo sapiens
tattgttagtagacagaattctaatcctgcacttatgttcacttatgaatctctgaaacctgggaacatgttccattacagggctaaagagacattgtgaatgtrattaaattaagacctttggatgtgaagtttatcctggattatctgggtgccccagtgtaatcacaaagttcttaaaagaggtagtcaggtggttcagagtcagagaaagagatgtgatgatataaatagaggtcagagatgaaaggccataagccaaggaatgtaggtggcctcttctggaaaagccaaagcagaatgttccctaaagcatccagaagggacacaacactgccaatacctagattttaggagttatgacctacagaagtgtaagatgaataaatttttgttgtttttaaaccattactttggtgttaatttgttaaagtatatttagtatttaaaaatgccatcaaatgccactttggtgatattgttaaattcaaaaatgatactgtatttaagagcaagaattttgtataaatattagggccatatgtaaa

SEQ ID NO: 580048 - DNA, 623 bp, Homo sapiens
agtctcaatccttgtaatggtcagttcaggtttctatttcttcctgatttaatcaatgaaggttatgtttccaggaatttattcatttcctctagattttctactttatgtgcatagaggtgttcatagtagtttcaaatgatatttgtctttctgtgggtcagttataatgtttccagtttcatttctaactgaatttatttgaatgtgtctcttctattcttggctaatctagctaatggtctatcaatttgattcttttcaaggaagccatttttgtttcatgttttattagtctgttctcacactactacgaaaaaaatacttgagacgggtaatttataaagaaaagaggtttaatttactcacagttccacatggctggggaggcctcaggaaacttacagtcatggcagaagacacctcttcacaggatagcaggagaaagaagtaagcgcaagcagggaaaatgctagatgtttataaaatcacagaasttgtgagactcactcattattatgagaacagcatgggtgaaactatccccaggattcaattatctccacctggtcctgcacttgacacatgggtattattaaaattcaaggtgagattgggtgggg

SEQ ID NO: 580049 - DNA, 575 bp, Homo sapiens
aggtgaattgaataattataggtttctttttgtctttaagcacatgtagatgaggaggtaacaagatctcctaaatcagagggagagcttgtgtagtgactgtattaaaagccttgaattatgggctttcttcccagtagttgagtggggcctttccttccggcagcttcagggcaacaggcatagggatgagatacctccaaagcccaaagcatccatcagtttaagtaggaactgctgcagatttctagtccaagggaggacatgtatctaaacgatgggtagttatgggtactcgtgaaatgacatgggcattttaagtttgaggggaaagctgtgaattctgagtaaggagattgattggactttagatcttcctatgacctgggaggataataagcttaagacaaagacaacaaattctttctgccgggcatcatactgaaaacttggctaatacctcttcccaagggccgtctcatcttcacaggttgggtatttggataagaacctgcttgttcctttactccaggaaaacgtggaggagatgcrcaacagctgaaggtagaaaagga

SEQ ID NO: 580050 - DNA, 566 bp, Homo sapiens
ttcttaattttaatgattagtagactaatttacacacaatggtaatttttaaaaagtcatgtgatctgcaggcacattaacatctgagcctgtggcccacaaataaacctgagatcacctggcttgcaagatacctttaggtctatgggcagaaggtgctctgaattagtaatttagtgcaagagtacttgagcttgctttctgcatttgtagacacatgcttaaaacatcagagtggttagaacccttagaagccatctcttgctttgtatgtgaagaccttgagcawgaatgggccaatgtcaggccgggtgtggtggctcacgcctgtaattccaccactctgagttgggtggattgcttgaggccaggagttcgagactagcctggttaacatggcaaaatcccatctctgctaaaaatacaaaaattagccaggtgtggtggcatgtgcctgtaatcctggcttcttgggaggctgaggcacgagaattacttgaacccaggaggcggaggttgtagtgagctgagatcgcaccactgcaccagcctgtgcgacagagtga

SEQ ID NO: 580051 - DNA, 570 bp, Homo sapiens
cctggctaatttttgtatttttacaaaaattaaaaatttttggttatggttttgtctgagttcagaaggaagcccatgtctctaaggtttgtgagaaaggtcccagggccttcagaatatcttatggagatgtggatgccccatgagcctcctttattaaccttttagacctgcagaaaagcagcttttgatccctgtctggagtcattggttatgatgatgattttctctggaagaatttttggtactatcttcagagctattacttgtacaaagaactgggagtaggggtgaggaggtaatcttggcattctttcatcctgggaagaatggaaatcagttgagaggaggaatcagtgatctctccatcagacaaattgcatgtctatagacaagtatttcmctttaaaggttgtaaaatagcttaaagacattggaaagcccagtgccgccttagaatcagataaccagggaaggatatgctagacaatgtcttgtatttcattgaagatgtccatttatttttggcctatttcagtctttcgcaattttttccttcaatagcctgac

SEQ ID NO: 580052 - DNA, 502 bp, Homo sapiens
agaccctatctcaaaaacaaaatttaaaaaaactgaaataatttgaaattcttaaaaaagaataagttcccagtatcataatgggctcaaagactaattcatacagttggtttgcatttcatactttccatgaggtttagagatttctctgacctaagttcaaaggagaatttgttctgatgttacttgtccaaggaaagttaatgtgaaggtctcctgacacctgcagagatgggcyttgttgctatgacagcctttggaagagggaaggatgcaagaggtggaagcattacacacctgtaaaataatggtccactccttacaagtaccctgagcgatttgatcctatgaagaaaataaaaaacaaggatttgtttctttaactcctcaccaggcgtggcatgagttaggttggagagttacaggcagagcccaggtgcagtctgtttggcctctgtactcagcaggtattgataccaaatctacgtcggccaagacaggc

SEQ ID NO: 580053 - DNA, 502 bp, Homo sapiens
agaccctatctcaaaaacaaaatttaaaaaaactgaaataatttgaaattcttaaaaaagaataagttcccagtatcataatgggctcaaagactaattcatacagttggtttgcatttcatactttccatgaggtttagagatttctctgacctaagttcaaaggagaatttgttctgatgttacttgtccaaggaaagttaatgtgaaggtctcctgacacctgcagagatgggccttgttgctatgacagcctttggaagagggaaggatgcaagaggtggaagcattacacacctgtaaaataatggtccactccttacaagtaccctgagcgatttgatcctatgaagaaaataaaaaacaaggatttgtttctttaactcctcaccaggcgtggcatgagttagsttggagagttacaggcagagcccaggtgcagtctgtttggcctctgtactcagcaggtattgataccaaatctacgtcggccaagacaggc

SEQ ID NO: 580054 - DNA, 571 bp, Homo sapiens
ccagcacaccaacatggcacatgtttacatatgtaacaaacctgcatgttgtacacatgtaccctaggacttaaagtataataaaattaataaataaattaattaatttttaaaatctccaaaaaaggactctaaaaaaatgtattactaaatactttttgaagtattttaagggttttaaaatactttaaaaaagtattttaaaggttactaaaactagtaaccatcattttgttaatatcaaatatccartgttcaaaatctcataaatgtcattgttgatttttatggatattttatatgaatcaggctcaaaataaagaccacttattgctattggcaaaaacaaaaaccacaaaacaacagaaggaaaagaccccctcctcctctctatagccaaaagtggaaaaatgaagcaagaaagtcttctgtgttaattaagaagatgacgctagaaaacatctagttttagtatttcttctatccgtgagattctgtgtttctcagagttacttcctcgtaggcagctgcaggcatttttggctgtggcatgcatttctgccacgtagaa

SEQ ID NO: 580055 - DNA, 573 bp, Homo sapiens
ttggtaagttgcatccctattttcaataatttcaaagaattttttgatttatgccttaaatttgatattcacccaggagttattcaggagtaagttgtttaatttccatgtatttatgcagttttgagagatgttcttgataatatttttatgtttattgcactgtgttccgagagtgtgcttggtatgatttcaactttacaaaaaaaattttaacacttgctttatgactgagcgtgtagttaatcttaraatatgttctgtgtggtcaggtgtggtggctcatacctgtaatcccagcactttgggagaccaaggcaggcagatcttttgaggtcaggagtttgagaccagcctggccagtgtggtgaaacccggtctctagtaaaaatacaaacaacaacaacaacaacaaacaaacaaacaaacaaacaataaaacaaaattagccagccgtgatgatgggtgtcataatcccagagatactcaggaggctgaggcagaagaatcacttgaacctgggaagcggaggttgcagtgagccaagatcgcaccattgcactccagcctgga

SEQ ID NO: 580056 - DNA, 620 bp, Homo sapiens
agagaagtgacagggaagctacaggttacgacagatttgtgaactcagccaagcacagtggtggcagggcctagctgctacaaagaagacatgttttagacaaatactcatgtgtatgggcaaaaaactcaaggactgtatttgtgactaattgtataacaggttattttagtttctgttctgtggaaagtgtaaagcattccaacaaagggttttaatgtagatttttttttttgcacccatgctgttgattgctaaatgtaayagtctgatcgtgatgctgaataaatgtctttttttttaatgtgctgtgtaaagttagtctactctgaagccatcttggtaaatttccccaacagtgtgaagttagaattccttcagggtgatgccaggttctatttggaatttatatacaacctgcttgggtggagaagccattgtctttggaaaccttggtgtagttgaactgatagttactgttgtgacctgaagttcaccattaaaagggattacccaagcaaaatcatggaatggttataaaagtgattgttggcacatcctatgcaatatatctaaattgaataatggtaccagataaaattatagatgggaatgaagct

SEQ ID NO: 580057 - DNA, 620 bp, Homo sapiens
agagaagtgacagggaagctacaggttacgacagatttgtgaactcagccaagcacagtggtggcagggcctagctgctacaaagaagacatgttttagacaaatactcatgtgtatgggcaaaaaactcaaggactgtatttgtgactaattgtataacaggttattttagtttctgttctgtggaaagtgtaaagcattccaacaaagggttttaatgtagatttttttttttgcacccatgctgttgattgctaaatgtaatagtctgatcgtgaygctgaataaatgtctttttttttaatgtgctgtgtaaagttagtctactctgaagccatcttggtaaatttccccaacagtgtgaagttagaattccttcagggtgatgccaggttctatttggaatttatatacaacctgcttgggtggagaagccattgtctttggaaaccttggtgtagttgaactgatagttactgttgtgacctgaagttcaccattaaaagggattacccaagcaaaatcatggaatggttataaaagtgattgttggcacatcctatgcaatatatctaaattgaataatggtaccagataaaattatagatgggaatgaagct

SEQ ID NO: 580058 - DNA, 620 bp, Homo sapiens
agagaagtgacagggaagctacaggttacgacagatttgtgaactcagccaagcacagtggtggcagggcctagctgctacaaagaagacatgttttagacaaatactcatgtgtatgggcaaaaaactcaaggactgtatttgtgactaattgtataacaggttattttagtttctgttctgtggaaagtgtaaagcattccaacaaagggttttaatgtagatttttttttttgcacccatgctgttgattgctaaatgtaatagtctgatcgtgatgctgaataaatgtctttttttttaatgtgctgtgtaaagttagtctactctkaagccatcttggtaaatttccccaacagtgtgaagttagaattccttcagggtgatgccaggttctatttggaatttatatacaacctgcttgggtggagaagccattgtctttggaaaccttggtgtagttgaactgatagttactgttgtgacctgaagttcaccattaaaagggattacccaagcaaaatcatggaatggttataaaagtgattgttggcacatcctatgcaatatatctaaattgaataatggtaccagataaaattatagatgggaatgaagct

SEQ ID NO: 580059 - DNA, 620 bp, Homo sapiens
agagaagtgacagggaagctacaggttacgacagatttgtgaactcagccaagcacagtggtggcagggcctagctgctacaaagaagacatgttttagacaaatactcatgtgtatgggcaaaaaactcaaggactgtatttgtgactaattgtataacaggttattttagtttctgttctgtggaaagtgtaaagcattccaacaaagggttttaatgtagatttttttttttgcacccatgctgttgattgctaaatgtaatagtctgatcgtgatgctgaataaatgtctttttttttaatgtgctgtgtaaagttagtctactctgaagccatcttggtaaatttccccaacagtgtgaagttagaattccttcagggtgatgccaggttctatttggaatttatatacaacctgcttgggtggagaagccattgtcttyggaaaccttggtgtagttgaactgatagttactgttgtgacctgaagttcaccattaaaagggattacccaagcaaaatcatggaatggttataaaagtgattgttggcacatcctatgcaatatatctaaattgaataatggtaccagataaaattatagatgggaatgaagct

SEQ ID NO: 580060 - DNA, 483 bp, Homo sapiens
gtcatacagttttttgttgttgttgttgggaatccaatttcatagacacgacttgccaattgttattcatcacaatgcgtgtgagatttaaacaataaatatttcctctttgcttgcccacctgcttatccaccacagcttatctatgcaatgtttttgaaatgtgaaccatattcctttctaataagagccagactagttttcattttccagtagtggaaacttcacagtgaggattttctgcctggttggtctagtctgattattattattattattattwttttttttgagagagagtctacctctgtcaccctggctggagtgcagtggcatggtctcagctcagtgcaacctctgcctcccgggttcaagtaatttttgtgccttagcctccccagtacctgggattacaggcgtgtgccaccatgcccagctaatttttgtatttttagtagagatggtcttctccatgtttcccag

SEQ ID NO: 580061 - DNA, 461 bp, Homo sapiens
caaagaatttgaatagaaatttcttcagatagatatacaaatggccaataaacacatgaaaaaacacatcactgatcattagggaaatggaaatcaaagccacagtgacatgccacctgatatgattcagctgtgtccccacccaagtctcatcttgaattgtaactcccacaattcccatgtgtcatgagaggaacccaatgggaggtgattgaattatgggggcagrtctttcctgtcctgttcttgtgatagtgaatcagtctcaagagatctgaaaatgggagtttccctgcacaagttctctctttacctgctgccatccatgtaagatgtgacttgctcctccttgccttctgccatgattgtgaggcctccccagccacgtggaactgttagtccattataactctttttctttcagtcttggttgtgtctttatcagcagtgtgaaagcagac

SEQ ID NO: 580062 - DNA, 461 bp, Homo sapiens
caaagaatttgaatagaaatttcttcagatagatatacaaatggccaataaacacatgaaaaaacacatcactgatcattagggaaatggaaatcaaagccacagtgacatgccacctgatatgattcagctgtgtccccacccaagtctcatcttgaattgtaactcccacaattcccatgtgtcatgagaggaacccaatgggaggtgattgaattatgggggcaggtctttcctgtcctgttcttgtgatagtgaatcagtctcaagagatctgaaaatgggagtttccctgcacaagttctctctttacctgctgccatccatgtaagatgtgacttgctcctccttgccttctgccatgattgtgaggcctccccagccacgtggaactgttagtmcattataactctttttctttcagtcttggttgtgtctttatcagcagtgtgaaagcagac

SEQ ID NO: 580063 - DNA, 438 bp, Homo sapiens
gtattattagcactgtactttaggaactctgttgtacagcagatctctagaacgtattcattgtgcataactgaaactttacacccaytgaagaccttcacattcccccctccactcagcccctggcaaccaccattctaatctctgcttctttacttgtcctctgttactatcttattttacttagtataatgtcctccaggttcattcatgctgtgacaaatattaggatttccttcttttttaaggctaatactccatcgtgtatgtataccatcttttcttcattcattcgtctccccatggacattttgtgttgtctccatatactggctcttttgagccaatgaacataggaacgcagatacgtctttcaggtcctgatttcaattcttttggatatatacccagaagtgggattgctggatcatatggtgg

SEQ ID NO: 580064 - DNA, 438 bp, Homo sapiens
gtattattagcactgtactttaggaactctgttgtacagcagatctctagaacgtattcattgtgcataactgaaactttacacccattgaagaccttcacattcccccctccactcagcccctggcaaccaccattctaatctctgcttctttacttgtcctctgttactatcttattttacttagtataatgtcctccaggttcattcatgctgtgacaaatattaggatttccttcttttttaaggctaatactccatcgtgtatgtataccatcttttcttcattcattcgtctccccatggacattttgtgttgtctccatatactggctcytttgagccaatgaacataggaacgcagatacgtctttcaggtcctgatttcaattcttttggatatatacccagaagtgggattgctggatcatatggtgg

SEQ ID NO: 580065 - DNA, 438 bp, Homo sapiens
gtattattagcactgtactttaggaactctgttgtacagcagatctctagaacgtattcattgtgcataactgaaactttacacccattgaagaccttcacattcccccctccactcagcccctggcaaccaccattctaatctctgcttctttacttgtcctctgttactatcttattttacttagtataatgtcctccaggttcattcatgctgtgacaaatattaggatttccttcttttttaaggctaatactccatcgtgtatgtataccatcttttcttcattcattcgtctccccatggacattttgtgttgtctccatatactggctcttttgasccaatgaacataggaacgcagatacgtctttcaggtcctgatttcaattcttttggatatatacccagaagtgggattgctggatcatatggtgg

SEQ ID NO: 580066 - DNA, 438 bp, Homo sapiens
gtattattagcactgtactttaggaactctgttgtacagcagatctctagaacgtattcattgtgcataactgaaactttacacccattgaagaccttcacattcccccctccactcagcccctggcaaccaccattctaatctctgcttctttacttgtcctctgttactatcttattttacttagtataatgtcctccaggttcattcatgctgtgacaaatattaggatttccttcttttttaaggctaatactccatcgtgtatgtataccatcttttcttcattcattcgtctccccatggacattttgtgttgtctccatatactggctcttttgagcmaatgaacataggaacgcagatacgtctttcaggtcctgatttcaattcttttggatatatacccagaagtgggattgctggatcatatggtgg

SEQ ID NO: 580067 - DNA, 577 bp, Homo sapiens
agaggagaggaagaaggcataatataatggttcaaaagagtgggagagagaatgaactgaggatgcatagcaggattgctgggtggcattaaggacctacttgaggttaatgactgtagcaatgactgttgattgtcaatcaaamcactttatcactttcttccattgtcatagagttttaactgggcacttagttacccagtcagttttactgtcatggcttcctctgtagcttcacgtggccattttaccaagtttttaaaagcaaactatgaaaagagatgtgtaccccaaccacatttgggccatatcactttggatatgaactcctcctggttctttcctcctgtaccttattaaatagggtatataagattatatatatatatatatatatctttaaagcagccagcccccaaacatatgttttatatatatttatatatctcacacagataatatattacataatttaaactatatatctattaaaatatataaatatatgtatcttgaaaatataacatataagtatatatatcatatatatgtgtgtgtgtgtatatatatatatatt

SEQ ID NO: 580068 - DNA, 527 bp, Homo sapiens
agtcaaagaacatatcaggcaaacttattaaacacmtgccagaggctgtagaaaaatatgtaggcttttatatgcaagttagagatttagatattggatctgtccaacctagaaaaagtattgagaggtatgaaaataaatagcatcctgtgcctcaaattcaactggactgaagttcacctcctcaaaacttcccaggcactgaactaatagagaggaaggtcagaaggggtgagcctctctgtgagtgaggggccaaggtgctgtttggtcatttcattgccagtggcctagtcctgtcaaagagggcctgaccaccatttcttgttcctttgggaaaccaggtagaggtctttccccaaagccatctagaaatagttgccaaggcagaaatcctgtgtattctacaaagttggcatgcctcttaatctgccattggtatgggggaatggacattatgaggaggattatgactttagaagaaggagaagagatccacagtaaaatggtccagctgtttctgaatt

SEQ ID NO: 580069 - DNA, 527 bp, Homo sapiens
agtcaaagaacatatcaggcaaacttattaaacacatgccagaggctgtagaaaaatatgtaggcttttatatgcaagttagagatttagatattggatctgtccaacctagaaaaagtattgagaggtatgaaaataaatagcatcctgtgcctcaaattcaactggactgaarttcacctcctcaaaacttcccaggcactgaactaatagagaggaaggtcagaaggggtgagcctctctgtgagtgaggggccaaggtgctgtttggtcatttcattgccagtggcctagtcctgtcaaagagggcctgaccaccatttcttgttcctttgggaaaccaggtagaggtctttccccaaagccatctagaaatagttgccaaggcagaaatcctgtgtattctacaaagttggcatgcctcttaatctgccattggtatgggggaatggacattatgaggaggattatgactttagaagaaggagaagagatccacagtaaaatggtccagctgtttctgaatt

SEQ ID NO: 580070 - DNA, 525 bp, Homo sapiens
aggcgcccaccaccatgcccagctaatttttgtatttttagtagagacagggtttcaccatattgcccgggctggtcttgaactccagacctcaggtgatccacctagagcggcctcccaaagtgctgggattacaggtgtgagccactgtgccyggcctggaattgattttgtattgccttttagatttcatggcttttttttttattgttttgaagtagtttatatttggcttttacagtattttataatctgtagctttactttctttgggaaggacaagtcaataattagtttttactttttatatgactatagcttttttttttttttttttttggtttctaacatagatctatgatcgaattctgtcaatttcctctcaagagggtgagacgattgaattggataaacctgtcatggcagagggcaatgtggaagtttggcttaattctcttttggaagaatctcagtcctcattgcatcttgtgattcgccaggcagccgcaaatattcaagaaacag

SEQ ID NO: 580071 - DNA, 525 bp, Homo sapiens
aggcgcccaccaccatgcccagctaatttttgtatttttagtagagacagggtttcaccatattgcccgggctggtcttgaactccagacctcaggtgatccacctagagcggcctcccaaagtgctgggattacaggtgtgagccactgtgcctggcctggaattgattttgtattgccttttagatttcatggcttttttttttattgttttgaagtagtttatatttggcttttacagtattttataatctgtagctttactttctttgggaaggacaagtcaataattagtttttactttttatatgacwatagcttttttttttttttttttttggtttctaacatagatctatgatcgaattctgtcaatttcctctcaagagggtgagacgattgaattggataaacctgtcatggcagagggcaatgtggaagtttggcttaattctcttttggaagaatctcagtcctcattgcatcttgtgattcgccaggcagccgcaaatattcaagaaacag

SEQ ID NO: 580072 - DNA, 605 bp, Homo sapiens
acttagtcactaccacaggaacactgtggggaagccgccaccttgattcaattatctcccrccaggtccccaccacaacatgtgggaattatgggagtacaattcaagatcagatttgagttgagacacagccaaaccatatcacctcattttgggggtttttcttcccttcaatttaaatttgaacacttttcaaatgtggaggatattctcatcaacgacgatgccctgtatgccaagggtagacattgttctgacatttctgttctccttcctgtcatacactattaggtcagaccaactaacaggaatcctcaaagtcccctttagatagatatctcctttaaaagccagagcaagcacggtctcggctgtgtgttgacttttctgccctggtgtcctcctacttcctaaaggcacaccccacggttcccaccccgtctgatgcagcccaacactgttctatttcagaaatgccctcattccttcaaccagtgtgtctccagtctgatcttgagacacctatatcttccaaaataataattaggccttattcatatattgaataaataggaaaaatagaacatttacatgttgaaagatac

SEQ ID NO: 580073 - DNA, 605 bp, Homo sapiens
acttagtcactaccacaggaacactgtggggaagccgccaccttgattcaattatctcccaccaggtccccaccacaacatgtgggaattatgggagtacaattcaagatcagatttgagttgagacacagccaaaccatatcacctcattttgggggtttttyttcccttcaatttaaatttgaacacttttcaaatgtggaggatattctcatcaacgacgatgccctgtatgccaagggtagacattgttctgacatttctgttctccttcctgtcatacactattaggtcagaccaactaacaggaatcctcaaagtcccctttagatagatatctcctttaaaagccagagcaagcacggtctcggctgtgtgttgacttttctgccctggtgtcctcctacttcctaaaggcacaccccacggttcccaccccgtctgatgcagcccaacactgttctatttcagaaatgccctcattccttcaaccagtgtgtctccagtctgatcttgagacacctatatcttccaaaataataattaggccttattcatatattgaataaataggaaaaatagaacatttacatgttgaaagatac

SEQ ID NO: 580074 - DNA, 605 bp, Homo sapiens
acttagtcactaccacaggaacactgtggggaagccgccaccttgattcaattatctcccaccaggtccccaccacaacatgtgggaattatgggagtacaattcaagatcagatttgagttgagacacagccaaaccatatcacctcattttgggggtttttcttcccttcaatttaaatttgaacacttttcaaatgtggaggatattctcatcaaygacgatgccctgtatgccaagggtagacattgttctgacatttctgttctccttcctgtcatacactattaggtcagaccaactaacaggaatcctcaaagtcccctttagatagatatctcctttaaaagccagagcaagcacggtctcggctgtgtgttgacttttctgccctggtgtcctcctacttcctaaaggcacaccccacggttcccaccccgtctgatgcagcccaacactgttctatttcagaaatgccctcattccttcaaccagtgtgtctccagtctgatcttgagacacctatatcttccaaaataataattaggccttattcatatattgaataaataggaaaaatagaacatttacatgttgaaagatac

SEQ ID NO: 580075 - DNA, 601 bp, Homo sapiens
ccaagattgtgccactgcactccagcctgggtgacagagcgagactctgtctcaggggaaaaaaaaaagtggtttcgtttgctataccaacgtgtaaaatgtagaaatttccagtgtttaaaaattctgattggctattcctttcaaggtattacagtgtgggaggtaaaggatctaatgtagttatctaggagtttaagtttgaaaaagaattcaacrgtgttgaattccttggaaatgggtacgctcagtttctttctttttttttttttttttttttttgagacggagtctcactctgctacccatgctggagtgcagggccatgatctcggctcactgtagcctccgcctcccaggttgcagcgattctcctgcctcagcctcccgggtagctgggattacaggcaggtgccaccgtgcctggctaatttttgtattttcagtagagacggggtttcaccatgttggccaggctggtcttgaactcttgtcctcaggtgatctgcccaccacggcttctcacttgatcttagccaaaaggccgagaagccatccaccacggcttctcaaagtgctaggattacaggcgtgagccacc

SEQ ID NO: 580076 - DNA, 618 bp, Homo sapiens
cagctcactgcaagctcggcctcccaggttcacgccattctcctgcctcagcctcccaagtagctgggactacaggtgcccgctgccacccccggctaattttttgtattttttagtagagacggggttcaccgtattagccgggatggtctcaatctcctgaccttgtgatccgcctgccttggcctcccaaagtgctgagattacaggcatgagccactgcgcttggccaattaaatgttaattatgattacataagggtttttagagccaataaaaaaaattcaattttcaaacatttggagtgaaaggcgagttggtcctaggcacttgaccaataatttcaaatggataaaacatcctttcctcacagttaactaaactattgacagatatactagaagatcttcaaaaagtcagatacaagaaaatstaccttccaacacccctcaaagagcaaaaaggaaatgaagggacctgagatatcagagaagatagcaaaaccttatttatttacttatctattttttagagacagaatcttgctctgtctcccaggctggagagcagtggtgcaatcatagcttactgtaataaccttgaactcctgggctcacg

SEQ ID NO: 580077 - DNA, 577 bp, Homo sapiens
acattctctttagacactcttctgccgatggrcagttgggttgcttctatgtcttgctatcatgagtaatgctgctatgaacatggacatgcaatctctcttcaagatctggcattcaattcttctgtatgtatgcagaagtaggattactgagacatatggcaatctattttcaattttttaaagaaccaacaccatttccatagcaactgtgtccattttcatttccaccagcagggcacaagtgttatacttttccaatttctctacatcctcaccaacacttgttgttgttttctttccctttctctctctctctctctggcttatttcacttaccataatgttcttaaggttcatccatgttgtagcttgtgtcagaatctcctttctaaaacctcatccaggccttaagttcaaacccaggctgagagagtaccttggagaggggaaggcaaacactgaatgttgggccctgggtttggattttctcccactagggagggtgtctgagagagttagagcggggtagagaaaaataaaaactgctgagaactaactcagctgcagaaggagc

SEQ ID NO: 580078 - DNA, 494 bp, Homo sapiens
atgtaatgacaaggtaaggatggcgagatcagtggctttgctgctctccaaggtcacctgctgcctcctttgtccacacagctgtctttctcttcttgttttgcagcagccactatcaccactaccttcttggctgggctggtgggtttgggaaggtggaggtcatakcacactccataataaaggctcttgactgtgcttagaatgggttggagtgattttccatacatagcacctggaatggacaagccagtagccttctgcccctgggtccccacacctgggcccagaacagctgggtataggaatgaaaatgggatgggcagcctctaagccaaactcctggagaacattcctctaccaggctctggccccagctggagagggcagttaccaggcaggacttcatgtcaaaatgaaaagggtcttatgcaggtgttagccttggttcctgctgttcagctcacccaagttcccaacccatacaaatgaag

SEQ ID NO: 580079 - DNA, 494 bp, Homo sapiens
atgtaatgacaaggtaaggatggcgagatcagtggctttgctgctctccaaggtcacctgctgcctcctttgtccacacagctgtctttctcttcttgttttgcagcagccactatcaccactaccttcttggctgggctggtgggtttgggaaggtggaggtcatagcacactccataataaaggctcttgactgtgcttagaatgggttggagtgattttccatacatagcacctggaatggacaagccagtagccttctgcccctgggtccccacacctgggcccagaacagctgggtatakgaatgaaaatgggatgggcagcctctaagccaaactcctggagaacattcctctaccaggctctggccccagctggagagggcagttaccaggcaggacttcatgtcaaaatgaaaagggtcttatgcaggtgttagccttggttcctgctgttcagctcacccaagttcccaacccatacaaatgaag

SEQ ID NO: 580080 - DNA, 572 bp, Homo sapiens
ccagacctgtgattggaggggctgccatgaaggtctcttacrtgcctcagaaacattttccccattgtcttggcaattagcatttggctcctcattacataagcaaatttttgcagccagattgaatttctcctcagaaatagggttttcttttctattgcattgtcaggctgcaaattgtccgaacttttatgctctactttctcttgaatgctttgctgcttataaatttcttccacaagataccctaagccatctttctcaaagtcaaaattccatagaactgtaaggcaggggccaaatgccaccagtctctttacatagcaggaatgacctttactccagttcccaacaagtttctcatctccatctgagaccacctcagcctggactttattgtccatatcagtataatcatttggtcaaagccactcaacaagtctacaggaatttccaaactttcccacatctttctgtcttctaagtcctccaagtgtctaggaacttccaaactttcccacatttttctgtcttcttctaaggtaacaaaactattccaacctctgcctgtt

SEQ ID NO: 580081 - DNA, 572 bp, Homo sapiens
ccagacctgtgattggaggggctgccatgaaggtctcttacgtgcctcagaaacattttccccattgtcttggcaattagcatttggctcctcattacataagcaaatttttgcagccagattgaatttctcctcagaaatagggttttcttttctattgcattgtcaggctgcaaattgtcygaacttttatgctctactttctcttgaatgctttgctgcttataaatttcttccacaagataccctaagccatctttctcaaagtcaaaattccatagaactgtaaggcaggggccaaatgccaccagtctctttacatagcaggaatgacctttactccagttcccaacaagtttctcatctccatctgagaccacctcagcctggactttattgtccatatcagtataatcatttggtcaaagccactcaacaagtctacaggaatttccaaactttcccacatctttctgtcttctaagtcctccaagtgtctaggaacttccaaactttcccacatttttctgtcttcttctaaggtaacaaaactattccaacctctgcctgtt

SEQ ID NO: 580082 - DNA, 572 bp, Homo sapiens
ccagacctgtgattggaggggctgccatgaaggtctcttacgtgcctcagaaacattttccccattgtcttggcaattagcatttggctcctcattacataagcaaatttttgcagccagattgaatttctcctcagaaatagggttttcttttctattgcattgtcaggctgcaaattgtccgaacttttatgctctactttctcttgaatgctttgctgcttataartttcttccacaagataccctaagccatctttctcaaagtcaaaattccatagaactgtaaggcaggggccaaatgccaccagtctctttacatagcaggaatgacctttactccagttcccaacaagtttctcatctccatctgagaccacctcagcctggactttattgtccatatcagtataatcatttggtcaaagccactcaacaagtctacaggaatttccaaactttcccacatctttctgtcttctaagtcctccaagtgtctaggaacttccaaactttcccacatttttctgtcttcttctaaggtaacaaaactattccaacctctgcctgtt

SEQ ID NO: 580083 - DNA, 572 bp, Homo sapiens
ccagacctgtgattggaggggctgccatgaaggtctcttacgtgcctcagaaacattttccccattgtcttggcaattagcatttggctcctcattacataagcaaatttttgcagccagattgaatttctcctcagaaatagggttttcttttctattgcattgtcaggctgcaaattgtccgaacttttatgctctactttctcttgaatgctttgctgcttataaatttcttccacaagataccctaagccatctttctcaaagtcaaaattccatagaactgtaaggcaggggccaaatgccaccagtctctttacatagcaggaatgacctttactccagttcccaacaagtttctcatctccatctgagaccacctcagmctggactttattgtccatatcagtataatcatttggtcaaagccactcaacaagtctacaggaatttccaaactttcccacatctttctgtcttctaagtcctccaagtgtctaggaacttccaaactttcccacatttttctgtcttcttctaaggtaacaaaactattccaacctctgcctgtt

SEQ ID NO: 580084 - DNA, 531 bp, Homo sapiens
caggctcaagtgatcctcctacctcagcttccagagtagctgggaccccagatgtgcaccacatttcctggttgttaaaaatatatataagtatgtattttgtagagacagggtctctctatgttgcccaggctactctcgaactactgggcttaagtgattctcctgcctctgcccctcaaagtgttgggattacacacatgagtcatcataccaagccttgctaatttattaatcatattattgttttatatcatcaaaacattgagttgttgtaaataaaatagaagtaatgccttaaagtagttttcttttcttcttttgaaaaatattattttttcatgtgattaargaatattagtgtttatttctgtgtatcctgtatgcatttataattctctctttgcacaatttatatgtcttgtctttttaaatgttgttgttttcttagtttgtataagctctttctatatcaggaatattacatattgtttgtgatataaaaattataacttttccaatttgactttc

SEQ ID NO: 580085 - DNA, 563 bp, Homo sapiens
ccatattttataacagacagcktattacatgtcacactatatgaatgaccttgtgcttctctctcaaagtggaaagtctatatagcagttattacttggtgaagtccctggaattgcttgcctctatccacagtttgccagagacctttgaatttctagggttttttcaccatattttaaatgtatctcagggaattaggctgttgtgtgtcagtattaggtttagccacagcacactggattactagaacacctatttcagcctctgctgcctagaaattccaaatgaaaaattccttaaacctactttatttctcctagtacattttcatggtgatctagagacttagcattccttgtattagccaggcttctataaaatattattcttggccaggtgtggtcactcacacctgtaattccagcactttgggaggctgaagcaggtggacaccttgagcccatgagtttgagaccagactgggtaacatggagaaaatccatctctacaacaaaaaaacaaaaattaagagttaatttgtttatattacattagttttaat

SEQ ID NO: 580086 - DNA, 538 bp, Homo sapiens
cttggcatctttgtcaaaaatgaattcactgtgggtgtataaatttgtttctgtgttctctattctgttccattggtctatgtgtctgtttttatatcagtaccaagttgttttggttactatagctctgtagtaccatttgaagtcaggtaatgtaattcctccagttttgtcctttttgcttaggacagctttggctatactgggtcttttgtggttccacataaattttaacattttttctaattctgtgaagaatgtcattggtattttgataggcattgcattgaatctgcagattgctttggtaatatgtatattttaataatattggttttttagttcattagtatagatgattttttacttttttgtttcctcttcaatttctttcatcatggatttatggtttttgttaaaaagacctttcacttattttgttaatttctaggtatttaattttatgtgtggctattgcaaatgaaattacttttttattcttttttcacattgttcamtgttggcatatagaaatggt

SEQ ID NO: 580087 - DNA, 556 bp, Homo sapiens
aaattagacacaaagttggtaaaattacaggaaaacaaaaccatcacgccttaccagttttacagaagtataaaaaatgcccttaatctgtactgtaaacaaagccatattctgttagagaatattagaaacatctgggaagctttttaagctgccaataagtatgtcttacctctgatattctsatttagttggaaacaggtgaggtctgagtagaaggagttttaaaacctctccaggtgattttaagatgcaagcaagtttgagaaccactgcgttagaaagagacatggacttttacatgggttttcaaaaatttgccctagcatcttgttactcaaaatgtggcttatgattcaggagcattgataccacctgagactatttaaaattgagtatctgggggccccaccccagatgcactgaatcagaatctacaatctgaaaatatttccaggtgattcaggagcacattaaacttcgagaggcacttctgtaacatgatattgaaatgactgtaatcatctttttgcctcatttccaagttttaggaaac

SEQ ID NO: 580088 - DNA, 574 bp, Homo sapiens
atggagcacaccagctttttatccttaaactaactgtttggattttaggcttcctgatactttaagtgtgttgagtatattcttacaagtataatttaagtcatatttctctctctgcctagtttctccaaaatctgtaaacyatctatgaatattctaaattcatggcaatgtgtttgtctgcataccatcaagcagggtcaccagggccactcagggagagataacccagaagcctggcatgccagcaaaagggtaagaatttcttaccgggcagtctctggcctctttctgtctgtgcagactggttaatcacctctttgaagttttaaattaattggtttaataataataagagcttaaatcaggtattttgtcagaaaagtagaaagtgttatgcgttttagttcatgtgactttagcaatatttgggaaataaggacggttttcaagattattagtaaaatacaaatttcttcacaatgtaaacgtggtctaaattatgttcaaatattaggtttgctaaatgctttaaggtcataaactgcttctttggcttttgaaaattgtttaa

SEQ ID NO: 580089 - DNA, 513 bp, Homo sapiens
tacagaccctttgaaggaagcagattgcttctgcaggacccaggagacaacccaaatactgtgctgctatccatagctgacagactggaaaacagttcacatcacaggactctgcgcagacacccaccaatcccaccctggaaaatggtagctccactgggtggctagatccagaagagaaataacaatcactagagtttggctctcaggaagccacatccctaggaaaagggggagagyactacatcaagggagcaccccatgggatgaaagaatccaaacatcaacctttgagccccagacctttcctttgatatagcctatgcaaatgagaaggaaccagaaaaaaaaattctggtaatatgacaaaacaaggttctttaacaccctcaaaaaaaaaatcacactatttcggctgggtgtggtggctcatgcctgtaatcccagcactttgggaggccgaggcgggtggatcatgaggtcaggagatcaagaccatcctggctaacatgg

SEQ ID NO: 580090 - DNA, 513 bp, Homo sapiens
tacagaccctttgaaggaagcagattgcttctgcaggacccaggagacaacccaaatactgtgctgctatccatagctgacagactggaaaacagttcacatcacaggactctgcgcagacacccaccaatcccaccctggaaaatggtagctccactgggtggctagatccagaagagaaataacaatcactagagtttggctctcaggaagccacatccctaggaaaagggggagagcactacatcaagggagcaccccatgggatgaaagaatccaaacatcaacctttgagccccagacctttcctttgatatagcctatscaaatgagaaggaaccagaaaaaaaaattctggtaatatgacaaaacaaggttctttaacaccctcaaaaaaaaaatcacactatttcggctgggtgtggtggctcatgcctgtaatcccagcactttgggaggccgaggcgggtggatcatgaggtcaggagatcaagaccatcctggctaacatgg

SEQ ID NO: 580091 - DNA, 639 bp, Homo sapiens
gtttgtttagtgactttccttgaatgcttcactcagctccctattcactgtcatattgtgtctggaattggtgggttcttggtctcactgacttcaagaatgaagccacacaccctcgcagtgagtgttacagttcttaaagrtggtgtgcctggagtttgttccttctgatgttcggacgtgttcagagtttcttccttctggtgggttcgtggtctctctggcttcaggagtgaaactgcagacctttgcggtgagtgttacagctcgtaaaggcagtgcggaaccacagagtgagcagcagcaagatttattgcaaagatcaaaagaacaaagcttctgaggtgtggaaggggaccccaggcgttgctgctgctggctcaggcagcctgttttcattcccttatctgaccccacccacatcctgctgattggcccattttacagagaggcgattggtccgttttacagagagctgattggtctgttttgacagggtgctgattggtgcatttacaatgcctgagctagacacagagtgctgattggtgtatttacaatcctctagctagacctaaaagttctccaagtccccactagattaactagacacagagtactgattggtgtgtttacaaa

SEQ ID NO: 580092 - DNA, 639 bp, Homo sapiens
gtttgtttagtgactttccttgaatgcttcactcagctccctattcactgtcatattgtgtctggaattggtgggttcttggtctcactgacttcaagaatgaagccacacaccctcgcagtgagtgttacagttcttaaagatggtgtgcctggartttgttccttctgatgttcggacgtgttcagagtttcttccttctggtgggttcgtggtctctctggcttcaggagtgaaactgcagacctttgcggtgagtgttacagctcgtaaaggcagtgcggaaccacagagtgagcagcagcaagatttattgcaaagatcaaaagaacaaagcttctgaggtgtggaaggggaccccaggcgttgctgctgctggctcaggcagcctgttttcattcccttatctgaccccacccacatcctgctgattggcccattttacagagaggcgattggtccgttttacagagagctgattggtctgttttgacagggtgctgattggtgcatttacaatgcctgagctagacacagagtgctgattggtgtatttacaatcctctagctagacctaaaagttctccaagtccccactagattaactagacacagagtactgattggtgtgtttacaaa

SEQ ID NO: 580093 - DNA, 639 bp, Homo sapiens
gtttgtttagtgactttccttgaatgcttcactcagctccctattcactgtcatattgtgtctggaattggtgggttcttggtctcactgacttcaagaatgaagccacacaccctcgcagtgagtgttacagttcttaaagatggtgtgcctggagtttgttccttctgatgttcggacgtgttcagagtttcttccttctggtgggttcgtggtctckctggcttcaggagtgaaactgcagacctttgcggtgagtgttacagctcgtaaaggcagtgcggaaccacagagtgagcagcagcaagatttattgcaaagatcaaaagaacaaagcttctgaggtgtggaaggggaccccaggcgttgctgctgctggctcaggcagcctgttttcattcccttatctgaccccacccacatcctgctgattggcccattttacagagaggcgattggtccgttttacagagagctgattggtctgttttgacagggtgctgattggtgcatttacaatgcctgagctagacacagagtgctgattggtgtatttacaatcctctagctagacctaaaagttctccaagtccccactagattaactagacacagagtactgattggtgtgtttacaaa

SEQ ID NO: 580094 - DNA, 639 bp, Homo sapiens
gtttgtttagtgactttccttgaatgcttcactcagctccctattcactgtcatattgtgtctggaattggtgggttcttggtctcactgacttcaagaatgaagccacacaccctcgcagtgagtgttacagttcttaaagatggtgtgcctggagtttgttccttctgatgttcggacgtgttcagagtttcttccttctggtgggttcgtggtctctctggcttcaggagtgaaactgcagacctttgcggtgagtgttacagctcgtaaaggcagtgcggamccacagagtgagcagcagcaagatttattgcaaagatcaaaagaacaaagcttctgaggtgtggaaggggaccccaggcgttgctgctgctggctcaggcagcctgttttcattcccttatctgaccccacccacatcctgctgattggcccattttacagagaggcgattggtccgttttacagagagctgattggtctgttttgacagggtgctgattggtgcatttacaatgcctgagctagacacagagtgctgattggtgtatttacaatcctctagctagacctaaaagttctccaagtccccactagattaactagacacagagtactgattggtgtgtttacaaa

SEQ ID NO: 580095 - DNA, 524 bp, Homo sapiens
gaggaagaagaaaaaacatggatatacaatgtcaacagaaatcaaggagaaacggaatttcaccaatcaatttagtgatctgggttgaacaatgcagagagctctaagttaatacaatcttagaaaaactatttcatttggcatgtaggttgttactaatcattaaaactcagtttcagaaacttgttttttttttttttttacacaaaaacaacttttcacataaaagattacacttgtccagtttaatttcgtttaaaagttaaaacaaaaatcaagagctcgcgccaggtgtggkggctcatgcctgtaatcccagcactttgggaggccaaggcaggcggatcacctgaggtcaggagttcaacaccagcctggccaacatggtgaaacgccgtctgtactaaaaatacaaaaaattacccgggtgtggtgggggggtgccctgtaatcccacctacttgggaggctgaggcaggaaaattgcttgaacccaggaggcggaggctgcagttagccgagac

SEQ ID NO: 580096 - DNA, 524 bp, Homo sapiens
gaggaagaagaaaaaacatggatatacaatgtcaacagaaatcaaggagaaacggaatttcaccaatcaatttagtgatctgggttgaacaatgcagagagctctaagttaatacaatcttagaaaaactatttcatttggcatgtaggttgttactaatcattaaaactcagtttcagaaacttgttttttttttttttttacacaaaaacaacttttcacataaaagattacacttgtccagtttaatttcgtttaaaagttaaaacaaaaatcaagagctcgcgccaggtgtgggggctcatgcctgtaatcccagcactttgggaggccaaggcaggcggatcacctgaggtcaggagttcaacaccagcctggccaacayggtgaaacgccgtctgtactaaaaatacaaaaaattacccgggtgtggtgggggggtgccctgtaatcccacctacttgggaggctgaggcaggaaaattgcttgaacccaggaggcggaggctgcagttagccgagac

SEQ ID NO: 580097 - DNA, 512 bp, Homo sapiens
atttccagaaatgttaagactgcacatgtagaagtgcagactgatttgattttgaaggttggaggaggagaaggaaatcaaggttagctctaggtttctttgcggggcaaataaaaaaatagtcaggtcatttactgagataaaacttaatggaagaagaacatggagggccaggtgggggtggtgcatccatttcattttggatacattgattttgaggtattccgtgaatatccaagaggaaatgtgaagtttgcagttgaatatttgtgcctggaactyaggaaaaacaatgtgtgggccatctgcatatcggtgatgaatgaagccacagaagcagaagcaatcaatgcagcaagagtaaataaagtgaagagaagggaagaggaagagaaagaagagaagaagccaatgtttaagggaatgatagtgtattcaaaattggcaaaagagactgagaaagcgtggccagagacagaagggaaatacagagtgaaaccaagggactagac

SEQ ID NO: 580098 - DNA, 512 bp, Homo sapiens
atttccagaaatgttaagactgcacatgtagaagtgcagactgatttgattttgaaggttggaggaggagaaggaaatcaaggttagctctaggtttctttgcggggcaaataaaaaaatagtcaggtcatttactgagataaaacttaatggaagaagaacatggagggccaggtgggggtggtgcatccatttcattttggatacattgattttgaggtattccgtgaatatccaagaggaaatgtgaagtttgcagttgaatatttgtgcctggaacttaggaaaaacaatgtgtgggccatctgcatatcggtgatgaatgaagccacagaagcagaagcaatcaatgcagcaagagtaaakaaagtgaagagaagggaagaggaagagaaagaagagaagaagccaatgtttaagggaatgatagtgtattcaaaattggcaaaagagactgagaaagcgtggccagagacagaagggaaatacagagtgaaaccaagggactagac

SEQ ID NO: 580099 - DNA, 512 bp, Homo sapiens
atttccagaaatgttaagactgcacatgtagaagtgcagactgatttgattttgaaggttggaggaggagaaggaaatcaaggttagctctaggtttctttgcggggcaaataaaaaaatagtcaggtcatttactgagataaaacttaatggaagaagaacatggagggccaggtgggggtggtgcatccatttcattttggatacattgattttgaggtattccgtgaatatccaagaggaaatgtgaagtttgcagttgaatatttgtgcctggaacttaggaaaaacaatgtgtgggccatctgcatatcggtgatgaatgaagccacagaagcagaagcaatcaatgcagcaagagtaaataaagtgaagagaagggaagaggaagagaaagaagagaagaagccaatgtttaagrgaatgatagtgtattcaaaattggcaaaagagactgagaaagcgtggccagagacagaagggaaatacagagtgaaaccaagggactagac

SEQ ID NO: 580100 - DNA, 514 bp, Homo sapiens
ggagtcacattcaaatcatagcaatggagcaccaaaatcccacagggtctttccaggaagaactcttgacatgtccctcatcactcctgtctatgtcaaccagcttggacacagatctacacatgcatggatcaatgactagcatttctgaggtggaagccagggcccacakcacactatataaaaataagactaggaggcacacctaaccattccaacgtccatgttcttccccactgtgcagccctcacatctacattctctcctttagctccctcacctcattatatgaccttaacaatcctgctggtaaaggcagtccccaacccacaagcatataatcttccaaagtttgcctggagatttatttaacttaaagctcgttttcctagataaacgctactaacagcatttctctcttaatagcattctgttaagaagctcccaggctggcctccaatctgaaacccatttaaaccacaatgcagctactactagtttgggaaaacactag

SEQ ID NO: 580101 - DNA, 494 bp, Homo sapiens
agaagaaatggggcagagaggtggagcgcagccccttcccttggggcctcagagagtgcacctgttggccacaggtgaaatggtgtctgaccactggctctcggaaggggtgagggtccagagaaatcagaaggcagggaaacgaagagcataaaggggtcttggagggaccacagagaaaggtggcaaartgggtgcagggggagtcaggctcaccatggcctccctgctctccgggtcctctgggacactcggcatgggccgaggtgcctcctccccctcactgtccagatgttctcctccgtgtcctgtggggggtggccagaggggtcttcagacaacccaacaagggaggtactgtgggcccacctctacctccaccctcactgtgtaaccctgagcctgcccctccccagagaggaatgagctgttgttctttatttttacttttaagaatcaagatcttgctattccgcccaggcacactcccacta

SEQ ID NO: 580102 - DNA, 566 bp, Homo sapiens
aacttccactccgtacgtgctttgctgcggctggacaactggatggtgaagagtgagaagtttcaatctggagagcctgggcatttccacacagtgccccttaaaagggctagggctaggcccaatatacaactcggtcagtaaagatcaaggcatttccaagcccgtggtctggtttttaaaagaactcagtaaagttggaacggacagggaatgagaytgagtttatagctggctaacagaggcccagagagatcagataatattgctattgttattactgttattattaccactgtttgaacctttgtggaatgcttcaccaggtaccgtgctaacaatcccatttaatcctcgcaaccaccataggagacagttactatgattccctctattgtggagatgaaaaaacatggagtatttgaggttaagtgcttgcctaagttcacttaggcagagctgggatataaacacccaggtctatccaattctctaagcccgtttttcttgctggggatgggggcacagataggaaggggaaaattaatcttttgttcactttttga

SEQ ID NO: 580103 - DNA, 566 bp, Homo sapiens
aacttccactccgtacgtgctttgctgcggctggacaactggatggtgaagagtgagaagtttcaatctggagagcctgggcatttccacacagtgccccttaaaagggctagggctaggcccaatatacaactcggtcagtaaagatcaaggcatttccaagcccgtggtctggtttttaaaagaactcagtaaagttggaacggacagggaatgagactgartttatagctggctaacagaggcccagagagatcagataatattgctattgttattactgttattattaccactgtttgaacctttgtggaatgcttcaccaggtaccgtgctaacaatcccatttaatcctcgcaaccaccataggagacagttactatgattccctctattgtggagatgaaaaaacatggagtatttgaggttaagtgcttgcctaagttcacttaggcagagctgggatataaacacccaggtctatccaattctctaagcccgtttttcttgctggggatgggggcacagataggaaggggaaaattaatcttttgttcactttttga

SEQ ID NO: 580104 - DNA, 566 bp, Homo sapiens
aacttccactccgtacgtgctttgctgcggctggacaactggatggtgaagagtgagaagtttcaatctggagagcctgggcatttccacacagtgccccttaaaagggctagggctaggcccaatatacaactcggtcagtaaagatcaaggcatttccaagcccgtggtctggtttttaaaagaactcagtaaagttggaacggacagggaatgagactgagtttatagctggctaacagaggcccagagagatcagataatattgctattgttattactgttattattaccrctgtttgaacctttgtggaatgcttcaccaggtaccgtgctaacaatcccatttaatcctcgcaaccaccataggagacagttactatgattccctctattgtggagatgaaaaaacatggagtatttgaggttaagtgcttgcctaagttcacttaggcagagctgggatataaacacccaggtctatccaattctctaagcccgtttttcttgctggggatgggggcacagataggaaggggaaaattaatcttttgttcactttttga

SEQ ID NO: 580105 - DNA, 566 bp, Homo sapiens
aacttccactccgtacgtgctttgctgcggctggacaactggatggtgaagagtgagaagtttcaatctggagagcctgggcatttccacacagtgccccttaaaagggctagggctaggcccaatatacaactcggtcagtaaagatcaaggcatttccaagcccgtggtctggtttttaaaagaactcagtaaagttggaacggacagggaatgagactgagtttatagctggctaacagaggcccagagagatcagataatattgctattgttattactgttattattaccactgtttgaacctttgtggaatgcttcaccaggtaccgtgctaamaatcccatttaatcctcgcaaccaccataggagacagttactatgattccctctattgtggagatgaaaaaacatggagtatttgaggttaagtgcttgcctaagttcacttaggcagagctgggatataaacacccaggtctatccaattctctaagcccgtttttcttgctggggatgggggcacagataggaaggggaaaattaatcttttgttcactttttga

SEQ ID NO: 580106 - DNA, 575 bp, Homo sapiens
tcctcgcaaccaccataggagacagttactatgattccctctattgtggagatgaaaaaacatggagtatttgaggttaagtgcttgcctaagttcacttaggcagagctgggatataaacacccaggtctatccaattctctaagcccgtttttcttgctggggatgggggcacagataggaaggggaaaattaatcttttgttcactttttgaaaggatgatacatttgcatagtccaaaactcagaaggtacagaagggaagtatctcccggccatcttgttgctctctcctgamttttttatgaacccttgcagacatgttttatgtatattatcacagtatgcacacacacacacacacacacacacacacacacacacgcacacacgtttcctctttctacagaaatggtaacatactaaaggtactcttctgtaccttcacagtacaagtacccaataccccacctaggactaggacttgcccaagaccacagacaggtaagggcggggcaggcacttggcctccaagctctgcgtccagtgctcactccacacagtgacccccaact

SEQ ID NO: 580107 - DNA, 526 bp, Homo sapiens
gacagttcattattatattttattttaaaaatgtattttttaaattttaaaatatttaattgacaaagattgaatatttttggtgtgcaacatgatgatttgacatatgtatgcattgtgtagtgattaccaaaatcaaattaattaacacatccatcaccacccatgctgtatatgagaaccccagaactgattcgtcttgtaactgaaagcttgtattctttgtccagcctctcacccagtttcccctctcccccacccctggcatcaccatttaactctctgcttctatgagtttgacacttttatttatttatttatttttgagacagatttttgctcttgtcgcccaggctagagtgcaatgkcacagtctgagctcactgtaacctctgcctcccgggttcaagtgattctcctgcctcaacctcccgagtagctgggattacaggcatggcatgtgccaccacacccagctaattttgtaattttagtagggatggggtttcaccatgttggtcaggct

SEQ ID NO: 580108 - DNA, 562 bp, Homo sapiens
tggtctgtgtcatctatgatttctttgagtagtgttttgtagttctccttgtagagatttttcacctccttggttagatgtattcctaagtattttaatttgttggggggtggtgctattttgaatgggatttcactcttgatttggctctcagcttaaaaactattggtatatagaaatgctactgatttgtgtatgctgattttgtatcctgaagctttrctgaagtcatttaccaggtctaggagttttttggtaaagtctttaaactattccacaaggctacagtaaccaaaacagcatggtactggtacaaaaagagacacatagaccaatgagacagtatagagaacccagaaataaggtcacacgcttacaaccaactgatctttgacaaagtcaacagaaacaagtaatggggaaaagactccatattcaacaaatggtgcagggaaaactgcctaataatatgcagaagaatgaaactggacacttagcccatatacaaaaattaactcagggggattaaagacttaattgtaagacctgaaactgtaaaaat

SEQ ID NO: 580109 - DNA, 381 bp, Homo sapiens
acctgaggtcgggagttcaagaccagcctgaccaacatggagaaaccccgtctgtactaaaaatacaaaactaggtgggtgtggtggcgcatgcctttaatcccagctacttgggaggctgaggcaggagaatcacttgaacctgggaggcaggcagatgttgcggtgagctgagattgcgccattgcactccagcctgggcaacaaaagcgaaactccatctcaaaaaaaaaaaaaaaaaaaaaaaaaraaagaaagaaaaagaaaaacaacagtgaaatagtggaaacaataagccagaagatagtggaaaaacatctttcaagtactgaaggaaaatctggcaacctagaattctgcacccaacaaaaatagaaaaac

SEQ ID NO: 580110 - DNA, 381 bp, Homo sapiens
acctgaggtcgggagttcaagaccagcctgaccaacatggagaaaccccgtctgtactaaaaatacaaaactaggtgggtgtggtggcgcatgcctttaatcccagctacttgggaggctgaggcaggagaatcacttgaacctgggaggcaggcagatgttgcggtgagctgagattgcgccattgcactccagcctgggcaacaaaagcgaaactccatctcaaaaaaaaaaaaaaaaaaaaaaaaagaaagaaagaaaaagaaaaacaacagtgaaatagtggaaacaataagccagaagatagtggaaaaacatctttcaagtactgaaggaaaatctggcaacctagaattctgcamccaacaaaaatagaaaaac

SEQ ID NO: 580111 - DNA, 598 bp, Homo sapiens
aagcacaaaccacacagttattaaaaagttccaatgaaattactgtaaaaaaataacgaggataacatgatagctaaaatcacctgaaattcctacctccaaatccctataaaaaaagggcaaaatctaggaaatgtgatactccctaaaattttttgctaacatgtttttgctgatctcaatctttagacaaagaaattgtaaatataatttcctaagtaactcaaagaagaaaaaggaaatagtatttcccrataataattctctaggtttgcataaatagacctacttggcactgaaagcactattaatattttgcttcactttggtctttcaaaaacgtccttctacacaggtttttttggttgtttttatcactaattaagttgactgatataaacccttagctggtttatttaaacctaaatatattttaaatttacttcaaatcatagattctactctagccacaatgaataattttccccaaattgagtttaacagcttaaaatataatttgttaaaaaaaaaaagtttaaggtatgtaaaaatttctgactttcaccgtaaataagattttcattagctcaacagaaat

SEQ ID NO: 580112 - DNA, 543 bp, Homo sapiens
ttgagaggaatcagatgaatgaaaaccattatagcctctccagaaaaatgcagtcagcacctagcacatgatttcaggggatctgaaaactctgcrgagtccactggtgaatctttggttcataactcctgagaccaggtttctgtaaaactcacaattgggtgcttgtagataatttttcagtaatcagtaacaaaatttcaagtgtaagataaatcctgaattctctattagatttactatcagtgaacaagaaaaattgtggttgaagttcctgtaagcattttattttttattttacttatttattcatttattttttgagacagagtctcgctctgttgcccaggctgtagtgcagtggtgtgatctcggctcactgcaacctctgtttcccaggttcaagagattctcagcctcagccccagccccacaagtagctgggactgcaggttcatgccaccatgccccgctaacttttgtatttttagtagagacagggtttcactatattggccaggctggtcttgaactcctggcttc

SEQ ID NO: 580113 - DNA, 452 bp, Homo sapiens
taaactatcagactgggtcctaaatgtaatcacaactgtacttataacactgaggtaaagggagacttgacacagacacacaaaggaaaaggcaacgcaaagatagaaagaagagagaaaaaagttggaagttgctggttggagcgatgcagtcacaagccaaagaatggcaagagccatcagaggctggaaaaggcaggcaacagaatcttccctagagcctctggaggcagcatagccctgaccacaccttgatttctgcccagtggaactcatttcagagctagagcctccagaactggaaatacatttctgtagttttaagtcacccaatttgtggtaacttgctacaacagccacaagaaactaatacagtttgtcatttatgaaatctttttwaaaaaaatacacatagagaaaagacaaaagcacaaaaaccaaaatgttagcaa

SEQ ID NO: 580114 - DNA, 678 bp, Homo sapiens
aagagtaccataacttaagaatgttcattaaagcctgggcgtggtggctcacacctgtaatcccagcactttgggaggccaaggcgggtggatcacgaggtcaggagttcaagaccagcctggccaagatggtgaaaccccatctctactaaaaatacaaaaattacctgggcgcggtggcaggtgcctgtaatcccagctacttgggaggctgaggcaggagaattgcttgaacccgggtggtggaggttgcagtgagctaagatcacgccactgcactccagtctgtgtgatagagtgagactccatctcaaaaaaaaaaaaaaaaagaatgttcataaaaaaattaaagaattatttacccaaggrtataggatgagaaaaaaccaggtacttcaccaggtttgttacaaaaatgttcatttctgcagctgtctacagagtgcctgctgtgtttcaggcaatgttttagatgttggaactctgaaaatagtaaatatgttcttacctttaaggagatttcaatgtaataataaatatcagtggaaagagaactttatggctacaattgccatgatcatttaaatggctttaaatgttcggttaaaatagtgatttaaaatatatgttacttcaaactattaaactactacaagaaaacactagggaaaatgttca

SEQ ID NO: 580115 - DNA, 388 bp, Homo sapiens
gaattctactaaacatttaaagaagaacaaatacaaatccttctcaaacatctccccaaaaattgaagagtaaggaatactttcaaactcatttcaatagaygcagaaaaagcctttgataaaattaaacatccattcacgatgaaaacccacaaatttggtatagaaggaatgtactgcaacccaatataggccatatatgacaaacccacagctaatatcatattcaatggtgaaaagttgaaggcttttcctgcaagatcaggaacaagacaagaatactttctcatcacttatattcaacatagtagtggaattactacacacagcaattaggtaagggaaaaaaataaaggcatccaactagaaggggaggaagctaaattgt

SEQ ID NO: 580116 - DNA, 388 bp, Homo sapiens
gaattctactaaacatttaaagaagaacaaatacaaatccttctcaaacatctccccaaaaattgaagagtaaggaatactttcaaactcatttcaatagatgcagaaaaagcctttgataaaattaaacatccattcacgatgaaaacycacaaatttggtatagaaggaatgtactgcaacccaatataggccatatatgacaaacccacagctaatatcatattcaatggtgaaaagttgaaggcttttcctgcaagatcaggaacaagacaagaatactttctcatcacttatattcaacatagtagtggaattactacacacagcaattaggtaagggaaaaaaataaaggcatccaactagaaggggaggaagctaaattgt

SEQ ID NO: 580117 - DNA, 622 bp, Homo sapiens
ctaaatttcaaatatcaggctcatatcttcaaaatactttcctcattgcgttctaattgtcttcccatatgtgtagcaagtaattaatagggtcacacaggagagaatagatttataactttgtttggtgaagactcatttaagygatcttctatagtgatgaaagtgttgggtctatgggttccattattccaagtagaagataagtaactttaaagagatagatctttcttgttttgtaaagactcacatcacctctcttaggtatatagatgttcagctaggaatgccatttttgttttgacaaattttttgaaaaactctcactcaagtgtagaaaaatttggtcacctgagaagatctggcctgcaaggaggtcctgaggacacctttacaactagagcattcctggacaatattttggaggaactggagtcttggagtgggataggctgtacctttggaattcctgcatgaaaaggtttgaacactgcaacctggggactgctgaagaagggtttttacagtgcctgagaggcagagtaagagttacaaactcataagtctacagatgctagacagatgtattacccgaggaatgggcactggagggcttgcctca

SEQ ID NO: 580118 - DNA, 550 bp, Homo sapiens
acatagcaagaccctgcctctacaaaaaatattttaaattaagccagcatggtggcatatgcctgtagtcccagctactcaggaggctgaggcaggaggatcacttcagcccatgagtttgaggctgtagtgagctatgatygcacggccacactccatcctgggtgacagagtaaaaccctgtctcaaaaaaataaaaataaaaagagttaacatgacaatgagatggtaaggtagagtcagctaaatgccagataagtgagaaaaggaaggatgcagatcgtgaactgagcccagagagacttcatctggacttgtcagggaaaagccaatggtctctaagccagaggtctactcagagcccttagtgctcacttctagggatagtctctagtgcagtattggggtatttatctataggaaaagatcaaagtggtattagattgtttatttaaaaaaatgatcagcccaactaaccctgtgtattcatttagggttcttctgtttataagtgatatatatataaaaaaaaaaaaacaaaaaaaacaat

SEQ ID NO: 580119 - DNA, 601 bp, Homo sapiens
tgagtcacctatttccccatccaccagggccttccaaagagagataggaaagtagaagggatgagaaggctatcattcagtgagtggggtcattgatttggcagactataggtcacagtattacagtgacctaagccaagatttkcaaatgttgaacctacaggaaattcaggctacataaatatgtgagaaaatagtagcattataataatagtttaataataattaatagcttaagtcattgttcatcaaaccagctgatgagtaaatacccagtgagtagatcataaaataaggtttgagagcagggagaaggccctgtgggctggcttggtctgacaagatttgatggagggaataggtgaggtagtgctttcaggtggggagactctggtaaggtgagagggtaaggaaaggcaatattgtgatgaaaagggagcgacttccagtttcaaccctgatatgtaaagaactttgaagtcatcactcccagtcttatggggcaaggaaaagctagacaagctgaaaatcaacaacttttcttgaacgtgtcataaaactgtggccacagggcaaactaataccctcaaatctggagaga

SEQ ID NO: 580120 - DNA, 552 bp, Homo sapiens
ggataataatgacattcactctacaaggaaattgtatttaaagtgtacacaatttgaataaattttcatttaaaatgtaaattgacgccaggagtggtggttcacgcctgtaatcccagctctttgggtggatcatctgaggtgggcagatcatttgaagtcaggagttcgagaccagcctggccaacatggtgaaaccccatctctacaaaaaataaaaagaaattagccaggcacggcagcatgtgcctgtagtcccagctactcaggaggctgaggcaggagaatcgcttgaacctaggaggtggaggttgcagtgagccaagatcacaccattgcactccagcctgggtgacaagagcgaaactcggtcttaaaaaaaaataaaataaattaagctacatgtaaatygagtacaaacatttgtaaaattaatttcttaaagaattataaatctatttttcttacaaaatattcaaacttactaaatttagaggtaaaatatatattgtaatcaatgaatattgcatttttaaataattacttaaatca

SEQ ID NO: 580121 - DNA, 525 bp, Homo sapiens
ttactgtttcatagcaaaccaaatctttatatttattgaaaatgtttgacagacatagatctatatctacatctatatctatatctatatctgtatctatatctatatacagatgcatatttacacatttatatttctatttttctttacagatacttaggagatgcacattagccaatgtgctaaaaattgtgatttgttgtatattatgtaataggcatacagctcagagtttatggttttgatttcgacagtgttttctgtggaatatccacaatttctataattaacactacagatatatttcaactgaaatcacgatacagagaagaattgaagtgttatataagtcatattctctaattttcctctcttattaacattagttctgttgaaactgaaaatacttataatgaatggctcatatgattacagcaggaaaataccaaataaccaatttggtattaaccaaaytaaacttatagtaatatatacagttatataataatggttatttataggttc

SEQ ID NO: 580122 - DNA, 589 bp, Homo sapiens
gacctgcgcctactgtctggcactccctagtgagatgaacccggtacctcggatggaaatgcagaaatcacccatcttctgcgtcgctcaggctcggagctgtagaccggagctgttcctattcggccatcttggctcctccctgcttaattctttttaaaggtcatatcatatcttatagtagagctatatcataattgttaactaatctcctgttaatgtggatattttgtttgaatgcaattrtttttacagacattgctgcaataaatgttattgcacgtatgtactggcatttgaatagagtaagtttcaaatagtggaattactagaccataagatttgtgcatttttaaatttggtagacactgaaaaaaaaacagtttgtttctgttacattttaatgagaaagtttcaatatttttaatttgtatttttattataaataatatggaacatcttttcagtgacttgttggagatattctgtttcttcttacctactcctgtactgtgcttaaaatatcctgcttctttagtctcagtaaatgacacttttgttgcctgtgtcagctgtttgtgtggatatg

SEQ ID NO: 580123 - DNA, 444 bp, Homo sapiens
agtcacacggccacacttatctccagggagacagggaactatagtctagctttgtgccaggaggaaaggcaattgtaattgttaatcaacaaataagtctctgcaacaatttacccttcctcttagcaaatttccgttgcatttttctcttcacacagagaatatgcttattccttctccattggagacatcttaatgtttttcaaatttttattcagcatcagccgcgaactcaaagccctgaatgttaaaaratgtgcaagctaaatgttgtggcaccttgtaatagacaggaaacccactgccatcttcccgacacagacaccaaacactaacacacccaaacccccactataaacctacatatagtatcagggacagcaaaacctcaaaaaaaaaaaaaaacttctattcaaaatcaggaaaaatgggagaacaataaca

SEQ ID NO: 580124 - DNA, 559 bp, Homo sapiens
aatagataaaaaccaaccaataatttaaaaaaacccatgatccaactttatgctgtctacaagagacataccttgtattcagatatacaaataggttaaatgtaaaataacagaagaagtactaaaataatcwcaaaaagggagttaatgtggttatactaaaattagacaaaataaattttaacaaaatattactatacatagagagggacatttcataatgatgatggagttgatccatcaggaagatataaaagttgtaaacatacatgcatttagccactgaaacccaaaatataccaagcaaaaagtagtagaattaaggagacaagtaggcagctagacaattatagttgaaaatgttaatactcacttgcagtaatggatagaaaacacaggcagggtgcggtggctcacccctgtaatcccagcactttgggaggctgaggcgggtggatcacgaggtcagaagattgagaccatcctagctaacatggtgaaacctcgtctctactaaagatacaaaaaattagccgggtgaggtggggggcacctgtag

SEQ ID NO: 580125 - DNA, 411 bp, Homo sapiens
tgttatattgtttgataacattttacycacaatagaacttctttcaaaattggagttaattggctgggagtggtggctcacgcctgtaatcccagcactctgggaggctgaggcaggtggatcacctgagctcaggagttccgagaccagcctggccaacatggtgaaaccccatctctactaaaaatacaaaaattagctggacgtggtggtgggcaccagtaatgccagctactcagaggctgaagcagacgaatcacttgaaccccggaggtggaggctgcagtgagttgagatcccaccattgcactccagcctgggcaacaagagcaaaactccatctcaaaaaaaaaaaaaaaaaaaaaaatagatttaatcctctcaaaccttgccccgatttataaactaata

SEQ ID NO: 580126 - DNA, 411 bp, Homo sapiens
tgttatattgtttgataacattttacccacratagaacttctttcaaaattggagttaattggctgggagtggtggctcacgcctgtaatcccagcactctgggaggctgaggcaggtggatcacctgagctcaggagttccgagaccagcctggccaacatggtgaaaccccatctctactaaaaatacaaaaattagctggacgtggtggtgggcaccagtaatgccagctactcagaggctgaagcagacgaatcacttgaaccccggaggtggaggctgcagtgagttgagatcccaccattgcactccagcctgggcaacaagagcaaaactccatctcaaaaaaaaaaaaaaaaaaaaaaatagatttaatcctctcaaaccttgccccgatttataaactaata

SEQ ID NO: 580127 - DNA, 553 bp, Homo sapiens
aaacagaatgaagtggggagcatttggggagcaacaattcccttgttaagctggatactagaatggaaaagtatttaacactggaaagaaatcagctatttatgaaaaggaggaaggctgaacttacatatctttctaaagagattagactttaaaccgttgctatgaggagctattacatattttaaatagaggaatgtatcatcagtttctcaaaagwtatcacaggcaataacgtagagaggatggaatgggaggcaaagaaagatgcaggtcaagaatatcagttaaaaagccatcaaaataatttaagagagaggtaatgcatgcctgaactaaggcaccggtcctgagaattataataaaatatatacttaaggtatatttatgaataataatcaataggaattggtgaccagttggatatgaggaatttaaaatgtattaagcgtaatctccaggtggctggcttgggacaaggggattgctatacattgagccaagaaatgaaaaattgtacaggactggggacgaaagtgatgagttgtattct

SEQ ID NO: 580128 - DNA, 553 bp, Homo sapiens
aaacagaatgaagtggggagcatttggggagcaacaattcccttgttaagctggatactagaatggaaaagtatttaacactggaaagaaatcagctatttatgaaaaggaggaaggctgaacttacatatctttctaaagagattagactttaaaccgttgctatgaggagctattacatattttaaatagaggaatgtatcatcagtttctcaaaagttatcacaggcaataacgtagagaggatggaatgggaggcaaagaaagatgcaggtcaagaatatcagttaaaaagccatcaaaataatttaagagagaggtaatgcatgcctgaactaaggcaccggtcctgagaattataataaaatatatacttaaggtatatttatgaataataatcaataggaattggtgaccagttggatatgaggaatttaaaatgtattaagcgtaatctccaggtggctggcttgggacaaggggattgctatacaytgagccaagaaatgaaaaattgtacaggactggggacgaaagtgatgagttgtattct

SEQ ID NO: 580129 - DNA, 573 bp, Homo sapiens
atgacaggttgatgggtgcagcaaaccaccatggcacatgtatacctatgtaacaaacctgtacrttctgcacatgtactccagaacttaaagtataagaaaaaaagaagggggaggcaggagaaaagtattaaatttatattaataaaaaaagaaatagtaaaattatgattatcagaggctgtgaggtgagaggattgaggagatgttggtcaaatggtacaaaatttcagttaggaggaataagttcaagagatccattgtatattgtggtgattagagttaataactatatattgtatacttaaaaattgctgagaattgattgaaagtgttctcaacacaaaacataagtatgtgaagtaatacatatgttaaatagcttgatttagccattctataatgtatatacatgtatcaaaacattgttttacaccataaatatatactgtttttccttgttgattaaaaataaataagttgttgaatacatgaaaaaaaaaagaaggaaaatgttcataatgaaaactgggcgtgaatgacaaacccaaaatgattgtaatatagcaacag

SEQ ID NO: 580130 - DNA, 573 bp, Homo sapiens
atgacaggttgatgggtgcagcaaaccaccatggcacatgtatacctatgtaacaaacctgtacgttctgcacatgtactccagaacttaaagtataagaaaaaaagaagggggaggcaggagaaaagtattaaatttatattaataaaaaaagaaatagtaaaattatgattatcagaggctgtgaggtgagaggattgaggagatgttggtcaaatggtacaaaatttcagttaggaggaataagttcaagagatccattgtatattgtggygattagagttaataactatatattgtatacttaaaaattgctgagaattgattgaaagtgttctcaacacaaaacataagtatgtgaagtaatacatatgttaaatagcttgatttagccattctataatgtatatacatgtatcaaaacattgttttacaccataaatatatactgtttttccttgttgattaaaaataaataagttgttgaatacatgaaaaaaaaaagaaggaaaatgttcataatgaaaactgggcgtgaatgacaaacccaaaatgattgtaatatagcaacag

SEQ ID NO: 580131 - DNA, 555 bp, Homo sapiens
tgaacaatgaggacacatgtacaccaaggcctctcggggattggagggtaggggagggatagcattaggaaaaatacctaatgtagatgatgggttggtgggtgcagcaaaccaccatggcacgtgtatatctatgtaacaaacctgtacattctgcacatgtaccccagaaattaaagtataataaagaaatctacattattgtgattgtaagtttaatagaatgtacatgcatttgttagtcttttgaaatttggtctcttattttgaaaactttcatatttcacatgaattctgattacrccactgaattttcttttttcctaatcctactctttaacgccattgctcctcatcagcatctccaaaaacaaaaattgtctgcatgcccagtcttctatccccaagttttcagctggctcctgtgatcctggctgcaaacaaacatcatgatatggctcttgactttgacagaagtaaaaatggctttacataggtaggtcccctctttagcaaaatccatccttagtaccacatagggagaataggaaagtg

SEQ ID NO: 580132 - DNA, 377 bp, Homo sapiens
ttagaccttctgtacctcagtgcctccatctgtataaagaatgtaatacttattgtgtgcagttactgacagaattagataaaatacatgtaaaacaaccatctcagcacctgatacagaggaagtgcttataataaaattacatgactaacgcaataataaartgttgcctaaatttataatatctacaatagcatttgggacttatggtgtgaaattccagactgtaaaggatttttttttgagacagagtcttgctctatcacccatgctggagtgcactggcatgatctcggctcacgacaacctctgccttctgggttcaagcgattctcttgcctcagcctcccaagtatctgggattacaggcatgtgcc

SEQ ID NO: 580133 - DNA, 612 bp, Homo sapiens
attttactgattttctaattttacataaattgaattatatagatgcatcaggtttctttattgcaaatttacacccatgagattatccatattgttttgtataattttagtttatttttattgctgcattgtactccactatatgaatatactatattcatctattgtaatgaakatgtgatattacaaataacccacattcttatatgcacctgttgactaatattttatatatttccattgggtacatatccaagagtagaatatatctaggaatggaattgctgaatcagaatattcttataaattttggaaaactatgtgatggtttaaaaccatgtatgtgttgttatctgataattacaaaaataacaaaaattaatttctggtaattttatgggttccattcatgtagaataagtcactaagagaagatttgttattttaggcctacaaaaactcagagctcaagataacagtatgaagcaatatagtagagtagatagatcaagcaggggtttcaagttcagactctcagagcctcagcttccatgtttagacaatggagatagcaccttcagaaaatctttttgaaaaataaaaggatatgaa

SEQ ID NO: 580134 - DNA, 612 bp, Homo sapiens
attttactgattttctaattttacataaattgaattatatagatgcatcaggtttctttattgcaaatttacacccatgagattatccatattgttttgtataattttagtttatttttattgctgcattgtactccactatatgaatatactatattcatctattgtaatgaagatgtgatattacaaataacccacattcttatatgcacctgttgactaatattttatatatttccattgggtacatatccaagagtagaatatatctaggaatggaattgctgaatcagaatattcttataaattttggaaaactatgtgatggtttaaaaccatgtatgtgttgttatctgataattacaaaaataacaaaaattaatttctggtaattttatgggttccattcatgtagaataagtcactaagagaagatttgttattttaggcctacaaaaactcagagctcaagataacagtatgaagcaatatagtagagtagatrgatcaagcaggggtttcaagttcagactctcagagcctcagcttccatgtttagacaatggagatagcaccttcagaaaatctttttgaaaaataaaaggatatgaa

SEQ ID NO: 580135 - DNA, 629 bp, Homo sapiens
atggatgaagcaagactgaccacaagttagtaactcttaaagttggtgatgtgtgtattattgctgtcaattttccataatacaaagtttaraagcttgcctctcctactagtaagagggcttcttaaagacaagttcaagagtgttcttctttgtacatctatccaatacagaacagaccaattgaactttactaaacacgtttcattctttaggtagaactacttttcaatgaaacttcaacatctttttgacggtactttatttaaaaaatttttcattagctcaaataaaacatatattcactcattcattattttctgggtccctgcttcctaagatatgctgtcctggtaaatgtaggataccaaaaataatttatcctctctactaaattaagaagggaaagaaggaagattaaaagaaaatattgtaaaatgcagtaatacagtttttaagaaaggcatctagggcatctatgtttttaattagaaagaaggcatacaacctattcaaggaagacgggcttaaaatttctcctccccctccattttacagatgaggaaactaaagcccatagaggggaagtgacttgcctagcaagttacacatcaagtagctaacaaaac

SEQ ID NO: 580136 - DNA, 603 bp, Homo sapiens
tgaaaacaaagatacaacatgccagaatctctggggcacagctaacacagtgttaagaggaaattttatagcactaaatacccaaatcaaaaagttggaaagatattaaattaacaacctaacatcacatctagaggaactagaaaatcaagagcaaactaacctcaaaactagcataagaaaataaataaccaaaatcagagctgaactgaatgaaattgagacatgaaaaaccatacaaaagaccaatgaaacaaaaatttggttgtttgaaagaataaataagattgatagatccatagctagactaataaagaraaaaagatgatctaaataaacccaattggaaatgagaaaggggacattaccacaaaccctacagaaacacataaaaccttcagaggctattttaaacacctctatacacacaaactagaaaatctagaaaagtggacaaatttctggaagtatatagtctcccaatattgaatcaggaagaaactgaaaccctgaataaaccaataacaaggttcaaaattgaataaataatgaaaaatctaccaaccagaaaaagtcctgaccagactgattcacagccaaatt

SEQ ID NO: 580137 - DNA, 566 bp, Homo sapiens
taaaacaagcttataaaaaatgctttacatccctaatcataagagaaatgcaaatcaaaaccccaatgagagtctatctcacattagtcagaatggctattactaaaaagtcaaggaaaaaaagcaaaaaaaaaaaaamcaaaaaacagatgttgatgagggtacagagaaaagggaatttttatacactgctgctgggaatgtaaattagttcagccattgtggaaagtagtttggatatttctcaaagaactaaaaatagaacaaccacatgtcccagcaatctcattactggatatatacccgaggaaaataaattgttctaccaaaaagacaccttcactcatatgtttattgcaatgctattcacaatagcaaaacatggaaacaacctaggtgcccatcaatagtggattgtatttttaaaatgtagtatatatatattatggaatactacacagtcataaaaaagaatgaaattatgtccttttcaggaacatagatatagctggaggccattatcctaagcaaattaatgcaggaacagaaagtcaaacattgcatgt

SEQ ID NO: 580138 - DNA, 566 bp, Homo sapiens
taaaacaagcttataaaaaatgctttacatccctaatcataagagaaatgcaaatcaaaaccccaatgagagtctatctcacattagtcagaatggctattactaaaaagtcaaggaaaaaaagcaaaaaaaaaaaaaacaaaaaacagatgttgatgagggtacagagaaaagggaatttttatacactgctgctgggaatgtaaattagttcagccattgtggaaagtagtttggatatttctcaaagaactaaaaatagaacaaccacatgtcccagcaatctcattactggatatatacccgaggaaaataaattgttctaccaaaaagacaccttcactcatatgtttattgcaatgctattcacaatagcaaaacatggaaacaacctaggtgcccatcaatagtggattgtatttttaaaatgtagtatatatatattatggaatactacacagtcataaaaaagaatgaaattatgtccttttcaggaacatagatatagctggaggccattatcctaagcaaattaatgcaggaacaraaagtcaaacattgcatgt

SEQ ID NO: 580139 - DNA, 557 bp, Homo sapiens
attgttatctaaacagtttctatttacagtgtataggcatcttcctctggcacagaaaacatcactttttttctttctgttttattaggtccaaggtagaaaaagaaacaattctaagaatttttttctaatctccttcagttctttttctgtgaatactttgagcttctctcacaattaaatagaaaaaaacagcacagacattttctctgaaggctctggattcatttcaccaagtatactctgaacttgaaaagtttcagaatgttgacatttataaattaggatttctggcaaccagatcttgtgcccctgtaataaaaacactactaaatttttatagaaactgtttggcaagatgacatcttgttgtccaatctgtagctgtaacagacaggaagaatgctagatgatttttcctgtttccttcctcaaaggctaaaattagaagaaacaccattagatagatactgttcttttagaaataatatgctcatcaaagacttgaaattattcctagagaaygaaaaataagtgtctcagagaatgcaagagga

SEQ ID NO: 580140 - DNA, 468 bp, Homo sapiens
acataaactagtacagccactatgaaaaatagtatgaaagtacctcaaaaaattaaaaataaaactaccatatgatccagaaatccctctactgtgtatctatccaaaagaaggcaaatcaatatatcaaagagatagctgcagtcctatgtttattgcagcactcttcataatacccaaaatatagaatcaacctaggtacccagtaatggatgaatggataagaaaaggtggtatgtaggcacactgggatgttatttgccgcaaaaagaataaaattctattttttgtagcagcayggacagaactgaaggtcactgtgttaactgaaataagccaagcagagaaagacaaatatcacatgttcttacttacaagtgggagctaaaaaactgaatctcatgaagatagaaagcaaagtgattactaaaggcctggaagtgggttgggggagggatgcagaataaa

SEQ ID NO: 580141 - DNA, 446 bp, Homo sapiens
agtataaagttctgttttttatattrctttgacatggccttaatatttgcaaaaaagatagttttatataaccagagcatgcgagtgatagggttttttcttctggaattgtaaatcattttattttcttctagaattataaatcattttcatttgaatcctagaatcttatgacacaagatttgtctacatatgtaatatatataggcaaatatatatgtgtgtgtatatatgtatgtgtgtatgtaaacatatatatacacacaaacagagagagagaaagagagagagagacagggtctcactctgtcacctaggctggtgtgcagtagcataatcatagctcactgcagcctcaaaatcctgggcttgagcaatcctcttgtctcagcttcccaagtagtgaggactacaggtgtataccaccacatctggctaatttttta

SEQ ID NO: 580142 - DNA, 446 bp, Homo sapiens
agtataaagttctgttttttatattgctttgacatggccttaatatttgcaaaaaagatagttttatataaccagagcatgcragtgatagggttttttcttctggaattgtaaatcattttattttcttctagaattataaatcattttcatttgaatcctagaatcttatgacacaagatttgtctacatatgtaatatatataggcaaatatatatgtgtgtgtatatatgtatgtgtgtatgtaaacatatatatacacacaaacagagagagagaaagagagagagagacagggtctcactctgtcacctaggctggtgtgcagtagcataatcatagctcactgcagcctcaaaatcctgggcttgagcaatcctcttgtctcagcttcccaagtagtgaggactacaggtgtataccaccacatctggctaatttttta

SEQ ID NO: 580143 - DNA, 446 bp, Homo sapiens
agtataaagttctgttttttatattgctttgacatggccttaatatttgcaaaaaagatagttttatataaccagagcatgcgagtgatagggttttttcttctggaattgtaaatcattttattttcttctagaattataaatcattttcatttgaatcctagaatcttatgasacaagatttgtctacatatgtaatatatataggcaaatatatatgtgtgtgtatatatgtatgtgtgtatgtaaacatatatatacacacaaacagagagagagaaagagagagagagacagggtctcactctgtcacctaggctggtgtgcagtagcataatcatagctcactgcagcctcaaaatcctgggcttgagcaatcctcttgtctcagcttcccaagtagtgaggactacaggtgtataccaccacatctggctaatttttta

SEQ ID NO: 580144 - DNA, 427 bp, Homo sapiens
  misc_feature 231, 420: n = A,T,C or G
gataagctaatgatgtatactgtaaacttagaacaatgtttctttaattttggcttcatcagaatcattttagagacttcatagaacacaaatagytaggtctccccatccctagtttctgatttggcagatcttggatagggctcaagaatttgcttttctaacaagattccaattgatgctggtccaaggaatccagttcaggaaccaacaacctaaagctattactanataggataaaaaataaatatacagaggcatggctaacattagaggaaaaagtgggattataaaatgatattcacccaaatcaaggtaaaatagataataaacaaaggaagacatatagataagtacaagcaatggtgaccgctagatttaagccactgtatttcatttaataaatgtaaatgattaacnctgaaat

SEQ ID NO: 580145 - DNA, 438 bp, Homo sapiens
cacatggctaacacctataatcccagctctttgggaggcgaagcaggagaatcacctgaggtcaggagttcaagactagcctggccaacatggtaaaaccccatctctactaaaaatacaaaaattagccaggcrtggtggcaggcccctgtaatcccagctacttaggaggctgaggcaggagaatcacttgaaactgggaggtagaagttgcagtgagccaagatcatgccattgcactccagcctgggtgacaagagcaaaactccatctcaaaaaaaaaaaaaaaaaaagtatacatcaaggaagaatgaagaaagcttcaagagacctctgcagttcaagacctgtaggaggtggttgttagatttgagttctaaatttctcttcaaagaatcaatatgtcagtatgttcagtactttgccttctacttttaa

SEQ ID NO: 580146 - DNA, 537 bp, Homo sapiens
ttacagttccacatggcaggggatgcctcacaatcatggtggtagacaagaaggagcaagtcacatcttacatggatggcagcaggcaaataaaaaaaaagcttatgcagagaaactctttttttttaataccatcaggtctcatgagacccattcattatcacaagaagaacattggaaagatctgcccacttgattcaatcatctcccaccaggtctcttcgacaatacctgggaattatgggagctaaaagatgagatttggctgggcacacagccaaaccatatcattacatccctcaactcatttcagcattaacttgagtccacaatccaaagtctcatccaagacaaggcaastcctttccacctatgagcctgtaaaatcaaaagcaagttaactacttcctagatatcatgggagtacaggcattgggtaaatacaggcattccaaatgggagaaattggccaaaacaaaggggctacaggacccaggaaagtccaaaatccagcagggcagtcaaatcttaaagctt

SEQ ID NO: 580147 - DNA, 587 bp, Homo sapiens
tgtgcttcagccacccaagtagctgggattacaagcctgtgctaccacgccccactaatttttgtatttttagtagtgacgggttttcaccatgttggccaggctggtcttgaactccttacctaaagtgatccacccacctcagcctcccaaaatgctgggattacatgcgtgaggcaytgtgcctggccatattgttttaataatataggcttcatattatattcctgtatcttctaggattaatgtttccttgcagcttttattttttcgtgttttcttagctattcttgaatgtttgttagttcatagtactgaatgacatgaaagagatttttcaatgcagcggaacaggtaaggcttcagtacttatgaaaggtagatttgattttagatttgattaggaaaagcagccctgatctcccagcagcagtccaagtgtgtgacgttatgcagcctgactcttacgtcagtattgggcaggaagggggaaacatgcaaggaaacatgcctgctggacagtggtgcagtatgacaatccagcagcatagtttccactgcctgggggcatgagtacatgcacatgt

SEQ ID NO: 580148 - DNA, 620 bp, Homo sapiens
cttataatagttctttgaaaagtagaaaataactttgctaaaaaatgaaactggtgtgtgtgccttctgtccatttggactttgttttttattgtcrtttaattttattgtggtaagaacaatcaacatgagatttgtcctcataacagattttcagtgtactatgtagtattgttatttataggtacaatgttatacaccacatatctgcaacttattatcttgtgtaactgaaattttacacttattgattggcagcttctaattatccccttccctgaccacctgaaacccaccattctattcttttcttccatgaatttgactattttagatatttcatgaagaagaatcatggagtagttgttcttctgtcactagcatatttcacttaccgtaatgtcctgcaggttagtccatgttgttgtacattatagggtattgttctttcttaaggttgaaaaaaatttaatttttttcatatttcatatatttcatatgacacctaacatatttacatgtcacacacacaaacacacacatatacacacacacacacatttatctcacattttaaaaaaatccattcatcctccatccattgatggacatttaaattg

SEQ ID NO: 580149 - DNA, 620 bp, Homo sapiens
cttataatagttctttgaaaagtagaaaataactttgctaaaaaatgaaactggtgtgtgtgccttctgtccatttggactttgttttttattgtcatttaattttattgtggtaagaacaatcaacatgagatttgtcctcataacagattttcagtgtactatgtagtattgttatttataggtacaatgttatacaccacatatctgcaacttattatcttgtgtaactgaaattttacacttattgattggcagcttctaattatccccttcccygaccacctgaaacccaccattctattcttttcttccatgaatttgactattttagatatttcatgaagaagaatcatggagtagttgttcttctgtcactagcatatttcacttaccgtaatgtcctgcaggttagtccatgttgttgtacattatagggtattgttctttcttaaggttgaaaaaaatttaatttttttcatatttcatatatttcatatgacacctaacatatttacatgtcacacacacaaacacacacatatacacacacacacacatttatctcacattttaaaaaaatccattcatcctccatccattgatggacatttaaattg

SEQ ID NO: 580150 - DNA, 620 bp, Homo sapiens
cttataatagttctttgaaaagtagaaaataactttgctaaaaaatgaaactggtgtgtgtgccttctgtccatttggactttgttttttattgtcatttaattttattgtggtaagaacaatcaacatgagatttgtcctcataacagattttcagtgtactatgtagtattgttatttataggtacaatgttatacaccacatatctgcaacttattatcttgtgtaactgaaattttacacttattgattggcagcttctaattatccccttccctgaccacctgaaacccaccattctattcttttcttccatgaatttgactattttagatatttcatgaagaagaatcatggagtagttgttcttctgtcactagcatatttcacttaccgtaatgtcctgcaggttagtccatgttgttgyacattatagggtattgttctttcttaaggttgaaaaaaatttaatttttttcatatttcatatatttcatatgacacctaacatatttacatgtcacacacacaaacacacacatatacacacacacacacatttatctcacattttaaaaaaatccattcatcctccatccattgatggacatttaaattg

SEQ ID NO: 580151 - DNA, 558 bp, Homo sapiens
gaatatcaccaagaccttatgtataagaccacatattttgctgtgtcccaacatagtaygaattcccagaagccatagatggttgtatacaacctctgccacccttatcccccatgcaaataggaaagaaagagttgggaggcctttattttataccaccattctactagggaagtgaagcttacctctttatacttagtacattatgtgtgtatgcaggcgggtgggtaggccctagctcaacagtattaatatttttggatctctgaaaaaataaatacctgatactcactattcactaaatattgtttattgtaatacaataattcaactatagaaagcagtagtctctgaaatctcagcaatgtatggaatctttaccttaggacacagatagtatgtacttccttccctgaacctcctggatctcaagaatatgaaatattacagaaagaaagaaaaaattctgggaatcaggtagttcaccaatacatctcacagaaaaaaaatgaacaattgctcaatgaaataaaagagtcaaaaatctcataataaaga

SEQ ID NO: 580152 - DNA, 524 bp, Homo sapiens
actgccttgctgcttccagggctgctatttcccgcctgtcccatctcacatctgcccctggaagatgctgctattctacmaggccttatgtttgcattctgagcctgacacttaaaaatgcacccaaggaagcagcttgttaaggaattatgtggagtggcctcggcgcctgagctgcattcctgcagattcccactcccatcagctagcctgggctgagggagcgtttccaggaacttcagtgggatgcaagccggggaccgggccagtcagcctggactgcaaagtcttttgagcctccactctctctggttgcttcccttatttgcccccaggctgggaaacagtaaggagcagagggcacccactgggatggaggttgcagtgggaaacaaaacagccaagaggtgcagcccagggaaggtgccggggctgtcgagaaatggtgtcaaggcttggagggtgggcaacagccagccccttagaggccccagtctgatctgttgccagggagttgggctctt

SEQ ID NO: 580153 - DNA, 606 bp, Homo sapiens
agtgagacgccactccagtctgagggtgagacatgaaaaatatgtgggccttttccccagtcattgatatagcaacatttgtctcccctgggcagggggaaatgaattaggattaccctctgggttgagcttacaagtctgtcttaggatctcttttttaccsaggtagccctcttggctatccaaggtggggtgcctgggtgggggtggcacactggaagctcatagcagctgcttctctccaggcactgtaactcactagcagcttaggactagatgtgaggcatgtatcacgtggcatttgttactacaggagttaaaggaccaaagtaatcttaaatgggttacctattcttataatttagaaggtatgcaagattatacctataataatagcaagcccattcactctctcataagctttcttaaataagagagggaagggtggagttactcctatggtcagaattgcagattaccctttttccctaaagaggcctaagggttggctcccatgtgacccccatcatctctgtagtcaagtagcatcaggcctaggaacccctaaggagatcattctctctctgttccctggcttagggcagg

SEQ ID NO: 580154 - DNA, 566 bp, Homo sapiens
gaattcttcagcaatgaagtcgttttgaggatttgttcattgtgtacattagtaaagtgtaaatgtcatagaaataaattattacttttacaaagatcatttgcaaactgaattatggatgagttataaatagaaggccacaaattcacacaaagaaagagagagcatgtatatatatggagactatttggcatcctaataaccaactagttcttcacctgaccatatcacacaaaagagccaccgttattgctgtaatgcttctgtatrgtactacttttcaatcactatggctttcattaattcattgagtctaagcctctcccaatacagaaatttcctttacaataatccagaaacctaattctaccctctgactgaatacattcatgttactttatcagcaaattcattccgtttttgattgtatatagttgcttctttttttactgatacaaaatattttatatatttctggggtacatgggctaatttttgcatttttggtagagatggggttttgccatgttgcccaggcaggtctcgaactcctggcctcatgtgat

SEQ ID NO: 580155 - DNA, 566 bp, Homo sapiens
gaattcttcagcaatgaagtcgttttgaggatttgttcattgtgtacattagtaaagtgtaaatgtcatagaaataaattattacttttacaaagatcatttgcaaactgaattatggatgagttataaatagaaggccacaaattcacacaaagaaagagagagcatgtatatatatggagactatttggcatcctaataaccaactagttcttcacctgaccatatcacacaaaagagccaccgttattgctgtaatgcttctgtatagtactacttttcaatcactatggctttcattaattcattgagtctaagcctctcccaatacagaaatttcctttacaataatccagaaacctaattctaccctctgactgaatacattcatgttactttatcagcaaattcattccgtttttgattgtatatagttgcttctttttttactgatacaaaatattttatatatttctggggtacatgggctaatttttgyatttttggtagagatggggttttgccatgttgcccaggcaggtctcgaactcctggcctcatgtgat

SEQ ID NO: 580156 - DNA, 414 bp, Homo sapiens
gccaccacgtccgactaatttttgtatttttaatatagatggggttttamcatgttgatcaggctagtcttcaactcctgacctcgtgatccgcccgcctcagcttccctaagtcctgggattacaagcgtgagcaccgcgcccagcctaacaggattttcttaaaaaaaaaaaaaaaaaaaagtcattgaaagtagcttaaaattgccatagtatattttcatttttgtgtctttgtaaaaaaaaaaaaaaaaccactaaggctgttaaaaatagctaaatgaaacttgaaagtaacagtttcaacttcgtttagtaaggcatagcatgagtagaagtgcgtgtttaaagtagaaggattttatttttatccccgttcagctacccgtagtactgtcatcaatcacttctacc

SEQ ID NO: 580157 - DNA, 414 bp, Homo sapiens
gccaccacgtccgactaatttttgtatttttaatatagatggggttttaacatgttgrtcaggctagtcttcaactcctgacctcgtgatccgcccgcctcagcttccctaagtcctgggattacaagcgtgagcaccgcgcccagcctaacaggattttcttaaaaaaaaaaaaaaaaaaaagtcattgaaagtagcttaaaattgccatagtatattttcatttttgtgtctttgtaaaaaaaaaaaaaaaaccactaaggctgttaaaaatagctaaatgaaacttgaaagtaacagtttcaacttcgtttagtaaggcatagcatgagtagaagtgcgtgtttaaagtagaaggattttatttttatccccgttcagctacccgtagtactgtcatcaatcacttctacc

SEQ ID NO: 580158 - DNA, 555 bp, Homo sapiens
atatttgtaggtattagtttgtaccatatattttctttctttttttttttttttttgagacaaagtctcactttgtcaccaggctggagtgcaatggcacaatcatggctcactgcaayctccacctcccagatccaagtgattctcctgcctcagcctcccaagtagctgggactacaggcatgcaccaccacgcccagctaatttttgtatttttagtagagacagggtttcactatgttggccatgattgtctcgatatcttgaccttgtgatccacccaccttggcctcccaaagcgctgagattacaggcatgagccaccatgcacagccactgtaccatatattttcttatatactggattttgtttttccccattcagactagaggtaggcatgcatttcctctgcggattgtcacagccagcaatattagaaacaacagatgaaaaaagattaaaatcagagaagctcccactcccacaatttgccggggtggaaagaggatgaattggtgggaaatcaaaagaatgtgatgttttcccttgcattg

SEQ ID NO: 580159 - DNA, 555 bp, Homo sapiens
atatttgtaggtattagtttgtaccatatattttctttctttttttttttttttttgagacaaagtctcactttgtcaccaggctggagtgcaatggcacaatcatggctcactgcaacctccacctcccagatccaagtgattctcctgcctcagcctcccaagtagctgggactacaggcatgcaccaccacgcccagctaatttttgtatttttagtagagacagggtttcactatgttggccatgattgtctcgatatcttgaccttgtgatccacccaccttggcctcccaaagcgctgagattacaggcatgagccaccatgcmcagccactgtaccatatattttcttatatactggattttgtttttccccattcagactagaggtaggcatgcatttcctctgcggattgtcacagccagcaatattagaaacaacagatgaaaaaagattaaaatcagagaagctcccactcccacaatttgccggggtggaaagaggatgaattggtgggaaatcaaaagaatgtgatgttttcccttgcattg

SEQ ID NO: 580160 - DNA, 526 bp, Homo sapiens
aggtctctgaactggccccccggggcgtacctgtctcttatggttgagaytgcaggggtgaaataaactccagtctcccatagcgctcccaggcttattaggaagaggaaattcccacctaataaattttggtcagaccagttgatctcaaaaccctgtctcctgataagatgttatcaatgacaatggtgcccaaaacttcattagcaattttaatttcgcctcagtcctgtggtcctgtgatctcgccctgcctccacttgccttgtgatagtctattaccctgttaagtacttgatgtctgtcacccacatctattcgcacactccctccccgtttgaaaatccctaataaaaacttgctggtttttgtggcttgtggggcatcacggatcctaccaatgtgtgatatctcccccagacgcccagctttaaaatttctctcttttgtactctgtccctttatttctcaagccagccgacgcttaggaaaatagaaaagaacctacgtgattattggggcaggt

SEQ ID NO: 580161 - DNA, 526 bp, Homo sapiens
aggtctctgaactggccccccggggcgtacctgtctcttatggttgagactgcaggggtgaaataaactccagtctcccatagcgctcccaggcttattaggaagaggaaattcccacctaataaattttggtcagaccrgttgatctcaaaaccctgtctcctgataagatgttatcaatgacaatggtgcccaaaacttcattagcaattttaatttcgcctcagtcctgtggtcctgtgatctcgccctgcctccacttgccttgtgatagtctattaccctgttaagtacttgatgtctgtcacccacatctattcgcacactccctccccgtttgaaaatccctaataaaaacttgctggtttttgtggcttgtggggcatcacggatcctaccaatgtgtgatatctcccccagacgcccagctttaaaatttctctcttttgtactctgtccctttatttctcaagccagccgacgcttaggaaaatagaaaagaacctacgtgattattggggcaggt

SEQ ID NO: 580162 - DNA, 526 bp, Homo sapiens
aggtctctgaactggccccccggggcgtacctgtctcttatggttgagactgcaggggtgaaataaactccagtctcccatagcgctcccaggcttattaggaagaggaaattcccacctaataaattttggtcagaccagttgatctcaaaaccctgtctcctgataagatgttatcaatgacaatggtgcccaaaacttcattagcaattttaatttcgcctcagtcctgtggtcctgtgatctcgccctgcctccacttgccttgtgataktctattaccctgttaagtacttgatgtctgtcacccacatctattcgcacactccctccccgtttgaaaatccctaataaaaacttgctggtttttgtggcttgtggggcatcacggatcctaccaatgtgtgatatctcccccagacgcccagctttaaaatttctctcttttgtactctgtccctttatttctcaagccagccgacgcttaggaaaatagaaaagaacctacgtgattattggggcaggt

SEQ ID NO: 580163 - DNA, 526 bp, Homo sapiens
aggtctctgaactggccccccggggcgtacctgtctcttatggttgagactgcaggggtgaaataaactccagtctcccatagcgctcccaggcttattaggaagaggaaattcccacctaataaattttggtcagaccagttgatctcaaaaccctgtctcctgataagatgttatcaatgacaatggtgcccaaaacttcattagcaattttaatttcgcctcagtcctgtggtcctgtgatctcgccctgcctccacttgccttgtgatagtctattaccctgttaagtacttgatgtctgtcacccacatctattcgcacactccctccccgtttgaaaatccctaataaaaacttgctggtttttgtggcttgtggggcatcacggatcctaccaatgtgtgatatctcccccrgacgcccagctttaaaatttctctcttttgtactctgtccctttatttctcaagccagccgacgcttaggaaaatagaaaagaacctacgtgattattggggcaggt

SEQ ID NO: 580164 - DNA, 621 bp, Homo sapiens
taaaaacaaaaatgaggaaagtatatcaccactacttttcaccattgcattgaagattctagcccatgcaataaagcaaggttaaaaggrcagatagaagaagaaataaagtagtctttatttacagaaaatatgatcatagacgtagaaagtactaagaatctgcaaaaaatttttaaaacactttattgaactaataatttagcaaagtattagtatataaggtcaatctacaaaaatctatatttctatacaattggacaataaaattaaaagatttttataacagtatcaaaaccataagacaactcacataataggaaaaaatattttcaagttttctatctgagaaggaattaataaccagaatacataaggtgctcaaacaactcaataggaaaacaatctaataatcccattaaaaatagtgaaaagatccgaatagctatttctcaaatatgaatgacagtcaggtatgtgaaaatgtgctcaacattattgatcatcagggagttgcaaatcgaaaccgcaatgagatatcatctcaccacagttcaaatggcttttatccaaaagacaggcaataatgaatgctggtgaggatgtagtgaaaggggaacc

SEQ ID NO: 580165 - DNA, 614 bp, Homo sapiens
gctattcagtaaaacactaatttaggtgtcactgtgaagagattttgcaaatgtaatgaatgctgacaaacaagagaaaacgtgctccatctaaaaaaggaracaccatatagctctggcctactgaagccaggagggagcttagcctactgctgccagatcttctgattttaaagagaagccggagaaaatccagattttgatacatcttccaatttcttaatgtgcatcacttttttcaagtactgtgtgattcatataaagtacatctgtgggcacctgtttgcaatctcagctctaatcgttagtgaaattggagtaaagcagaattagcttaatctcatttccttccctttccttttcctccttcctgtggtgctctccaagtctgtctggtatgtaatcctttagtactttcatttctccaactaagagattcattgactggtcgtctcaaatcatattacaaagtaagtaaaagaggaaatatcccttctcgttttaacagctatgaaacctgaggcaagaaacctcataggtaaacactgagacttattcaacgcactgagtttaaaaggacttggtgataaatttaaatgcagcttgatgtttta

SEQ ID NO: 580166 - DNA, 646 bp, Homo sapiens
gatatgtaactaacctgcacattgtgtacatgtaccctaaaacttaaagtataataataaaaaagaaatatatgtgttaaagagtttagcaacaatatcctattataaagtcatatattaatataaaatcaactatttaaaaataacccaaaacaatcagtaacataaaatgtagaaaaggaaacatagtaacagaaaggtagttgttacatcaaatgaagaaattatttttatttttcttcttaaaagtttctgtattttctgcatattctgtaatgaacatgtattgcttttctatcagagaaagtaaacaagctaataaaatcagtttatataaaacaaatattattaataamacaagtgaagaaacaagtaaaaatattatcatctatttgagaatgaacaatttttctaagcccccacccagatgtatatcatttatcctataatagggattcacaaatagtaaatatattatttctgctttttttgttgttgtttccataggcagagaacaggaagtaattaatatctagaatctacggttctcccaaaatcatcatagaaagacccatatgtttaaatgttatctttttaatgctattaaggctaaagaaacaattttgattcaaattcaagattattc

SEQ ID NO: 580167 - DNA, 646 bp, Homo sapiens
gatatgtaactaacctgcacattgtgtacatgtaccctaaaacttaaagtataataataaaaaagaaatatatgtgttaaagagtttagcaacaatatcctattataaagtcatatattaatataaaatcaactatttaaaaataacccaaaacaatcagtaacataaaatgtagaaaaggaaacatagtaacagaaaggtagttgttacatcaaatgaagaaattatttttatttttcttcttaaaagtttctgtattttctgcatattctgtaatgaacatgtattgcttttctatcagagaaagtaaacaagctaataaaatcagtttatataaaacaaatattattaataacacaagtgaagaaacaagtaaaaatattatcatctatttgagaatgaacaatttttctaagcccccacccagatgtatatcatttatcctataatagggattcacaaatagtaaatatattattyctgctttttttgttgttgtttccataggcagagaacaggaagtaattaatatctagaatctacggttctcccaaaatcatcatagaaagacccatatgtttaaatgttatctttttaatgctattaaggctaaagaaacaattttgattcaaattcaagattattc

SEQ ID NO: 580168 - DNA, 566 bp, Homo sapiens
cacctttcttttgacttctatctagtaagaagcaggctgatgggcttctttctgggaagagttcagaagaaatcaactccttycccccagtgccctctgatcatctcactcctttccccagaattaagggaaaactgatcatgaattgttccagggccctgggggcgttggtggaagatagatgccaagatagacttctgaaacctcaatatcctgcttgccaattccatgcatgctaaatttcttagtatcaacagtgtggaagaatggatggttcttctggcagaaacagtagacctgagacaaaacatatagactatcttggtactcaatggcttactgacttatgtatgtaggaggtcctaagttcaccaggtcttgtcattttcatcttctctctctcaaatttatcttttccctgctattctcactgccgcagttcagacactgagaatttccaatctggtccttacttcacactttcacagcatccaactgcaagtatggtccaatatatttatactgaactgaattcagttcctcaataaatgattttcttcaacatt

SEQ ID NO: 580169 - DNA, 430 bp, Homo sapiens
ttctccctacccttggaacacttactgtccacagggggcaaggtgtagagacagagttgcaaaccactaagaacagtgctgtgaatggaggtttgcatccagtgtgctrtgacagcacaaaggaggaagacatctcttcatgataaagtcaggaatcacttcatggaggaactcacatttgacatttgaagttcttaccatgtgaacaaggagaaggaagacattttgaatggaaggatagtgtgttcagaattggttgcttccagtaggttcttggtctcactgacttcaagaatgatgccacggaccctcacagtgagtgttacagttcttaaagatggtgtgtccagagttttttccttcaggtgttcagatgtgtccagagtttcttccttctggtgagttcgtggtcttgctgacttcaggagta

SEQ ID NO: 580170 - DNA, 430 bp, Homo sapiens
ttctccctacccttggaacacttactgtccacagggggcaaggtgtagagacagagttgcaaaccactaagaacagtgctgtgaatggaggtttgcatccagtgtgctgtgacagcacaaaggaggaagacatctcttcatgataaagtcaggaatcacttcatggaggaactcacatttgacatttgaagttcttaccatgtgaacaaggagaaggaagacattttgaatggaaggatagtgtgttcagaattggttgcttccagtaggttcttggtctcactgacttcaagaatgatgccacggaccctcacagtgagtgttacagttcttaaagatggtgtgtccagagttttttccttcagrtgttcagatgtgtccagagtttcttccttctggtgagttcgtggtcttgctgacttcaggagta

SEQ ID NO: 580171 - DNA, 649 bp, Homo sapiens
gctctgagccttgccgctcccactctcactgcaggtctgcaaataggaaatgaatgactacctgtcacagaagctgtgaatgtgatagctgtgttagggaaaatgttgatccacatcacctccgaaatcccttccaattagtgtaccctttgagtctgtgacattctgcaccctcaaagagtctatatacttctgagaaaatgggacaaaggggaaagtaactttttagaaagaattttaaacattcgtgttgattatcaacatcatgcttattataggcaatttggaaaattcaggaaagtagtaagaagaaaagaaatgctacacaacaacacagtgatagccacagtgaacacttggtgtctcttctttcatttktctccatgtttatcaaatttttcagttacagttatattataaacacaagttttttaaattgcctttataatttagagatataatgaaaatattttactatgcattaaaaaactttttgtcaatgtcattttaattacatgatttttgaaatttcttatatgtaatattttctctctgattcagataatttcttaggatagatttctttcctttctttcttttcttttcttttcttttttttttttgagatggagtctcactctcttgccca

SEQ ID NO: 580172 - DNA, 587 bp, Homo sapiens
aacactaatactcagcagaactctgatcaaatatttaaatggtttggggtggtgcctggtcatcaagtttgtttaagctgcccaggtgattctaaggtgcagctagcctgagaactacaaatttagaggtaagtggcaataaattatttaccagtatgtacacagtgcttaggtattcagctaggtgtggtttgactagcatgatttttgagtgagcactggaaccaacattctgtaacagtataaaaatgttttttgaattatagctgttcacactaaaatttttgatttttatgagcatacatttatttagcttttttggtattaaacttggtgtttccaygcaaagcattaaacatgtgccacaaattttaaaatttgaaacaatgaataaaatggggtatatttctaaagtggtaaatattgaccattttatacatagccacaaacctggggtccaagaggtaaatggatcctgagaccaaaaagtttcagaaccactggtctaatccattatgttactttcttcagtgttcttatctatttctgaaattatcttattggtttatgtgtgcatttactgtgtg

SEQ ID NO: 580173 - DNA, 570 bp, Homo sapiens
acaaaatggcaggagtaagtccttacttatcaataataacattaaatataaatggactgaatgctccaaccaaaagacatcaactggccgaatggatgaaaacacaagaaccattgatctgttgcctaaaacaaacacacttcacctataaatgcacacatagactgaaaataaaggaatggaaaaagatattccatgctaatggaaacaaaaaaaagatcaggasttgctatatttacatcagacaaaatagatttcaagaaaaaaactgtaagaagtgatatagaaggtcactgtataatgataaaggaatcatttcagcagaaaatataacaattttaaatatatatgacccaacactggagcacccaggtatataaaaagcagctattattagagctaatgtgagaggctccaatacaatagctggagacttcaacaccccactttcagcactggacagatcttccatacagaaaatcaacaaacaaaataaagcaacattagacttaatctgcactgtagaccaaatggatctaaaagatatctacagaacatttcatcctatgg

SEQ ID NO: 580174 - DNA, 570 bp, Homo sapiens
acaaaatggcaggagtaagtccttacttatcaataataacattaaatataaatggactgaatgctccaaccaaaagacatcaactggccgaatggatgaaaacacaagaaccattgatctgttgcctaaaacaaacacacttcacctataaatgcacacatagactgaaaataaaggaatggaaaaagatattccatgctaatggaaacaaaaaaaagatcaggagttgctatatttacatcagacaaaatagatttcaagaaaaaaactgtaagaagtgatatagaaggtcactgtataatgataaaggaatcawttcagcagaaaatataacaattttaaatatatatgacccaacactggagcacccaggtatataaaaagcagctattattagagctaatgtgagaggctccaatacaatagctggagacttcaacaccccactttcagcactggacagatcttccatacagaaaatcaacaaacaaaataaagcaacattagacttaatctgcactgtagaccaaatggatctaaaagatatctacagaacatttcatcctatgg

SEQ ID NO: 580175 - DNA, 514 bp, Homo sapiens
cttactatcttccccagtggttgaactaatttacattttcatcaacagtgtaaaagcattcctatttctccacagcctcatcagcatctattgcttcttagctttgtaataatcaccattctgactggcatgagatggcatctcattgtggttctgatttgcatttctctgatgatcagtgatgttgaggtttttttttctcatgtttgttggccacaaaaatgtcatcttgtgagaaatgtctgttcataacctttgcccacttttygatgtttttttttgcaaatatgtttaaattccttgcaaattctggatattagacctttgtcagatggatagattgcaaaaatgttctcccattctgtgggttgtgttactctgatgatagtttcttttgctgtgcggaacgtctttagattaattagatcccatttgtcaattttggcttttgttgcaattgctttcagtgttttagtcatgaagtctttgcctgtgcctatgtcctgaatggtac

SEQ ID NO: 580176 - DNA, 477 bp, Homo sapiens
tatgtttcatacacaatgataataatttagaaatatataaatatgaatgagataaccctgaccttaagtagctcagtttgatgagggtataaacacaggtcacagatactgatagtacaatcagtttgacaactcagaatcatttaatatcgcaatatcatcaatagtcatgtaaaaatatggagaatggcatagtgttttccaactgatagatattccagaagttctgtctagaactctaactttcaatacttaacattttctcagaaagaccatttcagactctcaagcaagcttytgtactagctcctgtcttttttcaaaatgctttttcttaagatacctctttcaaaaattagggaatggaatcagtcttccaaagataaataatcccattctaagattcctgggctcgtgatttaaattccataggtcagaagtaggaagaggaatcactctggatggtttatggggaac

SEQ ID NO: 580177 - DNA, 509 bp, Homo sapiens
gcactacaatgtctggttaatttatgtatttttagtagagacggrtttccccatgttggccaggctggtctcgaactcctgacctcaggtgatccgcccacctcagcctcccaaagtgctaggattacgtatatgagccaccgcgcccggccacataagaaattaaatacctgggttttagttggggtctgtcaattgctaattttgtacttttgagctagtaacttcacttcctatgccatagtaaaataggcataattccacctcacagactgctatgaggactaaatgaaatgcaggagaaaaatttgtgaaagccctttggaaacaacagaatatcaagtaaatgtagggttgcagtattatgatcgttattctaaagattggtcatatatttatcttttccttatttttgtttccctaaagcataagtttatcctgactcttggcagaactaggaacaagtctttcttgactgtccttcttcttttaaaagtctctccttaata

SEQ ID NO: 580178 - DNA, 428 bp, Homo sapiens
cataatatattaccttttatgagtgttgcaatatttgatttgctaaaatactttcaggatttttccatctatcttcatgagggttattggcctgtaactttttacttctagtgtctttttgttattgaggtgatgttggcctcataaagtgagttaggaaacgtactttcttctagaaagtagaaatggtgttatttccatcttgaatgtttggtaaattgtaccagtgatgccacctgggcctggagttttctttgcaggaaggcttttaatgcaatcttagtcatttaatggatggaaggttgtccaggttatcttttttttttttttttttttttttttttggcctttgaaagagtcaatttgggaatttattggcawaaatttgtttaaaaaatccccttaccttctttctaattcctatagga

SEQ ID NO: 580179 - DNA, 460 bp, Homo sapiens
ttcgtcaggtatatcaacttaatatattctacctagaactgtgttcacccttctacaacttctgcaatttttacagcttctcctaaggcactttccgtaaggcaccacaacctgttcatcctgtactccaaaaacggtttaaactcaagtctttctcgctttggcttctttccctaaccacacttggctctgatctctccmtacaaactataattagtcacatatctatgtatcttgcactttttatctttttaaaaaatctatgcctcgttgtgcatttattcttatatgcagtcagtgctgctgtaaacggaagcagaaactatgttcttcattaacttgattacagattaccaaggtccatgaatcattcatacactaagagcttctacggaatctgacatcatggactttcattacataattcatgtatttgttcaccaaatatttactgataact

SEQ ID NO: 580180 - DNA, 575 bp, Homo sapiens
aaaagtataatataaatatgatgattccttgctcttaacagattggctttaacaagaattaacaatcaaattctctgctaggccactcaagttttcctcttattattttcatttatcacaacaatggaaatgattcttacttattccttttttatacattctcatagttgaaaattaattacattgtctttaagccttaacatgaatatttacawgttaaatttctaatctgtatatttatcatacctagcgatcgcataatcattgaatggaagccgattgcaagtgctttcaattcaggttgaacaatcctgtaatatgattaaagcaaagaaacaatacacatcattaaaatatcaaactgagttaatatcaaaacatttatcagtatcatttttcttcatgattgaatgagaacccttaagtgaatggcccacattaaatatagttatattttcaattgttttaaaaggcaaacacctggatggtagtaataattatttttatttcttatttattctatgctttatgatttcaggacagtttaacaaatattttcatatttgatccttatg

SEQ ID NO: 580181 - DNA, 540 bp, Homo sapiens
ttctagcattgaacataaacagaactcttgatgacacaatcatgctaactaccacatcttttctctgcttcttcttctaacacttctcctgaaaagaactttccatactgactgctacactttcctttctagcattttttcttgatcctcttcaatacagcctttcagattctatgcagcacacattacagtcacagtttcaaagggagaaaaatcctgttaaaacaaaataaattcaaaataaggagagatagcttatccaaatgaggaagaaccagataaacaattctggaagtataaagaagaaagagtgttacaacatctccaaaggaccacactaacctccagcggtggattctaaacacaataaaatcttttatatagtcaatgaagaacgcacacctgtagtctcagctactcaggaggctgaggcaggagaatcrcttgaagccaggaggtggaggttgcagtgagccgagattgcgccactgcactccagcctggtgacagagtgagactccaactcaaaaaaaaaaaaaa

SEQ ID NO: 580182 - DNA, 480 bp, Homo sapiens
aataacccactgacagcaacaggaagatcatggaggctaaaaatcaacaaagaaagctggtaagttgaacactagaccgaatgaacctaacaaatatttgcagaacatcttatattactaccacagaatatagattcttcacagctgcatgtgaaacatgctaaaaaattgaccatatgccatgccacaggcaagagtgaatacatttttttaaaaatcaaagttacatcaagtaccttttcagaacacagtgaaataaaaatagaaattagcacatagaggaattctcaacactatacaaatacatggaaattaaataacttgttcctgaacaattattgggtcaatgatgaaatcaaggcagaattatttttaaaaatcaaaatgaatgaaaataaagacagcatgtcaaaacctctgagatgcagcaaatcagygctaaaagggaagtttgtagcattaaatggctaatattatgcc

SEQ ID NO: 580183 - DNA, 485 bp, Homo sapiens
tatccaaattgtaaaacaagtgttcaaattatttctgtttatttatgatataatcttatacctagaaaatcctaaagactcctctgaaagtctcctagacttgataaactactccagtaaagtttcaggatataaaaccaatgttcaaaaaccagtataatttccatacaccaataatgatctagctgagaaccaaatcaacaaatgaatcccaatacagttatctatctgatagataactgatagataatatagttgtctataacaagattttyttactgatatatataatagataaaaaataaaataaataggaatacatttaacctaagaggtaaaaaatctctacaaaaagaactgatgaaaaagtcatatatgacaaaattgaatggaaaaacttcccacactcataaattgaaataattaatattatgtaaaatgaccatcctgcccaaagcaacctatattcaatgcaatttccatta

SEQ ID NO: 580184 - DNA, 505 bp, Homo sapiens
tgccagaattctatttaagcaggcgaaagcagcattcaagaccataatgrcagataataacatagataatattattaccagagaggtccaacacaacagaatgtcctgactaatggtaagagcacagaaggcgaacattaggatcaaatgatttgagagatttaatcaggcagtgtttgtaggtaggtggctttaaaaaaaatctattctgattctaggctaaacaaaagtttaagggaagtttgcctttaacctactagtgctaaagactaattattgaaggaagaattttaaaagaatttaaatctatacttttatggttccaccaagcttcctttaatcctccttttttcactaagaataatatggaacaatcttttatggagaaagcacactggccaataaaaccaaactttgatacagagaacattattttaaaaagagatttcttttttactgaggatttagtaaaggaattttgcagtagcccccagatggtatagcc

SEQ ID NO: 580185 - DNA, 505 bp, Homo sapiens
tgccagaattctatttaagcaggcgaaagcagcattcaagaccataatgacagataataamatagataatattattaccagagaggtccaacacaacagaatgtcctgactaatggtaagagcacagaaggcgaacattaggatcaaatgatttgagagatttaatcaggcagtgtttgtaggtaggtggctttaaaaaaaatctattctgattctaggctaaacaaaagtttaagggaagtttgcctttaacctactagtgctaaagactaattattgaaggaagaattttaaaagaatttaaatctatacttttatggttccaccaagcttcctttaatcctccttttttcactaagaataatatggaacaatcttttatggagaaagcacactggccaataaaaccaaactttgatacagagaacattattttaaaaagagatttcttttttactgaggatttagtaaaggaattttgcagtagcccccagatggtatagcc

SEQ ID NO: 580186 - DNA, 505 bp, Homo sapiens
tgccagaattctatttaagcaggcgaaagcagcattcaagaccataatgacagataataacatagataatattattaccagagaggtccaacacaacagaatgtcctgactaatggtaagagyacagaaggcgaacattaggatcaaatgatttgagagatttaatcaggcagtgtttgtaggtaggtggctttaaaaaaaatctattctgattctaggctaaacaaaagtttaagggaagtttgcctttaacctactagtgctaaagactaattattgaaggaagaattttaaaagaatttaaatctatacttttatggttccaccaagcttcctttaatcctccttttttcactaagaataatatggaacaatcttttatggagaaagcacactggccaataaaaccaaactttgatacagagaacattattttaaaaagagatttcttttttactgaggatttagtaaaggaattttgcagtagcccccagatggtatagcc

SEQ ID NO: 580187 - DNA, 547 bp, Homo sapiens
ctagacaaggtgacaggtaagttattccattgtttccacagacgggttcccattgactttcatcacaattgcactctgagttgcaataagaaagtggtacatctacatgagatcttactggactatttctgaaaatatatgatagacatatatcaaaaagagagaaagagaagagagaggaagaaaagaaggaagaggaggagagagacaagggggaagtagaagggaaataaaggaggagggaaggtgagggaaagaaaagagaaatgaaataaaggattttcttcaattagatcaagaaatttgatctgatgatgccaaaataggtttttaaaaatgcttttaawttttttaatgcttgtaactctccttctttaccaaaacatgatttgttacttagaaaaagtaaaacttaaaaaagaaataagagattagataagacttagacaagaggttgttatgattccatcaagaaggttcacattagaaaagtaattttatttttctagactcagttttttttttggtgaggtaatggcgttagatt

SEQ ID NO: 580188 - DNA, 693 bp, Homo sapiens
tctgtgattgccaggtcaatcaactataatagaagttaaaagtggaaggaactacttagaacaaaaggaagttttagagtacagcaagacaggcccggaaatagttattgagagatggatgatatgggctttgaaagatcttgttctctataggcctctaaagattttcattagatatgaacagtactaacagtagtttctttaaaaaatagtttcctctgattataataaaacaaaatacattttgagaaatggcacagaacagaaaagaggtaagaaaatgtatagtaagaataaacaatatttaaaattgttaggycaaagtgctaaacttccctctattggtctcccctgtgagtaagaatcaccactgatttgtgaggccttctaagagagtcgtgatctttggtcaaaaggaatgaaacgtgtagattaaccaaactgttaaatttttgtggcagacagcaatttggatgtcatctggtctgaacttctatacaattgtgacgtattacttatttttaataaacagatcaataaacaactcaagtgacatgaagctgactacctgagagcaatttgctcaacttttgaacagttctcattgtttaaaaattgtctttgtaatgaactgaaattttcctttctttctaaccaattagtcttagttttcaacaagaacatagagaataa

SEQ ID NO: 580189 - DNA, 693 bp, Homo sapiens
tctgtgattgccaggtcaatcaactataatagaagttaaaagtggaaggaactacttagaacaaaaggaagttttagagtacagcaagacaggcccggaaatagttattgagagatggatgatatgggctttgaaagatcttgttctctataggcctctaaagattttcattagatatgaacagtactaacagtagtttctttaaaaaatagtttcctctgattataataaaacaaaatacattttgagaaatggcacagaacagaaaagaggtaagaaaatgtatagtaagaataaacaatatttaaaattgttaggccaaagtgctaaacttccctctattggtctcccctgtgagtaagaatcaccactgatttgtgaggccttctaagagagtcgtgatctttggtcaaaaggaatgaaacgtgtagattaacmaaactgttaaatttttgtggcagacagcaatttggatgtcatctggtctgaacttctatacaattgtgacgtattacttatttttaataaacagatcaataaacaactcaagtgacatgaagctgactacctgagagcaatttgctcaacttttgaacagttctcattgtttaaaaattgtctttgtaatgaactgaaattttcctttctttctaaccaattagtcttagttttcaacaagaacatagagaataa

SEQ ID NO: 580190 - DNA, 625 bp, Homo sapiens
ataaacaactcaagtgacatgaagctgactacctgagagcaatttgctcaacttttgaacagttctcattgtttaaaaattgtctttgtaatgaactgaaattttcctttctttctaaccaattagtcttagttttcaacaagaacatagagaataaatccaatatgtcttttctcctgactataggtatttaggtatgttatccattcttaacaggcacttattaataattaagattctctttactattcacgtcactaacccccccgaaaaccagctcataatatagacaatgttactattgtaccatttttgtatcttcattatcctctttattatttctggattcacagtcaactctgactcttataggtttgaaaatccattaattattatggatttgattagataaagcagaaacatggcacacacaaaacaaaaattccttgatatgctatttttagaatgcttattaaaaaacttttaaaacagtggtgtgctggtaaatgtttaacaactgatttgttggttgggaaaccwgatttgtaggatttctcaatttccatggtaacgtatggtggtaaattctcctaccatggacaatttcaagctaccaatgcagttg

SEQ ID NO: 580191 - DNA, 625 bp, Homo sapiens
ataaacaactcaagtgacatgaagctgactacctgagagcaatttgctcaacttttgaacagttctcattgtttaaaaattgtctttgtaatgaactgaaattttcctttctttctaaccaattagtcttagttttcaacaagaacatagagaataaatccaatatgtcttttctcctgactataggtatttaggtatgttatccattcttaacaggcacttattaataattaagattctctttactattcacgtcactaacccccccgaaaaccagctcataatatagacaatgttactattgtaccatttttgtatcttcattatcctctttattatttctggattcacagtcaactctgactcttataggtttgaaaatccattaattattatggatttgattagataaagcagaaacatggcacacacaaaacaaaaattccttgatatgctatttttagaatgcttattaaaaaacttttaaaacagtggtgtgctggtaaatgtttaacaactgatttgttggttgggaaaccagatttgtaggatttctcaatttcmatggtaacgtatggtggtaaattctcctaccatggacaatttcaagctaccaatgcagttg

SEQ ID NO: 580192 - DNA, 625 bp, Homo sapiens
ataaacaactcaagtgacatgaagctgactacctgagagcaatttgctcaacttttgaacagttctcattgtttaaaaattgtctttgtaatgaactgaaattttcctttctttctaaccaattagtcttagttttcaacaagaacatagagaataaatccaatatgtcttttctcctgactataggtatttaggtatgttatccattcttaacaggcacttattaataattaagattctctttactattcacgtcactaacccccccgaaaaccagctcataatatagacaatgttactattgtaccatttttgtatcttcattatcctctttattatttctggattcacagtcaactctgactcttataggtttgaaaatccattaattattatggatttgattagataaagcagaaacatggcacacacaaaacaaaaattccttgatatgctatttttagaatgcttattaaaaaacttttaaaacagtggtgtgctggtaaatgtttaacaactgatttgttggttgggaaaccagatttgtaggatttctcaatttccrtggtaacgtatggtggtaaattctcctaccatggacaatttcaagctaccaatgcagttg

SEQ ID NO: 580193 - DNA, 461 bp, Homo sapiens
gcttatattcaaaagaagagtcactatcaagtggtaaaggatcctaattcacattactgacttcaattactttaataacagctattgtttccacttcatttttgaatacttaggtaagctataattatatatatattaaaattatatataatctwattaaaattatatataatcttattaaaatatatataattttaattaccaagaaaaataatcttactccaattacctacagagaaacctctcctgaattccttctccttattctatctctacacttgagaatagttaagtataaccttaccactatttaagatactttactacaatgatctatatacttctcaatattatccactaggtttttgaaaaataaaagtgatgttctgtcaccagggcatagtgtggtggctggtaccttctgttgaataagtgaatgaatgaaatattataatcttttt

SEQ ID NO: 580194 - DNA, 422 bp, Homo sapiens
cagagccatagagaccaaaacaacatgcagtatgctacgggcatagaaacagacacatagaccaatggaacaaaatagagaacccagaatccatacaactacagtgaactcattttagacaaaggtgccaaaagcatgcactgaggaaaagacagtctgtttaatamatggtgctgagaaaacaggatatccatatgcagaagaataaaaccaggcccctgtctctcaccgtatgcaaaaatcaaatcaaaagtgattaaagacatacatctaagacttcaaactatgaaactactacaagaaaatattggtgaaaatcatcaggacattagtctgggtgaaaaaaaaatattgagcaatacctgacaaacacaagcaaccaaagtaaaaatacacaaatgggatcacatcaagttaaaaag

SEQ ID NO: 580195 - DNA, 422 bp, Homo sapiens
cagagccatagagaccaaaacaacatgcagtatgctacgggcatagaaacagacacatagaccaatggaacaaaatagagaacccagaatccatacaactacagtgaactcattttagacaaaggtgccaaaagcatgcactgaggaaaagacagtctgtttaataaatggtgctgagaaaacaggatatccatatgcagaagaataaaaccaggcccctgtctctcaccrtatgcaaaaatcaaatcaaaagtgattaaagacatacatctaagacttcaaactatgaaactactacaagaaaatattggtgaaaatcatcaggacattagtctgggtgaaaaaaaaatattgagcaatacctgacaaacacaagcaaccaaagtaaaaatacacaaatgggatcacatcaagttaaaaag

SEQ ID NO: 580196 - DNA, 491 bp, Homo sapiens
actgagatccaagacctgaacagaccaataacaagtaatgaaattgaagctgtaattaaaagtctcccaggaaagaaaagccaaggacctgctgggttcactgctgaawtctaccaaacatttaaagaagaattaatatcaatcctgctcaaactattctaaaatgtagataaggagaaaatatttctaaactcattctattaggttggtgcaaaagtaactgcagtatttgccattggttttaatggcaaaaccaacctaagacaaggtcggaattatcctgctatgcaaaccagacaaacatacatcaaaaaaagaaaactacaagccagtatctctgatgaatattgattcagaagtcctcaacgtagtactagcaaaccaaattaaataatacattaaaaagatcactcatcataaccaagttggatttatcccagggatgtaagaatggtttaacacatgcaaatcaatcatgacacagatatcaa

SEQ ID NO: 580197 - DNA, 592 bp, Homo sapiens
aaagctaaaaaatcatttgataaaattcaacaatgcttcatggtaaaaaccataaaaaagctgggtatacaaggaatatacccaaatgtaataaaagccacttataacaggcccacagagctagtagcatacygagtgggcaaaaactgaaatctttcttctaatatctggaatatgaccaggacacccagtttcaccactgttattcaacatagtagtggaagacctagctagagcaattagacaagtgaaagatataaagggcatccaaaaggaaaggaagtcaaattatccttgtttacaggtgatataatcacatattcagaaaaacctaagaccccaccaaaaaaaagaaaactattagaactgttaaacaaatttagtcaaattgcaggatacaaaatcaacatataaaaattagtaccatttctatatgtcaatagtgaacaatctgaataaaataattaaatcccatttacaatggccacaaaaaaattaaatgtgtggaggtcaacttaactaaagaagggaaagatctcaataatgaaaactttaaaacactgaggatagaaattgaaatcaagacacaaaa

SEQ ID NO: 580198 - DNA, 565 bp, Homo sapiens
cagtcatctcttggtacctgcgagggattggttccagtaccttccatggataccaaaacacaaagacgctcacgtcccttatataaaatggtgacatgcagtggccctccataataggctgattgtaatagtagaggaccttaatatgtccacttttagttataatagaacaaccagagagaatatcaatgaggaaatggagaacattacagatcaactggacccaattgtcagtgagcmctttattcattaacagtagaatatatattcttctcaaacagaaatggaacaatttttaagatagatcacatgttacaacacacaacaagtattaacaaatttcagattaaaatcatactaattatcttttgcaaccacaatggaataaaactagaaatcaatagcagaagcaaaactggaaagttcacatgaatgtgcatattaaacaacacatctttgaaaaattgattgttcaaatcaaccaaaagtgtatttagaaaatattttgagacaaacgagactgaaaacagagcattagaaaacatgagatgcaacaagagtagca

SEQ ID NO: 580199 - DNA, 411 bp, Homo sapiens
aaagcttttaggaaaagggaaaggatgactattctcaccaattatattcaatatagccctggaattgtatgccagagctattagtcaagaaaaaaaaataataaaatgcatcaaactagaaaggaagaagtaaaattatctccatttgcagatgatatgaccttatacatagaaaaccctagacttcacacacacacacacacacacacacacacacrcacacacacatacacatctgttaaattaaatgaacaagttctggaaagttgcaggataaaaaattcataagaaatgtttgcctttctattcactaacaaataactatctgaaaaggcaattgggaaaacaatcccattcacaattaaataaaaagaaataaaacatgataaatttaagcaggtgaaagacttg

SEQ ID NO: 580200 - DNA, 411 bp, Homo sapiens
aaagcttttaggaaaagggaaaggatgactattctcaccaattatattcaatatagccctggaattgtatgccagagctattagtcaagaaaaaaaaataataaaatgcatcaaactagaaaggaagaagtaaaattatctccatttgcagatgatatgaccttatacatagaaaaccctagacttcacacacacacacacacacacacacacacacgcrcacacacatacacatctgttaaattaaatgaacaagttctggaaagttgcaggataaaaaattcataagaaatgtttgcctttctattcactaacaaataactatctgaaaaggcaattgggaaaacaatcccattcacaattaaataaaaagaaataaaacatgataaatttaagcaggtgaaagacttg

SEQ ID NO: 580201 - DNA, 618 bp, Homo sapiens
caactacaatctacgttgttcatgggtcaactgtgtatattaacagtatgattttgtctgtatgtaacggttaaatatttttcctatctgttcttaaatgaattttgctaaaaaatcacattttatagatgtaattagatatacaaattttatactttttaactgtcagtattaattcttacctctttctattatctcagacggtgttctattgagtgataacatttgattaattaaacagtttggtaagtttgatgttgaattttctgatggatcaatattggtttctttagaatacctgtaactataagagtaacactggattgaacattttgcttatctgctgaatattttcacctttcccaaaaatgcagaaaaattttcccctttattgacactgtctttgaattaccggacttctctttgtcaatttcccaggatgtatgtcagaagaggaggtgataagwgggggtgggggtggggcgggaatgggagcatctactaagacagataattcaacacaccatggataaagtgggttatcacttttctataatcctaggagtgcttatattctggtcaagatgtaaaatatcctgtttcacctgtttttttttt

SEQ ID NO: 580202 - DNA, 526 bp, Homo sapiens
ataatcctaggagtgcttatattctggtcaagatgtaaaatatcctgtttcacctgttttttttttagtctgttaactrtatctatttatccctttgagttatcgccaaagatagtaagtctgtctgattttctttcatgaacacacacacactaatgcttgactcttcaaaactcaattaaaaatttctaacctattttaactttatgaggaagaacttaataaggaccaaagagatggtgctgaattagagacagatgctgatatccaaaagtactaaggagctctgtgagctctgagggcagctcatagtgtgccagatatgttcagcttcaatgagctagaagtaaagctcaatttttgtactttagagatttcacactctctgagataaaagcatatgatcaaagacacaataagtttaatatgcaaggtcccaagttgtcacatacacacacagaagagatgatcagctttgcttggaggtggtgggtagatcaaagaagacttcgcaatgtgagtgaca

SEQ ID NO: 580203 - DNA, 526 bp, Homo sapiens
ataatcctaggagtgcttatattctggtcaagatgtaaaatatcctgtttcacctgttttttttttagtctgttaactgtatctatttatccctttgagttatcgccaaagatagtaagtctgtctgattttctttcatgaacacacacacactaatgcttgactcttcaaaactcaattaaaaatttctaacctattttaactttatgaggaagaacttaataaggacmaaagagatggtgctgaattagagacagatgctgatatccaaaagtactaaggagctctgtgagctctgagggcagctcatagtgtgccagatatgttcagcttcaatgagctagaagtaaagctcaatttttgtactttagagatttcacactctctgagataaaagcatatgatcaaagacacaataagtttaatatgcaaggtcccaagttgtcacatacacacacagaagagatgatcagctttgcttggaggtggtgggtagatcaaagaagacttcgcaatgtgagtgaca

SEQ ID NO: 580204 - DNA, 603 bp, Homo sapiens
ttatgaggaagaacttaataaggaccaaagagatggtgctgaattagagacagatgctgatatccaaaagtactaaggagctctgtgagctctgagggcagctcatagtgtgccagatatgttcagcttcaatgagctagaagtaaagctcaatttttgtactttagagatttcacactctctgagataaaagcatatgatcaaagacacaataagtttaatatgcaaggtcccaagttgtcacatacacacacagaagagatgatcagctttgcttggaggtggtgggtagatcaaagaagacttcgcaatgtgagtgacagawaaaatgaatattgaagatggatagaagtttaactggtagacaaaggaagaaaagtattcaaggctgtagaaacaacaggtgcaaagagatgacatactctggcacatttagagaactgtaagcctggaatgtggtcctcaaatgtggggagcaatgcaagatgaagctgtggtggttgcatctaagcatgttctccttaaaaatcatgaagaataagatagtaagaagattagaaggaattatgggacactgaaattatggtgtcagaagtagagaaa

SEQ ID NO: 580205 - DNA, 553 bp, Homo sapiens
aaagaacagaattaatatgatgaccaaaaggcatgattgctggatatggcaatgagtaagtaattggcatctctaacagggactgctcattgtctctcggtatccttttttctctccttccatagtaaaagaagttggrgtttttagctggtaaccgcgtcctggaataaagcctttcccccccagtatctatatatctatgtgtaaaatgtaaccaatttctggtaaatgtgaagccagtggaaacattttgcttctgaaaatgctccttaagcctcagtctgtgtgcatttttggttcttctccttgttcttcttcccttcttctatcctgctgccagaaaatacattgccacaatttgtaccacgaggccaaggccatgcaaggcatagcactatgatgaaaagaatagaaccatatcatccttggactaactacattaacttttatgtaaaaaataagctctgtcttatttaagttttagctatttccagttttctcttatgaacaccttcctctaatcataactatgcagttaccttagaaagaacaa

SEQ ID NO: 580206 - DNA, 553 bp, Homo sapiens
aaagaacagaattaatatgatgaccaaaaggcatgattgctggatatggcaatgagtaagtaattggcatctctaacagggactgctcattgtctctcggtatccttttttctctccttccatagtaaaagaagttggggtttttagctggtaaccgcgtcctggaataaagcctttcccccccagtatctatatatctatgtgtaaaatgtaaccawtttctggtaaatgtgaagccagtggaaacattttgcttctgaaaatgctccttaagcctcagtctgtgtgcatttttggttcttctccttgttcttcttcccttcttctatcctgctgccagaaaatacattgccacaatttgtaccacgaggccaaggccatgcaaggcatagcactatgatgaaaagaatagaaccatatcatccttggactaactacattaacttttatgtaaaaaataagctctgtcttatttaagttttagctatttccagttttctcttatgaacaccttcctctaatcataactatgcagttaccttagaaagaacaa

SEQ ID NO: 580207 - DNA, 553 bp, Homo sapiens
aaagaacagaattaatatgatgaccaaaaggcatgattgctggatatggcaatgagtaagtaattggcatctctaacagggactgctcattgtctctcggtatccttttttctctccttccatagtaaaagaagttggggtttttagctggtaaccgcgtcctggaataaagcctttcccccccagtatctatatatctatgtgtaaaatgtaaccaatttctggtaaatgtgaagccagtggaaacattttgcttctgaaaatgctccttaagcctcagtctgtgtgcatttttggttcttctccttgttcttcttcccttcttctatcctgctgccagaaaatacattgccacaatttgtaccacgaggccaaggccatgcaaggcatagcactatgatgaaaagaatagaaycatatcatccttggactaactacattaacttttatgtaaaaaataagctctgtcttatttaagttttagctatttccagttttctcttatgaacaccttcctctaatcataactatgcagttaccttagaaagaacaa

SEQ ID NO: 580208 - DNA, 579 bp, Homo sapiens
tatttagattaaaacgtggaagaagagcaatcagagcagaccaattcagatttatctgtagcctgatatataacaattaacagacaacaatcaataattattgaacattgattgaaaatagtagcatgaaagaagagcatcaaaacagaccagcagataaagcaacataagcataagtacttaaacaagattaaactaaaaacagtaaaaacatttttttaaaaattctgttagcatatttagaggtacaagggcatgtagcatccataaaatcagaatggcagactaaaagtaacaaaagaatgataaagtattgttataaatttaaaatattattaaaaatttacaaattagaacttgatataataagatggcatcagagaagattgatgaaacatarggaaaataggtagaaatttagaagaaaaaaatttaaaagcaaaaatacccagaaaatatattatttatatcatatatgttacagaataaaatagaaaaaaacaaatagaaaacagaaaataaactcgctggtctggtgagatggctaacgcctataatcccagcactttgggaggccaa

SEQ ID NO: 580209 - DNA, 625 bp, Homo sapiens
tgtaattatcctctaacatgaaggagaaataaggatttctcagacaacaaaaattaaagaagttttttgtcagtttatttgcctggcaagatgttgaaagaagtttttttagagaaagaaaatactatagataaaaaactcagaacttcacaattaaagggagatatggcagaaaaataaggtaaaataaaaagtattattcttatatataattgatctaagaaatagttatttaaaataataattctacaatgtatttgattatgcatgcttacatataaattttaaaaatgtaacaatggtacaataaatgggagagaagaatagaagaatagaatccttttttgtttgtttgttattttgagacagaatctgtcacctaggctggagtttygtggcatgatctcggctcgctgaaaactctgccttcggggttccagcaattcttatgcctcaacttcctgagtagctgagattacaagcatgtacctccatacctggctaatttttgtatttttagtggaccaggctggtctcaaactcctggcctcaagtaatccacctgtctcagcctcataaagtgctgagattaaaggtgtgagctaccacatcttgttaataattt

SEQ ID NO: 580210 - DNA, 354 bp, Homo sapiens
aaaaaaactgagcactatttaggatttctattagagtaaaccaatgtcacattggtgctattcaagaggacacacattttttagccattgartataaaaaatattattctagacttgagcccaagagaactagaaagagttgagaaaagaaaagtttctatcatgcaaaatattttagaggactctgtcataaattcctgtcaaattagcataaatgccatctataatcagatatatataaaaatgaataaacagtgagataccactttggaataaattattgaatactgaaaaaagctgatgtctgataaatatgaacaagcaggggcaatctgtctagaaaaactatttttt

SEQ ID NO: 580211 - DNA, 607 bp, Homo sapiens
aatccatgtggggtctaatacctagatgatgggttgataggtgtagcaacccacatggtatgtttgtctatgtaacaaaactgcatgtcctgcacatgtatctcagaacttaaaataattaaaaaaacattttctaatatgaaataattagatacaacctaaatgcttatcagtatagaactagtaacatatattatggacaaattaatatcctgctaccataagaaaaataaggaggacttttattaatacaaagatagagaatagtgttaatagtatgctacttgtgttaaaaaaagacaatattatatacttaattaaaatacatattatatttctggataaggggacaatggttaaagaaaaaatctttgctttttttaaatttacatttcaactgcatgcattttctcttgaaaaagaaatgaacaacatcaaaataaaacaagatcatcatggtgtcaaggtcaagcatcaccagaattgctctaagaggtacttggagcacactttgtgtsgtttaacaaatccaaattctatctgtttttttagtctgattccagaggtatttcctttataaaactctctgaggttattctaaattaat

SEQ ID NO: 580212 - DNA, 607 bp, Homo sapiens
aatccatgtggggtctaatacctagatgatgggttgataggtgtagcaacccacatggtatgtttgtctatgtaacaaaactgcatgtcctgcacatgtatctcagaacttaaaataattaaaaaaacattttctaatatgaaataattagatacaacctaaatgcttatcagtatagaactagtaacatatattatggacaaattaatatcctgctaccataagaaaaataaggaggacttttattaatacaaagatagagaatagtgttaatagtatgctacttgtgttaaaaaaagacaatattatatacttaattaaaatacatattatatttctggataaggggacaatggttaaagaaaaaatctttgctttttttaaatttacatttcaactgcatgcattttctcttgaaaaagaaatgaacaacatcaaaataaaacaagatcatcatggtgtcaaggtcaagcatcaccagaattgctctaagaggtacttggagcacactttgtgtcstttaacaaatccaaattctatctgtttttttagtctgattccagaggtatttcctttataaaactctctgaggttattctaaattaat

SEQ ID NO: 580213 - DNA, 576 bp, Homo sapiens
cagtcagtattggtgagacggtgagtgtcaatattggggtaagtatgtctggactacttggcaaccccttgccatggagggaaattggaaaagtagtaactcattcaagcacctgtggcccttttattgaccactattgataggtttgaggtgattggagaaagctgagtctttctctatgcacaattcacccactcaaactcctccctcaatgcagcaatgtaggcccagagggacgtgatggtggacttagtaccatgggctcactcttactccctcatgggggagatggtattttactctgaaagcataggtttctcctttgacacttsttggtgggggaaagcagatcagagaaagtgggtgttggagcatttttggatcccttatgatctctgtcattggcatccatgaggtctgggagttcagttcttattctgagcactggcactaccctcatgaaggaggagataataactgcagacaaacgcagaagagagaaacaaaacaggtggtgagaagttaaggtcagtttttttttaaatttaatatcatgagaagtctcaagttaatgac

SEQ ID NO: 580214 - DNA, 594 bp, Homo sapiens
tcaagtgaacttggaaaaagcatttgggcttttctattttctagttttctgataaagtatttgatttaagtgctttttaaaatcctattggttagaactcatatattttcagtagttaacagtagtaagcattatatacataacaaataaatacatagatatattagtcatgcagataaaagtagaacttacagattcatattttagatattttaaatttccaatttagatattttagactttcaatttcttataaactgtttcattamcctaggcaattgttagctagatagtgttaaatttgcatactaaaggaacaactcttaagtgaaaatcagatagcaaaatttacatctcaaggtacagagagagagtctggtgtgctagaggaagattaaaaatggatgccaagtcaaacatgaaattgtagaaatgtaccatagaattgtttaggagaccaattgtatttagataggtagttttaaatttaatttctattttttaactggatctctgagctctgcacagagcccacactgtaccctaggtctccagaaagagagaggtatcctaagagtaggccatgtaatgctt

SEQ ID NO: 580215 - DNA, 521 bp, Homo sapiens
acaatcttggtaaactgatatagrcaatattactctgaagtctattgtcagtaggcaattagaaggtgatttatgtctataaatagggtcttgttattgtcttctgaagtttaagttgtctagtttgcatccacagggctttaatagaaatcacagcttaatatttagtaatttcaaattggaaacatgagagaaaaaagaaaaataaagagggaaaacaattaaaaacattattttggagacttgtagcaagaaataattttaaaatttagtccaaattgtagaaaataataaaaatggataaacctcagggaagaatagaatagaacaacaggcatactatagtttataaacaaataatttttctctcttcaattctccagttttattaaagacaaaattatagtaggaccaatttatttgtaaaataacttttagtactattacacttggtttgattatttgcataaagtgcaacaagaataatcatttggcatataggctgtgtctctttttttgta

SEQ ID NO: 580216 - DNA, 657 bp, Homo sapiens
cattacatttgcttagttccagattttagtatgcttatttttgaaacatattttatcagtttgaagatattctcctatatgcctaatattgagtttattttgttttctaatctttggctcatttatataactgtgtgtgtgtgtgtgtgtgtgtgtgtgtgtgtgygtgtgcccctttgtgcatgcacacttgtctgtttctacaatttttatttttattgtttcataggttattggcatacaggtggtgtttggttacatgagttagttctttggtagtgatttatgagattttggtgcacccatcacccaagcagcatacactgcaccctatttgtaggcttttatcccttgcttccctcccattcttccccccaagttgccaaagtccattgtattgttcttatgcctttgcatcctcatagcttagctcccacatatcaatgagaatatacatttccatttctgagttacttcacatagaacaatagtcttcaaactaatccaggtcactgagaatgcccttaatttattcctttttgtggctgagtagtattccatcttacatatatataccacagtttctttatacacttgttggtcaatgggtgtttgtgttggttccatgattttgcaattgtaaattgtgcttctatt

SEQ ID NO: 580217 - DNA, 506 bp, Homo sapiens
tagtaggctcttgttatttgatctactgtgatgctctcaatctttaaattgctgcattcagatcattgatgttaacattcattactaatacacagtcatgtgacatttaatgacagaaatgcattctgagaagtgcattgttagtctttatttttcaatttttcacacatcatagagtgtacttacataaacctagtaagtatatcctactacacaattaggctatatggcatagcctattgctttgaggctacaaacctgtacagcamgttactgtactaagtactgcaggaattgtaacacaatggtatgtatttttgtatctaaacatagaaaaggtatagtaaaatatagtgttataagctaatgggaccactcatatatgcagtccattgatgactaaaatgtcattatgtggtgcctaactgtagttgaattaatagctgccatatttcttactgtatttttatctgttcttgatctttgtttctatatttgtcttccac

SEQ ID NO: 580218 - DNA, 506 bp, Homo sapiens
tagtaggctcttgttatttgatctactgtgatgctctcaatctttaaattgctgcattcagatcattgatgttaacattcattactaatacacagtcatgtgacatttaatgacagaaatgcattctgagaagtgcattgttagtctttatttttcaatttttcacacatcatagagtgtacttacataaacctagtaagtatatcctactacacaattaggctatatggcatagcctattgctttgaggctacaaacctgtacagcacgttactgtactaagtactgcaggaattgtaacacaatggtatgtatttttgtatctaaacatagaaaaggtatagtaaaatatagtgttataagctaatgggaccactcatatatgcagtccattgatgactaaaatgtcattatgtggtgcytaactgtagttgaattaatagctgccatatttcttactgtatttttatctgttcttgatctttgtttctatatttgtcttccac

SEQ ID NO: 580219 - DNA, 473 bp, Homo sapiens
gtgttaaattttgtcaaatgcatctgcatttattgaaatgatcatataatttttatctgattctattgatgtaatgtatcatgcttattgattcacatatgttgaaatatcatggcatctctgatatgaatcccastgaatttttttaatatgttgttaaacttggtttactagtattttgttgacaatttctacatttaaattcatcagggatattgacctcaagtatttgtattgctgttatgtctttctctggttttggaatcagtgtaattatggcttcatataataagtttgaaagagttcccgccttttcaatttttttggaacagtttgtgaaaaattgtattagttcttttaaaaatattttctagaatttagcaatgacaccatcatgtcctggactttcttttcatggaagagtttattcctgcttcaaatctcattactcattatttgtttgttcatatttt

SEQ ID NO: 580220 - DNA, 473 bp, Homo sapiens
gtgttaaattttgtcaaatgcatctgcatttattgaaatgatcatataatttttatctgattctattgatgtaatgtatcatgcttattgattcacatatgttgaaatatcatggcatctctgatatgaatcccagtgaatttttttaatatgttgttaaacttggtttactagtattttgttgacaatttctacatttaaattcatcagggatattgacctcaagtatttgtattgctgttatgtctttctctggttttggaatcagtgtaattatggcttcatataataagtttgaaagagttcccgccttttcaatttttttggaacagtttgtgaaaaattgtattagttcttttaaaaatattttctagaatttagcaatgacaccatcatgtcctggactttcttttcatggaagagtttattcctrcttcaaatctcattactcattatttgtttgttcatatttt

SEQ ID NO: 580221 - DNA, 563 bp, Homo sapiens
aaaattttagaatttttttccatttctgtgaagaatgttgttggcattttgatataaattgcattaatctgaagaccgctttgggtagtagtgtcattttaacaatattgattcttctgatttatgaacacagaatgtctatttatttgtatcctcttcaatatttttcatcagcattttgcactttttcctgtagaggttttcacttctttgccaaaatttattcataggtctttttctgagctacagtaaataggtttatcttttttatttctttttcagctagttcattattcatgtatagaaatgccactaattttttgtatattaattttgtgtrgagtctctagattgtctatatatgagatcaggtcatctgcaaaaatggacaacttgacttcctctcttccaatttaaatgcccttctttttcttttgcttatttgctctggctagaaattccagtattgtgttgattaagaatggtgagagtggacatactcgttccattgcttagagaaaaatctcccagatttctattacttaggaaatagttagatgtgg

SEQ ID NO: 580222 - DNA, 357 bp, Homo sapiens
attcctttgataaatctcacacagtcattgtatattatttttcgatgtgttgttgaattaagttttctagtattttattgagtatttctgcatctatgtttgtcaggaatactagcctgtagtttccttatttcctggtgtcctgattgggttttgattatagtgttatgctgacctcrtagaatgagttaggaaaaattccttctgcctcacatttttataatagtttgataataatgagttaattcttcttaaaaagaatggtaccagtagaaaccagtagaattcaacagtgaagctatacagtcctcaacctgtatttgttgaaagtctttttattactaattcaaccatgtt

SEQ ID NO: 580223 - DNA, 357 bp, Homo sapiens
attcctttgataaatctcacacagtcattgtatattatttttcgatgtgttgttgaattaagttttctagtattttattgagtatttctgcatctatgtttgtcaggaatactagcctgtagtttccttatttcctggtgtcctgattgggttttgattatagtgttatgctgacctcatagaatgagttaggaaaaattccttctgcctcacatttttataatagtttgataataatgagttaattcttcttaaaaagaatggtaccagtagaaaccagtagaattcaacagtgaagctatacagtcctcaacytgtatttgttgaaagtctttttattactaattcaaccatgtt

SEQ ID NO: 580224 - DNA, 429 bp, Homo sapiens
tctaaaatgagctttaatcgacatagatwgtgaccatctttcctggccccaaccagttaattttacatgtgtatcaacataatacaagcaaggagaaactaaatatgtgaacagtggagtctatattcagaaatatctaaaaatgtatagaaaatgtgggcaatcctgataagttttaatcaatctgatacgtttgaattttattcaagttttcatgtgaactaagtaatggtttggagcaaaagggataacattatgcctttactaatgctcatagcttgattggaaggaaaaataaagttcatggaaatacgttaggaaggatttctgaagacctggttggtgatgcatttatttgactctgataaaaggatgatttaaagccgagcatggtggttcacacgtataatctcagtactttgggaggct

SEQ ID NO: 580225 - DNA, 550 bp, Homo sapiens
cccataagaaaaaaaaaatacacagcctgctccctctgaagtctgctatgtgagagattcctctgcacaataaaacttgttctctgaaatccyttatcttaacctgaatgttcctttccattgatcccaggtcttcagataaactcaaccaaatgtcaactggaaaatgtttaaatttacctatagcctggaagccccatgctttgagttgtcccacctttctaaaccaaaccaatgtatttcttaaatgtatttgatcgacgtctcatgtctgcctgccactgaccaccttgggtacatgttctcaggacctcctgagggctgtttcacaggccatggtcactcatatttgattcagaatgaatctcttcaaaatattttactgagtttgactcttttcactgacagatactccctcacatccatatctttccttatgtgtcatcttcccaacaagctccattctaaccaccatttatatttcagttactcttatctcccttactgtgatttatttttctatttgtttttaaatcacctatcactttct

SEQ ID NO: 580226 - DNA, 592 bp, Homo sapiens
gcacctgggcaaccccactactatatctgtcccctgcsacgagggtatgatattcttctgttgcagcacaagaggtattcatgcaggccaatcaccaagtgttggctatcagaggaacctgctggacagagaggactgactcctgctacgaaagctgaagctactctgcctctttatgagtaaagggtggtttcatccagtacttgactgtttttctcctcaatgattctggtatcaagatgcagtgggcaaaagtgctcagactcctactcctgataatagttaacagatgtcacttgctcgacgtacatgtaattgtatgattattcaattaattttaatttctcccaatataccaaaaaatcaaggaggaaataggtcatgactatttttcactgcattttatcaccaatacctatttatgctagattatattttttttttttgagacagagtctcattctgtcacccagactggagtgcagtggcgcgatcttggctcaccgcaagccccgtctcctgggtcacgccattctgctgcctcagtctcccgagtagctgggactacaggcaccagccaccgcgcccggct

SEQ ID NO: 580227 - DNA, 592 bp, Homo sapiens
gcacctgggcaaccccactactatatctgtcccctgcgacgagggtatgatattcttctgttgcagcacaagaggtattcatgcaggccaatcaccaagtgttggctatcagaggaacctgctggacagagaggactgactcctgctacgaaagctgaagctactctgcctctttatgagtaaagggtggtttcatccagtacttgactgtttttctcctcaatgattctggtatcaagatgcagtgggcaaaagtgctcagactcctactcctgataatagttaacagatgtcacttgctcgacgtacatgtaattgtatgattattcaattaattttaatttctcccaatataccaaaaaatcaaggaggaaataggtcatgactatttttcactgcattttatcaccaatacctatttatgctagattatawtttttttttttgagacagagtctcattctgtcacccagactggagtgcagtggcgcgatcttggctcaccgcaagccccgtctcctgggtcacgccattctgctgcctcagtctcccgagtagctgggactacaggcaccagccaccgcgcccggct

SEQ ID NO: 580228 - DNA, 558 bp, Homo sapiens
cagcactgttcacaatagcaaagacatggaatcaacctaaatgcccatcaatggtagactagataaagaaaatatggtgcatataagaccatggaatactacacagccataaaaaaggaagtgatcatgacctttacagcaacatggatggagccacaggccattatcctaagtgarctaacacaagagcagaaaaccaaatacagcagaagccagccatagacactggggccttctggagggtgaaggatggaaggagactgaagattgaaaaattacctattgggtactatgctaattacctgggtgatgaaataatctgtacaccaaacctccatgacaggcaatttacctatataacaaacctgcacatgtacccctgaaactaacataaaggttaaaaaatgttagaaattacactctgctcatttccaggctcagaccttaagaaacttgagaatctttaagaatcgtgcacatacaggcttattttccctcatgttcttatgtcaaatttcaattacagagctacatggatatgttcactttatgaaaatt

SEQ ID NO: 580229 - DNA, 558 bp, Homo sapiens
cagcactgttcacaatagcaaagacatggaatcaacctaaatgcccatcaatggtagactagataaagaaaatatggtgcatataagaccatggaatactacacagccataaaaaaggaagtgatcatgacctttacagcaacatggatggagccacaggccattatcctaagtgaactaacacaagagcagaaaaccaaatacagcagaagccarccatagacactggggccttctggagggtgaaggatggaaggagactgaagattgaaaaattacctattgggtactatgctaattacctgggtgatgaaataatctgtacaccaaacctccatgacaggcaatttacctatataacaaacctgcacatgtacccctgaaactaacataaaggttaaaaaatgttagaaattacactctgctcatttccaggctcagaccttaagaaacttgagaatctttaagaatcgtgcacatacaggcttattttccctcatgttcttatgtcaaatttcaattacagagctacatggatatgttcactttatgaaaatt

SEQ ID NO: 580230 - DNA, 634 bp, Homo sapiens
aaaaaaaaacttgctcctgtgaactatatttaaaacattgcaccacctattcctgagacatgaagtgcctttcaaggcttatataatattctctgtgatactcactgtctgttttcacttattacaccagtaaacccaaaagggtcatgtttgctaagtggtgacttagtaccataccctgtccttaaacatatcttatatcaaagcaacaaatttgctcaacatggtgtagcaattagttgtaataggaatagatgagacaaaagagtgttttgaatggtttaattttgttttgctggggtgggaagaatagaaataaaatatttggttttggacatattgagtttgcaagtgctatatgacagaatgaaagaagacattatatttaatattagaaaaaaagatcaaataatcaggagaggtatgcaaaaaaataaatgagttgaagcatagatagaaatatttatctctccaaagactgttttcttaatttcgaagtaaaaatcaacattgtttttactccagccaaatagacactacacaaaggataaaaactcaccatagagaattaaaatgaaagcattagaaatatcctttcctttcccaccttktctagcgatagtgacaaagagta

SEQ ID NO: 580231 - DNA, 545 bp, Homo sapiens
tgggtaatttataaagaaaagaggttaattgaccacagcatggctggagaggcctcaggaaacttacaatcatggtggaaggcacctcttcacagggcaccaggggagagaatgagtgccagcaggggaaatgccagatgcttagaaaaccatcagatctcttgagaactcactcactatcatgagaacagcatgggggaaaccacccctatgactcaattacctacaactgcatccctcccaygactcatgggaattatgggaactacaattcaagatgagatttgagtgggaacacaacaaaaccacaacaatgtacaaagaaaatgtggtatgtatgcatgatggaatattattcagtcataaaaaagaaactttggaatttgtcacaacatatatgaatttggagaacattattttaagtgaaatgagccagacgcagaaagacacttttgtatacttcatgactagatacttcatgacctcaatcacatgtggaatctaaaaaagcaaaaaagttcatatcataaaactgtgattatcag

SEQ ID NO: 580232 - DNA, 521 bp, Homo sapiens
gctttataaggggcttctgcttttgctcccctctcattctctcttactgccaccaagtaagaagcgccttttgccttctgccatgattttgaggcctccccagctatgaggaactgtgagtccattaaacctatttttcttcccagtctcgagtgtgtctttgtcagcagtgtgaaaacagactaatgcacctcccctcccctccttcctgtctctcccttctttccctcatcttccctcacagggtctttctctcttgcctatgcagagtcatagctcactgtacccttgaactttcaggcttaggtgatcctcccacctcagcctcccaagtagctgggactacaagctcaagctgccatgcctggctaatttttcttttacttttttttttttagacagagtctcgctgtgtcgcccaggctggagtgcagtggcacaatcttggctcaccgcaacctccgcctcccgggttctagcaattctcctgccttarcctcctgagtagctgggactacagg

SEQ ID NO: 580233 - DNA, 585 bp, Homo sapiens
atatgcatctaactcgagtactgaaagggagaatagaggtaatataggagaggcaataggtgaagagatcgtggttaaaggttttccagagatgataaaagatgtckctctgtagatgtaggaattaacctacataactagcagaataaagaaaatccatatctagacatattgtagtgaaaatttagaactccgaagatagacaagatcacacaagcagccagagactgtacaaaggaataataaagcaacaacagaagacttttcaacagtgacataaatcaggagataattgaacaatatctttaaacaggtgagaaaaaaatcactattaacctagaattgtgtatccagaaaagcaagggaaggatggaagacattttcatgcatacaaatgtggtagtttccccacaaataaatcttcatcaatgaagcttctaaagaatttaagaacaacaggaaaaagcagtgaaaatttctgatatgaaaaaagggatggagagcaaaaaaaaaaaaaaaagtaaacaagtaaaatgtgtataaaattaaactaatttctaatgtgtagaattgaaaaagaagtat

SEQ ID NO: 580234 - DNA, 455 bp, Homo sapiens
ttccattgtgtgtgtgtaccacattttctttgttcattcatctgttgatggacacttaggttgcttccaaatcttgtctattgtgagtagtgctgcagtaaacatgggagtgcatgtgtctatttgacatattgatttgctttcttttaggtagtatatatctagcagtgggattgctagattatgtggtagctctatttttagttttctgaggaacctcccaaccgttctccatagtggttgtactgatttacattcccacctgcagcgtrcaagggtttccttttctccgtatccttgccagcatttgctgttgcctgtcttggataaaagccattttaactggggtgagataatacctcactgtatttttatttccatttctctgataatgagtgatattgtgtacccttttatataccctgtgctgtttgtatgtcttcttttgagagatg

SEQ ID NO: 580235 - DNA, 549 bp, Homo sapiens
caagtatctacttttcccagacaccttcacaaaccccttcagctgagtcaaatacctttcctttctgttctagtcataatccttgatagcacttctccctatagtaatggtcagttatttgtctatacaagttaactggataaagctacattttattagtcacttgtccccaggtatgtacaccataagaacttgtggaataaatgaatggatgaccaaataccatttaacaaccagtacccagcccacaaaggagaaaatgaagaagcaagagagaagatgtgtagttttcttacaaaatggtaccatgtgccagtatatgtaaaataaggcagagccgaaatgccatgagtctaggtatgttctccttagtctcctaacaaagagwtccatatggtctagaccatatggcaattttttttctgtaaaggaacagatagtaaatattataggctttgtgactcacacaatctctgttgcaattactcaattctaccatcttcttaagaaagcagccatatataaggaggagaagagaaagcagattta

SEQ ID NO: 580236 - DNA, 379 bp, Homo sapiens
accgccacactcagtctccatgtataatcctactctactttttttcccacaatactaatcccatttagcatactatgtaacttatttgctatgtttcttatctgttgtatttctcccsctaactagggtgtaaactccatgatgacaaggatttttgtctgttttgttctgtgacttaagtaggcagaatagtgtcttgcacataataggtgttcaggaaatatttgttgacttaataatgaatttgagaaaatgaagaatagggaattaggaacatcttgacatgttacatggttacatttggaaagatttggacaaggtgcgcaaaaagagtgggacaatagaatcataagaagacaacaaaggtgaacaattgagt

SEQ ID NO: 580237 - DNA, 569 bp, Homo sapiens
ttgctgtaaccttacctgtataatgattctaataaatcctcctttttcttcagctagtttgagtagatgactgtggaatataataggaagttaaagcgtttaaaatttttgagaccacctagacactcaaaatgagttcagatttcctacactcttgaatgatacctgagggtcttaagaaaatatgcagttaagattgaactgttgaactccaacaaaaatcctttccagaacaagtcaatgaatataacaaataaataaacatattaagaaataatttatttctgaatatttgcagatgtaagttcagaccataaacattctgagtaattctagttaaatgtcttggggttgagggggaaaaggtgaattctggaaatcayaggacggtaaaagagacattgagcctagataagattctagaaagtgatatgtagtagaatgcccattacatcctcccattcccatgatcactttagaagactgtttctgcctacaaacaccaaaagagcagccctccattacaggtgaatccttgcccttcacctgatgacactgacacctagtga

SEQ ID NO: 580238 - DNA, 382 bp, Homo sapiens
agtgtgcctttaccatttcctctctctctctcccatcagccaactagatgtgagtctctaaaataaatttagtagttatatgtcgaygaaagagtctctgccaccctcactgacttgcattggactgatttgacccaggaataaatatattttgctaaaccactgatattttggagtgatttattgtagctgctcatatgccctgactaattcctaaacatactctagtcactcaaaaaaaaaatttactaagcacctactaggaggcaagcacagtgctaagaacatgagggtacaagggagaacaagatagacaagagtcttcattttcaaagcatacattgtagtgtgggagacacacaagaaacatgtatttaaataa

SEQ ID NO: 580239 - DNA, 458 bp, Homo sapiens
tgagcttacctgaaagggtgatttgtagagtaagagctcttagggggacaaagtaatgaaccctgattttgatatgtttcatatgggaaggtataaggaagttaaggttctgtttaggaatcaagattaaccgtggggcaaaaggacaaaaaatagattaaggtaataatggagaacagcatakaaatgaaattcccaatgcccaaatggccaccagttttttcacgtttccctagaagaaccaagatagttcctaaagatgtctgccaggatagaaaaggaagaggcatctagattggaaaggaagaactatctctatttgcagatgacatgactttgtatacagaaaatcctagagaatacacacacatacacatattaaagctaataaatgagctcagcaaggttgcaggatataataatatcaatatgcaaaaaatcaagtgtatttctaaact

SEQ ID NO: 580240 - DNA, 648 bp, Homo sapiens
atctgcactatgagaaatgctaaaagatgttcctcaggctaaagagaaatgataccagacataaccttaggtccacaggaagatatagatatcactgcaaagtgtgtgtgtgtgtgtgtgtgtgtgtgtgtgtgtgtgtgtgtgtgtgtgtgtgcatgtgtgattttttttttagattagttgctttaaaacaagcttgtccaacctgtggcccatgggccacatgcaacccaggayggcttcgaatggggcccgacacaaattcataaactttcttaaaacattatgagattttttgtaatttttttttagttcatcagttatcactgatgttagtatcttttatttgtggcccaagacagttcttttcccaatgtggcccagggaagccaaaagattggacactcctgctttcacagaaactatcaacagagtaaacagacaacctatagaatgaaaactttttgcaaactctgcatctgacaaaggtctaataactagcatctataaggaacttagacaaatttacaagaaaaaaacaaccccattaaaaagtgggcaaaggacatgaacagacatttttcaaaagaaggtatacttgtggaaaacaaacatatgaaaaaagctcaatatccctgatcattagaa

SEQ ID NO: 580241 - DNA, 612 bp, Homo sapiens
tattatttgttgatttttaaaaagtaaaattttttataaagcatagacaaatgaaaaaagcatcaacattgaagtcaggtcaaagaaaataaatgttgaaaagcggaaagcatgtacacattaaaccattccatagttgtttgtccttgaataatgtgtttaacttctctgagctttattctaccattaaagaatgaagataataatacatattttataatattatgagaattaaatggaaataatgttataaaaagcacatgtctattatctgtcacaaaatatatttaataaatggtaattattatttttattatcatcagcaacataatctgctatgtcttgtgggctttccctcttcttccccatactgtgctttctctgcctcccatcatactgtctcctccagagatgatgatgatggatagtgatgctgaygatggagaaggaagaaagaaggggagtgattcacaattaattcaatgttcctgatatgccacatcctgtgctacatgcttaacacatggattagtcttttcttaccctgagaataaagacatacctgagattggaaatttatacaggaaagaggtttaatggactcaattccac

SEQ ID NO: 580242 - DNA, 656 bp, Homo sapiens
taaaattctcacagatctaaggaatttcagatgaaaaggtactgacgtgtaagaatagtgcaaagccaagaaagcctacatggtgctagggcaaaaaaaaaaaatgcagaagtcatgaatttttcttagggaaatgcctgttataaatgtagagtactctgctacaaaaaagagtgagccttgtatccctagaaagaacccacactgctatgaattaaattatatccattccccccaattgaagctctaacccccaatgtcactgtatttggaggtagaattcacaagaaagttattaaggttaaatgaggtcataggagtagggccccaatctaataggactggtgtccttattaaaagaggaagagacaccatagtttccttctctctccctttctctctttctctctctctctccctctctctygcttgctctctctctctctttctgtccccatctttccctatgtgcacataggggaaaggtcatgtaaggacgtagcaagagagtggctgtcagcaagccaggcatagagcctttacaagaaaccgaatctgccagcaccttcatctgggacttctagcctccagaacaacaagaaaataaactcttttgtttaagctattcagcctgtggtctacttatggcaatctga

SEQ ID NO: 580243 - DNA, 558 bp, Homo sapiens
atgcatgtttatagcagtacaattcgcagttgcaaaaatatggaaccygtctaaatgcctgtcaaccaatgaatggataaagaaaatgtgattgcctgtaatcccagcacttcgggaggccgaggcaggcggatcacaaggtcaggagatcgagaccatcctagctaacatggtgaaaccccatctctactaaaaatacaaaacatttagccaggcttggtggtgggtgcctgtagtcctagctactcaggaggctgaggcaggagaatcgcttgaacccaggaggcggagtttgcagtgagctgagatcgtgccattgcgctccaggcctgggcaacagagcaagactccgtctcaaaacaagaaaagaaaatgtgatatatatatatatacatggtggactattactcagccataaaaaggagtgaaatagtggcatttgcagcaacttgaatggagttggagaccattattctaagagaactcaagaatggaaaaccaaatactataggctctcacaagtgggagctaggttttgaggatgcaaaagcataagaa

SEQ ID NO: 580244 - DNA, 416 bp, Homo sapiens
caggtaacaaacctgcaacagtatgtcctgaatctaaaataaaagttgaaattattttaataaaaagagctagatgaaaatggttggagaaaaacacagccatcttcatggtgtctcttgaaatttattacttcaaactccaagtgatttgaagattgccttcactactgtcaaggcaatcttactacaccttcaaagccaattaccgcaccatccttccagagggmtgtttcaccatgcctcctccctcagcctcccttagtccgtgtttttactttttcactaacaaaatggtagtaatcaaaatgttagcacatcatctcaccttcaaacctacatatccacctccttctagatccatatttttttcttctttgctgttataatggatgaacactgccattttctatgcgaag

SEQ ID NO: 580245 - DNA, 481 bp, Homo sapiens
tacaatggtggaagcatgtccagattatataaatgaattaaaaattttcaacttgtcgctaagcagatttcttgctttcttttaaatatacagaaaaagcatatggattctcaagataaaccacatatgaaaaagttttagctttttttaaaatttttacagcttcactgaaatgtcattcaagacatattagtaaatttgtgatttaaatttagaagccatcaccacaatccaattttagaacttttctagcacttcccaaatttccttcaatttcaccttttaaggagtgttaagagcagaaaacacacacaattatctgacttaaagagaaaagaaaaatcacctagtwccacctagtggtgtataagtagatagcgagttgattttggaatttttgaaatccaatactcagacatttctcttccatgggattacaaattagctactaatatttctggtttataatcgaaagttaact

SEQ ID NO: 580246 - DNA, 502 bp, Homo sapiens
agatagcgagttgattttggaatttttgaaatccaatactcagacatttctcttccatgggattacaaattagctactaatatttctggtttataatcgaaagttaacttcaaaatatccacaagcttatccaaaatatttactagataaattttaaaaactttagttttaaaaacaaatgatatcctttcttcaaatgagagtttacttggagtcccagtatgtttagcagataaatacttagtttatcattggatggtctactcactcccctacttgctgaaaataaytgtagaaagtaaagactgtggagaaatacacaaaacagaaagaatagttatctctgagtactggaaaataagtgaggttttccttttggttttattttttcgctggagtgtgtatatataattgaaaaaaactataataagttgtatttagaaattcaatataaaattttaaaatattgcaaaaatgcctaccaaggtccttgcaaaacagc

SEQ ID NO: 580247 - DNA, 543 bp, Homo sapiens
tgttttaaccaccatggtatggtatccttcctaaaatttaagtaacaccctgcaaggaattttcttcttgggtttagtctactagcatatactgtatcttcctatggttaatatctaaatactgtgaggagtggtgggggtggggggcaagactgaagatgagaattgagaagtggcttcctctggaaaagcgatttactcaggtaagagagagacagtgtctttaagaaggtagcacagcctcaccaggacagggtagagagggctgatccatttgtctgaggaggttcatagggagttggagtcttggtgtagtccaaatcttctaaattctgtcccactcctttgtgaccaatgctataactgtcatgtaagaaatcatgaaactgtgacctcagaccttggaagaaattcratctccaattatcttagctttagtgctaaataataatagaaagcctttagttcatcatggttcagagaatttaagcatttgagcttttgtctgtttaactttctggttttgttagaagttgctactcc

SEQ ID NO: 580248 - DNA, 543 bp, Homo sapiens
tgttttaaccaccatggtatggtatccttcctaaaatttaagtaacaccctgcaaggaattttcttcttgggtttagtctactagcatatactgtatcttcctatggttaatatctaaatactgtgaggagtggtgggggtggggggcaagactgaagatgagaattgagaagtggcttcctctggaaaagcgatttactcaggtaagagagagacagtgtctttaagaaggtagcacagcctcaccaggacagggtagagagggctgatccatttgtctgaggaggttcatagggagttggagtcttggtgtagtccaaatcttctaaattctgtcccactcctttgtgaccaatgctataactgtcatgtaagaaatcatgaaactgtgacctcagaccttggaagaaattcaatctccaattatcttagctttagtgctaaataataawagaaagcctttagttcatcatggttcagagaatttaagcatttgagcttttgtctgtttaactttctggttttgttagaagttgctactcc

SEQ ID NO: 580249 - DNA, 577 bp, Homo sapiens
ggctggctgctggcttaattcaaataccctgagaagaaagcactgctaaatgcaagctggtccccatttcaaattgaacttggtgatctcacccacctgcttcattgttcaggttccagaaaaccctctccacacttctccttctcttgtcttggctgtgctgttagtcctatctgctgcttctgcttgatactttagatgtcaaatccataggcttgagtcacaaatacaaagccataaattaaccttcctttaaattcacctaaaaggatagactgccctaaatatgtccatkaatgctgggtttcagggctggattccatggaccatggatttgtcccattgcagcagttctcagtttcatctaacataaagagacttgtaaggtcttatgtgaaccagctcctatagtttttatgtcccacatttttactctctttaatgagtttaaaatgttctaaccaggcatacttgcctctgaaagaaattcggtgcccttatttaggaagtcaaatgtatttctttttttttgcaaggctggcacaatataaaatgacccaaaacttggagtcagtca

SEQ ID NO: 580250 - DNA, 648 bp, Homo sapiens
acttctccttctcttgtcttggctgtgctgttagtcctatctgctgcttctgcttgatactttagatgtcaaatccataggcttgagtcacaaatacaaagccataaattaaccttcctttaaattcacctaaaaggatagactgccctaaatatgtccatgaatgctgggtttcagggctggattccatggaccatggatttgtcccattgcagcagttctcagtttcatctaacataaagagacttgtaaggtcttatgtgaaccagctcctatagtttttatgtcccacatttttactctctttaatgagtttaaaatkttctaaccaggcatacttgcctctgaaagaaattcggtgcccttatttaggaagtcaaatgtatttctttttttttgcaaggctggcacaatataaaatgacccaaaacttggagtcagtcacataaggaagggccaggccacattttagaaggaaaaatcaaagaaggcaagaggcagcatctgggatctatcagtctgcttgccaagaagaggcagggagcctgcgaagatgcagagatgcaggattatcagcattaggaccaagagcattgaattgttctgctttggagaggctcagaagatgttacagtggcagcagggtat

SEQ ID NO: 580251 - DNA, 523 bp, Homo sapiens
atgaggagtgatagggaagttaggtatacctgggtatacccattgttcaagataggcttttttggtgggaaaactgaagttcccagcccagtgctccaggtagccattgtcaatcaagcaacacaactgtactatatgatactaagttgccaaccaggatggatctagctctaatctgataatgtagaaaaatactactagcaagtaaatgtgactttagatagaatacctctttgaaaatcaaagcaaagaaaatgtattttcaattggaaaggggaattctaaaaattgaaaacattccttatacttttattgtatttttgagttttaaaaatgatttcccatgcatgttctcattttatacttccaacaattttgtggtaggtactgaagtgttatctcattttgttgataagtaaaccaagagacagaaagtttccatgacargacaaagcttggaagatttagcaaatggttctgcatggctggggagggttcagaatcatggcgggaggcgaaagtc

SEQ ID NO: 580252 - DNA, 567 bp, Homo sapiens
cggaatctttccaatttatctttctaagctatagtttgccccctaagatatatatatttaaattttttaaagaaaatttrgtcatctcagtctgttttagtccaggcttcatacagaagagtttcagcctgaaatcactgaaaaatctgtgtcccataaaaatgacaagccactcaagaccttgcatggtcccagagtgccatctagtgactaaaagttgaaatgacggcctccaaatctttactgacactttttcctgcaaaaagccatgcagagaaagcatgcttgttcttgctctcatcagagtatcagattaggtggtcacagcacccacgtgcatggtgaactatgtgggatggctgtgggagttaaactgtgtgtgtgtgtgtgtgtgtgtgcgcgcgcgtgtttaggacacaaggatgaaatagtttaactgcttattaaaagaatccctctggatatggtgtgtaaaacagtcctaacagcatacaagatggagtccgggagagcaataaagataccagaacaattcaagcaagtgctaatgataggttacactagggt

SEQ ID NO: 580253 - DNA, 567 bp, Homo sapiens
cggaatctttccaatttatctttctaagctatagtttgccccctaagatatatatatttaaattttttaaagaaaatttggtcatctcagtctgttttagtccaggcttcatacagaagagtttcagcctgaaatcactgaaaaatctgtgtcccataaaaatgacaagccactcaagaccttgcatggtcccagagtrccatctagtgactaaaagttgaaatgacggcctccaaatctttactgacactttttcctgcaaaaagccatgcagagaaagcatgcttgttcttgctctcatcagagtatcagattaggtggtcacagcacccacgtgcatggtgaactatgtgggatggctgtgggagttaaactgtgtgtgtgtgtgtgtgtgtgtgcgcgcgcgtgtttaggacacaaggatgaaatagtttaactgcttattaaaagaatccctctggatatggtgtgtaaaacagtcctaacagcatacaagatggagtccgggagagcaataaagataccagaacaattcaagcaagtgctaatgataggttacactagggt

SEQ ID NO: 580254 - DNA, 567 bp, Homo sapiens
cggaatctttccaatttatctttctaagctatagtttgccccctaagatatatatatttaaattttttaaagaaaatttggtcatctcagtctgttttagtccaggcttcatacagaagagtttcagcctgaaatcactgaaaaatctgtgtcccataaaaatgacaagccactcaagaccttgcatggtcccagagtgccatctagtgactaaaagttgaaatgacggcctccaaatctttactgacactttttcctgcaaaaagccatgcagagaaagcatgcttgttcttgctctcatcagagtatcagattaggtggtcacagcacccacgtgcatggtgaactatgtgggrtggctgtgggagttaaactgtgtgtgtgtgtgtgtgtgtgtgcgcgcgcgtgtttaggacacaaggatgaaatagtttaactgcttattaaaagaatccctctggatatggtgtgtaaaacagtcctaacagcatacaagatggagtccgggagagcaataaagataccagaacaattcaagcaagtgctaatgataggttacactagggt

SEQ ID NO: 580255 - DNA, 567 bp, Homo sapiens
cggaatctttccaatttatctttctaagctatagtttgccccctaagatatatatatttaaattttttaaagaaaatttggtcatctcagtctgttttagtccaggcttcatacagaagagtttcagcctgaaatcactgaaaaatctgtgtcccataaaaatgacaagccactcaagaccttgcatggtcccagagtgccatctagtgactaaaagttgaaatgacggcctccaaatctttactgacactttttcctgcaaaaagccatgcagagaaagcatgcttgttcttgctctcatcagagtatcagattaggtggtcacagcacccacgtgcatggtgaactatgtgggatggctgtgggagttaaactgtgtgtgtgtgtgtgtgtgtgtgcgcgcgcgtgtttaggacacaaggatgaaatagtttaactgcttattaaaagaatccctctggatatggtgtgtaaaacagtcctaacagcatacaagatggagtccgggaragcaataaagataccagaacaattcaagcaagtgctaatgataggttacactagggt

SEQ ID NO: 580256 - DNA, 670 bp, Homo sapiens
tgcatggtcccagagtgccatctagtgactaaaagttgaaatgacggcctccaaatctttactgacactttttcctgcaaaaagccatgcagagaaagcatgcttgttcttgctctcatcagagtatcagattaggtggtcacagcacccacgtgcatggtgaactatgtgggatggctgtgggagttaaactgtgtgtgtgtgtgtgtgtgtgtgcgcgcgcgtgtttaggacacaaggatgaaatagtttaactgcttattaaaagaatccctctggatatggtgtgtaaaacagtcctaacagcatacaagatggagtccgggagagcaataaagataccagaacaattcaagcaagtgctaatgataggttacactagggtggcagtggtgagatcctagatatattttgaaaagtagctggcaggatttgctgaggggcttaatgtagagttaaacaaaaagaggagtcgaggataacttccaggtttttaaccygaacaattaagagaaacgtattgtcatttatcaagctgggacagattgggtgaatctcagtctacacagtaatcctaaacatctgtataaataaaatcctgtttccagggacttggactgcgccattaactcaaggcacctttcactaaaatgagggctgattgttgcaa

SEQ ID NO: 580257 - DNA, 574 bp, Homo sapiens
atgccagtgccaggctattttgattactatagccttatagtaaatttgaagtcaggtaatgtgaggccttcagatttgttctttttattcctacacattttttggtagccattataaaagggatcaagttcttgatttgattctcagcttagtcattgttggtatatagcagtgctactgaattgtgtacattgattttataacrtgagactttgctgaatttatttatcaaatctaggagtcttttggaggagtcattagtgttttctaggtataagatcatatcattggcaaacagagattgtttgacttcctcttttccaatttggatgtcctttatttctttcccttgccggattgctctggctaggaattccactcggcactgctttaatctctttcacatgaactcacatgatcaatccccacaataccatatgaggttaatatgattacttgacactcaagcacagatgatgtattattactatccctaagttacagacaatgcacagcaagatttaataacttgctaaatttacccagctaattagtagagagccatgactggaac

SEQ ID NO: 580258 - DNA, 474 bp, Homo sapiens
gggttaatgaaggattaactgcatagggtttctcctcaactttgtataatcctaagagacactctagagatcataagccaagcccctaggaaaaaaaaatgttgatgcataactgctcattttgctttcaaattaacacagttaaaggcatatgttttggtacagagtcctggatacctgtgagatrtcctacagccaagtacaagtatttatttttatgtgaagctaaagatttcttacttgtaacatgctatgtcagttatgaaaaggtcttaaatcatcttccctagaagcaggccctgagatgagaactcttgtaaaatgattcatttaggaagtacttccaacagtaaccaataagggaatgggagaagcaagacaggaaagtaaaagaggccaggcaagcatgcaatttcagacaaagtcccacaaagggtagctccagtttgatcccatgggggaatgcagaagtgt

SEQ ID NO: 580259 - DNA, 646 bp, Homo sapiens
tgtatcaggaagaagtatatgaattatcatatgcctattgctaaggcatatgtttattaatctctcaaaatatatttgttcagtcgtacatcaatattatcaatayattttccaaaaagtggaacttgggtgagggcatggtgctgacaggagcccagcatctgctgcctcttgaaggcttgaaacccgctcccgaaggacaccacgttgaacccctggccaccaagctaccaatttaccgtcaccgtctgcacgaggggatatgctatccactctgtcaagaaatctatgtttttgaaagggaaggactggttttgacaaattaccacaggaaaagcattccccaaaggaggaccatagaaacttctgttttcctctctaaagttttgtcggttcaaactagatgacaaacatgcttctaaaaagcttctaaaccaagagcaaatatcatccaccactcccaccaaaaatatccaaagctattattaggttggtacaaaagtaattgtgaaataatttgccattacttccaatggtgaaagccagaattacttttgcacccaccttgtaccaacaatctataaaatgttaaaatggaaggtattgtaggctttgtctatttaacctcttcatttgtcagtgagaa

SEQ ID NO: 580260 - DNA, 646 bp, Homo sapiens
tgtatcaggaagaagtatatgaattatcatatgcctattgctaaggcatatgtttattaatctctcaaaatatatttgttcagtcgtacatcaatattatcaatacattttccaaaaagtggaacttgggtgagggcatggtgctgacaggagcccagcatctgctgcctcttgaaggcttgaaacccgctcccgaaggacaccacrttgaacccctggccaccaagctaccaatttaccgtcaccgtctgcacgaggggatatgctatccactctgtcaagaaatctatgtttttgaaagggaaggactggttttgacaaattaccacaggaaaagcattccccaaaggaggaccatagaaacttctgttttcctctctaaagttttgtcggttcaaactagatgacaaacatgcttctaaaaagcttctaaaccaagagcaaatatcatccaccactcccaccaaaaatatccaaagctattattaggttggtacaaaagtaattgtgaaataatttgccattacttccaatggtgaaagccagaattacttttgcacccaccttgtaccaacaatctataaaatgttaaaatggaaggtattgtaggctttgtctatttaacctcttcatttgtcagtgagaa

SEQ ID NO: 580261 - DNA, 646 bp, Homo sapiens
tgtatcaggaagaagtatatgaattatcatatgcctattgctaaggcatatgtttattaatctctcaaaatatatttgttcagtcgtacatcaatattatcaatacattttccaaaaagtggaacttgggtgagggcatggtgctgacaggagcccagcatctgctgcctcttgaaggcttgaaacccgctcccgaaggacaccacgttgaacccctggccaccaagctaccaatttaccgtcaccgtctgcacgaggggatatgctatccactctgtcaagaaatctatgtttttgaaagggaaggactggttttgacaaattaccacaggaaaagcattccccaaaggaggaccatagaaacttctgttttcctctctaaagttttgtckgttcaaactagatgacaaacatgcttctaaaaagcttctaaaccaagagcaaatatcatccaccactcccaccaaaaatatccaaagctattattaggttggtacaaaagtaattgtgaaataatttgccattacttccaatggtgaaagccagaattacttttgcacccaccttgtaccaacaatctataaaatgttaaaatggaaggtattgtaggctttgtctatttaacctcttcatttgtcagtgagaa

SEQ ID NO: 580262 - DNA, 646 bp, Homo sapiens
tgtatcaggaagaagtatatgaattatcatatgcctattgctaaggcatatgtttattaatctctcaaaatatatttgttcagtcgtacatcaatattatcaatacattttccaaaaagtggaacttgggtgagggcatggtgctgacaggagcccagcatctgctgcctcttgaaggcttgaaacccgctcccgaaggacaccacgttgaacccctggccaccaagctaccaatttaccgtcaccgtctgcacgaggggatatgctatccactctgtcaagaaatctatgtttttgaaagggaaggactggttttgacaaattaccacaggaaaagcattccccaaaggaggaccatagaaacttctgttttcctctctaaagttttgtcggttcaaactagatgacaaacatgcttctaaaaagcttctaaaccaagagcaaatatcatccaccactcccaccaaaaatatccaaagctattattaggttggtacaaaagtaattgtgaaataatttgycattacttccaatggtgaaagccagaattacttttgcacccaccttgtaccaacaatctataaaatgttaaaatggaaggtattgtaggctttgtctatttaacctcttcatttgtcagtgagaa

SEQ ID NO: 580263 - DNA, 572 bp, Homo sapiens
gagcatgtgatgctctttgatagaattttacccacagtagaactttgaaaattggagtcagtcctctcagatcctgccactgctttatcaagtaagtttatgtaatattctaaattgttcattgtcatttcaacaatgtttacaacatctttactaggagtagattccatctcaagaaaccactttctttgctcatccatgagaagccactctgaggccaggggcagtggcttatgccagtaatcccaacactttgggaggctgaggcgggtggatcgcttgagctcaggagtttgagaacagcctgggcaacatggtgaaaccccgtctacaaaagaatacaaaaattagccagacatggtggcatgcacctgtagtcccagatactcaggaggctgaggtgggaggattgcttgagtacaaaaggttgaggctgcagtgagccgtgatcgtgctactgcactccagcctgggtgacagagcgagaccctatctcagtcagccaatcaataaaacaagcaagcaagtcactgttcatccattcamggtttatcatgagattgcagcaattc

SEQ ID NO: 580264 - DNA, 417 bp, Homo sapiens
aagttgtcttataagtgtcagcatatattatacactcaatagatggagtttggtagcagtgactgactcaaatgttggtgagacagagaaagggaaagtggtcagaggctactgggattcctccctccatgcttacttttggtacctttgaccatgctagccaccatggtggaaatgctagcagttcccagcatgtccacttccacttkgcttcaaccggtatcttgataggaattaactgcccacagatgaatctgctctgtggtcagaagcagcacccacttcaaccctacaaataggttctgtttgatacaaataaaacaaagagaaagactgtggatcctgctataaataaatcaatgactatgaccgggatcatggcatgtccatatttctattctgtttctaacacttatc

SEQ ID NO: 580265 - DNA, 569 bp, Homo sapiens
ttataagtgtcagcatatattatacactcaatagatggagtttggtagcagtgactgactcaaatgttggtgagacagagaaagggaaagtggtcagaggctactgggattcctccctccatgcttacttttggtacctttgaccatgctagccaccatggtggaaatgctagcagttcccagcatgtccacttccacttggcttcaaccggtatcttgataggaattaactgcccacagatgaatctgctctgtggtcagaagcagcacccacttcaaycctacaaataggttctgtttgatacaaataaaacaaagagaaagactgtggatcctgctataaataaatcaatgactatgaccgggatcatggcatgtccatatttctattctgtttctaacacttatcaaattacccctggaataagtctcagaaatttttcttagtgagtaacagaggagccccgcaccacactgggggaaacagagtgctgctaggagaatctttggcttcggaatcagagattggcccaataatgactctaccacttagcaactctcaacttagt

SEQ ID NO: 580266 - DNA, 586 bp, Homo sapiens
aatctgctctgtggtcagaagcagcacccacttcaaccctacaaataggttctgtttgatacaaataaaacaaagagaaagactgtggatcctgctataaataaatcaatgactatgaccgggatcatggcatgtccatatttctattctgtttctaacacttatcaaattacccctggaataagtctcagaaatttttcttagtgagtaacagaggagccccgcaccacactgggggaaacagagtgctgctaggagaatctttggcttcggaatcagagattggcccaataatgactctaccacttagcaactctcaacttagtttagtgttactgacattttctatgctagtataccatactggcctgttatttaaccaagttattaagatagcaggactcctttagtgctgttacttatcytctctgacccttcatgtcctcctctataaaataaagagaactgccctcatgtttgttgtatgaggtaaatgagatcatgtatgaagcaatcaatatagtattgcccttggtttaataatcattattttgctgtccttattcagtattataaaactctatct

SEQ ID NO: 580267 - DNA, 664 bp, Homo sapiens
gtattccactagctccattcaacctttgccactaagtctatttaattgaaaacctcaacataggaatcaaatgcatrctgttagttatatgcttcaattatctatgaaggcttctcatttaccaaggcccacatatccagagtcaacaaatattttttccttatctcagaataaggctaatttctctaaaaatctggagcacctgggtggtagggatatagaaatagagacagttaaaaaggtaatacaacctccatattcatttgacatgcagtaaccaaagacaagtgtgtcccaaagtacttttccaggcttgaggtagccccttaaaaatgactgaatttcaagctacgtgtgatggctcacgcctgtaatcactttgggaggctgaagtaggagaatcacttgagctcaggagtttgagaccagcctgggcaacacggcaaaaacccatctctataaaaaatacaaaacttagctgggtgtggtggcatctacctatggccccagctactcaggaggctgaggtggaaggatggcttgaacccaggaggtcaagactacagtgagccaaaatggcaccactgcactccagcctaggtgacagagtgagaccctatctcaaaaaaaaaaaaaaaaaaaaagattggtgctaaattcacat

SEQ ID NO: 580268 - DNA, 493 bp, Homo sapiens
tactaatcgcaatattaataataacatttatgcagtacttactatgtactatgctttacttatatttattcattaaatcctcacaacaatcctagggctataggtactactaacatctccattttactgacaaggaaactgaaggaaagacagttaagcaattcgccaaggatatacagctggaatttgaaccttttcctttactatgttgtactgactctcgaagatcacaggaaaaaaacatgaaaataattctttcaagctgggcctacatggcactgaaaagctgtttaaagagtcatagaatgccactgattcctccactcaacagtcaaggaatgtttactgagcatatccactctgccaggtgctagttgtttacmatcatttctgtttaatcttgcattaaaccctgtccctgatcatggagtagacagagtgctgtgtaggcctatacaatggaacatctgtgtcagtacatccttccatgagt

SEQ ID NO: 580269 - DNA, 493 bp, Homo sapiens
tactaatcgcaatattaataataacatttatgcagtacttactatgtactatgctttacttatatttattcattaaatcctcacaacaatcctagggctataggtactactaacatctccattttactgacaaggaaactgaaggaaagacagttaagcaattcgccaaggatatacagctggaatttgaaccttttcctttactatgttgtactgactctcgaagatcacaggaaaaaaacatgaaaataattctttcaagctgggcctacatggcactgaaaagctgtttaaagagtcatagaatgccactgattcctccactcaacagtcaaggaatgtttactgagcatatccactctgccaggtgctagttgtttaccatcatttctgtttaatcttgcrttaaaccctgtccctgatcatggagtagacagagtgctgtgtaggcctatacaatggaacatctgtgtcagtacatccttccatgagt

SEQ ID NO: 580270 - DNA, 529 bp, Homo sapiens
ggcttcttggaagagtcttaaatccattccccaaagacctcacttgtctctagcacctctttggcacattgtctcctctgctagagactcattttgactagagctaactgcttgagaaatcagggccaaatgcaggcttatttaaacaggaaaaaaaaaatttactctctaacctcrgaaacaaatatttttaaaagtatgcatgtaaatatacacacaatgacaaacatttgtggcttgtatatacctcagtccacaaatttaggagtgtatacattgttagtttttaaattttttaaattccacttgagtcaattcaggtcgccctgagacttctcaggattttgaggtgtgtgggcatgtgggtgcacagaaatcttactgacaaccaacagaaaagagcagtggaggaactgacaaaacagaattgctgcaacctttgctttgtgtgttgggacgaggcttcatcatactaagggtgtagagacttctggtccctgatgctgttgcctgtccaccattgagtggt

SEQ ID NO: 580271 - DNA, 529 bp, Homo sapiens
ggcttcttggaagagtcttaaatccattccccaaagacctcacttgtctctagcacctctttggcacattgtctcctctgctagagactcattttgactagagctaactgcttgagaaatcagggccaaatgcaggcttatttaaacaggaaaaaaaaaatttactctctaacctcggaaacaaatatttttaaaagtatgcatgtaaatatacacacaatgacaaacatttgtgrcttgtatatacctcagtccacaaatttaggagtgtatacattgttagtttttaaattttttaaattccacttgagtcaattcaggtcgccctgagacttctcaggattttgaggtgtgtgggcatgtgggtgcacagaaatcttactgacaaccaacagaaaagagcagtggaggaactgacaaaacagaattgctgcaacctttgctttgtgtgttgggacgaggcttcatcatactaagggtgtagagacttctggtccctgatgctgttgcctgtccaccattgagtggt

SEQ ID NO: 580272 - DNA, 529 bp, Homo sapiens
ggcttcttggaagagtcttaaatccattccccaaagacctcacttgtctctagcacctctttggcacattgtctcctctgctagagactcattttgactagagctaactgcttgagaaatcagggccaaatgcaggcttatttaaacaggaaaaaaaaaatttactctctaacctcggaaacaaatatttttaaaagtatgcatgtaaatatacacacaatgacaaacatttgtggcttgtatatacctcagtccacaaatttaggagtgtatacattgttagtttttaaattttttwaattccacttgagtcaattcaggtcgccctgagacttctcaggattttgaggtgtgtgggcatgtgggtgcacagaaatcttactgacaaccaacagaaaagagcagtggaggaactgacaaaacagaattgctgcaacctttgctttgtgtgttgggacgaggcttcatcatactaagggtgtagagacttctggtccctgatgctgttgcctgtccaccattgagtggt

SEQ ID NO: 580273 - DNA, 529 bp, Homo sapiens
ggcttcttggaagagtcttaaatccattccccaaagacctcacttgtctctagcacctctttggcacattgtctcctctgctagagactcattttgactagagctaactgcttgagaaatcagggccaaatgcaggcttatttaaacaggaaaaaaaaaatttactctctaacctcggaaacaaatatttttaaaagtatgcatgtaaatatacacacaatgacaaacatttgtggcttgtatatacctcagtccacaaatttaggagtgtatacattgttagtttttaaattttttaaattccacttgagtcaattcaggtcgccctgagacttctcargattttgaggtgtgtgggcatgtgggtgcacagaaatcttactgacaaccaacagaaaagagcagtggaggaactgacaaaacagaattgctgcaacctttgctttgtgtgttgggacgaggcttcatcatactaagggtgtagagacttctggtccctgatgctgttgcctgtccaccattgagtggt

SEQ ID NO: 580274 - DNA, 529 bp, Homo sapiens
tatgaagcttctgtgtatcagaccaaaatatctggacataaactccaaggcagcagtaccttagatttagaactgtggtttgatttgaactttttttttttaattgagacagaattttgctctttcacccaggctggagtgaagtggcacaatctcagctcgctgcaatctccactctccaggtccaagcaattctcctgcctcagcctcttcaatagctgggattacaggtgcatgccaccacacctggctaatttttgtatttttagtagagaygagacttcatcatgttggccaggctggtcccaaactcttgacctcaggtgattctgccgcctcagcatcccaaagtgctaggattacaggggtgagccaccgtgcccagcctgaacttttaaattctttttataaaagaaaatttatcttttttaccctcagaaaacttcaatagatatctggctaactaagaaatcttactaacagatatagaacaatgtgagaggagcagtgcaggaactgacaaaacaga

SEQ ID NO: 580275 - DNA, 529 bp, Homo sapiens
tatgaagcttctgtgtatcagaccaaaatatctggacataaactccaaggcagcagtaccttagatttagaactgtggtttgatttgaactttttttttttaattgagacagaattttgctctttcacccaggctggagtgaagtggcacaatctcagctcgctgcaatctccactctccaggtccaagcaattctcctgcctcagcctcttcaatagctgggattacaggtgcatgccaccacacctggctaatttttgtatttttagtagagacgagacttcatcatgttggccaggctggtcccaaactcttgacctcaggtgattctsccgcctcagcatcccaaagtgctaggattacaggggtgagccaccgtgcccagcctgaacttttaaattctttttataaaagaaaatttatcttttttaccctcagaaaacttcaatagatatctggctaactaagaaatcttactaacagatatagaacaatgtgagaggagcagtgcaggaactgacaaaacaga

SEQ ID NO: 580276 - DNA, 529 bp, Homo sapiens
tatgaagcttctgtgtatcagaccaaaatatctggacataaactccaaggcagcagtaccttagatttagaactgtggtttgatttgaactttttttttttaattgagacagaattttgctctttcacccaggctggagtgaagtggcacaatctcagctcgctgcaatctccactctccaggtccaagcaattctcctgcctcagcctcttcaatagctgggattacaggtgcatgccaccacacctggctaatttttgtatttttagtagagacgagacttcatcatgttggccaggctggtcccaaactcttgacctcaggtgattctgccgcctcagcatcccaaagtgctaggattacaggggtgagccacygtgcccagcctgaacttttaaattctttttataaaagaaaatttatcttttttaccctcagaaaacttcaatagatatctggctaactaagaaatcttactaacagatatagaacaatgtgagaggagcagtgcaggaactgacaaaacaga

SEQ ID NO: 580277 - DNA, 609 bp, Homo sapiens
tctccactctccaggtccaagcaattctcctgcctcagcctcttcaatagctgggattacaggtgcatgccaccacacctggctaatttttgtatttttagtagagacgagacttcatcatgttggccaggctggtcccaaactcttgacctcaggtgattctgccgcctcagcatcccaaagtgctaggattacaggggtgagccaccgtgcccagcctgaacttttaaattctttttataaaagaaaatttatcttttttaccctcagaaaacttcaatagatatctggctaactaagaaatcttactaacagatatagaacaatgtgagaggagcagtgcaggaactgacaaaacagaattgycgcaatctttgctgacaagtgaaattttagaaagggtgccctcaccctcacctttaagtaggtacaattacagttgacccttgaactttttttcaatgtaagttacacctagtatgccagcctctcctgcctccccttccacatcctccatctctgcctgtgccaccctggagacagcaagaccaacacttcctctttcccctccttctcagcccatcaacatgaagacagcagggacgaaga

SEQ ID NO: 580278 - DNA, 611 bp, Homo sapiens
aaaatacttatgagtacttaataaggtacttaataaggtaaagcagaaaaaaaaaggaagggaaagaggagaagagaagaaaggaaggcagataggaaaggaagaggagtgaagggcgaggtaaagaggaatgaaagaaggaaagaaagagtatagacattgggaataaagaacagcaccattttttgcaaaaagtgtaatttttcacacagaaaattcaggagactcygaagaccaaaaattagacacaaaaagaaagttcagatagtttgtcaatcataaaagtaataccaaaaaagtcaattacattcctacaaataaatcacaaactattagaaaatgtaattttttacggatattacataaattatttaaaataacctatagaaataaatctagcaaaagatgtgccataatcttattgagaaaaaaaaactctattgaaggatttaaaacttaagtatttatggatggtgacacgcaatatcttgaagatgtcacgtataaccaaattaatctataaattaaatgtaattgtagtcaaaatctaacagtttttcttgcaacttgaaaagctgcttctaaaatttatatggaagctaccagccaat

SEQ ID NO: 580279 - DNA, 611 bp, Homo sapiens
aaaatacttatgagtacttaataaggtacttaataaggtaaagcagaaaaaaaaaggaagggaaagaggagaagagaagaaaggaaggcagataggaaaggaagaggagtgaagggcgaggtaaagaggaatgaaagaaggaaagaaagagtatagacattgggaataaagaacagcaccattttttgcaaaaagtgtaatttttcacacagaaaattcaggagactctgragaccaaaaattagacacaaaaagaaagttcagatagtttgtcaatcataaaagtaataccaaaaaagtcaattacattcctacaaataaatcacaaactattagaaaatgtaattttttacggatattacataaattatttaaaataacctatagaaataaatctagcaaaagatgtgccataatcttattgagaaaaaaaaactctattgaaggatttaaaacttaagtatttatggatggtgacacgcaatatcttgaagatgtcacgtataaccaaattaatctataaattaaatgtaattgtagtcaaaatctaacagtttttcttgcaacttgaaaagctgcttctaaaatttatatggaagctaccagccaat

SEQ ID NO: 580280 - DNA, 611 bp, Homo sapiens
aaaatacttatgagtacttaataaggtacttaataaggtaaagcagaaaaaaaaaggaagggaaagaggagaagagaagaaaggaaggcagataggaaaggaagaggagtgaagggcgaggtaaagaggaatgaaagaaggaaagaaagagtatagacattgggaataaagaacagcaccattttttgcaaaaagtgtaatttttcacacagaaaattcaggagactctgaagaccaaaaattagacacaaaaagaaagttcagatagtttgtcaatcataaaagtaataccaaaaaagtcaattacattcctacaaataaatcacaaactattagaaaatgtaattttttayggatattacataaattatttaaaataacctatagaaataaatctagcaaaagatgtgccataatcttattgagaaaaaaaaactctattgaaggatttaaaacttaagtatttatggatggtgacacgcaatatcttgaagatgtcacgtataaccaaattaatctataaattaaatgtaattgtagtcaaaatctaacagtttttcttgcaacttgaaaagctgcttctaaaatttatatggaagctaccagccaat

SEQ ID NO: 580281 - DNA, 601 bp, Homo sapiens
gcctctgcttcttggtgctgctcaatgctggagttctatggaccaacaggtctttttcaatccagtctttaagagacctgtagagcaaagaaccaactgtgctcttacgtatttgttcccctaatgagattacacactctcaaggcagcagttgaaattttgkgcttcctggcatgaggctttttcaaaaatttaatttgaatgtctctagatgaagctgtgaaattccaccatttgcaataggcgccatcattctctacagtcttatcagcccaagtcacataactgttacctatctgacctatatatgcagtcaagttatgacttctgcttatgagcagtgattagctttaactttttaaaactgataaatcaggccgggcacagtggctcacatctgtaatcccaccactttgggaggctaaggcagatggatcgcttgagcttaagagttcgagaccagcctgggaaacatgacaaaaccctctatctaccaaaaaatacaaaatttggccaggcatggtggtggacacgtgtggtcacagctacttgggtggctgaggtgggaggatcacttgagcctgggaggcagaggtggcag

SEQ ID NO: 580282 - DNA, 601 bp, Homo sapiens
gcctctgcttcttggtgctgctcaatgctggagttctatggaccaacaggtctttttcaatccagtctttaagagacctgtagagcaaagaaccaactgtgctcttacgtatttgttcccctaatgagattacacactctcaaggcagcagttgaaattttgtgcttcctggcatgaggctttttcaaaaatttaatttgaatgtctctagatgaagctgtgaaattccaccatttgcaataggcgccatcattctctacagtcttatcagcccaagtcacatawctgttacctatctgacctatatatgcagtcaagttatgacttctgcttatgagcagtgattagctttaactttttaaaactgataaatcaggccgggcacagtggctcacatctgtaatcccaccactttgggaggctaaggcagatggatcgcttgagcttaagagttcgagaccagcctgggaaacatgacaaaaccctctatctaccaaaaaatacaaaatttggccaggcatggtggtggacacgtgtggtcacagctacttgggtggctgaggtgggaggatcacttgagcctgggaggcagaggtggcag

SEQ ID NO: 580283 - DNA, 601 bp, Homo sapiens
gcctctgcttcttggtgctgctcaatgctggagttctatggaccaacaggtctttttcaatccagtctttaagagacctgtagagcaaagaaccaactgtgctcttacgtatttgttcccctaatgagattacacactctcaaggcagcagttgaaattttgtgcttcctggcatgaggctttttcaaaaatttaatttgaatgtctctagatgaagctgtgaaattccaccatttgcaataggcgccatcattctctacagtcttatcagcccaagtcacataactgttacctatctgacctatatatgcagtcaagttatgacttctgcttatgagcagtgattagctttaactttttaaaactgataaatcaggccgggcacagtggctcacatctgtaatcccaccactttgggaggctaaggcagatggatcgcttgagcttaagagttcgagaccagcctgggaaacatgrcaaaaccctctatctaccaaaaaatacaaaatttggccaggcatggtggtggacacgtgtggtcacagctacttgggtggctgaggtgggaggatcacttgagcctgggaggcagaggtggcag

SEQ ID NO: 580284 - DNA, 609 bp, Homo sapiens
cttgggtggctgaggtgggaggatcacttgagcctgggaggcagaggtggcagtgagctgagattgtgccactgcattccagcctgggttacctttctggtaataggtcaaactgatttttagcaagttacaaaagcaattcaatgaaacgacagtcttcaacaaatgatgctggacatttttgatcaaaaaaaaaaaaaaagaacctgaacctaaacctcacaccttatacaaaattaatttaaaatacatcaaggaatcaaaagtctaacataaaactataaaacattttagaaaaaaaattataggcaaaatcttcagcacttagggttcagtgaagaggttttagaattgatyccaaaagcaagatttatgaaaggaaaactgataaattgaaactcgctgaaatttaaaacttttgctctgcaaaagaccctattaagatgaaaagacaagttagactacaagaaatcattcgccaaacatatatttgacaaaaaaacctctatctagaatatataaggaactctcaaaacataccaatttaaaaagccaatccaattagaacaggcaaaaggcatgaacagacatttcaccaaatgggcatac

SEQ ID NO: 580285 - DNA, 588 bp, Homo sapiens
catgaacagacatttcaccaaatgggcatacagatggcaaataaacacatgaaaggtattcaataatattatccattagggaaatacagattaaaaccacaacgatattactatgcaccagtaagcatggctaaaataaaaaattatgacaataccaaatgcawataaagttgaggagaaactgaatcagtcatacattgctggagagatatggaatagtatagcaaatttaaaatatagttagccaagtagttttaaaaaaaaaacaaaaactaaacatgcacctaccatatggtctagaaatcctccttttaggcatttatcccagaaaaataaaattcacactcacacaaaaacatacacaagaatgttcataaaaactatattagtcagggctctccagagaaacagaaccaataatacacacgtgtgcacacacgcacagagatttaagaaattggctcacatggttttgggggttagcaagtctaaaatctgcaggacaggccagtaggcaggagacccaggaaagagttattttagtagttttgagtcctaaagtcatctagaagtagaattccttttcct

SEQ ID NO: 580286 - DNA, 418 bp, Homo sapiens
caggcaaaaggcatgaacagacatttcaccaaatgggcatacagatggcaaataaacacatgaaaggtattcaataatattatccattagggaaatacagattaaaaccacaacgatattactatgcaccagtaagcatggctaaaataaaaaattatgacaataccaaatgcatataaagttgaggagaaactgaatcagtcatacattgctggagagatatggaatagtatagcmaatttaaaatatagttagccaagtagttttaaaaaaaaaacaaaaactaaacatgcacctaccatatggtctagaaatcctccttttaggcatttatcccagaaaaataaaattcacactcacacaaaaacatacacaagaatgttcataaaaactatattagtcagggctctccagagaa

SEQ ID NO: 580287 - DNA, 418 bp, Homo sapiens
caggcaaaaggcatgaacagacatttcaccaaatgggcatacagatggcaaataaacacatgaaaggtattcaataatattatccattagggaaatacagattaaaaccacaacgatattactatgcaccagtaagcatggctaaaataaaaaattatgacaataccaaatgcatataaagttgaggagaaactgaatcagtcatacattgctggagagatatggaatagtatagcaaatttaaaatatagttagccaagtagttttaaaaaaaaamcaaaaactaaacatgcacctaccatatggtctagaaatcctccttttaggcatttatcccagaaaaataaaattcacactcacacaaaaacatacacaagaatgttcataaaaactatattagtcagggctctccagagaa

SEQ ID NO: 580288 - DNA, 625 bp, Homo sapiens
tgtcctcaactacttggatggctttaccgatttttcaagagacatctatgtctccataaaagccaatgcagtgactaatcgctctcaagtgtctagagagttcctcactcactactgatgttactgctattatttaggattygtgattcaccaaaccacagcctagagacttcagagggagcatgactctgccaatatcttgattctgaacttatagtcttcataactgtgagagattaaatgtctgtgttttaagccatatggttcatagtgctttgttattgcaggcctaggaaagtaattcacctctctcctgtttcactcatgaaagtataccttgcattaagtatacttaatgcaagcaaataagagagacgatattataggaacaactttgaattcactcttaaaatacaaaaccatttcccaaacttatattaaatgtaatctgtaacaaattgcttccaaaacacttcccaaccaatcacaatatactcaagcaacccactatcagggctaggaactgttcatctcacccaacactttcattttcctggagaaatggagacccaaaaaggccaaacagctcaccaaaggtgacatagcaacttgactgtgcgtttct

SEQ ID NO: 580289 - DNA, 608 bp, Homo sapiens
ggcagccagtggccacaccctgagcacccttctcaagagctaatgatgaaatgagtggggtcagaactgttgcttctcaactgcttccccatgactagggaccctggccctccctgctgccagagytagatggggctggaggcaggatctcatgctgtgccctgcacatgcctgcaggtcccagtagacagcaggagacgggggagggcccaggtgatgtggtggtcgctaattcaatctacctactgtgtggctagggtcagggctgaggctagttcccaggggccacctccttcctctgtctatgacaagggagtacacgatcttccagaatttttgcaaggagtctctgaagagacgtgtgctaattaaactgaggctgcatctccagccacacagaaagggaagttttaattcaggagtgagtatttttcagacacagtatgggctgtatctaaaaaaatcttcagtggtctgtgctgtcatgatctgtctatgctgttcgacgagtctaagaattttacaaacaccagcctctgactttacagagtggttttcctgagtcacgatgaaacaattaatgagtctattacttatgttcatctcag

SEQ ID NO: 580290 - DNA, 608 bp, Homo sapiens
ggcagccagtggccacaccctgagcacccttctcaagagctaatgatgaaatgagtggggtcagaactgttgcttctcaactgcttccccatgactagggaccctggccctccctgctgccagagctagatggggctggaggcaggatctcatgctgtgccctgcacatgcctgcaggtcccagtagacagcaggagacgggggagggcccaggtgatgtggtggtcgctaattcaatctacctactgtgtggctagggtcagggctgaggctagttcccaggggccacctccttcctctgtctatgacaagggagtacacgatcttccagaatttttgcaaggagtctctgaagagacgtgtgctaattaaactgaggctgcatctccagccacacagaawgggaagttttaattcaggagtgagtatttttcagacacagtatgggctgtatctaaaaaaatcttcagtggtctgtgctgtcatgatctgtctatgctgttcgacgagtctaagaattttacaaacaccagcctctgactttacagagtggttttcctgagtcacgatgaaacaattaatgagtctattacttatgttcatctcag

SEQ ID NO: 580291 - DNA, 520 bp, Homo sapiens
atagcaaaatacttttttttaaagctgcaacaaaacaacattaacagaagacagcaagaatttgccttcggtgccctcgttaaacactttccacagaacaattagatagtgaaaacacagtggctttgtggtttaggaaataaaatcattgtaaacacggagaaaatcgcctgcattgaccaaacatactcaggacactggagcccgcggtcgccgttttgcctcaaacgagcttggatgcggaattccaactgcgcaggaaaagattgtgaggaagtaggataattaagccatgacacaggcactagcattactagccaatcacaaccctggggcattaatatactacrcctctccccccgtgaggcctaattattccacaataaccacacctttcattttaatttagtccctcgaagatagtttgggcagggaggggcggggtgactgaggaagaggaggtagggttggaaagtgacactgggcgctgcagtggtgaggtgtgacctcacactcccag

SEQ ID NO: 580292 - DNA, 565 bp, Homo sapiens
aaattctattttttttttttttaagatggaatctcgctctgtcaccaggctggagtgcagtggcacgatctcagctcactgcaacttctgactccctggttcaagcgattctcctgcttcagcctcctgagtagctggaattacaggcaagcaccactatgcccagataatttttatatttttagtggagactacgtttcaccatgttggccaggatggtctggatctcttgacctcatgatccgcctgccttggcctcccaaagtgctgggattacaggcgtgagccactgcgcccagccaaaaattctagttttaagcagagactaatacaatgcagcaacaataacaaccaaaaaaagagtaaaagaaaattgatctcaaagaataatgatttagcagtagtaacaaattctaataaatagtagatgaatgtttaacccaaatataaaaagaaaaaaaaaataactgttcaaarccctattctaattttaacctattgcatgtattattaatatttgattatatattccaatggaaagcgagattccagagatttaatctaa

SEQ ID NO: 580293 - DNA, 553 bp, Homo sapiens
tgcttaatagcatacagtagagtgtatgcataacttttatgcacacgtggaaacaaatgaaaatcctgtgattcactctattgtgatattaatgctattatggtggtctagtaccaaacctacaatatctttgaggtatgcctctacacatatactgtcaaaagtgaagtactgagtgctgtgtgactgctacacacaaatacacacacacacacacacacacacacacacacacacacactttcatatatattttttacttctaacaccaaatgggtaacattctcccaaccccacctttagccaattctttaacattagctggtctgggaaamcatttttccctcctaggcctccaggcctgtgatgagaggggctgccatgaaggtctctgacataacccagagacattttcatcattgtcttggagattagcatttggctcctcattatttatgcaaatttttgtagcaggcttgaatattcccccagaaaatgggtttttcttttctactgcatcatcaggctgcaaatgttccaaacttttatgctc

SEQ ID NO: 580294 - DNA, 595 bp, Homo sapiens
tcacactgattttcaagtgtgaagaagcagaggccaggagactcacttgcacacctcatctcagccaggataatagagccacagcaccctgcttcccaccgcccagcagtgatgccaggtgtcccccctacccgtgtgctgcccgtcagagccaggctggctgtcagggcctagcaggaagcatgtcatgtcagatggccaaagtgaagaaactctattcaagggacccatttggctggtgacatgcgcctcagtggctcctcctctgttggctactgctgcctggacctgctcaagccctcctctcctctgcagttcctgccatctgcatccttcatgattaatctgaccctgggtagggaggcaggaggggcttctcttctccacagccctgcacctcagcagcatggctcagggtctccaagtccccagccgccacctgacatgcccctagcttactagcttgctttctccagcccccacttcagctcctggggtgtgccatgcgtgtgtgtgtgtgtgtgtgtgtgtgtgwgagagagagagagagagagagacagagagagagaaagagaaagagagagagacagcaacc

SEQ ID NO: 580295 - DNA, 563 bp, Homo sapiens
gaattctatacccagcaaaaatattcttcaagaatgaaagtgaaataaaaatatattcaaatgtataaaaactagagaaactcatcaaagcagaccaacactaaggacaacactgaaaagtgttctttaggcagaaaaaaaattattccaggtggaaactcagaaatgcaggaaggaatgaagagcaatgaaaaatagcatacataaacattaattatatgaaacaaaaataatgtttatacttaatagaaatgaaatagrtaacatatgtcagaaggagactacattaagtgttcaaaggttcttatataaaaatgccgggccgggcacagtggctcacgcctgtaatcccagtactttgggaggccaaagcaggtggattacctgaggtcaggagttcgagaccagcctggccaacatggcaaaaccccatctactaaaaatacaaaaatcagccgggcatggtggcgggcacctgtaatcccagctactcgggaggctgaggcaggagaatcgcttcaacataggaggcagaggttacagtgagccaagatcatgccact

SEQ ID NO: 580296 - DNA, 633 bp, Homo sapiens
gtttgtagagggtttctttttgattattcagtatagtacaaataaatacatacatctgaggaaactacccaagttttggggggaaacgtctgagaggattaagatgaagagtgcctgactccaccagctagactgaaaaatatattttatgggacatttgggtagagcacttagaaggaccttgcctcagtagtggggaakaattagacctaaactaaaaaatgttctggtcctgcctgacaaatcttaaaagcaagacccaaagaatcaatctgcttccaactagttcacctgcatcacaaaataaagaatatttatgcaaactatccatcacataacatgtaaaattcacatgtgtggtatccaatcaaagattaccaggcatgcaaagaagcagaaaaatgcaacctctgaagataagaaaaaccaatacattaaaactaaccccaaaatgccacagatgttaagactagcaaacaaggacactaaaacagttattacaactgtattacagatgttcaaaaactttaatagagacatggaagacattttaaaagggctaaattgaatttccagagattaaaacaatatctggttttctagaacttaatacaatatctgagatgaaaaatg

SEQ ID NO: 580297 - DNA, 586 bp, Homo sapiens
aagtgctgggattacaggcatgagccactgcacctggcctgcttctgacttattgtgagacatacaagaagacccattaaacaggtattctgttaacttgctgctgaacggaagcccataatgatgccccagtttcttgctttcatggatggggctacaggccttcgggagtggggaggtaaatacaacacaaaaataaaatcccatacatgactccacactgtcaaaactttgatttcatttgaatgcatcctatagcactgcagggtgcacatgctctgtctggttgaggcatggctgcatgtacttgtcttgtatttagtttgcctttgcagatggcaaacgttaatggtaggaagaatttctgtgtagggaccttgatctttatgatgattaatgtcgaaaacagaattccaatatggaaaaattcagtttgctttttaggagagttgatttttatctcacaatgcwggaaacagagtgaactgtcagagctgctcttagagaatggggcaggtggtcacactgagctgtgtggtccagtgtcaggctagcttctcatgtcctaggaggagctgggtggtcc

SEQ ID NO: 580298 - DNA, 526 bp, Homo sapiens
ctgtgagtacagcctgacttgccttttaaccattctcctctactgcccctcacggaggccatctcccagggaaggatgttcttaacaactagggcactttcatcacaaactgtaaaccagtggctgctatacaattatgtgtgtgtgcaagtaaattattgatggggactctcgagctcatacctctcttgaaaagggtgtagtctcaaagggtttctatagtttcttcaggtagtaagctccctgggcctaggaatcaggttatttcgtgtgatcactatctattcagcacctagcatgcacccagtactttgtaggtttaatcattatgtgttaaatgaataaatgaatgygtggggctttggtataatccaagataaaagtcacgattataaaacaagctagaacaggatgacctccacagagtaagggccatggggtgtcagagatggattaaagaggccaaaggtcactgggcacagtggctcatgcctgtaatcccagcactttgggaggccaagggggg

SEQ ID NO: 580299 - DNA, 512 bp, Homo sapiens
ctaacattgaggtctctagtcattttggtaatctgaagacaattctctactagattccttgacaaaaaaaaaaaagagagagagaatgggaaaggtaacccctgaaatcttacatttctatttatttttttcctttttcttaattttttaaattgtggtaaaatacacacataacatttaccactgctacctttttttgtttttgatttctagagacagaatctcgctctattgcccaggctggagtgcagtggttcaggcttgtctcaaattcctgagctcaagctatccacctgaactcggcctcccagtagcactggcattataggtatgagccatcacgtttggcctgttacatgggaggctgaggcacctccttgggaagttgaggcaggaraattgcttgaacccagggggacaaaagttgcagtgagccaaaagggcaccacttcactccagcctgagctaaagagcaaaacgctgtctcaaaaaaaaaaaaaaaagttatatat

SEQ ID NO: 580300 - DNA, 549 bp, Homo sapiens
gtgagctgtgattgtgccactgtactccagcctgggtgaaagagtgagatcctgtgcagaaacaaaagaagaaaaaaaragatgtgaaagcctatatattgaagactaccaagtactgcttagagcagttaaagacctttggaatagaaaatgtttcttcttgcatttcaagattgcttttgttttggggggacacactattttttaggaatatgaagttcttcttaggcattcctgtaaaaaaggccacttcttgataggattgtattgaatctgtgggttgctttgagttgtatttttatcttaaccatgttacaacttccaacccatggacacaagatgtctgtccattgatttaggtcttcctgaatctcctcgagcaatgttctgtagttgtctgtgtacaagtactgcaccttcttgaacaaatttattcccaggcatattattcttacaagtgctattataaatgaaatcattgtgtcaattttcttctcagattgttcattgctaacacaactgattgtttactgaaagtttgctgaattc

SEQ ID NO: 580301 - DNA, 549 bp, Homo sapiens
gtgagctgtgattgtgccactgtactccagcctgggtgaaagagtgagatcctgtgcagaaacaaaagaagaaaaaaagagatgtgaaagcctatatattgaagactaccaagtactgcttagagcagttaaagacctttggaatagaaaatgtttcttcttgcatttcaagattgcttttgttttggggggacacactattttttaggaatatgaagttcttcttaggcattcctgtaaaaaaggccacttcttgataggattgtattgaatctgtgggttgctttgagttgtatttttatcttaaccatgttacaacttccaacccatggacacaagatgtctgtccattgatttaggtcttcctgaatctcctcgagcaatgttctgtagttgtctgtgtacaagtactgcaccttcttgaacaaatttattcycaggcatattattcttacaagtgctattataaatgaaatcattgtgtcaattttcttctcagattgttcattgctaacacaactgattgtttactgaaagtttgctgaattc

SEQ ID NO: 580302 - DNA, 550 bp, Homo sapiens
agtgagctgtgattgtgccactgtactccagcctgggtgaaagagtgagatcctgtgcagaaacaaaagaagaaaaaaagagatgtgaaagcctatatattgaagactaccaagtactgcttagagcagttaaagacctttggaatagaaaatgtttcttcttgcatttcaagattgcttttgttttggggggacacactattttttaggaatatgaagttcttcttaggcattcctgtaaaaaaggccacttcttgataggattgtattgaatctgtgggttgctttgagttgtatttttatcttaaccatgttacaacttccaacccatggacacaagatgtctgtccattgatttaggtcttcctgaatctcctcgagcaatgttctgtagttgtctgtgtacaagtactgcaccttcttgaacaaatttattcccaggcatattattcttacaagtgctattataaatgaaatcattgtgtcaattttcttctcagattgttcattgctaacacaactgattgtttrctgaaagtttgctgaattc

SEQ ID NO: 580303 - DNA, 421 bp, Homo sapiens
ctgtcctctactcttccagaaccctgttgttctgacagcagggaggrcaaatccatgcggcatctcccgccatgacctccagcctgcagaggagaggtgccacaggacctttacacgcacaccgctgttcccctcacccatgcatttcttaatgccttggtgaggagaatgcctctgggtcttccttgatgggagctaaaggaacaaaggtaaataatgctatgggacccactgagaattggggctgtggaagagtggccactgaagtaatagacagatgcagctattgccagatactcagtgccagagcagggagggagagggaagaaatacggacctcaccttcctctcacttccaggctccatcgggtgcccccattgctaaacctaactacaagtgtgcacacaggggagccaggga

SEQ ID NO: 580304 - DNA, 408 bp, Homo sapiens
tgtcctctactcttccagaaccctgttgttctgacagcagggagggcaaatccatgcggcatctcccgccatgacctccagcctgcagaggagaggtgccacaggacctttacacgcacaccgctgttcccctcacccatgcatttcttaatgccttggtgaggagaatgcctctgggtcttccttgatgggagctaaaggaacaaaggtaaataatgctatgggacccactgagaattggggctgtggaagagtggccactgaagtaatagacagatgcagctattgccagatactcagtgccagagcagggagggagagggaagaaatacggacctcaccttcctctcacttccaggctccatcgggtgcccccaytgctaaacctaactacaagtgtgcacacag

SEQ ID NO: 580305 - DNA, 625 bp, Homo sapiens
aacgctaggtgacactaatatccccaagtctgtgctcatattcggaaaagamagctcagcgtaaagcactcaaccaggagtcaagatattgttattttcaactgttgttccaacagttgtattataaagggctagtttatttcatgcctttctaatttgacataaagtgctacatggcattggggctggtacagcctcgctcaattatgggttgaagagtacacagagactgccaggctgagggaaggtgcaagagaatagaagagatgctcacagagaaccacagaccgcacggccccagagtcaggggcagcatcagccactgtcggctgctcatttgtccagacagagcccacaagcctcagccatgctttgcttctgcaagatgcttcttcaccttttcaataaacctgcctgaattaaagctgatgggagtttatttctccttcatcataaaagaaattcttcaccacaacaatctccaatgaattgtgggcacagaaggcagacccatccctgcttctcttccactatctcccctgtaggttgaaaaggaggaggtactgaattacctccaaatgttcctttggctctgatattctgtgactctggtttctttttggct

SEQ ID NO: 580306 - DNA, 520 bp, Homo sapiens
attagccgggcgaggtggcgggcgcctgtagtcccagctgctcgggaggctgaggcaggagaatggcgtgaacccggaaagcggagcttgcagtgagctaagatcgcgccactgcactccagcctgggccttggagtgagactctgtctcaaaaaaaaaaaaaaaaaaaaaaaagaattgacttgaaggagtcaggccggaaggccaaataggagatgaatggggatagcggctkgaataagggcagtggcaaggaaaatgggctaggggttagggaagggggctgactggctgtgcacccaaatgctaaaaagggtccagaaaggaatgtgttcagctatttttcaaggacttctaaattaaactctcttaaatgatgtttatattaaggctggtggtggagtctttcagaggcagtgttggtgctagaagagctcttgaggatcatacagcctcccccctcaatttcacagtgaaagaaaacctcagagaagcaaagcaacttgctcaaggtcacaca

SEQ ID NO: 580307 - DNA, 311 bp, Homo sapiens
atccctgtatgctgtgtgtcctgagggcactaactcagagtgtcctgttactccctcatcagtgtgtcayctggacaattcactgagctcgttctctgtgtgtgtgtgtttgtgtgtgtgtgtgtgtgtgtgtgtgtgtgtgtctatctgtctttctctttcattcttttccatttggccccgttgtgtcccaacatgaaggcaataatttgttacctcattaatggatctatccttttagttttttaaccacttccctatgctacccatgaaacctagttggggctctgttgtgtctgatttcccctggc

SEQ ID NO: 580308 - DNA, 224 bp, Homo sapiens
cattcttttccatttggcccygttgtgtcccaacatgaaggcaataatttgttacctcattaatggatctatccttttagttttttaaccacttccctatgctacccatgaaacctagttggggctctgttgtgtctgatttcccctggcttattctttactttttcctccttttccaggctcagcagggagctgctggaggtagtagagcctgaagtcttgca

SEQ ID NO: 580309 - DNA, 224 bp, Homo sapiens
cattcttttccatttggccccgttstgtcccaacatgaaggcaataatttgttacctcattaatggatctatccttttagttttttaaccacttccctatgctacccatgaaacctagttggggctctgttgtgtctgatttcccctggcttattctttactttttcctccttttccaggctcagcagggagctgctggaggtagtagagcctgaagtcttgca

SEQ ID NO: 580310 - DNA, 342 bp, Homo sapiens
ctctcacagtgtcctattcttatgctgaggagcctgaggtccctgtgtgaggrttagacagtggattgttatgtgtgtaggggaatcagcttaatgtgtctgtccatgtctgaatttattgcagaaattgaaaagaaggggaaggggaagaaaagaaggagaagaagatcaaagaaggaaagaagaaggggaagaaaagaaggggaagaagatcaaaacccaccatgccccaggtgactttcagcaattgtggatgcttaattctgtgttaacacctggaggcaacagattcagggaaaccagagtgtgtttgatgtcatgttttcaacgaaggctgaatta

SEQ ID NO: 580311 - DNA, 595 bp, Homo sapiens
acaagcacaggcaaccaaagcaaacatggacaaataggatcacaccaagttaaaaagcttctgcacagcgaaggatatagtcaacaaagtgaagagacaacccacagaatgggagagagtattcgcaaatctcccatctgacaagagattaataatcagaatatataatgagctcaaacaactctacgggaaaaaaaatctaacaattaaaatgggcaaaaatttgagtaaacatttctcaaaagaagacatacaaatggcaaagaggcacatgaaaaggtgctcagtcggagaaatgcaaatcaaaactacaatgagataacatctcatcccacttaaaatggcttatatgcaaaaaggcaataacaaatgctcgcaaggatataaagaaaagggaacccttgtgcgcygttggtggtaatgtaaattggtgcaactattacggagaacagtttgaaggttccttaaaaagctaaaaattgagctaccatatgatccaaccattctactgctgggtatatatccaaaagaaaggaaatcagtatgtcaaagagctgtctgtactcctatgtttgttgcagcactgtttacaata

SEQ ID NO: 580312 - DNA, 470 bp, Homo sapiens
aaatgtataatgataaatttgtagtattttaagccactagttggtggtaatttattgtagcagcaatgagaacttaatacatctccaacatagttccaaaaatacttaaaaatttccgcgatacttcctccaaatatttgaatggatgagctctaatgtttaatatccaatacattttatatattttatacttaggaatatacaaaaatactctctgcaacacacacatacacacattttgcaggtgtattagtctgttctcacacttctatgaagaaatacccaagactgggtaatttttaaaggaaagaggtttaattgactcacmcacatggctgggaggcctcaggaaacttacaatcatggctgaaggcaaaggagaagcaggcaccttcttcacaaggtggcagagtggagtgagtgcaagcaggggaaataccagatgcttataaaagcatcagatctcgtga

SEQ ID NO: 580313 - DNA, 502 bp, Homo sapiens
aaacacatataaatataatgtgcacatattacatacctgcaatatacagaatatatttctttgattctaaaatgaaaaatttgttgtttcaaacatttccaaaattggaatgtacttaaaattgatattgtcataaagttgctgttaacaaggcaacagctgtgattcatcaatgactgatcctgggtagagagcagatctagttttccattctactattctttgaacttctctgtatctttaaaatttttcataatcaatgctttggggaaatctatttaattaaatagtttaaatcaatcattaattaaattaagtaatttaattaaataagcctatttaattaaaatctttgtggcacagggcataatgttttgttgaaaaatgtggacaccaatagctctcaccatgaaartgttttacaagattgagactctgaatatgcagaaattttaggaataccttaaccatttctgtttgcttatctgatatatgagacata

SEQ ID NO: 580314 - DNA, 517 bp, Homo sapiens
gctggaaaatatgagacaagggacaaggtggtctggctagaggaatatggatagtcatacgggggtgggcaaaaaatacgacaattcttttgtctctaaatgggcactaaagttagtgccccacagaaagcatttaccattaaagtggcacagaacatcccagtaaacaaaatgaatcaggcaactgccattaaccagcttcacgggactgaacgtttgtgcctccaaccccgaatttacatattaaaattctaaccttcaatatgatgttataccatattgggggcctttggaaggaggtggggcctttggaagataactaagtsataagggtggagccctcatgaacaggatcaatgtgcttatgaaaggaaccacagagagctcacttgtcctctttactatgtgaggatactgagaaaagacacctgtctgcaaaccagaagatggcctttacagaacccaaccactctggtctcagacttccaggttttggaattgtgagaaataagtgttt

SEQ ID NO: 580315 - DNA, 573 bp, Homo sapiens
ttttgtgtttccatatgaattgcagaatagttaaaaaaaaaactttctgtaaaaaatgccattggaatttgacagcggttgcattgaatcyttccagattccatactactctttgagtagtatgaacattttcataatattaaatctgcctatctgtgaacatagaatatctttccatttgtttgtatcttctttttttgcataaatgatttgtagttttcagattgttagtgtacagaaatacaactaagttttgtaggttgattttgtatcatgcagctttactgaatttgtttattcattctaatagtgtcttaatggaacctttagggttttctatatataaaatcatatcatcagcaaatgggcaattttacttctttttcatttgaatgccttttatttctttttcctgcctagctgctctatctctgtcacaattacaccttcatgtcctataatttagggaataaattaaaattttttaccatactggattgctttttcataaattagcgaggaaaggggagagaaaggaaatgtttgtgatgatgtacataatataagaaataa

SEQ ID NO: 580316 - DNA, 573 bp, Homo sapiens
ttttgtgtttccatatgaattgcagaatagttaaaaaaaaaactttctgtaaaaaatgccattggaatttgacagcggttgcattgaatctttccagattccatactactctttgagtagtatgaacattttcataatattaaatctgcctatctgtgaacatagaatatctttccatttgtttgtatcttctttttttgcataaatgatttgtagttttcagattgttagtgtacagaaatacaactaagttttgtaggttgattttgtatcatgcagctttactgaatttgtttattcattctaatagtgtcttaatggaacctttaggrttttctatatataaaatcatatcatcagcaaatgggcaattttacttctttttcatttgaatgccttttatttctttttcctgcctagctgctctatctctgtcacaattacaccttcatgtcctataatttagggaataaattaaaattttttaccatactggattgctttttcataaattagcgaggaaaggggagagaaaggaaatgtttgtgatgatgtacataatataagaaataa

SEQ ID NO: 580317 - DNA, 573 bp, Homo sapiens
ttttgtgtttccatatgaattgcagaatagttaaaaaaaaaactttctgtaaaaaatgccattggaatttgacagcggttgcattgaatctttccagattccatactactctttgagtagtatgaacattttcataatattaaatctgcctatctgtgaacatagaatatctttccatttgtttgtatcttctttttttgcataaatgatttgtagttttcagattgttagtgtacagaaatacaactaagttttgtaggttgattttgtatcatgcagctttactgaatttgtttattcattctaatagtgtcttaatggaacctttagggttttctatatataaaatcatatcatcagcaaatgggcaattttacttctttttcatttgaatgycttttatttctttttcctgcctagctgctctatctctgtcacaattacaccttcatgtcctataatttagggaataaattaaaattttttaccatactggattgctttttcataaattagcgaggaaaggggagagaaaggaaatgtttgtgatgatgtacataatataagaaataa

SEQ ID NO: 580318 - DNA, 593 bp, Homo sapiens
ctttctctctcttgtagtccccagtgtctactgtwcccaaaaatatggtttcttgagagtttattaacatatctaggaaacaatagccaaataaataacattataagacaaagcataaacgagaatgtactaaagttactaaaatggttaattggtccttcatattgcttcatagaaatgggggggtagaagtcttaggcatatggcagagcagatgcagactcaataaggttggttggctggtgtctggtaggcaaaggtctttatccactgaaagaagtttgaggctttcagagttatttcactttaacctataataatatttcatgcccaaaatatctttctactggcttgatttttttacatggagaaatgatttccatcataagaaagggaagaaacagtctctgagctatttgcaatactgattatatcaaaaagggatcacgtcactgaaatctctgttgagctttatgcttttcctggtaaagttagtagaatgggtgaaatacttaaacattttcttttggctgggcacagtggctgaaacctgtaatctcagcactttgggaggctgagtaggtggaccgctt

SEQ ID NO: 580319 - DNA, 578 bp, Homo sapiens
caacatggtactggaaatcctagccagagcaattcagcaagaaaaaagaagtaaaaggcatcaaaatttgaaaggaaacaataaaattatcattgtacttagatgatatgatcttacatgtagaattccccaaagattacacaagaaaactgttagaaataataaacaggccaggcatgatrgctcacacctgtaatcccagcactttgggaggccaagtcaggtggatcacctgaggtcaagagttcaagaccagcctggccagcatggcaaaaccccgtctctactaaaaaaaatacaaaaattatctgtgtgtgatggcagatgcctgtaatcccagctactcgggaggctgaggcagggagaattgcttgaatctgggaggtggaggttgcagtgagccaagttcacactactgcactccagcctgggtggaagaaagagactctgtctcaaaaagaaaaaaaaaagaaagaaaataaaagaaataataaacaaatacagaaaattaacagaatacaaaatccacatgcaaaaataagctgattgtctatgcactaataatagttggaggcttt

SEQ ID NO: 580320 - DNA, 578 bp, Homo sapiens
caacatggtactggaaatcctagccagagcaattcagcaagaaaaaagaagtaaaaggcatcaaaatttgaaaggaaacaataaaattatcattgtacttagatgatatgatcttacatgtagaattccccaaagattacacaagaaaactgttagaaataataaacaggccaggcatgatagctcacacctgtaatcccagcactttgggaggccaagtcaggtggatcacctgaggtcaagagttcaagaccagcctggccagcatggcaaaaccccgtctctactaaaaaaaatacaaaaattatctgtgtgtgatggcagatgcctgtaatcccagctactcgggaggctgaggcagggagaattgcttgaatctgggaggtggaggttgcagtgagccaagttcacrctactgcactccagcctgggtggaagaaagagactctgtctcaaaaagaaaaaaaaaagaaagaaaataaaagaaataataaacaaatacagaaaattaacagaatacaaaatccacatgcaaaaataagctgattgtctatgcactaataatagttggaggcttt

SEQ ID NO: 580321 - DNA, 533 bp, Homo sapiens
gtgatcctcccactgcagcctcctgagtagctaggactacaggcatgcaccatttttaagtagagacaagatctctctatatwgtccaggctggtcttgaactcctgaactcaagtgatcctcctgtcttggcctctcaaagtattgggattacaagtttgagcccccacgcctggcccacagacatatttgaattccatttctaattactagctgtgtgaccttggggttacataacttactatctgtgagtcttgtctcactatcctgaaaagaaagcaatacttaatatattccttaggtgtagggtaatgataacatatgtaactttggttagcacatggcctgcacatgatagagcttcccttccttgacctattaggtgaggctttggtcaaaaatccaattacagagattagtttctgccagaagaaatgatatatgaatccacagaaacacagttagcgtgacatcatttatggtacctatatatccagccattctgttaagtaacaatttccagagggttttca

SEQ ID NO: 580322 - DNA, 533 bp, Homo sapiens
gtgatcctcccactgcagcctcctgagtagctaggactacaggcatgcaccatttttaagtagagacaagatctctctatatagtccaggctggtcttgaactcctgaactcaagtgatcctcctgtcttggcctctcaaagtattgggattacaagtttgagcccccaygcctggcccacagacatatttgaattccatttctaattactagctgtgtgaccttggggttacataacttactatctgtgagtcttgtctcactatcctgaaaagaaagcaatacttaatatattccttaggtgtagggtaatgataacatatgtaactttggttagcacatggcctgcacatgatagagcttcccttccttgacctattaggtgaggctttggtcaaaaatccaattacagagattagtttctgccagaagaaatgatatatgaatccacagaaacacagttagcgtgacatcatttatggtacctatatatccagccattctgttaagtaacaatttccagagggttttca

SEQ ID NO: 580323 - DNA, 548 bp, Homo sapiens
tttttgtacactttaagtactcacttagagtggttcttttttgtacacaactttttataattaaaattgctacaaggttattttcttttatgtctcctgggttatatgaagtaattttaaaaggcctctttcattggaagatattaaaagtgaattattacatacttttcaagaaatgtattgatatatattcacatggattatgtataaagaggtatatataattcacatgaaatatatataaaaatatacgttctgtgtgaattttattctgattgttaggtgtgatattttcaatgaatctatataatactgtttttaaaattgtgttacaatatatacaacatgaaattaaccattttaaccattttaaagtgtacaattcagtggcattgatggtggtacacactagccatgtgcacaaccatcaccactatgtggttcaagacctttttcattgtcccatgaagaaaacccataaattaggcagtctcttcccattgccgcttctstccagccctaggcaactacgcatctgctttctatct

SEQ ID NO: 580324 - DNA, 497 bp, Homo sapiens
attgtgccttacctacctccagctatcatgaactgcttacagtacagttctgcaaacgctccaggtcatttcatgccttcatgttttattctcatgctgttgttcccattgaaatgtccttccttattccgactgcttcacaagaatctgtcgcattttcagacttagattaagcacactaatgtcctctgaatatacagacagtagcaaataaattttaaaaattacctttcatttcttaatttatcatagttcaacatacacatagtgtcaatgtacaaaaataaggcatgtggtcactgctgtagaagagctttctgtatggatagttcaagtaaaaaagttactgtgatatcaaacaatgaatgctaagaaccgtaatagtgtagatgaaagtgctgaaaaggctaaagtaggaagaaacggaatctaactgggcgtggagattagaaaagacttcatggttgagmaggtaatttaagatggatcttgaaagt

SEQ ID NO: 580325 - DNA, 501 bp, Homo sapiens
atattgatatccagttttcccagcaccatttattcaagagactatcctttccataatgtctgttcttggcacctttgtcaaaaatgaactcaatgcatgtgtatgaatttgtttctgggttctctattctgttccatgggtttatgtgtctgtttttatgccagtaccgtgctgtttactgtcactttgtagtataaattgaagtcaggtaatgtgattcctccagttttgttctttttgcttaggatagcttyggctattctgggtctttcatagtttcatataaattttaggattgtgttttctagttctgtgaagaatgtcattggtattttgataaagattgcattgaatctgtagattgctttgggtagtatgcacattttaataatattaatttttctaatccctgaacatggactatttttccattgtattgtgtcctcttcagtttctttcatcaatattttactgttttcattgtagagatctttcactttt

SEQ ID NO: 580326 - DNA, 501 bp, Homo sapiens
atattgatatccagttttcccagcaccatttattcaagagactatcctttccataatgtctgttcttggcacctttgtcaaaaatgaactcaatgcatgtgtatgaatttgtttctgggttctctattctgttccatgggtttatgtgtctgtttttatgccagtaccgtgctgtttactgtcactttgtagtataaattgaagtcaggtaatgtgattcctccagttttgttctttttgcttaggatagcttcggctattctgggtctttcatagtttcatataaattttaggattgtgttttctagttctgtgaagaatgtcattggtattttgataaarattgcattgaatctgtagattgctttgggtagtatgcacattttaataatattaatttttctaatccctgaacatggactatttttccattgtattgtgtcctcttcagtttctttcatcaatattttactgttttcattgtagagatctttcactttt

SEQ ID NO: 580327 - DNA, 580 bp, Homo sapiens
acaatcctagccaacatggcgaaaccycgtttctactaaacacacacacacacacacacacacacacacacacacacaaaattagctggacgtggtggcacgtgcctgtaatcccagctcctcgggaggctgaggcaggagaatctcttgaaccagtgagttggaggttgcagtgagtcgagatcacaccactgctctccagcctggcgacagagtgagactccctctcaaaaaaaaaaaaaaaaaaaaatacagataattctaggctttcatgtactcattaaagctgatctctgactcccaattcctgaggtgagccacagtatatcttgtcaatgtataattttcaaaaagttaaaagtatgactctcattgaactatcaaatgaatatgtatcaaaaattttattcaactcattaattgatgaggtaaccaataagaagataaaagttctccaagagcattttggataatttagtttacatagtctttttctttaaaaaggactaaaatttctagatacaaaattaattaatgtctttaggggcaataaaccataaacttcagggtcatctttaca

SEQ ID NO: 580328 - DNA, 580 bp, Homo sapiens
acaatcctagccaacatggcgaaaccccgtttctactaaacacacacacacacacacacacacacacacacacacacaaaattagctggacgtggtggcacgtgcctgtaatcccagctcctcgggaggctgaggcaggagaatctcttgaaccagtgagttggaggttgcagtgagtcragatcacaccactgctctccagcctggcgacagagtgagactccctctcaaaaaaaaaaaaaaaaaaaaatacagataattctaggctttcatgtactcattaaagctgatctctgactcccaattcctgaggtgagccacagtatatcttgtcaatgtataattttcaaaaagttaaaagtatgactctcattgaactatcaaatgaatatgtatcaaaaattttattcaactcattaattgatgaggtaaccaataagaagataaaagttctccaagagcattttggataatttagtttacatagtctttttctttaaaaaggactaaaatttctagatacaaaattaattaatgtctttaggggcaataaaccataaacttcagggtcatctttaca

SEQ ID NO: 580329 - DNA, 580 bp, Homo sapiens
acaatcctagccaacatggcgaaaccccgtttctactaaacacacacacacacacacacacacacacacacacacacaaaattagctggacgtggtggcacgtgcctgtaatcccagctcctcgggaggctgaggcaggagaatctcttgaaccagtgagttggaggttgcagtgagtcgagatcacaccactgctctccagcctggcgacagagtgagactccctctcaaaaaaaaaaaaaaaaaaaaatacagataattctaggctttcatgtactcattaaagctgatctctgactcccaattcctgaggtgagccacrgtatatcttgtcaatgtataattttcaaaaagttaaaagtatgactctcattgaactatcaaatgaatatgtatcaaaaattttattcaactcattaattgatgaggtaaccaataagaagataaaagttctccaagagcattttggataatttagtttacatagtctttttctttaaaaaggactaaaatttctagatacaaaattaattaatgtctttaggggcaataaaccataaacttcagggtcatctttaca

SEQ ID NO: 580330 - DNA, 496 bp, Homo sapiens
tttcagcagtgttttgtagtttcccttgcagaagtctttcacatccttggttaggtatattcctaagtaatttattttattttattttttcagttattgtgaaaggggttgagttctttatttgattctcagcttggtcactgctggtgtatagcagagctactgatttgtatccattaattttgtgtcctgaaactttgccaaattcatttaccagttctgggagctttttggatgcatctatagggtttyctaggtatacaatcatatcatctgcaaacagtgacagtttgacttcctctttactgatttggatgccctttatttctttctcttgtctggttgctctggctaagacttccagtactttgttgaataaaagtggtgaaagtggacatccttgtcttgttccagttcccagggggaatgctttcaacttttccccattcagtataatgttggctgtggatttgtcatagatggcttttattacctt

SEQ ID NO: 580331 - DNA, 596 bp, Homo sapiens
atctactttctgtctgtatgaatttccttaatcaggatgtttcatgtaagtgaaatcatacagtatgtggccttctgtgtctgtcttctttcacttagcataaggttttcaaagttcatccatactgtagcatgcatcagtacttcattcctttttatggctgaatattttcatgatatagagataccactggtggatggacatttgggtgtttctacattttggctgtygtgaaaatactgctacgagcatttatgtacaagtttttgtgtagacatgtgtttattttcaattctcttgggtgtacccttagaagtggaattgttgggtcatatgataactccgtgtttaatattttgaggaactgctagactgttttctaaagcagctggcactagtttatgaccccattgtaggtagctcttactttcttcttttgtttacttattcttctgtaatggacatatattaataattagaaagaagtaattttttaaaatctatgagctccaatctgtgggtaacaagcctggtgtaatgaggttttatttcatttggtaccaactttgtatttaaactgaacaaaggccctatct

SEQ ID NO: 580332 - DNA, 580 bp, Homo sapiens
tagcccagcattttccaaagttatcccttgataatagctatagaaatagttgcttggggaaataaattgggaaatactgcatactaatgtcagtcttgaagatgaacatgctcattagcatatgaaagsctctgaaaaaatcctgaaggggaaagcaaaaatctatagagtttggtttaacctagttttgcccaaattttgttatgagacctcttagtattgctgtgaaactaattgccctaaaacttagaggcataagacaataatcacttaatatcacctagagtgtccatgggtcaggaatctgggaaggattcacctgggtgcttcttctggcttaggatgtttcaagcattgtagttaggagattaggaggtggctgtccaaaataacaagtggcaaaaaccactggagacttgctggtcatctgtcttcctgccatgttagagcttttccttgtggcttctctatgtaggctagattgggtttcctcacagcatggctttctccaggtaagactattacatggtagctccgagttctgatgccagtatggcaactcaccaagtagaagatgcca

SEQ ID NO: 580333 - DNA, 580 bp, Homo sapiens
tagcccagcattttccaaagttatcccttgataatagctatagaaatagttgcttggggaaataaattgggaaatactgcatactaatgtcagtcttgaagatgaacatgctcattagcatatgaaagcctctgaaaaaatcctgaaggggaaagcaaaaatctatagagtttggtttaacctagttttgcccaaattttgttatgagacctcttagtattgctgtgaaactaattgccctaaaacttagaggcataagacaataatcacttaatatcacctagagtgtccatgggtcaggaatctgggaaggattcacctgggtgcttcttctggcttaggatgtttcaagcattgtagttaggagattaggaggtggctgtccaaaataacaagtggcaaraaccactggagacttgctggtcatctgtcttcctgccatgttagagcttttccttgtggcttctctatgtaggctagattgggtttcctcacagcatggctttctccaggtaagactattacatggtagctccgagttctgatgccagtatggcaactcaccaagtagaagatgcca

SEQ ID NO: 580334 - DNA, 580 bp, Homo sapiens
tagcccagcattttccaaagttatcccttgataatagctatagaaatagttgcttggggaaataaattgggaaatactgcatactaatgtcagtcttgaagatgaacatgctcattagcatatgaaagcctctgaaaaaatcctgaaggggaaagcaaaaatctatagagtttggtttaacctagttttgcccaaattttgttatgagacctcttagtattgctgtgaaactaattgccctaaaacttagaggcataagacaataatcacttaatatcacctagagtgtccatgggtcaggaatctgggaaggattcacctgggtgcttcttctggcttaggatgtttcaagcattgtagttaggagattaggaggtggctgtccaaaataacaagtggcaaaarccactggagacttgctggtcatctgtcttcctgccatgttagagcttttccttgtggcttctctatgtaggctagattgggtttcctcacagcatggctttctccaggtaagactattacatggtagctccgagttctgatgccagtatggcaactcaccaagtagaagatgcca

SEQ ID NO: 580335 - DNA, 607 bp, Homo sapiens
ctacatccattttcccaaactttaccgagcaaggtgcagaacagcctccactatgttagaaccatctttggcacttgtttcacagaataatgccccatacgtctgtaaaaaagaaatacacacaattaaatgaagcccttcattgagtttcctgaaattttagcttttaaaatcagtaaaataaaaatatgttcctactgagcatgctaagagtaactaatagctaagaaactgaattcagagttccagtacttacaaagaaaatggtttaagcatagttactccaggaaaagttcctagttggaggacttttactttacattaaaaaaatagaatatttcatgtttgaaggtttttatttccaacagtcaaaacacatgctaccaaatgttctttatcaaatattccgagacagataaaaatgagttcaaggtaaccactcaggaattaaatgtccatcaagagtctgtttccctttggccagcagctaacacacyctccttcccgctaacttttcccttctggatccagcagcctccacgtttgctgaaaccaatggacacgttctagttctctattattcaacctcccagccatagtgcatatg

SEQ ID NO: 580336 - DNA, 530 bp, Homo sapiens
ataatgttatatattgaaaaaaagaaagtttgttccatttcagtagaaattaagcatacgtagtaattacttaatatttatagctatattccctttactgcaacaagcatatattgtgtctaatatataaaaggttctaggctaggtaatggggattcagaggtatataaattggaatttatgatgtcatggcaatctttttttttttttttttttttttttgagacagagtctctgttgcccaggctggagtgtatggcgtgatctcagttcactgcaacctctgcctcctgggctcaggcaattctcctgcctcagcctcctgagtagctgggaccacaggcatgcgccaacgggcctggctagtttttgtatttttagtagaggcggggtttcaccatgttggccaggctggcctggaactcctgaccttaagtgatccacttgccttggcctcccaaagtgctgggattacagacatgarccactgcgcctggccaatctactgactttctaattatgatttcatt

SEQ ID NO: 580337 - DNA, 626 bp, Homo sapiens
tactggtaccaatttactgtattagtccgttttcatgctgctgataaagacatacctgagactgggcaatttacaaaagaaagaggtttaatggacccacagttccttgtggctggggaggmctcacaatcatggtggatggcaaggaggagcaagtcatgtctttcatggatggcagcaagcaaagagagagagcttgtgcagagatatctccccttataaaaccatcaaatcttgtgaaacttattcactatcacaagaacaacacaggaaaaacttacccccatgattcagttacctcttactgggtccctcccacaacatgtgggaattgtggaagctaaaattctagatgagatttgggtggggacacagcaaatcatatcagtgttggtggtggcaccaaatcattaaatccaagtgatgttaatatccccattatatagaggaaaagactgacactcaggagcttcatagatggcacccactgccaagttctgcaatactttatgaatgtgtttgtacagagcaggccatctccagagtacatctagtctttcagaaatggttgcttgcattatttttatttctaagccttatttcttgcatttttttcacctcatgaa

SEQ ID NO: 580338 - DNA, 626 bp, Homo sapiens
tactggtaccaatttactgtattagtccgttttcatgctgctgataaagacatacctgagactgggcaatttacaaaagaaagaggtttaatggacccacagttccttgtggctggggaggactcacaatcatggtggatggcaaggaggagcaagtcatgtctttcatggatggcagcaagcaaagagagagagcttgtgcagagatatctccccttataaaaccatcaaatcttgtgaaacttattcactatcacaagaacaacacaggaaaaactyacccccatgattcagttacctcttactgggtccctcccacaacatgtgggaattgtggaagctaaaattctagatgagatttgggtggggacacagcaaatcatatcagtgttggtggtggcaccaaatcattaaatccaagtgatgttaatatccccattatatagaggaaaagactgacactcaggagcttcatagatggcacccactgccaagttctgcaatactttatgaatgtgtttgtacagagcaggccatctccagagtacatctagtctttcagaaatggttgcttgcattatttttatttctaagccttatttcttgcatttttttcacctcatgaa

SEQ ID NO: 580339 - DNA, 606 bp, Homo sapiens
ccacccgctttgatgttcttttcttctgtctcacacctgtttgaccatctcttaaataggaacattttaaaaccaaattaaaaattccattttctgatacattgtctcatttgaatccaatttactaaacatataatatgctttttccaatcttatactaaaataataaagtggggctctatgagaatgcatatctttcgtcaactcaaaggaagaactgaaaactaacattttatttcaaggaaacatgcttaaatggctcatttgattacttttatgtacacatgatacctcaaagtcagatgcctcaaatctcagtgttcagataatctcctaaatgaagatgtataaaaagagctactttttctatttttagctgtgcctaaaggattttcttgtctctcagatattctcatttgctttggttattccccttttcttcttctttctcctgtgtggttttgctttatgttkttaactttctctgattttcagatttttttttattttctaggtttcttacctttgccttttctgtctattcttattttcactttcttccaacaaaacacccactaaaattcagagcaggatgggtcttttctc

SEQ ID NO: 580340 - DNA, 606 bp, Homo sapiens
ccacccgctttgatgttcttttcttctgtctcacacctgtttgaccatctcttaaataggaacattttaaaaccaaattaaaaattccattttctgatacattgtctcatttgaatccaatttactaaacatataatatgctttttccaatcttatactaaaataataaagtggggctctatgagaatgcatatctttcgtcaactcaaaggaagaactgaaaactaacattttatttcaaggaaacatgcttaaatggctcatttgattacttttatgtacacatgatacctcaaagtcagatgcctcaaatctcagtgttcagataatctcctaaatgaagatgtataaaaagagctactttttctatttttagctgtgcctaaaggattttcttgtctctcagatattctcatttgctttggttattccccttttcttcttctttctcctgtgtggttttgctttatgtttytaactttctctgattttcagatttttttttattttctaggtttcttacctttgccttttctgtctattcttattttcactttcttccaacaaaacacccactaaaattcagagcaggatgggtcttttctc

SEQ ID NO: 580341 - DNA, 606 bp, Homo sapiens
ccacccgctttgatgttcttttcttctgtctcacacctgtttgaccatctcttaaataggaacattttaaaaccaaattaaaaattccattttctgatacattgtctcatttgaatccaatttactaaacatataatatgctttttccaatcttatactaaaataataaagtggggctctatgagaatgcatatctttcgtcaactcaaaggaagaactgaaaactaacattttatttcaaggaaacatgcttaaatggctcatttgattacttttatgtacacatgatacctcaaagtcagatgcctcaaatctcagtgttcagataatctcctaaatgaagatgtataaaaagagctactttttctatttttagctgtgcctaaaggattttcttgtctctcagatattctcatttgctttggttattccccttttcttcttctttctcctgtgtggttttgctttatgtttttaactttctckgattttcagatttttttttattttctaggtttcttacctttgccttttctgtctattcttattttcactttcttccaacaaaacacccactaaaattcagagcaggatgggtcttttctc

SEQ ID NO: 580342 - DNA, 607 bp, Homo sapiens
tacacttttaagaaagtcatggttggggcccaggaggtatgggtcagaaggagaggtaggggcacacacatgggcaactgttgagtagacttctggctgcgccatgatctcaactggccaatgccaggagttcaggatgacagctttctgcctctagtcagccctcggcttccccaggaaaattgaaagtggaagctggttccaggcagaccaacactcccaacagttgttagaaagcccttccccagacagcctcacacctgagtcttaagtctggcggccacgctaatcgtttttaactggcgacaggtgcccagtattttcctccaattctaaggggataggacagaatagcaaatgaaagtggtccaatattactcaccactttggaggtcccttcatggtcgccaaaatgttaccagggggtccttgttcttagagctcccaagtggtggcaggccgcttccaagatggaggcaagccttttgttctctgacctggggttcttggcctcacagattccaaggaatggaatcttgggccatgcggtgagtgwtatagctctattcagctcaattaggacaaacccgggcacttagccatgcag

SEQ ID NO: 580343 - DNA, 607 bp, Homo sapiens
tacacttttaagaaagtcatggttggggcccaggaggtatgggtcagaaggagaggtaggggcacacacatgggcaactgttgagtagacttctggctgcgccatgatctcaactggccaatgccaggagttcaggatgacagctttctgcctctagtcagccctcggcttccccaggaaaattgaaagtggaagctggttccaggcagaccaacactcccaacagttgttagaaagcccttccccagacagcctcacacctgagtcttaagtctggcggccacgctaatcgtttttaactggcgacaggtgcccagtattttcctccaattctaaggggataggacagaatagcaaatgaaagtggtccaatattactcaccactttggaggtcccttcatggtcgccaaaatgttaccagggggtccttgttcttagagctcccaagtggtggcaggccgcttccaagatggaggcaagccttttgttctctgacctggggttcttggcctcacagattccaaggaatggaatcttgggccatgcggtgagtgatatagctctattcarctcaattaggacaaacccgggcacttagccatgcag

SEQ ID NO: 580344 - DNA, 526 bp, Homo sapiens
ttaaagaagttattcagggagaaggaaagtgatataggtcaggaacttagatctatgtaacaggaagcatgttagagaatgcataaataaaggtaaaactaagatcttttgtttttcttattattttcttttttttttttttttttgagcggagtcttgctctgtcacccaggctggagtgcagtggcgtgatctcggctcactgaaagctccrcctgccgggttcacgccattctcctgcctcagcctcccaagtagctgggactacaggcacctgccaccacacctggctaatttttttgtatttctagtagagatggcatttcaccatgttagccaggatggtctcgatctcctgacctcatgatccccccgcctaggcctcccaaagtgcatttttcttattcttaatggatctaacagataacagtttgttcaaaataagagcaacaatgtgtttgctgattttagcttgtagataagtaaaatgaataacagcaatgatataagagataagagggaaggg

SEQ ID NO: 580345 - DNA, 523 bp, Homo sapiens
tttggattctctcagcattcctggtatgttcctgtggcaggtcttggagcaaaatttcacaatgtgtgtctccacacactgctctgtccatctgagtgggagttgaaagttagtcttgcctcctctctgccattttctctcccagacagttctggagactagatgtccaagatcaaggtgccagctggtttagagtctgataatagcccagtctctgcttccaagctcccaagatttcttattttataatttcctttatgtttaacccatttcccttyagaaaaaaaaatgcagctcactgccagcactcatttaattttacatgctctttgaggctgagtcaaatctgactgattttcaatgtgaaaatgaaatataaaaactgtttttgcagttacttctaaacagaacttgtctctaatactaatgtaacagaaatgtctatgatgtcacgttaggattagagagaagagtattctcagggcaaagaggaaatgggttaaataacttcctttagttattc

SEQ ID NO: 580346 - DNA, 237 bp, Homo sapiens
tcagggtccaacatcatgcatgtgcaggtttggttccttctgaggcctcgctaccggatttgcagatggctgctttctttttctttttttttttgaggcggagtctcactctgtcgcccaggctggagtgcagtggygcaatctctgcactccaggttcaagcaattctcactgcaacctctgcctcctaggttcaagcaattctgcctcagcctcccaagtagctaggactacagg

SEQ ID NO: 580347 - DNA, 399 bp, Homo sapiens
ttttgaaattctgaaagcactttgatagatcagtgtttgttccgtaaatatttgggacatattatgtgttctagtttctgccttagacattggacctgcttagcctgatgtaaagaagttccctatttagaattccatctagcraaatatcagatgagggatattagtcactagaagaaaagcccccagatctctagtgggtctgtgaggatagttcccatagtgaccccaggtctctagtgggtctgtgaggatagttcccatagtgacactatcagtgtgaagtaggccaatttaaactgggttgctgcactgcacatgatcagttcccactggctgctgtgagcaaaggctttactgctgttcctgcaggagtgtgcatcaatcatcaggttaagc

SEQ ID NO: 580348 - DNA, 399 bp, Homo sapiens
ttttgaaattctgaaagcactttgatagatcagtgtttgttccgtaaatatttgggacatattatgtgttctagtttctgccttagacattggacctgcttagcctgatgtaaagaagttccctatttagaattccatctagcaaaatatcagatgagggatattagtcactagaagaaaagcccccagatctctagtgggtctgtgaggatagttcccatagtgaccccaggtstctagtgggtctgtgaggatagttcccatagtgacactatcagtgtgaagtaggccaatttaaactgggttgctgcactgcacatgatcagttcccactggctgctgtgagcaaaggctttactgctgttcctgcaggagtgtgcatcaatcatcaggttaagc

SEQ ID NO: 580349 - DNA, 571 bp, Homo sapiens
agactggcaaaatggatttaaaagagaaaacatgattcgactacataacaagagagtcacttcagatctaaaaaaccaaaaaggttaaaagtgaaaagatggaaaaatatattccatacaaattttaaccaaaakgcaccagacgtggctattttaatatcacacaaaatatactttaaatcagaatattttaaaagtgataaagacatatactaataaaagtttcaatacatccagaagatataaaaattataaatacttacttaataacagaccatcaatatatatgaagcaaaatttgacagaattgaaggcaaaaataaacagttctacaataatagcttgaaacttcaatacccctacctcaataatggatagaacaaccagatggaggataagtaaggaaatagaggacttgaacaatatgataaagcaactaaactgacagacatatacagaacagtctactcaacagcaacaaaatatacattcttctcaagtacatataggctattttccaggatagacaatattttgggccaaagattaagtctcagtaaatttaaaaaga

SEQ ID NO: 580350 - DNA, 474 bp, Homo sapiens
tagacctctttttgttccgttactagcaatttgtattttctctcttctttttttcttagttaacctggctaaaggttattgtgcttttgtttcttttcttttttcttttttttttttttgaaacaaagtctcattctgtcgccaggctggagtgcaatggtgagatcttggctcactgcaacctccgcctcctgggttcaagcaattctcctgcctcagcctcccgagtagctgggaactacaggtgcacgccactacacccagctaatttttatatttttttagtagagatgggtttcaccatcttggccaggatggtcttgatctcttgaccttttgagctgcccgctgtggccaaggktactgattttattgatcttttcaaggaactggtttgggttttggtgatttttttctattgattttccattttcaatttcattaatttttgctttaatttttattatttcttct

SEQ ID NO: 580351 - DNA, 474 bp, Homo sapiens
tagacctctttttgttccgttactagcaatttgtattttctctcttctttttttcttagttaacctggctaaaggttattgtgcttttgtttcttttcttttttcttttttttttttttgaaacaaagtctcattctgtcgccaggctggagtgcaatggtgagatcttggctcactgcaacctccgcctcctgggttcaagcaattctcctgcctcagcctcccgagtagctgggaactacaggtgcacgccactacacccagctaatttttatatttttttagtagagatgggtttcaccatcttggccaggatggtcttgatctcttgaccttttgagctgcccgctgtggccaaggttactgattttattgatcttttcaaggaactggtttgggttttggkgatttttttctattgattttccattttcaatttcattaatttttgctttaatttttattatttcttct

SEQ ID NO: 580352 - DNA, 597 bp, Homo sapiens
aatggccaataccacagtgagtgtgggtaagttgtaagcatttcatttaagaactggaacaagacaaagatgctcactttcctcactcttatttaacgtagtactagaaatccttgttggagcaatcagacaagagaaaaaatagtcattcaaattgctaaacaggaagtcaaattattcttccttgctgatagtataatcttacctctagaaaaaccccataaatttcactaaaaatcatttgatttgaccagtgaattgaataaagtacctggatacaaaataaatgtacataaattggtaatatttttatacaccaatgaccaaagaactaaggaccaaatcaagaaagcaatcccatttatagtagccacacacacataaaatatctaggaatatattttgtcaagggagtgaaatacctccacaaggagaataacaaaacactactgagagaaatcatatgtgacacaaacaaaaaaaatcccacgctaatagattggaagaatcaatattaaaatgaccatactgcccaaagcaattgaacaaaattacagacagttttcttcttttttwaacttttattgtaagttcaga

SEQ ID NO: 580353 - DNA, 487 bp, Homo sapiens
agttttaaacattggcagtaaggccaggttactaacggaaagcttgaagtgctacttttgggtggatttcatttgtcatgaatgtatcctcagcattaaagaatgatctcacacttatttggtcatcttgacaaagagattgtaagaaatyagtgtttttttaaaatataaagaagcacagtgacatgatttttataaaagcatgttctaaactggaaagcactatacaaatgtagacttctttatccctgaagttttgcatgttaattcattggcaagtcatgaaatttatagctcaaatgcacagaacacacagactttttacacagcatttggtatcatatcttattttctgaacactggaactccaaattacaatgtaggacagcaaattgcagaggagtgaaattaagaggccacctctaaattatcagctaaggccaacatgtggtcaatcctctttaaagtaggtagaatgaaattagta

SEQ ID NO: 580354 - DNA, 538 bp, Homo sapiens
gaaaatcagccgtgctgtcttttgggctctcagtattttgaggtaagagcaactcagaggaaaatggggagcctggggggatgggtgcctatggccctgttcgctgcgactgccctgtgcacaaaaatcctttggcttagcacgggctgaaattctgtctctgcttactctttaggcagactcctctgtcagctsaagtgtccataggggatgtggaatctcttgaaattaggatcccagaggtttatggagagagagagctgacccaccattccatcgcacacaagttccctaggaggagttcgggaatggatactaaccctgacatttggcaaccccgtgcagggttctcagcttcctccctcttcttcagcctcagtgtctacattgtctttgtaatgattcttggttttctttctccaaagacgtgtttttaaaatgttgctttgctcaattttagtctcttttccatgagaatgctgctttctggctgcatctatttggctatattgtcccctatctcaaagaattgcttctt

SEQ ID NO: 580355 - DNA, 543 bp, Homo sapiens
tttttcttactataattactaatcaattaaaacaagtttttggtctctactaaaaatacaaaaattagctgggcatggtggcggctgcctataattccaggtactagggaggctgaggcaggagaatcacttgaacctgggaggcagaagttgcagtgagctgagattacgcactgcactccagcctgggtgactaagtgagactccgtttaaaaaaaaaaaaaagcttttacttttatttactatgtgccaggacattattctaagaatttttacatgtaacaattaacttttacagtttttatactcctttgtcttcttttctcgaaattttaataatttctgtgtatcattcttgggtcacctcttgctgtgaggctacaraaaggggtggaaagggttattagttttgaagtcaactggatatacattacttagtttgttgaataaattatcacattttctttttttttcctcttccttccattctcctttcctttctctctttggtgggtttttttacttttgttttcttctttccta

SEQ ID NO: 580356 - DNA, 543 bp, Homo sapiens
tttttcttactataattactaatcaattaaaacaagtttttggtctctactaaaaatacaaaaattagctgggcatggtggcggctgcctataattccaggtactagggaggctgaggcaggagaatcacttgaacctgggaggcagaagttgcagtgagctgagattacgcactgcactccagcctgggtgactaagtgagactccgtttaaaaaaaaaaaaaagcttttacttttatttactatgtgccaggacattattctaagaatttttacatgtaacaattaacttttacagtttttatactcctttgtcttcttttctcgaaattttaataatttctgtgtatcattcttgggtcacctcttgctgtgaggctacaaaaaggggtggaaagggttattagttttgaagtcaactggatatacattacttagtttgttgaataaattatcacattttctttttttttcctcttccttccattctcctttcctttctctctttgktgggtttttttacttttgttttcttctttccta

SEQ ID NO: 580357 - DNA, 543 bp, Homo sapiens
tttttcttactataattactaatcaattaaaacaagtttttggtctctactaaaaatacaaaaattagctgggcatggtggcggctgcctataattccaggtactagggaggctgaggcaggagaatcacttgaacctgggaggcagaagttgcagtgagctgagattacgcactgcactccagcctgggtgactaagtgagactccgtttaaaaaaaaaaaaaagcttttacttttatttactatgtgccaggacattattctaagaatttttacatgtaacaattaacttttacagtttttatactcctttgtcttcttttctcgaaattttaataatttctgtgtatcattcttgggtcacctcttgctgtgaggctacaaaaaggggtggaaagggttattagttttgaagtcaactggatatacattacttagtttgttgaataaattatcacattttctttttttttcctcttccttccattctcctttcctttctctctttggtgggttyttttacttttgttttcttctttccta

SEQ ID NO: 580358 - DNA, 570 bp, Homo sapiens
gatttaaccatcgcacttcattaaaatataaacagttagtgggagaggaaccaaatgctgatgtaaacttgaataactaaaatataggatatcaacaaatacctgcatattgatgtagaaatggaatgaacacttttttttgtaatgacaaatcaaacttctttaaagytgaagataaattaaagagccaaaggtttccaaaaaatgtagcattagctgttctagtgatcttaagtatttctttttacttaagaaaaattactttaactgcagtaatatatgttatgtaaaggcatatcattaatctagtgaaaacaaaacaaacgaaaagcacagaaagtgtatttacctttatgagaaattttcaaagcaactcaaaagtaacacctattggaagtaaaaattaatgaatggaatatggcactaagctaataagttcatattaggccatcaaagtagtttagaagtgaagtatttttagttctctaatccattaatttgacaaatggtttaatagctgaaaagagaaatctcccggacagtatcagctaacccaaaaatcaaatgtaa

SEQ ID NO: 580359 - DNA, 464 bp, Homo sapiens
ttgattaaaaacgtgagaagctgccatcttagcaccacagctgactagttgtgccatctgggccacaggggtactgcagccactgcctggcctctcaacactttgtcccacgtgtctgatgtctgctaccatcattgcagcttcctccctgaaaagcacagctctccctgaaaggggagtaaagaagactgtattagtctgttctcacactgctaataaagacataccagagactgggtaatttctgaaggaaagaggtttaatggactctcagttccacatggctgaggaggcctcacaaacatagtggaaggcaaataagaagcaatgtcatatcttatatggcagcaggcaagaragcgtttgcaggggaacccccctttacaaaccatcagatctcactatcacaagaacagcacagggaaaacccgcccccatgattcaattacctcccaccaggtccc

SEQ ID NO: 580360 - DNA, 593 bp, Homo sapiens
gaactaagatacatggttcttttgaatatagttgtaagtaattattaagaaacttctgctattgctatttttattttatttatgctttgtgtgtgtgtgtgtgtgtgtgtgtgtgtgtgtgtgtgtgtgtgtgtgtggcagggtctcgccctgtcacccaagtgggagtgcagtggcatgatcatggctcactgcagcctccacttcctgggctcaagtgatcctcccacctcattttttgatttttttttgtagagacgaagtctcaatatgttgcccaagctggttttgaactcttaggctcaagcaatcctcctgcctctgcctcccaaagtactgggattatrggcttgagccactgcacccagctgttgctatttttaatatttcataataatttatcttctacattttgtttttatgagcatgtattttttattacaggtctgttgtcctttatttcatgtggactataaagccctattttatatctagtatactgagtcacggtggtggcaggcagaaggagagaaagacaatatttattgaccattttctgtttaatatgtactctgctaggttcttttaattta

SEQ ID NO: 580361 - DNA, 579 bp, Homo sapiens
atgtttgcttgaattcattgcaaatgggtgtataaaaataaaatttaacttaatatgcacaaagttccgagtaaacatttcaatgagtaatatgtaaaattttagcctcagagtatcaggtacattatggattgatagcaaaattatacacttgcacagagtaaaaggttatgctaactttccaaaataattttcttcaagtacaaattgttatcagatgtgaagtgacagcttagggcagaattagatgcatcaattttctgcataatttatcttggtccccagagtccctaacaagaggaacacagatgctggtgacatgtattgtgcaaggtaagatcaactgttactatcaaatttcctcttttgactcacatcttgaatcaccagacagaaataacttacaccaatagttgaaacacttctgtttaaggacatttttattaaycttgtgctctccctgttcttggataaaactaagcatcagaaagggaatatcttttcataaagaaaaaaagtagactttccttaagtggtatttctcactctatccttcacacttatactttaattgtgatt

SEQ ID NO: 580362 - DNA, 467 bp, Homo sapiens
ttttaaacaaccagatcttgtgagaactctatcacaagataggactagggagtggtgttaaaccatcagaaatcacccccatgatccaatcacctcccaccaggtcccacctccaacactagggattacaattcaacatgagatttgggtggggacacagagccaagccatatcaygtagtatcctcaattaaaccaaacagggttgttcaattgtgtcaaagtcattgtagaaataatagatttccttagaaaaagatttccaactttcttggtacttcataaacaaatgaggatagcagtgtgactttcttaatactcagtaacttgtcagaagtttatctgaaaaaacaaagtgcctcactctcttgagaaagctttggaaaggaaaggacatgacgcacactatggaaaggagtttgaacatttctcaaagaactgaaaacagaactaccgttcaattcagca

SEQ ID NO: 580363 - DNA, 467 bp, Homo sapiens
ttttaaacaaccagatcttgtgagaactctatcacaagataggactagggagtggtgttaaaccatcagaaatcacccccatgatccaatcacctcccaccaggtcccacctccaacactagggattacaattcaacatgagatttgggtggggacacagagccaagccatatcacgtagtatcctcaattaaaccaaacagggttgttcaattgtgtcaaagtcattgtagaaataatagatttccttagaaaaagatttccaactttcttggtacttcataaacaaatgaggatagcagtgtgactttcttaatactcagtaacttgtyagaagtttatctgaaaaaacaaagtgcctcactctcttgagaaagctttggaaaggaaaggacatgacgcacactatggaaaggagtttgaacatttctcaaagaactgaaaacagaactaccgttcaattcagca

SEQ ID NO: 580364 - DNA, 467 bp, Homo sapiens
ttttaaacaaccagatcttgtgagaactctatcacaagataggactagggagtggtgttaaaccatcagaaatcacccccatgatccaatcacctcccaccaggtcccacctccaacactagggattacaattcaacatgagatttgggtggggacacagagccaagccatatcacgtagtatcctcaattaaaccaaacagggttgttcaattgtgtcaaagtcattgtagaaataatagatttccttagaaaaagatttccaactttcttggtacttcataaacaaatgaggatagcagtgtgactttcttaatactcagtaacttgtcagaagtttatctgaaaaaacaaagygcctcactctcttgagaaagctttggaaaggaaaggacatgacgcacactatggaaaggagtttgaacatttctcaaagaactgaaaacagaactaccgttcaattcagca

SEQ ID NO: 580365 - DNA, 467 bp, Homo sapiens
ttttaaacaaccagatcttgtgagaactctatcacaagataggactagggagtggtgttaaaccatcagaaatcacccccatgatccaatcacctcccaccaggtcccacctccaacactagggattacaattcaacatgagatttgggtggggacacagagccaagccatatcacgtagtatcctcaattaaaccaaacagggttgttcaattgtgtcaaagtcattgtagaaataatagatttccttagaaaaagatttccaactttcttggtacttcataaacaaatgaggatagcagtgtgactttcttaatactcagtaacttgtcagaagtttatctgaaaaaacaaagtgcctcactctcttgagaaagctttggaaaggaaaggacatgacgcacactatggaaaggagtttgaacatttctcaaagaactkaaaacagaactaccgttcaattcagca

SEQ ID NO: 580366 - DNA, 566 bp, Homo sapiens
agaatctgcattttagcaagatccccaggtgttgaatagtcacattcgagtttgagaatcactagtctagcagacaataaatgaatttgggattaaataataagtcacctgactcctggcccagagctgctgtctttgaatcacagtgattggcagtgagtagtgggcaattagggccaacagcctcaggtcytgaagagctcctctaatttgagagggtctgctggtttagtgaagggcagagctgctgctgcctcatggcctcttggggacatagggcctcacaatgtctgggtcagcttaggtcccagaggtcctaggatccttaattgaaaaatcataattatttatttagatgacactgctgttagcatgcagaattaatgacagccatgtggtctaggttgagggaggcagaaatggagggcaaaagacttctgggtggggatttcagagcccagaggtgctccataaactcaccttcgtggacaccccttaaccatgttatgtttattaaacagatacacaaaagcataagcacactttcccttaaagcttaaataata

SEQ ID NO: 580367 - DNA, 631 bp, Homo sapiens
ctaggaaacaaatgtgattcaccccaagatgggccaaccagccaactcaycacctaagagagagggtatctctttaaggtgtcactgatctttagacacttactggatgtctatgatgttctgccaattgaaagcaggggataggaagacatggaagagtacctgctctctgagagtttataggctaatgaaggagggaacaagataaagctgagacaagataaataaccatacacagcaacctatccatgaccagagagtggtaccaagtgtcagtacttctgtagctcagagaccagaacacctgtgactagactgagcaaggcctttaaaaaaaaaagaaaaagaaaatgagagaatgcaccataaaggaagaacagcttgagaggaggtgtggaggtgggaaatctatatgctgcaaacagtccttgtatggctagagtgagaagtggaagatgacaatggtgtgagagagatcaatctagagatggaattaggaacataattattaatttatgtaaataaataattatatgtttatataaatacaaaatcagcagtcaaataataacatgtaacccctatatagcccacaccaggctaagaaggcaggactttgtcttaaaaaaaa

SEQ ID NO: 580368 - DNA, 398 bp, Homo sapiens
gaattccactatggtgaagcatgtttgaaaggcacttagcttgcattgatttatagggtttttcagtaaagacatatcccaaatttcagacactcatctttctggttccccatcgatttattagcgctcacttccctttccttatttcctgtgcttccaaaggtactctgcttactcaaytataaaaaatgcataatttttcaaaattgagtaagagtagaatacaatgaacagagagatgatagaagattgataggttggtaggtggatagacagacaggcaggcaggcaggcaaggtctcctccatattacccccatcaccctcactaccccagactctgcatctgagattagctaaaagtatgtttgaggagatcggcactgcatctaagcatgt

SEQ ID NO: 580369 - DNA, 559 bp, Homo sapiens
cctaaaattaatcaacgatgtactatgtgcccaaattgccactattgttccttatagatttatttttcaagtagaccataaactctcagacttttcactctatataattcttatcaccatactgagaatatagtaaacagaatgtttgcttactaattatctaatttattaagatacyggaaacagcaagagctttttcctttttctttttcaatatcctctaaacccataagttgagctgattcaattaggaaggttcagatattgtactgtaaaccttggatttagatacactttggcccaatcctagtcttaccatttctagaagggaagccttgaacaaattctttaacttccatgaactccaattgctttattcataaaatgaggattaattttttcttacaacataaactggaggctacattgaggtggcatgttctctgataataatattagtgttatttattctgttactattattatgtattatgctgtggtataaaaacagcattttggggttgagttaataacatgcttattatttactgttttctga

SEQ ID NO: 580370 - DNA, 559 bp, Homo sapiens
cctaaaattaatcaacgatgtactatgtgcccaaattgccactattgttccttatagatttatttttcaagtagaccataaactctcagacttttcactctatataattcttatcaccatactgagaatatagtaaacagaatgtttgcttactaattatctaatttattaagatactggaaacagcaagagctttttcctttttctttttcaatatcctctaaacccataagttgagctgattcaattaggaaggttcagatatygtactgtaaaccttggatttagatacactttggcccaatcctagtcttaccatttctagaagggaagccttgaacaaattctttaacttccatgaactccaattgctttattcataaaatgaggattaattttttcttacaacataaactggaggctacattgaggtggcatgttctctgataataatattagtgttatttattctgttactattattatgtattatgctgtggtataaaaacagcattttggggttgagttaataacatgcttattatttactgttttctga

SEQ ID NO: 580371 - DNA, 559 bp, Homo sapiens
cctaaaattaatcaacgatgtactatgtgcccaaattgccactattgttccttatagatttatttttcaagtagaccataaactctcagacttttcactctatataattcttatcaccatactgagaatatagtaaacagaatgtttgcttactaattatctaatttattaagatactggaaacagcaagagctttttcctttttctttttcaatatcctctaaacccataagttgagctgattcaattaggaaggttcagatattgtactgtaaaccttggatttagatacactttggcccaatcctagtcttaccatttctagaagggaagccttgaacaaattctttaacttccatgaactccaattgctttattcataaaatgaggattaattttttcttacaacataaactggaggmtacattgaggtggcatgttctctgataataatattagtgttatttattctgttactattattatgtattatgctgtggtataaaaacagcattttggggttgagttaataacatgcttattatttactgttttctga

SEQ ID NO: 580372 - DNA, 519 bp, Homo sapiens
agctgggtgtggtggtgggtacctgtaatcccagctaatcgggaggctgaggcacgagaatggcttgaacctgggaggtagaggttgcaatgagccaagatcgcgccactgcactccagcctgggggacagagggagactctgtctcaataataaagaaaaagtttattgtagttttaawtaatttttaaatcgtatcaatttcctgataggattaatgtgtataattctatcatgatgctttgcccaaacaactatataatattctaacataataaaccaacagacattgtagatcattcctatataaccacaaattaaaagaaaaaactactggtatcagaagactctgataaccacaactaccccacaaccatgtctatgccacattttacccctccccatcatcctattacttcctctgtaagcaaggtccggtattagcatctattataggtttgttattaagagtaaatgagattatctatggaaggcactcaacatagatttgatgcctact

SEQ ID NO: 580373 - DNA, 519 bp, Homo sapiens
agctgggtgtggtggtgggtacctgtaatcccagctaatcgggaggctgaggcacgagaatggcttgaacctgggaggtagaggttgcaatgagccaagatcgcgccactgcactccagcctgggggacagagggagactctgtctcaataataaagaaaaagtttattgtagttttaaataatttttaaatcgtatcaatttcctgataggattaatgtgtatarttctatcatgatgctttgcccaaacaactatataatattctaacataataaaccaacagacattgtagatcattcctatataaccacaaattaaaagaaaaaactactggtatcagaagactctgataaccacaactaccccacaaccatgtctatgccacattttacccctccccatcatcctattacttcctctgtaagcaaggtccggtattagcatctattataggtttgttattaagagtaaatgagattatctatggaaggcactcaacatagatttgatgcctact

SEQ ID NO: 580374 - DNA, 588 bp, Homo sapiens
ttactgtttgttaaagctatttaagcttgataatgagtgaagtctattgtgtcccatgagtctgagaataaatccaaatccatcttcactgatagttcaagctgttgagaattaataaaggaaatatctttagttcagtagaggttattgcaaaaaaaaaaaaacaaagtaaatagtgtatctgctctttaaaaaataaaaaagtttttccctctgagttgaagactaagataatgaaggacattactaccatatgtattgaatattgacattaggtatctgccaatgcaatgaaaaacaaaagaaaaaacttaagaatgaaaaggaatcattaatattgtcattttcatggataatgtagttacatacatagaaaagtcaaaataatgtaatagaaactattaagtgtaaaaaatggatttagcaagtttgctgaaaccaagctatataaccaaaaataaataatattcaccattgggaaacaattacaaaatatattttttaaaaaagttatttacaaacacaagagttgtacargaataaacataacaaaaacataaacaattttgagaaaaaataaagaaaacc

SEQ ID NO: 580375 - DNA, 607 bp, Homo sapiens
acaactccctgtccttgttgctgcccattttggggaatttatttatcaactcctgctgtaaacgataataataacaatgataacacatattgaatattttgtgcctaacactgtacactttctcatgtaatcctccaataaccacgtgagataggtgctattattatttccattgacaggtgaaataacagatgttcagagagttaagtaatctatccaaagtcagacagctagtacctgacaacgcatatcagagcaagaaattctagctctcataacaggcaaactcccaaatcacagtatcttaacacaaaaagagtttatttcwtgatcacatcttggcccctgggaattggtgactccttctagtcaggccatcatgaaacatatgacacccatggcttctgcatggggtaatgaaagaggcattgcaaactttaagggcctcagcccttcctgtcacagttcaatgacaagaatgagtattgtgacccctatctacttacaagggaggataggacacataggggaagacatatctatttagtgagcactaactgtactgctttaccctagcacccatgctcttatctagcttaactgtcct

SEQ ID NO: 580376 - DNA, 607 bp, Homo sapiens
acaactccctgtccttgttgctgcccattttggggaatttatttatcaactcctgctgtaaacgataataataacaatgataacacatattgaatattttgtgcctaacactgtacactttctcatgtaatcctccaataaccacgtgagataggtgctattattatttccattgacaggtgaaataacagatgttcagagagttaagtaatctatccaaagtcagacagctagtacctgacaacgcatatcagagcaagaaattctagctctcataacaggcaaactcccaaatcacagtatcttaacacaaaaagagtttatttcatgatcacatcttggcccctgggaattggtgactccttctagtcaggccatcatgaaacatatgacacccatggcttctgcatggggtaatgaaagaggcattgcaaactttaagggcctcagcccttcctgtcacagtycaatgacaagaatgagtattgtgacccctatctacttacaagggaggataggacacataggggaagacatatctatttagtgagcactaactgtactgctttaccctagcacccatgctcttatctagcttaactgtcct

SEQ ID NO: 580377 - DNA, 552 bp, Homo sapiens
aataaaacctcatacttccaggcaatctttctccctctctctctctctctctctcwcacacacacacacacacacacacacacacacacacagagattaatttacacaggaaagaaaattacaatggatttctcacctgcaaatgtggaagacagggaaaaatatatttatgtgctttccagggaaaaagagtaagatccaagaattttttaccagcctagatatcatccctatggaaggacaagtgaataaatttatatgatcacaaaatatattacctgtgtgtcttttctgagaaaacaaagaagcaaagagaaaattaattcaggacaaacatctcaagttagtaaaagattgagtataccagagacaatggtaagcaaaaaactgctagtttttaaaaactgaaaaaaaagttgttaaaatcaaaacttcataataatgcaatttttcaagtataaaataagtgttgctaagaatcatttttaaaaatgcataattccaggaagagcaataattgagaattaaaacttcaaaaatacctaaaagggc

SEQ ID NO: 580378 - DNA, 582 bp, Homo sapiens
tgtaacagattactactacttgagggcttaaacaacacacattctcttacagttctggagtccaaaatcagttttactgggccaaaacaaagtatcttcagggtcatgcttactctggagactcaagtggaggatctgtttccttgtcttttccagcctcgagagcttcaatccttgcattccttggcccatgrccccatcagccatcttcaaagctagcagtgtaacatcttgcctcagtatcatattgccttctgtctgtgtaatcaaatctccttcttcctctctcttctaaagaaacttgtggttacatttagagcccactgaaataattaaggataatctcctcatctcaatatctttaagtcacatctgcaaaggcccttttgccatataagataacattcacaggctccaaagattgagatatagctgttttgggggccattattcatcctaccacattggatgctagacattgtgaatcttaccttgctgggtgctttcaaaagtgtaaaaatcttacacttttaaaaatattttggggctttgttcttgaatttcattaagttacgtggaaat

SEQ ID NO: 580379 - DNA, 522 bp, Homo sapiens
tctcctgcctcagcctcccaagtagctgggactactggtgtgcaccaccacacctggctaactttgttattttaaatagagatggggtttcgccacattggccagggtggtctcgaactcctgaactcaagtgatccacccccccacctcggcctcccaaaatgctgggattacagacatgagccgccactcatgtrgttttaacaatgccttgtacattaactttgactgtcaagacaagaattgagctcacagagaaattaatgcttagatgggacctgaatagggtgagaaagaaaggcaaagaagcccactaaaagtcaaacttggcgactgcatatgaacccgaatgtgaaaagtcagagtaagtgggaaaggcctcagccagaccaccacaggttcctgggaccaaaggcaagaatgatatatggcctcactttctgatggttcattgccatttcacctcccaccacccacacatccatttttttagataagaatgtacagttgacccttgaacaa

SEQ ID NO: 580380 - DNA, 385 bp, Homo sapiens
agaatcctagaatcatatagtaatgttcttgaacycttcaattcaaaatacatgaacatacattcactctccaatttcactgatgtagacacaatgcttttctttaacgctagggcatgtggagagagagcagcagtgaatgatgtagataataaaccaagtccacaatgcatcatctaccatttccagtttcattgtccttaaaatggaaagagaacttaaagtggttacaaataaacccgaatgcagaatctctctagattttgaaatattttctcaatcttgtacagctgtttttcctacacttaatttgacagaaattttttagtgactcacccctatggagtctttttaaagtatttaatatagtttccctggaaacaag

SEQ ID NO: 580381 - DNA, 385 bp, Homo sapiens
agaatcctagaatcatatagtaatgttcttgaacccttcaattcaaaatacatgaacatacattcactctccaatttcactgatgtagacacaatgcttttctttaacgctagggcatgtggagagagagcagcagtgaatgatgtagataataaaccaagtccacaatgcatcatctaccatttccagtttcattgtccttaaaatggaaagagaacttaaagtggttacaaataaaccygaatgcagaatctctctagattttgaaatattttctcaatcttgtacagctgtttttcctacacttaatttgacagaaattttttagtgactcacccctatggagtctttttaaagtatttaatatagtttccctggaaacaag

SEQ ID NO: 580382 - DNA, 583 bp, Homo sapiens
tgttgaaaattttaaacatggaataattatatgtatttatatataatgaaaatgtttgaataaaaatgacataaattagaaagggttctttccaactttgggttttgatagtttataatatgtctacgtctggatttttgagtttattccttttgggttttactgagtttctggacatgtagatcaacaatttttatcaaaatttgggaagttttcagacattaatttttcaaatattctttctaccccttttcctcccctcttctctctgctccttctgctccttctctttctccttctgtgactctcattatgtatatatatgtatcatggtatctcacaggtctctgagactttttttcattcttttctctctcagtrcctcagactggttatataaattgaactatcttcaaggtcaagcattcattcttctgaaagctcaaatcttctgttgagtgccccctgtgaatttattttaattattattgtgtgttttgaccctatagactgtattataaacttttaaataatttatatatctttcttgatattttcctttatttgatgatgtattattctc

SEQ ID NO: 580383 - DNA, 583 bp, Homo sapiens
tgttgaaaattttaaacatggaataattatatgtatttatatataatgaaaatgtttgaataaaaatgacataaattagaaagggttctttccaactttgggttttgatagtttataatatgtctacgtctggatttttgagtttattccttttgggttttactgagtttctggacatgtagatcaacaatttttatcaaaatttgggaagttttcagacattaatttttcaaatattctttctaccccttttcctcccctcttctctctgctccttctgctccttctctttctccttctgtgactctcattatgtatatatatgtatcatggtatctcacaggtctctgagactttttttcattcttttctctctcagtacctcagactggttatataaattgarctatcttcaaggtcaagcattcattcttctgaaagctcaaatcttctgttgagtgccccctgtgaatttattttaattattattgtgtgttttgaccctatagactgtattataaacttttaaataatttatatatctttcttgatattttcctttatttgatgatgtattattctc

SEQ ID NO: 580384 - DNA, 670 bp, Homo sapiens
acaggctcctgaatgacttctgagtaaacaatgaagttaaggaagaaatcaagttctttgaaactaataagaacaaaggtagaacatrccagaatctctgggacagaactaacagtgttaagagggaagttcatagcattaaatgcccacatcaaaaaggtaaaaagatctcaaattaccaatctaataccacaactgaaagaattacggaaggaagagcaaatcaactccaaagctagcagaagacaagaaataaccaaaatcagagctgagctgaaagaaatcaaaacacagaaaactattcaatgtttgctttctgaaaaacataataagatatatagggcattagccacactaataaagaagaaaagagagaagatccaaatagacacaattagaaataacaaagaggatgctaccactgaccccacagaaataaaaataaccatcagaaactactatgaacacctctatgcacacaaactagaaaatctagaagagcagaataaatttctggacacatacaccttccctagactgaaccaggaagaaatcaaatccctaaaccgaccgataatgagcttcaaaattgaatgagtaataaatagtctaccatcccaaagaagcccagaaccagattaattcatagccatattctaccagatgtaca

SEQ ID NO: 580385 - DNA, 670 bp, Homo sapiens
acaggctcctgaatgacttctgagtaaacaatgaagttaaggaagaaatcaagttctttgaaactaataagaacaaaggtagaacataccagaatctctgggacagaactaacagtgttaagagggaagttcatagcattaaatgcccacatcaaaaaggtaaaaagatctcaaattaccaatctaataccacaactgaaagaattacggaaggaagagcaaatcaactccaaagctagcagaagacaagaaataaccaaaatcagagctgagctgaaagaaatcaaaacacagaaaactattcaatgtttgctttctgaaaaacataataagatatatagggcattagccacactaataaagaagaaaagagagaagatccaaatagacacaattagaaataacaaagaggatgctaccactgaccccacagaaataaaaataaccatcagaaactactatgaacacctctatgcacacaaactagaaaatctagaagagcagaataaatttctggacacatacaccttccctagactgaaccaggaagaaatcaaatccctaaaccgaccgataatgagcttcaaawttgaatgagtaataaatagtctaccatcccaaagaagcccagaaccagattaattcatagccatattctaccagatgtaca

SEQ ID NO: 580386 - DNA, 507 bp, Homo sapiens
ttttcttttcctttggtttgtattccctgctggtgcctaaaattgtctcctcctcagagaaaaggataattttatgccttgaagtgtgataactgtacagttacatgagaaaagagcagaataatatacagagtatgggatgttaagttatttatctgccacacattagtacttctttttgagtcccactgcagaagcacrgtggccaaaaaaggagagctgagaatcctgctcttattatttctggccagacccacccaaatcatcttatccccagctttttattttgaaaattttcaaccctacaagagaaattttgaacacccattgtacccttctctagtgtcattaattgatatcatattcccatatgtgcttttcttttaattacattcattttattgtggtaaaatatacataaactaaaaatttaccattttaaatcacttttaagtatacaatttaatggcattaaatacatttacattgttgtgcaactatcaccgc

SEQ ID NO: 580387 - DNA, 577 bp, Homo sapiens
tcttttaccactgttgcaggtctggcttttctgaggctgtttttaatgattagtctataaacttaaagcagcaattatcctcaagcaagcaaaatttttctttaacatagactcaatattgtaacattctcaataggatcaaggtgagtcttcctgtatggtaatgggagtagggaaggaggcagagtctctgggcccctatgttcatacgtggcatcttcagttttgtccttgaatgttggtgtttgtaagaaaacgaccttgtgtaaatgtctcttgcactaaagaaaggtggcatttcagagaacaccatggagtcaktgctccttctcctgtttcccaatggccagccagcatttactgtcagtgggtcttccaaatttcactgtatcctagtgttttcttcactttagaaatatgacttgtcagaattagatagtacataataaattcaacttcaggtgtttgtttttctcaattttcaaaaatattaaggagttgatttctctctctcctcacatactcccaatgcagcacaccaccttttgacttaattcaccagtctacatagagttga

SEQ ID NO: 580388 - DNA, 587 bp, Homo sapiens
ttgcttaagatatctttggctactgggctcttttgtggttccaaatgaattttagagtggttgtttctaattgtgaaaaaatgttgttagtagtttgataggaatagcattgaatctgtaaattgctttgggcagtatgaccrttttaacgatattgattctccatatccatgagcttggaatgttttcctatttgtttgagtcatctgtgattctttcagtagtgttttataattcttcttgtacagaccttttacctccctgattagctgtattcctaggtattttattctttttgtggctattgtgaatgggattgcatttctgagttggctctcagcttggatgctgctggtgtgtagaaatgctagtgatttttatagaatgattttgtatcctgaaactttgctgaagtttctgagatctaggagcctttggacagagagtatggaattttctaggtatagaatcatataatctgtgaagagagatagcttgacttcttttccaatttggatgcctttttatttttattattttgtctggttgttctggctaggatttccagtattatgttgaataggtgt

SEQ ID NO: 580389 - DNA, 308 bp, Homo sapiens
acctacagcaacagaggatcatttctctctctcatggcatgccaaatacagctctactactcatcctccttaatttcagaaataaagctttgagtktataatcaacgcttaggaaaagaaaccatcccagtttgcctaggaatgagtagttcagtagacataagacttttagcttttaaaaacagaaagtcccaggcaaacagttaagttgatcaccttaaattcgccataccataataagtgaacttatttaaatgaagataatcatacttctatttcagaggtaaagtttgaagtgtataaatttt

SEQ ID NO: 580390 - DNA, 558 bp, Homo sapiens
agaccacactggctaacatggtgaaaccccgtctctactaaaaatacaaaaattagctgggtgcggtggcgcatgcctgtaatcccagctactcaggaggctgaggtaggagaattgcttgaacctagggggtggaggttgcagtgagccaagatcatactccagcctgagcgacagagcaagactctgtctcaaaaaaaaaaaaaaaaaaaaaaawtcagaaccaggcttttactagcagaacgcaaaacgccctggcgaaaaaagccactcctcaaagttggccctttttcagctatctgattcaacaatgaggacctgcttcttattctcactttctatgcagaactttgcaattaaaagtaaaacaattgtttcttggatggcacctgaaggcactctggcatttttcccagtgttaattaacattctgcccatactaaggtcaatgttcaccgaattatttccttttagtgttggaataatagacaatataaagaaataaaaaaattgttctggtgcaggagagaaaaacaggtatgcaagatctaagaatga

SEQ ID NO: 580391 - DNA, 558 bp, Homo sapiens
agaccacactggctaacatggtgaaaccccgtctctactaaaaatacaaaaattagctgggtgcggtggcgcatgcctgtaatcccagctactcaggaggctgaggtaggagaattgcttgaacctagggggtggaggttgcagtgagccaagatcatactccagcctgagcgacagagcaagactctgtctcaaaaaaaaaaaaaaaaaaaaaaattcagaaccaggcttttactagcagaacgcaaaacgccctggcgaaaaaagccactcctcaaagttggccctttttcagctatctgattcaacaatgaggacctgcttcttattctcactttctatgcagaactttgcaattaaaagtaaaacaattgtttcttggatggcacctgaaggcactctggcatttytcccagtgttaattaacattctgcccatactaaggtcaatgttcaccgaattatttccttttagtgttggaataatagacaatataaagaaataaaaaaattgttctggtgcaggagagaaaaacaggtatgcaagatctaagaatga

SEQ ID NO: 580392 - DNA, 608 bp, Homo sapiens
aggaaagaaatagaaagttaagctctaaaacacttgtgttgtctgaagtccacagaggmagaaagaaaaggtgtaggaggaatagtaatagaagacaagaccaagcaaaataggaacaggaagaacagtgctggtggaatctaaggataaagggcatcaaactgagaagatactgaagccgaattagaaacaaaatgaaattacagaatttgggggtggggagcatatcctcaaattgacagagatattcaaaaggctggaaatgtaattactacactttgagagaataaaagcagattgctttaatgcaaggtaactaagtcaaaaatggcttaatgggacatggatgaagctggaaaccatcattctcagcaaactatcgcaaggacaaaaaaccaaacaccgcatgttctcactcataggtgggaattgaacaatgagaacacttggacacaggaaggggaacatcatgcactggggcctcttgccttttatatagcattaggagatatacctaatgtaaatgactagttaatgggtgcagcacaccaacatggcacatgtatacatatgtagcaaaactgcacgttgtgcacatgtaccctaga

SEQ ID NO: 580393 - DNA, 608 bp, Homo sapiens
aggaaagaaatagaaagttaagctctaaaacacttgtgttgtctgaagtccacagaggaagaaagaaaaggtgtaggaggaatagtaatagaagacaagaccaagcaaaataggaacaggaagaacagtgctggtggaatctaaggataaagggcatcaaactgagaagatactgaagccgaattagaaacaaaatgaaattacagaatttgggggtggggagcatatcctcaaattgacagagatattcaaaaggctggaaatgtaattactacactttgagagaataaaagcagattgctttaatgcaaggtaactaagtcaaaaatggcttaatgggacatggatgaagctggaaaccatcattctcagcaaactatcgcaaggacaaaaaaccaaacaccgcatgttctcactcataggtgggaattgaacaatgagaacacttggacacaggaaggggaacatcatgcactggggcctcttgccttttatatagcattaggagatatacctaatgtaaatgactagttaatgggtgcagcacaccaacatggcacatgtatacatatgtagcaaamctgcacgttgtgcacatgtaccctaga

SEQ ID NO: 580394 - DNA, 550 bp, Homo sapiens
aaccagcctgggaaacatggtgaaaccctgtctccacaaaaaaatacaattacctaggtgtggtggcacatacctgtggtcccaactactcagaaggctgacgtaagaggaccrcttgagcccaggaggtcgagactgcagtgagccatgattgcgccactgcgctccagcctgagtgacagagcaagaccctgtctcaaaaaacaaacaaaaccctatatactcttttcacctatcaaattagaaaaaaaaattaatgataacatttaatgctttaatgctggcagatgtgcggtaaaaccgatattcctagaccctgttataacagtataaattgtacttcacatgaaaacagtttagccgcatatagttgactcttgttattcacagtggttatattccataacgtcaccactaacactgaactaacgaatcctgaaccattgcttctaggggagtcatggggttaggctcctgtgatcctctggtcacatcttcatcaaccaatcaatgcataaccttgttttatgtgtgtttctgtttaaagaca

SEQ ID NO: 580395 - DNA, 618 bp, Homo sapiens
actttgcttagatccatcagaggaatcactgtctatggaagctatagccttacaaaaagcatttcttaaataaaaagacttgaaagtaaaaatattcttttattggtgggctacaaaagggatgccatgttagcagttatgaaaacaatatttatctccttgtataactccatcagatctcttgggtgatcagttgcattgtcactgagcagtaatatcttgaaaggaatattttttttttcctgagcagcaggtcacaatggtgggcttaaaatattcactaaactatgctgtaaacaggtgtgtggtcattcagactttgttcatccatttmtagagggcaggcagagtaaatttagcatctttcttaaggaacctaggatttttggaatggaagatgagcattggcttcaactaaaattcaccagctgcattaacccctagcaagagaagcagtctgttctttgaaggtttaaagtcagcattgacttttcctctctagctgtgaaagtcctaggtggcactatcttctgatactaggctgtttttttttcacattgaaaatatgttgtttggtataacaaccttcatcaataatcttagctagatcaggaattc

SEQ ID NO: 580396 - DNA, 618 bp, Homo sapiens
actttgcttagatccatcagaggaatcactgtctatggaagctatagccttacaaaaagcatttcttaaataaaaagacttgaaagtaaaaatattcttttattggtgggctacaaaagggatgccatgttagcagttatgaaaacaatatttatctccttgtataactccatcagatctcttgggtgatcagttgcattgtcactgagcagtaatatcttgaaaggaatattttttttttcctgagcagcaggtcacaatggtgggcttaaaatattcactaaactatgctgtaaacaggtgtgtggtcattcagactttgttcatccatttctagagggcaggcagagtaaatttagcatctttcttaaggaacctaggatttttggaatggaagatgagcattggcttcaactaaaattcaccagctgcattaacccctagcaagagaagcagtctgttctttgaaggtttaaagtcagcattgacttttcctctctagctgtgaaagtcctaggtggcactatcttctgatastaggctgtttttttttcacattgaaaatatgttgtttggtataacaaccttcatcaataatcttagctagatcaggaattc

SEQ ID NO: 580397 - DNA, 506 bp, Homo sapiens
cctatttttaatacacagtattaaataaatgcattcatcctcttgtgcttgaaaatatattacagattttccatgtttaatgaaaggcatctgttttatattacatcaaatctaactcattttaccaatcagtacacaattatatttttaagaagtgaggttttgagagtaggtatcctaagtttataaatgctttggtattttgctgctrcctcagaaatatttaaatattctggtatccagatgatgtgtgttacattaactgaggcatgtaccggttaatggatctctcacctctgtctgaagatggaagaaatagtatgccttcaataaccctcaaacctagaagctattattaataaaaagcagggagattttctctgcattccaacctcaagtgcatatgaactattactctatattttctgcccaaatgaaatttactccgggaaggcaaataataaatgaagctagagattgtttttcttgtttggtgtctctgtgtc

SEQ ID NO: 580398 - DNA, 554 bp, Homo sapiens
ttttcctaacttaaaaaattattatttaaagttattataatttaaaaatatatttaaaataaaaagtttaaaaagatgacacaaatgatcaatatctggaatgaaaaaggaatattggccctggaggcatcaaaaggataatatggtaatattatgaacaattctacatatataaatttagcaacttagatgaaatggaccaattccttgagaagcccaaactaccttaattaatctaatatgaaaccggtcatttggatagtcctacaactatggaaaattaaattcagaatttaaaagcctcctccaaagaaatgtccaggcctagatggtttcactggagaattctaccaaacatttaaatatgaattaacacctattctactgtctcttccagaaaatagaagaaatgaaaacactttccgacacttctacgaagccacaattactctcataccaaaaccagacaaacccartgtaaacaaataaaactatagaccaatatccctcatgaatatagatgcaaaaatctttaacaaaatattactgatggg

SEQ ID NO: 580399 - DNA, 565 bp, Homo sapiens
gatcttggctcactgcaacctctgcctcctgggttcaagcaattctcctgcctcagcctcttgagtagctgggattacaggtayacaccaccacgcctggctaatttttgtatttttagtagagacagggtttcaccatgttggtcaggctggtcttgaactcctgacctcgtgatctgcccgccttggcctcccgaagtgctgggattacaggcgtgagccaccaagcctggccaaagtgtttaattttaagcagccacaatggcacagacttttgagtaaaaccaacaaaataggccagtgatggtacctgggggttacaagcttccccaataggaaggaaataagatctacttaattgatcagcgtgacacaaggaaactcactgcaaatggtcttaatgggtctgtttaagagtatttaaatacactcatctctctaaaggaagaatgtgtcttcctgaatgaggccaggcgagagggagtatcttagaattctgatctggagatgtttatttttattttttttgacattttttccccaaatacgtctggtctaacggcag

SEQ ID NO: 580400 - DNA, 586 bp, Homo sapiens
tatgatcacaccattgtagcctgggagacagagtgagattctgttgctaataaaaatttgaaaataaaagtaaaatacttattgcacactttaatatttatcattcacttaaaatacttgatcwgtatgtaaattttataaattcatagtcaaaatttgttgattcacatacctattttgctgcaaacataattaaaagtttcccaatgactcaaagtgccagttttttctttaaatttaaatttaagtaaaataaaatgaaaatataagctcttcagttgccctagccacagttcaagtggtccatggtcactactattggacaccataagttcagagtatgcaaacaatggctataaaaaggttcatgatacattctgatacaaatattcaaataatgtcatctacaacaaatttttattttaaaataatgtggtaagttgttaagaaatgacattagtcacagattttgattgttacttaatctgctttgatatatttgattgtgaacacttaaagatttttaaatgctgatatttagttatctttaaaagctacttagtattaaacaatttgcaaaacctaa

SEQ ID NO: 580401 - DNA, 586 bp, Homo sapiens
tatgatcacaccattgtagcctgggagacagagtgagattctgttgctaataaaaatttgaaaataaaagtaaaatacttattgcacactttaatatttatcattcacttaaaatacttgatctgtatgtaaattttataaattcatagtcaaaatttgttgattcacatacctattttgctgcaaacataattaaaagtttcccaatgactcaaagtgccagttttttctttaaatttaaatttaagtaaaataaaatgaaaatataagctcttcagttgccctagccacagttcaagtggtccatggtcactactattggacaccataagttcagagtatgcaaacaatggctataaaaaggttcatgatacattctgatacaaatattcaaataatgtcatctacaacaaatttttattttaaaataatgtggkaagttgttaagaaatgacattagtcacagattttgattgttacttaatctgctttgatatatttgattgtgaacacttaaagatttttaaatgctgatatttagttatctttaaaagctacttagtattaaacaatttgcaaaacctaa

SEQ ID NO: 580402 - DNA, 528 bp, Homo sapiens
ggattacaggtgtgagccactgtgcccggccagattttttttttttttaayataaaaacttttattttgtcttttttgatagaatagtttcactctggacatttatcctcagtacattgaggatcatatcgcactgtcttggcttccactgttgccattgaaaatcagcctgtaagtctaactgcattttttatttcaatatagatactgggctctgtgctcttcagtggctttggacatttctgtttgtcttagatgtttaacagtttcactgtgatttgtacaaatgtggatttctttatatttaatctgttggggctccttggcattaacaaatttgagcttttgtgtctttgaacaattccaaatttttaaccattatagcagcaagtatttcctcttccccattttctcgactgtatcggtatgaaacactggctaaatcgatatttagactttctgcttttttatatttatcatttaatgtttcattcaaagtttcttctctttatctctgtattgcattca

SEQ ID NO: 580403 - DNA, 528 bp, Homo sapiens
ggattacaggtgtgagccactgtgcccggccagattttttttttttttaacataaaaacttttattttgtcttttttgatagaatagtttcactctggacatttatcctcagtacattgaggatcatatcgcactgtcttggcttccactgttgccattgaaaatcagcctgtaagtctaactgcattttttatttcaatatagatactgggctctgtgctcttcagtggctttggacatttctgtttgtcttagatgtttaacagtttcactgtgatttgtacaaatgtggatttctttatatttaatctgttggggctccttggcattaacaaatttgagcttttgtgtctwtgaacaattccaaatttttaaccattatagcagcaagtatttcctcttccccattttctcgactgtatcggtatgaaacactggctaaatcgatatttagactttctgcttttttatatttatcatttaatgtttcattcaaagtttcttctctttatctctgtattgcattca

SEQ ID NO: 580404 - DNA, 333 bp, Homo sapiens
acagaacaagactctttctcaaaataaaacaaaactggattgagacccttccctctctcaactttgtatctaaccagacaggtagcagcgtgctttactggaatagataaaagaaaatattcttccactttcaattaatgctattctgagaactgagaccagagttctaattagtttcttcaaactgagcccacatctyaatcagtaaacatgattacatttattatattattcttcctattgcttttaacagttatgacatggtaacttaaagtttttttttttacttatttatatatcatttagtaattaaaagaaggcatctgactctca

SEQ ID NO: 580405 - DNA, 333 bp, Homo sapiens
acagaacaagactctttctcaaaataaaacaaaactggattgagacccttccctctctcaactttgtatctaaccagacaggtagcagcgtgctttactggaatagataaaagaaaatattcttccactttcaattaatgctattctgagaactgagaccagagttctaattagtttcttcaaactgagcccacatcttaaycagtaaacatgattacatttattatattattcttcctattgcttttaacagttatgacatggtaacttaaagtttttttttttacttatttatatatcatttagtaattaaaagaaggcatctgactctca

SEQ ID NO: 580406 - DNA, 634 bp, Homo sapiens
acctaatgataacaatcattgacgaaattatggatcaataagtgtgcttatacactgacagagaggatagaaatgattaaaaacaactttgcaaaaaataggtgaaattgcagatacacacacttgaagtctcagattttactaatatagtaaaatctctcactctagagaactcatacacacagagaaacacatgccatgtggtgccaccattgggaaccaacagcaagcgtgtcaccagcttggacacttggccctggtagagtagataaatgtctgccctgtctttctgtcttgtgtatctcattttcctcaggatttctatttttttttttttttttaaccagggaggaagggaatcatggaggaagacagaacttttgacttttcttcaatgcaactgctttgttccatttatgggggcattgcctctctcagcccaggttgcacctcatcctggtggccttggctttgtgttgcagactccctgtccagtggctgagatggccagccttgtactcctgggttgggtagtgtaatcattgctgcttttctcattccttgctgttagacatattttaatggggaacstgctggtctctgtttccacactttcccctaggcactgcagtct

SEQ ID NO: 580407 - DNA, 634 bp, Homo sapiens
agctccctcccccacctgctcctttttctttcctactctatcctttggctcctcccctcccctgccctggccctgccaccaccctcttccatgcagcctgctgggtaccccyctggcaggtgccccctcccaccaggaagcccccacagaggcaatcaagcccatgattgcccatgatggccatgcccccccccaacccatcccccacttgctgcctggagccatcctaccagcttgtagatgtgaactgaggggtgtgattgaggttttaatgggaagggaaaaagtgaaagaaggttgaagttcagggccctgaagaacaagtctcagccctgcgcgatgtctcatgcctgtaatcccagcactttgggaggcagaagcaggcagatcagttggggtcaggagttcaagaccagcctgaccaacatggagaaaccccgtctctactaaagatacaaaaattagccaggcgtggtagcacatgcctgtaatcccagctacttgggaggctaaggcaggagaatcacttgaactgggagggggagtttgcagtgagccaagatcacgccactgtactccatccaacctggagtgagactctgtctcaaaaccaaaaagaacaagtctcaattgg

SEQ ID NO: 580408 - DNA, 605 bp, Homo sapiens
attcatataaacgtatgtatatctgcctaggaaaatccaaactccatatgacaggccattaagaagcacaggctggaattctcagggagaagctaaagctgcagtccagaggcagaatttcttctttctttggttagtctcagctctgcttttaagggcttgcaactgattgaatcaagtacacctaggttatctaggatactttcctttacttaaagtgaactgattgtggactttttatcacatctacaaaataccttcatgagattagcgtttgattaaataaccaaggactatagtctagctaagttgacacatcaaaccatcacagaaatttaattagtaaataaactgaaaaagaaatgtctgttccacttaatcctatcataacttcattaatattgacatgcaatgttcaaattacacartattttgtttaacaaaacaaattatccatatcctagttgggaaacatttagccattatgtttatgaatatatttaaataattaaaaatgatacaactctatcttatggaccaaatatttgtctcttttcaaaatccgtattttgaaattctaacctctaatgtgatagtatttaaaa

SEQ ID NO: 580409 - DNA, 350 bp, Homo sapiens
tcttgttgagactccttcttcctgacagtagaaggtgtgtgttcattagtgagaacacccactaagttccagaaaggaaatgtgggtcagagaaaaagcaacagatggagagcaatgagataatcaagctgtagtgkacactcaggcctgctgctttctttatgtcagcctatgtacccctatattggcagccaggtgaaccttagtacccatgctttctagctcatggtgctttccccacatgcattatcccaagagatattcacaatacctgggaagtaaataggactagcctggtttttagaggtgagggggcaaaggttcaacaaattgaaaccaagatttcacag

SEQ ID NO: 580410 - DNA, 443 bp, Homo sapiens
tcattgcagcatgccaatgttagacaccgcacaacaagccacggacctgacccaccctcaagcttccctgagaaacccacctctcgtcctcagcagctcattcttggaggctgcatctgctcttctgtcctctttgtacacgtcctgccgataagtctctctgaatgttcccctcaggcgactgagtgacaataacgaaacaaccgtcgtcgcaagcaacgctgactaagggccatgcagcaggccctttacacacagtgtctcatttagtcttcaccaggaccctactattatctcctactttacagatgagaaaacggacacccagtgacgtgggccccccgcccctaccaaagtcccctagcagagccaggactcagaagcaggtctgcctgaccccaaagcatgtgcycttgacctttcaactctcctgcttccaggtc

SEQ ID NO: 580411 - DNA, 459 bp, Homo sapiens
ttataaatctcatattaatccttgtgtgcctgttttgtctgttgttagtctgcagstgtacccaacagctccgaagagacagcgaccatcgagaacaggccatgatgacgatagtggttttgtcgaaaagaaaagggggaaatgtggggaaaagcaagagagatcagattgttactgtgtctgtgtagaaagaagtagacataggagactccattttgttatgtactaagaaaaattcttctgccttgagattctgtgaccttacctccaatcccgtgctctctgaaacatgtgctgtgtcaactcagagttgaatggattaagggcggtgcaagatgtgctttgttaaacagatgcttgaaggcagcatgctccttaagagtcatcaccactccctaatctcaagtacccaagcacacaaaaactgcggaaggccgcagggacctctgcctaggaaag

SEQ ID NO: 580412 - DNA, 459 bp, Homo sapiens
ttataaatctcatattaatccttgtgtgcctgttttgtctgttgttagtctgcagctgtacccaacagctccgaagagacagcgaccatcgagaacrggccatgatgacgatagtggttttgtcgaaaagaaaagggggaaatgtggggaaaagcaagagagatcagattgttactgtgtctgtgtagaaagaagtagacataggagactccattttgttatgtactaagaaaaattcttctgccttgagattctgtgaccttacctccaatcccgtgctctctgaaacatgtgctgtgtcaactcagagttgaatggattaagggcggtgcaagatgtgctttgttaaacagatgcttgaaggcagcatgctccttaagagtcatcaccactccctaatctcaagtacccaagcacacaaaaactgcggaaggccgcagggacctctgcctaggaaag

SEQ ID NO: 580413 - DNA, 459 bp, Homo sapiens
ttataaatctcatattaatccttgtgtgcctgttttgtctgttgttagtctgcagctgtacccaacagctccgaagagacagcgaccatcgagaacaggccatgatgacgatrgtggttttgtcgaaaagaaaagggggaaatgtggggaaaagcaagagagatcagattgttactgtgtctgtgtagaaagaagtagacataggagactccattttgttatgtactaagaaaaattcttctgccttgagattctgtgaccttacctccaatcccgtgctctctgaaacatgtgctgtgtcaactcagagttgaatggattaagggcggtgcaagatgtgctttgttaaacagatgcttgaaggcagcatgctccttaagagtcatcaccactccctaatctcaagtacccaagcacacaaaaactgcggaaggccgcagggacctctgcctaggaaag

SEQ ID NO: 580414 - DNA, 459 bp, Homo sapiens
ttataaatctcatattaatccttgtgtgcctgttttgtctgttgttagtctgcagctgtacccaacagctccgaagagacagcgaccatcgagaacaggccatgatgacgatagtggttttgtcgaaaagaaaagggggaaatgtggggaaaagcaagagagatcagattgttactgtgtctgtgtagaaagaagtagacataggagactccattttgttatgtactaagaaaaattcttctgccttgagattctgtgaccttacctccaaycccgtgctctctgaaacatgtgctgtgtcaactcagagttgaatggattaagggcggtgcaagatgtgctttgttaaacagatgcttgaaggcagcatgctccttaagagtcatcaccactccctaatctcaagtacccaagcacacaaaaactgcggaaggccgcagggacctctgcctaggaaag

SEQ ID NO: 580415 - DNA, 422 bp, Homo sapiens
aatttagtttgtcaacacgtcatgggtctggatcagctaccagacgagcagaattaatcaacctagaatgggttgtagagatggaagaagataagaatcatttgcaacctctaaaccagttgccccaatgggactgcaattcctcccactaagttgtattttttgtttttataataaatcaaccagaattctagagaagttgttcccagaacttatatgaagcaaatggatccaaccagcacaaggtggtggatgcactaatgtaaatactcttattacagccaatttcaagctatgagtaaaatactactgaacatggagttggaacaagatgtataaaaatgaggctgggcatggtggctcacayctgtaatcccaacactttgggaagcagaagtgggaggatcacctgaggtcaggag

SEQ ID NO: 580416 - DNA, 579 bp, Homo sapiens
tggtgctattggattggaatttttcagtaggtattctttctatggcagttcttcacacagtgtgtgtcttctgagatatttttattggcttttctgagagccctctcttttgagactcctataatgaatctttagcatgagtgatagrttttgtggctggatgcctctgaagtctctcagcttctgcattcagatggtgtgacctagagaaactttgtcttctggggttctcctgtctcagcagtcagcctcatgaagtggggttattgtaagattgcttgtagtctgttaaagtttataatctccaattctgacatgagaaaactacatattcttgttataaaatgaaatataatatttaagataaataaaatgtgtagaaaatatgtccagtatgatttctaacttgtaagaaatgtatatggatgtttgaataaaccagtaaaaaacctttgcatgactatataaaaaaattttggctctgagagtgagattaaaagtagtctttcctttctcttttttgattttccatgtttttcaagttttctaccagtattgtttgctttggtgaaaagaaaa

SEQ ID NO: 580417 - DNA, 615 bp, Homo sapiens
gtacttatttattaaatttgtcatttattatctgggttctccactgtaatgtaaacttcagaaagacagagatctctctatattttgttcccaatgtacccaagtacagacaacagtgccagtctcaattgttactgcccaaaacttttggaagcccttctattaatggaaattaataaattggtcaagaatgcccaygatgaaagcttaagtcaaactgaaagtactagggaaaacaataagattggaaacaaagttgcatgatatttcgggggaaaaagttcacatatttataatttgcacaacgactacacagaaaacccaactacaaactttctaacaagagaatttatcaatactgctgtatataaagttaacctgaaaatagtgttctcagggattagtaaaagaaatgtaataaaaaggacaaccacacttataatggcaaaataaataaataagaaatctacaaattacttaagatcaaaaatagtataagtgcaagaaagttatgaagaaaattaccataatattgagagacatttttaccaggtgcaatggctgatgcttgtaatcctagcacttcgataggccaaggtgggagaatcacttgat

SEQ ID NO: 580418 - DNA, 615 bp, Homo sapiens
gtacttatttattaaatttgtcatttattatctgggttctccactgtaatgtaaacttcagaaagacagagatctctctatattttgttcccaatgtacccaagtacagacaacagtgccagtctcaattgttactgcccaaaacttttggaagcccttctattaatggaaattaataaattggtcaagaatgcccacgatgaaagcttaagtcaaactgaaagtactaggsaaaacaataagattggaaacaaagttgcatgatatttcgggggaaaaagttcacatatttataatttgcacaacgactacacagaaaacccaactacaaactttctaacaagagaatttatcaatactgctgtatataaagttaacctgaaaatagtgttctcagggattagtaaaagaaatgtaataaaaaggacaaccacacttataatggcaaaataaataaataagaaatctacaaattacttaagatcaaaaatagtataagtgcaagaaagttatgaagaaaattaccataatattgagagacatttttaccaggtgcaatggctgatgcttgtaatcctagcacttcgataggccaaggtgggagaatcacttgat

SEQ ID NO: 580419 - DNA, 565 bp, Homo sapiens
gtgataccctggccctaagatttttcccaggtgatctatcttccttaatattcatacatgtgtttagaccactccttccttgatttggggcttaccatgtgtgaaccaatatatcatagcagatggtacattgttttgttgcaagatttctgaaattaggttgtaaaaacccttgctttctggaaacattcttagagccctgagctgcaatgtaagaaatttgactaccctgaagccaccatggtagaggaaacacataaagacacaacctggaaaaattccaggaatataagggaagaragctggctgtccagccctatttgtttctaactataggtgtttcacttatttcagaaattgtgggtcagagacaatttgtcctgctctcccctgatacattacatatttatgggaaaagtaaacaattatggatttaagatactaaatattagcctgatttgttaagcagtagtagataaatggaacaaaaacaacaaaaaagcaaatggtctgtaaatgtatataagcaatcagaaaaatgttaatattttagaaccacagaaac

SEQ ID NO: 580420 - DNA, 575 bp, Homo sapiens
taaaagaaaaatttatgccataataagcatgctgtgcctgcttcaggtaggctagaatttggttttactattttttaatggattccaagtatctgccttttttgccttttattttattattaactcacggcaacaaggccttctatttttaagttctgggatacatgtgctaagcatgcagatttgttatataggtatacatgtgcygtggtgctttgctgcacctatcaacccatcatctaggttttaaaccttgcatgtgttaggtatttgttgtaatgctctccctccccttgttccccacctgaggacaggccctggtgtgtgatattccccgctccctgtgtccatgggttctcattgtttatctcccacttattagtgagaacctgcagcgttggttttctgttcctgtgcaagttaaggccttctcttttatcgctactctgatatgatagttgaggcccttttgagttcttggaataaatcattctatttgtttttctttgcagaattttagttgtcatattggtttccaaggaagatatcttaaaacatacctgataattctaatt

SEQ ID NO: 580421 - DNA, 575 bp, Homo sapiens
taaaagaaaaatttatgccataataagcatgctgtgcctgcttcaggtaggctagaatttggttttactattttttaatggattccaagtatctgccttttttgccttttattttattattaactcacggcaacaaggccttctatttttaagttctgggatacatgtgctaagcatgcagatttgttatataggtatacatgtgctgtggtgctttgctgcacctatcaacccatcatctaggttttaaaccttgcatgtgttaggtatttgttgtaatgctctccctccccttgttccccacctgaggacaggccctggtgtgtgatattccccsctccctgtgtccatgggttctcattgtttatctcccacttattagtgagaacctgcagcgttggttttctgttcctgtgcaagttaaggccttctcttttatcgctactctgatatgatagttgaggcccttttgagttcttggaataaatcattctatttgtttttctttgcagaattttagttgtcatattggtttccaaggaagatatcttaaaacatacctgataattctaatt

SEQ ID NO: 580422 - DNA, 585 bp, Homo sapiens
ccttgctgctgctttgccaactaagtttatgtaatattctatatcctttgttatcctttcaacaatattcacaacatgctcactgagtagatttcttctcatgaaaccactttctttgctcatccataggaagaggctcctcatccattcaagttttatcatgagactgcagcaattcagtcacatctttgggcttcatttctaattctatttctcttgctgttttcaccacatcttcagtgacttccttccctgaagtcttatacccctaaaagtcaaccatgagagttggaattaacttattctaaatccccattattagtattttgagctcctatgagtcatcagtgttttcagtggtgtataaaagggtaaacccataaaattttcaattcactttgcccagatctatcagaggaatcactgatatcacggctatagccttacaaaacacatttyttaaataagacttgaaagtctaaattactccttgatccatgagctgtaaaatgaatgttgtgttagcaagcatggaaacaatattaatctccttgtacatttccatcagagctcttgagttactag

SEQ ID NO: 580423 - DNA, 464 bp, Homo sapiens
caatccatgcttttaaccacacagcttatgtgtgcctaaaacaagatggcaggtaatggatcaaccctgtttcccacctaaaactgaattgtaaagccgtaacagtgtacagaaatagaaaacattgatttagaaagataaaaccygattgtttaatcccctttggaacctatacaaaatgaagtagtaatgctgatgattttgctaattctaactcatttccacagccagtcgggttaaactgacctataaatctccacctaactcaattcggtccccagactcttgcctataggtttttctcattacactttccctctttcagccaaggttgtacagaaattctgtagatatagtcactctcccccaggatttgcagtcatggttgttctaaatacatctggttctcttgttcccttcgggacacttgcaatctgtcagacaacggttttcttgtttggttt

SEQ ID NO: 580424 - DNA, 575 bp, Homo sapiens
tggtgtgtgcctgtaatcccagctactcagggggctgaggcaggagaattgcttgaaccgggacctgggaggaggaggttgccataagccgagatcctgccactgcactcyagcctgggctacagagtgagattccgtctcaaaaaacaaacaaacaaaagttagcagtagaacaccacaggaataattgcagctggcagcatccactgatgactgcaaaaattagtgagcaaaactgtaaggagaaataggatacttgcatagccttaaaaatctcccctaaaatatttattaattattgttagtggttttactttatgtctacagattcttttatactcctcactccaaaaatggagcttaattctcctccataagtaactcacttataaataatagtgcatgaaaagggaaaaacagtaaacttcacaatggagaaacctgccaggtactaccttaaccaagtgatcaacattaacatcatcagtaataagaccagacacaacccagacatcttagtctaaggctaattttgtcctactattgaggcaaggctttttaaagtattctaccca

SEQ ID NO: 580425 - DNA, 628 bp, Homo sapiens
ccaaaggcttttattttgtttcctagctctcccgatattatggggaccatgggggagagaggatactcacccatccgcaggaaccaaaatggcactgactgatcttccacatgggacccagttgaakgtctctccagatttcctcaccttgggtgggcttggctgtcacacaggatgtctggtgcaaatgctggtaacctattgagctgttggttagagcagcgagtctcacatgaggcagcagcactatggtcacttgcccatccactcagctctgttgcctgccagggaaagtgatggctctgaaaagagcctttggctattagtacagctctatagtattagctatttattgttacagcctttgtgttatagctcttgcagcctctatcacagactgctttgctgtctcttgccatctctgcttgttgtctcactgatcggtctcttgctgtctctcacggtctcttgctgtattcttgctgtctttgctgactgccatctcctcatctctcgcattctatggctcactgtcttcaaccctttgttaatcaccgaatgatggagggcagctgagcctcaaaactggggcttagcctaggagggttcttgtattttcccaggaaag

SEQ ID NO: 580426 - DNA, 628 bp, Homo sapiens
ccaaaggcttttattttgtttcctagctctcccgatattatggggaccatgggggagagaggatactcacccatccgcaggaaccaaaatggcactgactgatcttccacatgggacccagttgaatgtctctccagatttcctcaccttgggtgggcttggctgtcacacaggatgtctggtgcaaatgctggtaacctattgagctgttggttagagcagcgagtctcacatgaggcagcagcactatggtcacttgcccatccactcagctctgttgcctgccagggaaagtgatggctctgaaaagagcctttggctattrgtacagctctatagtattagctatttattgttacagcctttgtgttatagctcttgcagcctctatcacagactgctttgctgtctcttgccatctctgcttgttgtctcactgatcggtctcttgctgtctctcacggtctcttgctgtattcttgctgtctttgctgactgccatctcctcatctctcgcattctatggctcactgtcttcaaccctttgttaatcaccgaatgatggagggcagctgagcctcaaaactggggcttagcctaggagggttcttgtattttcccaggaaag

SEQ ID NO: 580427 - DNA, 355 bp, Homo sapiens
tgttctgtagtttcactaagctctctctatgtgtggatttatcttatttattctgccaggaacctggttgtgcttcttaaatattaggacttatgtttttgtttttgtttttttaatcaatgctgaaaaaattattagctgctctatctttgaatattacccctcctccattctctttattctttcttactaaaactcytagtagatatgttttattttcttataccttcaatgtcgcttgatgttttctattttacattttctttctttttttttttattatgctttaagttccagggtacatgtgcacaacgtgtaggtttgttacataggtaaacatgtgccatgttggctt

SEQ ID NO: 580428 - DNA, 566 bp, Homo sapiens
aagcttccataggaaggatcaggcagcaacatttgctsttctgcaatatttgctgttctgcagcctctgctggtgatacccaggaaaacggggtctaaagtggacctctggcgaactccaacagacctgcagctgaaggatccgctagaaggaaaactaacaaacagaaaggaatagcaccaacattaacaaaaaggacatccacactaaaaccccacctccagttcaccaatatcaaagaccaaaggtagataaaaccacaaagatggggagaaacgagagcagaaaagctgaaaagtccaaagaacagagcatctcctctcctttaaaggattgcagctcctcgccagcaatggaacaaagctggatggagaatgacttggatgagttgacagaagtaggcttcagaaggtcggtaataacaaacttctccaagctaaaggaggatgtttgaacccattgcaaggaagctaaaaaccttgaaaaaatattagatgaatggcaactagaataaacagtgtagcaaagaccttaaatgacctgctggagctgaaagccatggcaca

SEQ ID NO: 580429 - DNA, 409 bp, Homo sapiens
gcttagatcacaacaccccggtcctttcaaatatctggaaagccttcccaagaagggtggctacaaataagcccagacagtgaaaactacaataatacctaattcttcaatgtcaagacactgaagaatgtctactggcatcaacaccatccaggaaaacatgacctcaccagaagaactaaggcaccagggatcaatcaargagaaacagagatattgacctttcagacacagaattcaaaataactgtgttatcaaaaaacttatccactatgatccggttggcttcattcctgagaggcaaggttggttcaacatatgcaaatcaataaatgaaagacaaaacataacataaacacataaacagaaagacaaaacaacacataaacagaaaaacaaaaaccacatg

SEQ ID NO: 580430 - DNA, 595 bp, Homo sapiens
tcgaaaccagcctggccaatatggtgaaaccccatctctactaaaaatacaaaaaaagtagccaggtgtgatgatgcacccctgtaatcccagctacttgggaggctgaggcaggagaatcacttgaacccaggaggtggagtttgcagtgagcagagatcgtgccactgtactccagcctgggcaacagagcaagactccgtctcaaaaataatagtaatgataatatatagactattattgagcaacaaaagaaataaactattgatacacacaacaatttagayggatctcaaggggattttgctgagtggaaaaaaaacagtcttcaaaggttagatactgtatgattcatttatgtagcattcctgaaatgacaaaattacagagatagagaacagagtagtagttgccaggtgttggagatgagaaggagggaggtggtggtgtttataaaaggataacagaaaggattcttgtgatggaagtactttgtattttgactgtgggtggtaataacacaaatctacacatgtaataaaattacatagagctaagtacagacatatgcaacaagtgcatgtaaaactggcaa

SEQ ID NO: 580431 - DNA, 560 bp, Homo sapiens
aaataaataagtgtgaggtaacrtatatgttaattagctgtatttagaaattatataataaatatatatttctaaatattctgttctatgcaagaaatacataatttttgtcaatttaaaaatttattaattaaagagaatcttggcatataaacttttgaacaagcaatacatctgtaaccaaacatacatctgcttcttcttagtttgtctgctttttttttttttttttgagacagagtcttgctctgtcgcccaggctggagggcagtggcacaatctcgactcactgccacttccgcctccaggattcaggattcaagcaattctctgcctcagcctcctgaatagctgggattacaggaacccaccaccatgcctggctgatttttgtatttgtagtagagagggggtttcaccaggctggccagtctggtcttgaactcctgacctcatgatccaccctcctcagcctcccaaagtgctgggattacaggcctgagccactgcgcccagcagtttgtctgcttttaatgcatgagtctgtatacaccccatcc

SEQ ID NO: 580432 - DNA, 583 bp, Homo sapiens
ctaggtgcctgaagagcataggacagttttagacaacaaagaattgtcctgtatctcatgacttctttgaacctcgctgaataattatgtacatagaaatcctgtttataatgagaaaggaagagcaacccctacagctgtcagctggaagctgatttagccctaatggctaggctattatattctgttgaatataaacaatgttatataacamcaacatctgacaaggccactctgagtgtggtggaggaagacaaaaattaagacactccataggcatgttggaacttagcaagattctgtgtaaatcatagagcgaccaaacattcttgtctcttggcttacatgtgtgatatttgctccattacccattagatcactctgttccttcttcctcctagattaaaaatttcaatgtttacactcatttagaatttcccttgctttctgaaagcacttaatccagagtaaaaccatgattcatggagcccttcttgaaatcacccaacacaaccccaaatcctttaaaaagcccttcccagcaccctcatactgaggcacccccatggttccccatggtgtg

SEQ ID NO: 580433 - DNA, 583 bp, Homo sapiens
ctaggtgcctgaagagcataggacagttttagacaacaaagaattgtcctgtatctcatgacttctttgaacctcgctgaataattatgtacatagaaatcctgtttataatgagaaaggaagagcaacccctacagctgtcagctggaagctgatttagccctaatggctaggctattatattctgttgaatataaacaatgttatataacaacaacatctgacaagkccactctgagtgtggtggaggaagacaaaaattaagacactccataggcatgttggaacttagcaagattctgtgtaaatcatagagcgaccaaacattcttgtctcttggcttacatgtgtgatatttgctccattacccattagatcactctgttccttcttcctcctagattaaaaatttcaatgtttacactcatttagaatttcccttgctttctgaaagcacttaatccagagtaaaaccatgattcatggagcccttcttgaaatcacccaacacaaccccaaatcctttaaaaagcccttcccagcaccctcatactgaggcacccccatggttccccatggtgtg

SEQ ID NO: 580434 - DNA, 583 bp, Homo sapiens
ctaggtgcctgaagagcataggacagttttagacaacaaagaattgtcctgtatctcatgacttctttgaacctcgctgaataattatgtacatagaaatcctgtttataatgagaaaggaagagcaacccctacagctgtcagctggaagctgatttagccctaatggctaggctattatattctgttgaatataaacaatgttatataacaacaacatctgacaaggccactctgagtgtggtggaggaagacaaaaattaagacactccataggcatgttggaacttagcaagattctgtgtaaatcatagagcgaccaaacattcttgtctcttggcttayatgtgtgatatttgctccattacccattagatcactctgttccttcttcctcctagattaaaaatttcaatgtttacactcatttagaatttcccttgctttctgaaagcacttaatccagagtaaaaccatgattcatggagcccttcttgaaatcacccaacacaaccccaaatcctttaaaaagcccttcccagcaccctcatactgaggcacccccatggttccccatggtgtg

SEQ ID NO: 580435 - DNA, 583 bp, Homo sapiens
ctaggtgcctgaagagcataggacagttttagacaacaaagaattgtcctgtatctcatgacttctttgaacctcgctgaataattatgtacatagaaatcctgtttataatgagaaaggaagagcaacccctacagctgtcagctggaagctgatttagccctaatggctaggctattatattctgttgaatataaacaatgttatataacaacaacatctgacaaggccactctgagtgtggtggaggaagacaaaaattaagacactccataggcatgttggaacttagcaagattctgtgtaaatcatagagcgaccaaacattcttgtctcttggcttacatgtgtgatatttgctccattacccattagatcactctgttccttcttcctcctagattaaaaatttcaatrtttacactcatttagaatttcccttgctttctgaaagcacttaatccagagtaaaaccatgattcatggagcccttcttgaaatcacccaacacaaccccaaatcctttaaaaagcccttcccagcaccctcatactgaggcacccccatggttccccatggtgtg

SEQ ID NO: 580436 - DNA, 462 bp, Homo sapiens
agtgctggtgggagtgtaaayttgtgcaaactctctggagtacagcctgacagtacgtgtcaaaatccctacaacatgtgcatatcatctgacttagcagtttcacatctaggaatttatcttcggaatttcttctaaccagagctgtgaacaaaagtctacccataagatatttatcccaacacgctttttgatttttaaaaatggaaaaagactgaatgtctgaaaaaaagtatattggttgaattaattgtggtgtatccaaagaataagccactgtgtgttataaatattaatgatgttgatgcaaaaaatatatttaatagcctggggaaattattaagatatattgaaataaatcaggggataaaaccacaatttagcatattctcaattttttttaagtagttatatcattggaaaaaggctgagaagatatcaactagtatgtttctccgaata

SEQ ID NO: 580437 - DNA, 472 bp, Homo sapiens
tggtgggagtgtaaatttgtgcaaactctctggagtacagcctgacagtacgtgtcaaaatccctacaacatgtgcatatcatctgacttagcagtttcacatctaggaatttatcttcggaatttcttctaaccagagctgtgaacaaaagtctacccataagatatttatcccaacaygctttttgatttttaaaaatggaaaaagactgaatgtctgaaaaaaagtatattggttgaattaattgtggtgtatccaaagaataagccactgtgtgttataaatattaatgatgttgatgcaaaaaatatatttaatagcctggggaaattattaagatatattgaaataaatcaggggataaaaccacaatttagcatattctcaattttttttaagtagttatatcattggaaaaaggctgagaagatatcaactagtatgtttctccgaataactcatgaagaattt

SEQ ID NO: 580438 - DNA, 456 bp, Homo sapiens
gctggtgggagtgtaaatttgtgcaaactctctggagtacagcctgacagtacgtgtcaaaatccctacaacatgtgcatatcatctgacttagcagtttcacatctaggaatttatcttcggaatttcttctaaccagagctgtgaacaaaagtctacccataagatatttatcccaacacgctttttgatttttaaaaatggaaaaagactgaatgtctgaaaaaaagtatattggttgaattaattgtggtrtatccaaagaataagccactgtgtgttataaatattaatgatgttgatgcaaaaaatatatttaatagcctggggaaattattaagatatattgaaataaatcaggggataaaaccacaatttagcatattctcaattttttttaagtagttatatcattggaaaaaggctgagaagatatcaactagtatgtttctccga

SEQ ID NO: 580439 - DNA, 472 bp, Homo sapiens
tggtgggagtgtaaatttgtgcaaactctctggagtacagcctgacagtacgtgtcaaaatccctacaacatgtgcatatcatctgacttagcagtttcacatctaggaatttatcttcggaatttcttctaaccagagctgtgaacaaaagtctacccataagatatttatcccaacacgctttttgatttttaaaaatggaaaaagactgaatgtctgaaaaaaagtatattggttgaattaattgtggtgtatccaaagaataagccactgtgtgttataaatattaatgatgttgatgcaaaaaatatatttaatagcctggggaaattattaagatatattgaaataaatcagggrataaaaccacaatttagcatattctcaattttttttaagtagttatatcattggaaaaaggctgagaagatatcaactagtatgtttctccgaataactcatgaagaattt

SEQ ID NO: 580440 - DNA, 472 bp, Homo sapiens
tggtgggagtgtaaatttgtgcaaactctctggagtacagcctgacagtacgtgtcaaaatccctacaacatgtgcatatcatctgacttagcagtttcacatctaggaatttatcttcggaatttcttctaaccagagctgtgaacaaaagtctacccataagatatttatcccaacacgctttttgatttttaaaaatggaaaaagactgaatgtctgaaaaaaagtatattggttgaattaattgtggtgtatccaaagaataagccactgtgtgttataaatattaatgatgttgatgcaaaaaatatatttaatagcctggggaaattattaagatatattgaaataaatcaggggataaaaccacaatttagcatattctcaattttttttaagtagttatatcattggaaaaaggcwgagaagatatcaactagtatgtttctccgaataactcatgaagaattt

SEQ ID NO: 580441 - DNA, 473 bp, Homo sapiens
atttttcacatgagagatcaaaaggcagttgaccataaaccgttaccctgtaagccacatttctgaaacttttcataaaagctcttacactccaatttggcaagcttacaaatgcgattacacctttaccatgattgtctcttagaatggctttaatatcctgtaaatgtcagattttaatgaatctacaaataccatattctaaaacgtatgtgcttgtgtgttctgtgataaacctaaaaccagagccccatccacgtgggaggcagtgtcagcaaagcggtggtgagcaaggaagccggcggcgctgcctggatggggagcccgaccccaccgctcatgagctgtgcatccttcgcggctgaattcagcctctttctgccacygtctcctcatctcccacatggggctaataatcttctcccctcctggagtcattgtgaggatgaaatgaattgttatttgtaaggtgc

SEQ ID NO: 580442 - DNA, 584 bp, Homo sapiens
  misc_feature 132, 133: n = A,T,C or G
gccatcctctccagctactgcttgctcttctccatctcggcactcctgtactccaggtgggccttgataccgttggcctggctcagcgcagcttgctccttctcctctaagaagagcatcacattgggcctnnggccttctcacagcagcaaggagttccccaaactgcatttcagccaccggctctgacctctgacaccgacaccggggcagggggtgggggtggaaggcagccaaacatttcttagtgaggcatccaacttgatagaaactcaacatacagaaatgtcagcttgagaaacacatatattagggagcagttccctattgtaaaaggaatcctttattctcatgtgaattccaggttcctggaaaaaggatttacgtattaacttggtctcctcatccatttgatgagasagtgaattcctctatgacctctgagatccctcacaactctgacactccgggattgttagtcaagtttccgaaattgattttcctaccagagcaatgtgtgtattcagtctacttgatagtcatatttcaagaggtaaagaatttggcttttttttttttttttt

SEQ ID NO: 580443 - DNA, 584 bp, Homo sapiens
  misc_feature 132, 133: n = A,T,C or G
gccatcctctccagctactgcttgctcttctccatctcggcactcctgtactccaggtgggccttgataccgttggcctggctcagcgcagcttgctccttctcctctaagaagagcatcacattgggcctnnggccttctcacagcagcaaggagttccccaaactgcatttcagccaccggctctgacctctgacaccgacaccggggcagggggtgggggtggaaggcagccaaacatttcttagtgaggcatccaacttgatagaaactcaacatacagaaatgtcagcttgagaaacacatatattagggagcagttccctattgtaaaaggaatcctttattctcatgtgaattccaggttcctggaaaaaggatttacgtattaacttggtctcctcatccatttgatgagagagtgaattcctctatgacctctgagatccctcacaactctgacactccgggattgttagtcaagtttccgaaaytgattttcctaccagagcaatgtgtgtattcagtctacttgatagtcatatttcaagaggtaaagaatttggcttttttttttttttttt

SEQ ID NO: 580444 - DNA, 628 bp, Homo sapiens
cctacttatgcctagtgttccattattggaacgctaagcatgtaggagttatttatatcctactgctcaaggtaatcaccaaggtctgatttttcactcatgcaaaaattcacaaaattgcagcctacagcataaatgggttaagaccttggcatggtggctcatgcctgtaatcccagcactttgggagggccaaggcgggcggatcacgaggtcaggagatcgagaccatcctggctaacacggtgaaaccctgtctctactaaaaataaaaaaattagccgggtgtggtggcrggcacctgtagtcccagttactcgggaggctgaggcaggagaatggagtgaacccaggaggcggagtttgcagtgagctgagatcgtgccaccgcactccagcctgagtgacagagcgagactccgtctcaaaaaataaataaataaaaataaataaataaaaataataaaaataaatgggttaagaccacaggacgggaatgggcttcacccagtctctccatgagtctcccacctcctcacttctcttaagatgatcatctctcatgattattgatccttctgcgcttcgtctcctgccttcttcccacccggtggcaccactatggcca

SEQ ID NO: 580445 - DNA, 570 bp, Homo sapiens
ctatccctcccccctccccccaccccacaacagtccccggtgtgtgatgttccccttcctgtgtccgtgtgttctcagtgttcaattcccacctaagagtgagaacatggacttttgtttttaactaagggaacaaagtcctttgatccttaagggggttttgagcccagcctcggtgtagttaccatttatatccacaagatggcaggcacgacccgggaagagcctgcagtagccacctctggatttcaaggtctccaggctcagccagctggtgaggtctcttgagtctcaagagaggttagtgggcaatggcttagaagctgggattcaattagtagcttttcctatgtgggaaaaagcatcagatcagaggacaataaagtagctaggagaagtcatgaggacctgagaraggaggtaagcaaattaaagcaaaatcaagcaaaatctggatagaggaagtagggtcattttaataaagagttgttgcatggcgaaaaaatcacagggacaggcggaaggtcggaggagccagaacgccgggttggaaagtgaaaggctaagaga

SEQ ID NO: 580446 - DNA, 484 bp, Homo sapiens
gctaagccttggaagggtgtctgggtccaaatcgtttgcatctctttaaaaaatctagcgttgattgcttctttgtctcttgctttccctctcagcaggggtaagatcagaagtcccactcaacctcttgagccatagttataactgcctttgttttgcagaagcagggctggggaaaagctgtaaaaagtgatgagataatttaagcttgtgccttctgaggtcttgtctgtgggattaaacctttacagagcaatagctctcagtcactaggaggtgactgggtgacagcatttactgagaaccttatgacagtatcttgtttatttatttatttttgtttttttttttttttttttttttgaracaaagtcttactttgttgcccaggctggagtgcagtggcgtgacaacagctcactgcaacctttgccttttgggttcaagtgattctcctgcctcaacctcctgagtagctgaaact

SEQ ID NO: 580447 - DNA, 484 bp, Homo sapiens
gctaagccttggaagggtgtctgggtccaaatcgtttgcatctctttaaaaaatctagcgttgattgcttctttgtctcttgctttccctctcagcaggggtaagatcagaagtcccactcaacctcttgagccatagttataactgcctttgttttgcagaagcagggctggggaaaagctgtaaaaagtgatgagataatttaagcttgtgccttctgaggtcttgtctgtgggattaaacctttacagagcaatagctctcagtcactaggaggtgactgggtgacagcatttactgagaaccttatgacagtatcttgtttatttatttatttttgtttttttttttttttttttttttgaaacaragtcttactttgttgcccaggctggagtgcagtggcgtgacaacagctcactgcaacctttgccttttgggttcaagtgattctcctgcctcaacctcctgagtagctgaaact

SEQ ID NO: 580448 - DNA, 596 bp, Homo sapiens
ttgttcacaagttctatttctttctggttcagtctagggaggttgtatgtttccagaaatttatccatttcaggttttctagtttgtgagcatatagctgtgcataatagtctctgatgatctcacatttatgtagtattagttgaaatgtttccttttttcatttctgaacatttttatttggatgttctatcttcttggtgagtctgctagtggtttatcaattttgtttatctttttgaggaaccaacttttcattttgttgattcttttttttgtctctattccatttagttctgttctgatctgtgttattccctttcttttgctaacctggggtttggattgatcttgcttttctatttccttgaagtgtgatgttaggttgttaatttgtgctctttctacttttctgattaggcatttcatggtataaacttccctcttagcactgcgtttgctgtatcccacaggttttggtatgtcatattttcatttttatttatttccaaacaatttaartttctgtttgaatttctttgttgacccaatgatcattcaggagcatgcagcttatttccatgtatttgtacaga

SEQ ID NO: 580449 - DNA, 560 bp, Homo sapiens
gttgtaaaaacatggcgccaacatcagttcagcttctagtgaggccctcaggaagcttacaatcatggtggaaagccaaggtgggagctgatgtattacatggagagagatggagcaagagaaagcaagggaggaggtgccacactcttttaaacaaccagatctcgtgtgcacttggagcgagaactcagtcattactccgaggagagcaccaagccatttatgagggatctgcccccatagcctaaacacctcctaccagactccacctccaacattggggattacattttaacataagatggaggagacaaatatacaaaccatatcatatgctcatgattatgtaagtatcatttttattacacttatatcttaaaacattgttttgctcatggtttctatgaggaatgaacattctaccaatgtttcagaacaattaaataggtactgtattttctaaataatctagataaatgactcacatttactattttttcttaaaattaaagattctcacaaaaaatmttttcatatgctatatagaatcatatacaaat

SEQ ID NO: 580450 - DNA, 574 bp, Homo sapiens
cctttactaagttacataacctttctaaactttttattttctcaactgtgtaattaagaaaatagtaaagactwttttacacacacaaagttttagacaggaggaataaatttttgagatctactgcgcagcatgttgacgatagttcataataatgtattgtattccaaaatggccaagaataaaaatgttgagttcttaccacgaaaaaaataggaaagaatgtgaggtgaaagatatgttaattagcttgatttatttactgcacaatgtatacatatattaaaacttcacattgtacctgataaacatatacaagtattatttgtcaatttttaagtttcaggttcataatttagtcctttcagcacaatcgcacacgtactgagagcttcatattagggagataactggcttcctgaggattcctgccacccagtcagtagtaaagctaagactttaccactatgctatgctattcccagaacagcaggggccaacagttccaaacagcaccaccatcttatattttctttgcagcaaataaattctccctgctgaccccaggttcttt

SEQ ID NO: 580451 - DNA, 588 bp, Homo sapiens
aatgtctttcctttctttacagatcgttgatctcccatcctctccctcctcctttctttctctgctctcttatttccctctaattttcttctttcttcctctttccctgctccacagaatatattttttctctgcttctttttactgcttgccttctccacaaagctggtagtatttgccacccactcctactatgccaagtttggcttgcattcagttcccgaagccatggccaaatcctggctcttaccacattctggcttcatagctctagtcctaatgtcatctactaaccttagtatctaagtctcttagtctaatgtcttaatcctcagtcagaacatctttggtacacccatggaatgaatagtaatgactggcaygggcagaggtgaagccatatccatatgtttattttttattaaaaaacgtactgggctctcattcgctgacaggcacctgtgagagatattaaaacagagccgtggagtggggcaaggaatgggaggtgtgttttccttaaattgtcttagaaagtagggggaggcagtgatctagtttagaacaatatttaatctttggacgaca

SEQ ID NO: 580452 - DNA, 588 bp, Homo sapiens
aatgtctttcctttctttacagatcgttgatctcccatcctctccctcctcctttctttctctgctctcttatttccctctaattttcttctttcttcctctttccctgctccacagaatatattttttctctgcttctttttactgcttgccttctccacaaagctggtagtatttgccacccactcctactatgccaagtttggcttgcattcagttcccgaagccatggccaaatcctggctcttaccacattctggcttcatagctctagtcctaatgtcatctactaaccttagtatctaagtctcttagtctaatgtcttaatcctcagtcagaacatctttggtacacccatggaatgaatagtaatgactggcacgggcagaggtgaagccatatccatatgtttattttttattaaaaaaygtactgggctctcattcgctgacaggcacctgtgagagatattaaaacagagccgtggagtggggcaaggaatgggaggtgtgttttccttaaattgtcttagaaagtagggggaggcagtgatctagtttagaacaatatttaatctttggacgaca

SEQ ID NO: 580453 - DNA, 615 bp, Homo sapiens
tatttgtcatctgtaaccttcaggctttcttgttttagtctgttcaagaatcctggcttggctagataaataaacagattcccagttctttccacacatggataatagcttttgttgtcagtaacacaacatttttatagtgtcaaagagcaatcatgttctaataggcaattttaaattttgacctatgattactctttaatgtctgaatacacaattagagttgtttgaatgttgagcccacgcgtgcctgctgttatttattggatacacatgtggatacagtgcttgtggttctatgcccacatttcccagcctttcttactaagtagaagggggtggtctatcacactcatcagttttggcatttctcactttcttgttaaaggaacttatttgaggcataccatcatttagctgcaagctatagagtcaattcagccctcctaggtcaagcactggatttcctgtgcatatgtgttacatatatgtgtatattgtcackgacacatacttatttctacatctgttctcccttattttacccctgtcaacaacacttacttgattacgagcaaagacagaatctatggcaacaaataactttaaaataaa

SEQ ID NO: 580454 - DNA, 253 bp, Homo sapiens
tccacacacccaaccagccaataccaccacaggtgacactcacccacacgtgttgaaaggcagagcccctcctcctctytatacaaagcagcagtattcatgcatcagagtacaagtgagccacaaagatgtatccaccccaaagtcactcccatgaagatcttgggacaggtgttttccatggctctcagctacattgtggcctggagatagcagtgtctttctgaactgagagtctcgagtcctaggacag

SEQ ID NO: 580455 - DNA, 414 bp, Homo sapiens
ttattttagaacttgggtaaaactgtaggactctttaatcaagcaacaawagttattaagagttttgtatctactcagcaccatggtgggcactttggagactacaaaaaaatttgccaagctcaatctagagttttaaaatgtatgggcaaggctgggcgtggtggctcacacctgtaatcccagcactctgggaggctgaagcaggcgaatcacttgaggtcaggagtttgagactaccctggccaacatagcaaaacctcgtctctacaataataataataataataataataataataataataataagccggatgtggtggcgagtgcttatagtcccagctagtcaggaggctaagacacgagaattgcttgaacctgggaggtggaggttgcagtgaactgagattg

SEQ ID NO: 580456 - DNA, 540 bp, Homo sapiens
atttttgtatcacatagtcataactaaaaaatgcacactttataattaaaaattgtaactttttgcctatacttttttttttttttttttttttttttggtgaaacagggtctcgctctgtcacccaggctaaagggcagtggcgcaatctcagttcactgcaacctccacctcccaggttcaagcaattctcgggtcttaacctcctgactagctgggactataagcactcgccaccacatccggcttattattattattattattattattattattattattattggaaaaacgaggttttgctatgttggccagggtagtctcaaactcctgacctcaagtgattcgcctgcttcascctcccaaagtgctgggattacaggtgtgagccaccacgcccagccttgcccatacattttaaaactctaaattgagcttggcaaatttttttgtagtctccaaagtgcccaccatggtgctgagtagatacaaaactcttaataacttttgttgcttgattaaagagtcctacagttt

SEQ ID NO: 580457 - DNA, 404 bp, Homo sapiens
tcactgcaacctccacctcccaggttcaagcaattctcgggtcttaacctcctgactagctgggactataagcactcgccaccacatccggcttattattattattattattattattattattattattattggaaaaacgaggttttgctatgttggccagggtagtctcaaactcctgacctcaagtgattcgcctgcttcagcctcccaragtgctgggattacaggtgtgagccaccacgcccagccttgcccatacattttaaaactctaaattgagcttggcaaatttttttgtagtctccaaagtgcccaccatggtgctgagtagatacaaaactcttaataacttttgttgcttgattaaagagtcctacagttttacccaagttctaaaataa

SEQ ID NO: 580458 - DNA, 404 bp, Homo sapiens
tcactgcaacctccacctcccaggttcaagcaattctcgggtcttaacctcctgactagctgggactataagcactcgccaccacatccggcttattattattattattattattattattattattattattggaaaaacgaggttttgctatgttggccagggtagtctcaaactcctgacctcaagtgattcgcctgcttcagcctcccaaagtgctgggattacaggtgtgagccaccacgcccagccttgcccatacattttaaaactctarattgagcttggcaaatttttttgtagtctccaaagtgcccaccatggtgctgagtagatacaaaactcttaataacttttgttgcttgattaaagagtcctacagttttacccaagttctaaaataa

SEQ ID NO: 580459 - DNA, 603 bp, Homo sapiens
ataccagcatggtttttaacgttatttaygtgtattatgaaaaatgtaagcaacctaatattttcatgtgtttgatctgcccaagagaaagaggaaatgcattcatcagagaataggatctaatgagtttagcaatttaaaaattaagaaccatgattttctgctattttaattaagtcattttatatctctttaactcattctctaaaataatttgttacaattatctaaccttttacaaatatttgcaaattaaaagaaataattacccagtactacaccataattttgaagaatggatgaagcacacagtatgataatgtgtttttcatccttctaaaggaacttggtgatgaccaaaacaggaaaaaattcttaatctacaaatctattgaattttattacatttgtttccacacctcttttcacaaatgtttgtaccatctttttgaactttaactggtctttaattagttctctatacaccaatgaacacacaaacacaagtcaaggaatcaaattaacacaggattcctagttatattacctgctatgctttattagtctttctatcctctgccccaaccaatgcttggcacaatg

SEQ ID NO: 580460 - DNA, 603 bp, Homo sapiens
ataccagcatggtttttaacgttatttatgtgtattatgaaaaatgtaagcaacctaatattttcatgtgtttgatctgcccaagagaaagaggaaatgcattcatcagagaataggatctaatgagtttagcaatttaaaaattaagaaccatgattttctgctattttaattaagtcattttatatctctttaactcattctctaaaataatttgttacaattatctaaccttttacaaatatttgcaaattaaaagaaataattacccrgtactacaccataattttgaagaatggatgaagcacacagtatgataatgtgtttttcatccttctaaaggaacttggtgatgaccaaaacaggaaaaaattcttaatctacaaatctattgaattttattacatttgtttccacacctcttttcacaaatgtttgtaccatctttttgaactttaactggtctttaattagttctctatacaccaatgaacacacaaacacaagtcaaggaatcaaattaacacaggattcctagttatattacctgctatgctttattagtctttctatcctctgccccaaccaatgcttggcacaatg

SEQ ID NO: 580461 - DNA, 599 bp, Homo sapiens
aggaacttgttccataacatgacaatacatagaatgaatacaaataacttatatcttgatgcttcctaaatttaaataatctggcttgaactcctatattttcggtagtatctaggaaacagaatatcagtcatgcttattggtagttagttactgcttcttttccagaatcattcragagttctgggagatttacctagtccagagaaaagaaattggaaaatacttctaattttctatacatcttgtcactatgatcttcactgtacatacaggtgtggtacattctaaggaagaagttctgctctcactggaccaatctttgacacagttattttccattctcaattcacaaagctgttctacttagtgcagataactgccttagtgtatgacctgggtgtcaaacattcctcctggtctacagtaggtaggaggaaccctacctcctaattatggcaagggtcaaattcttctgctagtatgataattcctttctttgctgatgtactggaataagagactcaatctgattgtagtcatggctgcctctattgtgtcccctggtggaagtatcattcctctcagattgaagactt

SEQ ID NO: 580462 - DNA, 539 bp, Homo sapiens
tgaaataatatatgtggaaatatcatatatgcttaagtgttatgtatctacttacttgaagttgccctgttatgagtattccattaaaacaatgaatcaatatttaaccgttttcctaatgggccttcttcagggtatttacgtttattattattatatccttctggatctttttcctgagaggaggtaaataacattttctttacatattttctggaataattctattttttatttaagattataaaataataaactttttctagaaacaattctaataggcaaataatgttsaaacatgtatatgaatatatcactatatttatattgccctatataagacatttagattttttctgaaacattatattcaattaaccttattgctgtataatattgtacaataaacttaactcatttaaattgtacaattcaatgaattttgatagttatatacatttttaaagccattactgcaatcaagatacagaacattttctctccctaaaagaattttctcatgcacttatgtagtcagt

SEQ ID NO: 580463 - DNA, 616 bp, Homo sapiens
tgtaaccaactcttaactctcaacacactagaaaattatactactaaaaagttttgattagttatgtataaatagagcagtgctgacatgtaatacaaagaatgtgcatgaatgtgtctaaatagaagttttgtttagaattggtcatctacagttcatgtgtaattacaatttgcaagttctctcaggtttaccactctactgtggggcctttgatgatgccaacaaaatttcattaaaattcggatatatgctctacagttaaaatctaaactcatattaaccaaaggaaatgcacaaaaaatgtgaaagtatttaggtagacatattaatagcttcactaataccctgtaaaatattatatctcaattcatatttgactacattttgtatattgaaaataaacttattttagacctggagaaaaaaatgacactattaaagaaaatgaataaagcaatcatgatattagatgagaacacttgggtcttgggagagaaataaaaagagtgaaagaatcaaaagataaataagcagcgccaaaatcaaattgtactctggatgaygtatgaatagatttataacaaaacacagtgttgtttttcaaataacttaa

SEQ ID NO: 580464 - DNA, 558 bp, Homo sapiens
aatcaactcagtgataaaatcgcaatgatattttcagaattgatagacaataaataggtagatagatacatgggtagatgggtgataaaacaaataataaataggaacttggattactaagaattccactgttatcactggctgacccaatacgcataactaacttcctctattttacttatcttgaatgtaaagtctgagaatgtgcttgtagctaaaggctgttacatgaaatgattctggctaaaaaagaaaatctcgtaatttgagaagggaaagtaggtacaattgctaaatgtagaataaaataaggcaaatggtcaaaatttattttgaaaacakagagagccaaaaggatgataaaataacaatagagaaagatgatattttaaaaaaatctgtaaacacaaaaatgaaatacaaagaacaaaagcataatcaatgaaatagatgagatgtttcaaaatgccgtgttcctatagataatatatatcataaaaggcaaatgtaagcaatttggaaaacttaattgctaatgtgaaattacaaaaccccttg

SEQ ID NO: 580465 - DNA, 368 bp, Homo sapiens
tttatgccagtaccacactgttttaattactatagctttgtaatatattttaaaatcaggacatgtgaaatctccagctttgaaaaacttacatttgatccagcagttatatttytggaaatataacttacagattagttttacatatttaaattaaggttatttgctgccacactattggaaaacaatccaaatacccatcagtagaagactacctaagaaaataatggtatgcaaacaccacatgttctcactcatatgtggaagttgaacaatgagaacacatggacacagagagggaaacaacacacaccagggcctgttggggggtggggggtgaggggagggaacttagagggcaggtcaat

SEQ ID NO: 580466 - DNA, 387 bp, Homo sapiens
tctatcttggtttagattctgatccttgcagctaaaacctaatctaaatgatgtttcatctaaaactgtacattgagaatgattaattcatatttcattgacatcacaggattacawtgagacgccaatgaagtaatgaatgtgaaagggctttgaaatatgcatagggtattatgcaaatatagggtatatcaattaataagttcaaatatggatttcatgtattagtttggacagttggtattttttgttgcaagacaatatatgaacactatttcgagctctcaaataagttcttttctggctgcttcaagcaatctcacttctggctcaagcccttcccaaatgataaaaactaataatgccgacatcattttgatatatttt

SEQ ID NO: 580467 - DNA, 587 bp, Homo sapiens
tggtgtaattttcctgtgctaatatacacccattttctctccctttctttgtatattttaaaatatattacatctttaaaagttataagcccaacaatataattttataattattaattatctaatgtcttttaagtgagttaagagaaaaaaagatatataaacattcatactatcttttataatgtcctacataattacttttactgatgttcttaaattttttcatatgcgtttatgttaccacctgatgtcagatcctaaaaagcttcctttaatatttcttgtaaagcagatctattagcaataaaattatctctcactcttgtcccttaggctggagtgcaatggcgcaatctcagctcactgcaacctctgcctcctgggttcaagtgattctcctgcctcagcctcccaagtagctgggattacagcamctgccaccatgccaggctaattattttttgtatttttcatagagacagggtttcaccatgttgaccaggctggtctcaaactcctgacctcaggtgatccacccatctaggcctcccaaagtgctgggattacaggtgtgagtcaccaca

SEQ ID NO: 580468 - DNA, 587 bp, Homo sapiens
tggtgtaattttcctgtgctaatatacacccattttctctccctttctttgtatattttaaaatatattacatctttaaaagttataagcccaacaatataattttataattattaattatctaatgtcttttaagtgagttaagagaaaaaaagatatataaacattcatactatcttttataatgtcctacataattacttttactgatgttcttaaattttttcatatgcgtttatgttaccacctgatgtcagatcctaaaaagcttcctttaatatttcttgtaaagcagatctattagcaataaaattatctctcactcttgtcccttaggctggagtgcaatggcgcaatctcagctcactgcaacctctgcctcctgggttcaagtgattctcctgcctcagcctcccaagtagctgggattacagcaactgccaccatgccaggctaattattttttgtatttttcatagagacagggtttcaccatgttgaccaggctkgtctcaaactcctgacctcaggtgatccacccatctaggcctcccaaagtgctgggattacaggtgtgagtcaccaca

SEQ ID NO: 580469 - DNA, 525 bp, Homo sapiens
tacctgcatttctaaacagcacccaggggactccagaaataacaattcatgttgccaaagcatgtaacctaccagcttcacaggggaggcttacctctaccccacagaccagcaatgaaagcttcagcccagtcctatcctcagcaaactctgggccccagaaaacaggtttggatcgttcttatggttggggaggggacaccatcctttgaaataacagtcctgcataaagagcaaggcctcttgggaggtatttccaaaaagctgacttcattcttgttggttcacttagtcttgtcttaaagcaattctgaggaaacaggtgactttycgaattttttcaatcacctgaaggaacaaaaggtcaaatccagagcagaaagggaaaagaaaagttgcataaactacatgtttttcccctagagaaggccaagtcaagagctgcctttaagcagacagtaattgtaagatcagctgggtaggtgacttctccagcagtcaccaaaccacccctaactaaacaag

SEQ ID NO: 580470 - DNA, 503 bp, Homo sapiens
cacgcccagctaatttttgtattttgagcatgttggccaggctggtcttgaactcctgaccttgtgatccccctgcctcggcctcccaaagtgctgggattacaggtgtgagccactgtgcctggccttatttatttatttttgagacagggtctcactctatcacccaggctggagtgcagtggtgcagtcatagctcactgcagcttggaactcttgggctgaagtgattcttcttccttagcctccccagtagctaggactatagtgccaccatgcctggctaatttaaattttttttktgtgtgtgtgtgtggtggagatgggttctcactgtgttgctcaggctggtcttgaactcttgggcttaagcgatcttcccatcttggcctcccagagtgctgcgattacaggcgtgggccaccacacctgtcctgtgctaggctcttaacgtccttcccagatgttatgtcccttcccttggtggctgctgctttctgcca

SEQ ID NO: 580471 - DNA, 575 bp, Homo sapiens
tgctggctttggagacagagaaaggggccccgagccagggaatgcagatgacctctagaggatgcaaaagtcaaggaaaaggattctcccctagagcctccagaggaaacacagcccagctggcaccgtgactttagcgcagagaaacctgtgttgaccttctaacctccagaactgtaagataataactgtgtgttgtttgaagccactaaatttgtggtgatttgttacagcagccttaggaaactaaatcagtgacccattcctggggtgcatgaattccgtggataatgaatagaaatcctcattcttaattaaaagattttttatgatgaaagtaatttttagttccaagagcttggttttaagtgtcaaaaggaaatcattaaggaatcataaaattagggtcataaacaataggctgaagagagaatagataccctatacctggggaggccggataatggttttctaggctagaggaagagagctagacaacaaaggagtaatatgctgcttatctcttaatggggcscttgcaccctgctctactttcattctcaaaacctgggaaa

SEQ ID NO: 580472 - DNA, 532 bp, Homo sapiens
cactcttgttgcccaggctggagtgcagcggcataatctcagcgcactgcaacctctgccccctgggttcaagtgattgtcctgcctcagcctcctgagtagctgggattacaggtgtccaccaccatgcccagctaaatttttgcatttttcatagagacagggtttcacatgttggccaggctagtcttgaactgctgacctcagatgatccacccacctcgccttcccaaagtgctaggattacaggcatgagccaccrcagccagcctcctcaaaatcttttaaacaaatatttactgggtatatagtatgtattcagcagtgttctatgtgctacggatacagtaatcaacaaaacaaagtctttcccttgtagagctcatgttgtaaagggggcaggaaaatgaattgagaaatagatacataagaggtactgatacgaaaaaaagtagcataaggaggagagttgtggtgaggaaggggaatcttggtttttgccttaagaacctgcctccagctgggtgcagtt

SEQ ID NO: 580473 - DNA, 563 bp, Homo sapiens
ttgctctctgtagccctctaggctacctcagcattgctttctgctctttcagctttctgacacctgaaacaaatcctctatattaaatccctgataaggtttggatctgtgtccttacccaaatctcatctcaaaacctcgaattgtaaaccccacatgttgaggaagggccctgtaatccccacgtgttgagggagagaagtgattggattatgctgttctagcgatagtgagtgagtctcacaagatctgatggttttcaaaagtggcagtttttgtcctacactctcacttctctctcctgccgccttgtgaagaaggtccttgcctcccyttcgccttccatcgtggttgtaagtttcctgaggcctccccagcactgtggaactgtgagtcaattaaacctctttcctttataaattacccagtctcaggcatttatttatagcagtgtgagaacaggataatacaatccttctggtgatttttatttttctaattggaccctgactggtgacataggggaagggaaagggcaggaaactatatatatctatatatat

SEQ ID NO: 580474 - DNA, 508 bp, Homo sapiens
ggactggcaaagcctaatagcctaatagtgttaccctgaaggtctagtggacyatttgtggaagggaaccaacctgattaggtcaaagtgaaatctgcctcgtatccatggatataatctgaagaaagggcaccagacatgcacagatgaacaagaatcagtccttgctctccagggcttgtagtccattggaaaatttcaaggacacaggttgtaggataaggattaggtttggctgggagtaaaggagatccccccaaaataaaatagtttctttctctctcagaaataatgtatgtagtataccagagatattatggcacaccacagtgttgtgaaccaagacttctgtcttgttgctctaacatgtatggcttccactcccaagatatctcatggtcttaggcagctgccatagctgctattccaaccaagagaaatgtggaagagagaaagaattgacaaagggtgcatgccagctatcttttatagggtttcctggaagctg

SEQ ID NO: 580475 - DNA, 508 bp, Homo sapiens
ggactggcaaagcctaatagcctaatagtgttaccctgaaggtctagtggaccatttgtggaagggaaccaacctgattaggtcaaagtgaaatctgcctcgtatccatggatataatctgaagaaagggcaccagacatgcacagatgaacaagaatcagtccttgctctccagggcttgtagtccattggaaaatttcaaggacacaggttgtaggataaggattaggtttggctgggagtaaaggagatccccccaaaataaaatagtttctttctctctcagaaataatgtatgtagtataccagagatattatggcacaccacagtgttgtgaaccaagacttctgtcttgttgctstaacatgtatggcttccactcccaagatatctcatggtcttaggcagctgccatagctgctattccaaccaagagaaatgtggaagagagaaagaattgacaaagggtgcatgccagctatcttttatagggtttcctggaagctg

SEQ ID NO: 580476 - DNA, 630 bp, Homo sapiens
ttgtcagcatgcggctatgccccatgaaggcatttaatgtcaataccgagtgtttgccttattagaaaacagcacacattagatgtctgggttcaaggcagggcgccattgggaaagctcaaggctcacttctgagctttgctttttgttcttgaaattggtccctggcaattcctgacccattttcttctgagtcaagaaggtggtagcaaggtaggtaaggctgtaaagtagaactggcaaggagcaaaggtgagaggcctgtgcttatctctaggtgttgcaacatgaaaagaataaaaaccagccactttgattacctagctagagatctggaggccagacgcagttcaagataaagataaaagggratttgggtatctagctattcaagccccttggactattatctgaaatatgtttacccagtggtttctatcacattgtgacatggtggtaggggatggagtctagaatcaaagcactggctctaagttctgctctagtgttttgggtgaatcaccttgggcaagaccttacttctcaaagcctcgattttctcatccatcaagtaggatgcatactaatgctgcttgattgagatgtcatgaagagcaaatgaaatggtgc

SEQ ID NO: 580477 - DNA, 609 bp, Homo sapiens
tttagatgggtcagccatgaccctggctctttggaccgggctttttggcaagcatttgctcacagagggctagtcagtcttcttgatcacatattgagattttgttcttggtctctatttttcagtttgactttcacgtttagctcaaatcagtcattcttggtagaagattccagatgagatacagaaataacagtttcccaataaaaggtttttttttggttgtccttgagtgtgaattcgtacatatgtttaccttatatatcccaaagagtaatgagygctgatctaggaatcctgtttgatgtggtttgattatgagtcatgtcttaaaaatcagcataaagttctctctgaacaggagatagcaaggccgctgtctttttttctcttgcttctaacaaggcagactccacagggttaaataatgccagctatcatgtgacaaagattgagccagctgaatgcattaattgattaaacaggatgaacaaatcagcggttgaggagggagaaagaagaagcatccttcagcaggaaagtgaggcagaagaaagttttctaagattgggggtgacagaggctggaggctggggtggaagaactgtg

SEQ ID NO: 580478 - DNA, 620 bp, Homo sapiens
aacatttttcatgtcatttgatattcttttaaaatttgattttccatggctgcattatttctgcaatgtgtttagtcaatgtcctggattttatgtggttttctgttattcatgttatcctcattcayaaatattgtgtgcatctatgactattgtttaggatcaatccctatatgaagaaatactggataaaagaggatgaacgtttctagctttcaatacttattgtcaaatggatatttctatgatctattgccaaacttggtattagcatttttgaaaacggaaatttgatgggtcaaaaacagcatttgatacagtttttccctagtgattactagtgaggatgactatataatttgtccatttggacactttctaagctgctccttcatactccacagaacaattgtaatttgtctctggactagagcagccagctgtcactgacttccacactcctctttagtcagtggagatgctggtggctaaagcaaccacagctctgagagcagcttgatacataatctgcacaaattaattcttccctgtaccctatatttttcatctgaataagaataatctaaattctatagtccatataatcttacatttttgga

SEQ ID NO: 580479 - DNA, 587 bp, Homo sapiens
gtttattttttattgttttctcttcttttcttctttccccttctcccttgctccacctttcctacttagccctttagaaatgcaaatataaggctgagtgaggtggctcatgcttgtaatcctagcaccttgggaggcggaggagggtggttcacctgaggccaggagttcaagacctgcctggccaacagagtgaaacccatctctactaaaaatgcaaaaattagctaggtgtggttgtgtgaccctgtaatcccagctactcaggtggctgaggtgggaaaattgcttgaacctgggaggtggagactgcagtgagctaagatggcaccactgcactccagtctgggtaacagagcaagactctgtcccccccccaaaaaaaaaaaggaaaaagaaagaaagaaattcaaatataacctttcacctctccctcaacagactttcctcccacagggctarttcacctatatgttccgagaaggatacctcttgacagttgatgtgcagaccaaaacgtgcccccagagaactcacctccacagggtcactttagaagaacatgtggaaagcatgcccacttggcc

SEQ ID NO: 580480 - DNA, 618 bp, Homo sapiens
ttgtcctattctgtaagttgtctgttcactctcagtttcttttgctgtgcagaagccctttagttaggtttcaattgtcaatttttgattttgttgcaattgtttctggggacttagccaaaaattctttcccaaggttaatgtccagaatggtatttcctaggtaggatttttgcatatggtgaatggtaggggtccagtttcattcttctgcatatggctaggccattatcccaacacccctgggaaagagagtcctttccccgttgcttgtttttstcagccttgtagttgatcagatggttttaaatgtgtggctttatttttgagatttttattctgttttgctggtctgtgtgtctgtttttataccagtaccatgctgttttggttaatacagccttatattaaagctatattagtttgaacatatagtttgaaattgggtagtttgatgcctctggctttgttcttcttgtttacagttgcttgggctatttgacctcatttttggtcccctatgaattttagagtagctttttctaattctgtgaagaatgattttggtaatttgaaggaataatgttaaatttgtttgtggtgattgtaatgagattg

SEQ ID NO: 580481 - DNA, 551 bp, Homo sapiens
gaataatgttaaatttgtttgtggtgattgtaatgagattgtgttttttatttaactttcagcctcgacattgttggtgtataaaaatgctactgatttttgtatgttgattttgtatcytgaaactttcctgaattcattttttggttccagtagccttttggtggagtctttatagagttttctaggtacagactcatcagtgaagagagatggtttgacttcttattttcctatttgtatgatttttatttatttctcttgattgattgctctggctgggacttctggtactatgttgaataggaatggtgagagtgagcatccttgttttgttctagttctcaagggcaatggttttagcttttgcccatgaagtgtgacattagctattggtttgtctaagattgttcttattattttcaagtattttccctcagtgcctattgagggttgttggggttctttgtgttttttgtttttgtttttgttgtttttttgtttgtttgttttaaaaaaaaaccatgaaggtatattggattttatagaag

SEQ ID NO: 580482 - DNA, 551 bp, Homo sapiens
gaataatgttaaatttgtttgtggtgattgtaatgagattgtgttttttatttaactttcagcctcgacattgttggtgtataaaaatgctactgatttttgtatgttgattttgtatcctgaaactttcctgaattcattttttggttccagtagccttttggtggagtctttatagagttttctaggtacagactcatcagtgaagagagatggtttgacttcttattttcctatttgtatgatttttatttatttctcttgattgattgctctggctgggacttctggtactatgttgaataggaatggtgagagtgagcatccttgttttgttctagttctcaagggcaatggttttagcttttgcccatgaagtgtgacattagctattggtttgtctaagattgttcttattattttcaagtattttccctcagtgcctattgagggttgttggggttctttgtgttttttgtttttgtttttgttgtttttttgtttgtttgtttwaaaaaaaaaccatgaaggtatattggattttatagaag

SEQ ID NO: 580483 - DNA, 513 bp, Homo sapiens
tgtctagaattaaaataagcascagttaaatatagtaatatgcatacatttcactgtttccactttcactgccagactcagaggatacagtaaacaatgcatgttctctgggctacccgtgcgttcagggaggttcatttctagacgaagtaatggggtatttgcatggggaaacttggaagaattagatacacgcagagcacctgtcattgcctacttgtggtgggattcacaggaaattcagggaggaggaagagccttcaggaggaatatgcagggtagggtaggacagctgcagccgtaagggagcttgatcttaaagggcagggaggatctggacaatactacggcacaaagcatcatgagccctggtgcagagggcatcaccagatggcaggatccttagaagactgggaccagggtgaatactcaccatggtgtcttggcgacccgttagtcagcaacaacagcaatcttgtgtgcagtgaggaaggcttagactaagcactggaa

SEQ ID NO: 580484 - DNA, 561 bp, Homo sapiens
aggtattcaaataaaaatgatggggaaaaaaaagactttcatagcaacccttaaaagactgaccataccaaatgtcagcaaacatttagaaaaactgtgtgtaagagttcaccgttagtgagggtggaacttagtacagccaccatggaaaacagtatgcagctttcttataaaagtaaaaaagaactatcatatgatccagtcatcctactagtgggcatatacccaacagaaatgaaatcagtacatggaagagatagctgcactcccctgttcactgcagaatcattcacaatagccaagatayggaaagaaccgaggtgtcaatcaatggatgaataatggtaaaaatgtggaatactatttggtcataaaaaagaaagaaatcctgtcatttgcagcaacacggatgagcctgaaggacactttgttaagtaaagtgagccagtgacagaaagacaagcacatcatcatctcacttttacggagaacctcagaaaactgatctcattggagcagaggatggaatggtggttaccagagactgggggaggcaggagg

SEQ ID NO: 580485 - DNA, 561 bp, Homo sapiens
aggtattcaaataaaaatgatggggaaaaaaaagactttcatagcaacccttaaaagactgaccataccaaatgtcagcaaacatttagaaaaactgtgtgtaagagttcaccgttagtgagggtggaacttagtacagccaccatggaaaacagtatgcagctttcttataaaagtaaaaaagaactatcatatgatccagtcatcctactagtgggcatatacccaacagaaatgaaatcagtacatggaagagatagctgcactcccctgttcactgcagaatcattcacaatagccaagatacggaaagaaccgaggtgtcaatcaatggatgaataatggtaaaaatgtggaatactatttggtcataaaaaagaaagaaatcctgtcatttgcagcaacacggatgagcctgaaggacactttgttaagtaaagtgagccagtsacagaaagacaagcacatcatcatctcacttttacggagaacctcagaaaactgatctcattggagcagaggatggaatggtggttaccagagactgggggaggcaggagg

SEQ ID NO: 580486 - DNA, 513 bp, Homo sapiens
ccttaaaagactgaccataccaaatgtcagcaaacatttagaaaaactgtgtgtaagagttcaccgttagtgagggtggaacttagtacagccaccatggaaaacagtatgcagctttcttataaaagtaaaaaagaactatcatatgatccagtcatcctactagtgggcatatacccaacagaaatgaaatcagtacatggaagagatagctgcactcccctgttcactgcagaatcattcacaatagccaagatacggaaagaaccgaggtgtcaatcaatggatgaataatggtaaaaatgtggaatactatttggtcataaaaaagaaagaaatcctgtcatttgcagcaacacggatgagcctgaaggacactttgttaagtaaagtgagccagtgacagaaagacaagcacatcatcatctcacktttacggagaacctcagaaaactgatctcattggagcagaggatggaatggtggttaccagagactgggggaggcaggagg

SEQ ID NO: 580487 - DNA, 564 bp, Homo sapiens
ctattaatgctttaaacgttatccagaatatgcctctatgttcagaaatcatggcttttaaagacttcaatcaaaaaaggttaacaaagttctaaaatccaaaaataggcttattttaaaattagtttaagaagaaacattttcctctrccctaaaacttgcattaaagctttgttttgtaatgtttctttccactcttctccaaaaaaaacaagcaaagaaaaaagatgtatccattaaaatgtctactaaactttacttgggttgcattttgtacagaaatatgttttattgctttttcttatcaatcattcaatatcaaaagtttttctttatgcttgaactacaccttgtcatacagaagaattaagccaagttatttatggcagcgtagttttctctttatatgaccagctgtctcctttttttctgatgccttttcttgtttttgcaaaagatcacttaagaccttgacagcatcattaaatttattatcttgtaaaaagctctataacttaaagcctctaggcttgtgtgatgtctttttataaaatacattcctct

SEQ ID NO: 580488 - DNA, 564 bp, Homo sapiens
ctattaatgctttaaacgttatccagaatatgcctctatgttcagaaatcatggcttttaaagacttcaatcaaaaaaggttaacaaagttctaaaatccaaaaataggcttattttaaaattagtttaagaagaaacattttcctctaccctaaaacttgcattaaagctttgttttgtaatgtttctttccactcttctccaaaaaaaacaagcaaagaaaaaagatgtatccattaaaatgtctactaaactttacttgggttgsattttgtacagaaatatgttttattgctttttcttatcaatcattcaatatcaaaagtttttctttatgcttgaactacaccttgtcatacagaagaattaagccaagttatttatggcagcgtagttttctctttatatgaccagctgtctcctttttttctgatgccttttcttgtttttgcaaaagatcacttaagaccttgacagcatcattaaatttattatcttgtaaaaagctctataacttaaagcctctaggcttgtgtgatgtctttttataaaatacattcctct

SEQ ID NO: 580489 - DNA, 564 bp, Homo sapiens
ctattaatgctttaaacgttatccagaatatgcctctatgttcagaaatcatggcttttaaagacttcaatcaaaaaaggttaacaaagttctaaaatccaaaaataggcttattttaaaattagtttaagaagaaacattttcctctaccctaaaacttgcattaaagctttgttttgtaatgtttctttccactcttctccaaaaaaaacaagcaaagaaaaaagatgtatccattaaaatgtctactaaactttacttgggttgcattttgtacagaaatatgttttattgctttttcttatcaatcattcaatatcaaaagtttttctttatgcttgaactacaccttgtcatacagaagaattaagccaagttatttatggcagcrtagttttctctttatatgaccagctgtctcctttttttctgatgccttttcttgtttttgcaaaagatcacttaagaccttgacagcatcattaaatttattatcttgtaaaaagctctataacttaaagcctctaggcttgtgtgatgtctttttataaaatacattcctct

SEQ ID NO: 580490 - DNA, 317 bp, Homo sapiens
gtttttatactgttaaacatagttggatatgaattaattttatcagtttatataacatgcasattttgggataaagaccactgacaagtagctttggatataagatatctcagttttacataaaatgttttacattcattatggtgatcgtcttcataaaaatttgagaaattattgcatcaattcataccaatccaatcatagaccagtgaaaagttacgaatccaaaccttctgaattcgggactcctccgtcctctgctggttttcttcccactacgcggtgcgctggcattagttccctctatggaagcttat

SEQ ID NO: 580491 - DNA, 623 bp, Homo sapiens
tcaaaaccagcctgggcaacttggtgaaaccccatctctaccaaaaatacaaaaataagccaggcatggtggcatgtgcctgtggtcccagccactcaggaggaagagcagcttgctggggtttgctaggtcattatactgtttatctgtctgcttgctcagcctgaatcttccactgtgctgtgccacctggtgctgagattgtggggttccttctagttctcaggtacctgcagatattgaatgaacctaggattgtatttcaatcaacttcagacactatctatcagctggaagtcatgccgctatttttgcctactactaacacacacacccacaaatgctgccaattttatcaggaggcaccactgatgggaaatgaatcctgatttcagagctgttaaaatgtcacaaaaaaagtgcgtgttgaaattgattgatgaaagacagtwattgtgaataagcaattggcttaagttcatctgcaatgattactttctccaaactcactactctgctctttaaagggatctttaaaggctcttttaccacaaaaccaggacttgcaagtggaagaccatattcctgggaataaatctcaatctgtgttacattttttttgc

SEQ ID NO: 580492 - DNA, 549 bp, Homo sapiens
tccaagtgtgcagagtcaagtatccctccacaactactattagccactccctaaagtatatttcctacctagttattacacaccaaagctctctcataataagtaatttctgatacccctaaaaatcaaaactgtcagataacacagtgaaaaacagaacagagcctttgattctgagagggatctatccgcttttaattcctggggtttcatgaggaaaacagagccttttttccaaaacggggttcgtggtgcctcctctgtttttcccaaggagtcccaggctaccagaagttatcttagggcctctcatgtgtgtattaagattggcaagataaaaaaaaatggaaaaaaataattcagtcaactgagaagaaaaaaccttttcccaggaaaaaaacaagtcccaaaaagaggaaaacataaaggccttttaaatatacctattgcttgtttatccacttttaattaagctgacttttaaccatagcgctctttaaaaaatatccttttaaattttttattaccmgactttaacactaagcgacc

SEQ ID NO: 580493 - DNA, 647 bp, Homo sapiens
aacaaaatcaataacattgataaagttctaaccagattgaccaagtgaaaaataatgcacaaattacaaataccaggaatgaaaagaggggatgtaattactgatattagcatcacaaaaaatggaaaactatgaaagttctatgcacatacatttgaaagactagatgaaatagacaaattatttgaaagatgtaaactacaaaaccttacccataaagaaatgataacctgaatagcctacacctattaaataaattgaattactgtttaaaatcttacaaacagagaaaatgtcagatgcaggagggttgggattagagtaaggaattcgaatgagaaaaatagtggccagatgatgtctgggcagtctgtggtgtagtgctgaaacataggggaatcttcgactcaractgctggcaggaatggaatggaacccctaacaaaaagtctgtcttggtcataattggcccatgcacagctaatgccagttattatcttcatttagacagttaatgccatgggcagtgaatgtggtcagcggctacattcaagaaggtctaggtgatctttcaagaagagaaagagtctcaagaggacaccatgtcatgttaaaaagaaagagctatattatatgtgttaccctaa

SEQ ID NO: 580494 - DNA, 635 bp, Homo sapiens
cacacattgcatatgaaacccaagtcaggaaccttgctggaaataaatatcccatagagagccttggcactctgaaagcacccagaaacaaaggtaattgactgcactcaatataaactatggtcaaaccccaagagaaataaggaatatagaaacaaaaaaccccatccaattgacagcaacttcacaaagataaaggaacatcagccctctcagatgagagataatgaaygcaagaattctggcaatggcaattcaaaatgtaagagtgtctccttacctccaagctgtcacactaggtccccagcaatggttcctaaccagactgaaatggctgaaatgatagacagaattaagattcaggagaaagttgaaacacaatccatgtaagccactaaaatgatacaggagttgaaagacagcgtagccatcttaagaaaaaaccagttgaactctggtattgaaaatttcattgcaaggatttcataatagaggtggaatcagtaacaacagaatagagcaagctgagaaaagaatcttggagcttgcagaccagtccttcaaatcaacccaatcagaccaaaaaattaaaataaaaataaaaagaaagaaaaaagaaattataaaatgaacaa

SEQ ID NO: 580495 - DNA, 630 bp, Homo sapiens
agagaaggagaaagatctatcaagcaaatggaaattaaaaagagcaggggttgttgttcttacattagacaaaatgactttaaaccaacaatagtcagtaaggacaaagaagggcattacatagtggtaaaggattcaattcacaagaagactttactatcctaaatatataggcgtccaatgttacagcacccagacttataaaacaagcacttctagacctatgaaaaaatgtagccacacaataatagtgggrgaacttcagcactccactaacagctttagacagatcattgaggcagaatatcaacaaagaaattctggatttttttttttacctttttaaatgtaatttatttatttacttttatttttccataagttattggggtacaggtgatatttggttacatgagtaagttgtttagtagagattgatgagattttggtgcacccatcacccgagctgtatacactgcaccatatttgtagacttttatcgctcgtccccatcctactcttccacccaagtaccctaagtccattggatcattctttttttttttttttaaattattattatactttaagttttagggtacatgtgcacaatgtgccagttagttacat

SEQ ID NO: 580496 - DNA, 535 bp, Homo sapiens
aaaaaggtaaacataaatataaatatataatgttgattcttgctatagaaaaaaatagaggaggtgtgtgggtwatttttgagggtggcaattttagatgaggttgccagggaaggctttcttgagaagatgttgttgagtaaagactggaggagaaagggaggttgtcatgtaaaactctggggcagagcattctaggaagagggtacaacaggctcaaaggcaggtgcctgaaaaacaggcttttacaagcctggaaagaagtgagtgaagcagatgaggctggagagataacaggcactcaccacatggagcctcatagacgattgctggaaattcagctttacctccgagtgagatggagaacctggggctggttgagaagagaggaatgacatgacctggctgaggttttaataggatcccctgcagctgcactgggaattgactaacaggggcaaagggacaattggggtaaccaggcatgaagctgttacaatcacccaggagagaggtgatggtgacttgaaccagg

SEQ ID NO: 580497 - DNA, 535 bp, Homo sapiens
aaaaaggtaaacataaatataaatatataatgttgattcttgctatagaaaaaaatagaggaggtgtgtgggtaatttttgagggtggyaattttagatgaggttgccagggaaggctttcttgagaagatgttgttgagtaaagactggaggagaaagggaggttgtcatgtaaaactctggggcagagcattctaggaagagggtacaacaggctcaaaggcaggtgcctgaaaaacaggcttttacaagcctggaaagaagtgagtgaagcagatgaggctggagagataacaggcactcaccacatggagcctcatagacgattgctggaaattcagctttacctccgagtgagatggagaacctggggctggttgagaagagaggaatgacatgacctggctgaggttttaataggatcccctgcagctgcactgggaattgactaacaggggcaaagggacaattggggtaaccaggcatgaagctgttacaatcacccaggagagaggtgatggtgacttgaaccagg

SEQ ID NO: 580498 - DNA, 513 bp, Homo sapiens
ttagagattggaatagcagtagtagcctcttggtggggcattgactgggaatgaggcatgagggaccctctgataatgttccgtatcttgatttgggtggttgtcaccgacaagcatatgtatgtaagaaatgtgttgagctatctggttaagaccaattcactttgctgtatgtatgttacctaaataaaaaataaatttwaaaaaacctatgagatacatattaatcagtaggagaaaatcaaatggttgtgatgatctgaaaataatacaagagctttgcaagatgcaagcaattcatctttttagacatcaaatctcattaaattttctacatacaatgacaacttaatacataggtaagagaactgccctcctgatcccccaaaaccctgaacaagcaggcaagattcctttgctatatgctctcagagaagcatgttcatttcctttagagcatttatctcagtttaaagtaacataccattaatctcagtttaaagtaacatacca

SEQ ID NO: 580499 - DNA, 560 bp, Homo sapiens
ttggttttcatcttgaatgttattagtggatagaaatgctactgatttttgtacatttacatttattttgtatcctgaaacattactgaagtcatttatcagggttaggggtcttttggaagaatctttagggttttctaagtrtagaataatgtggtctgtaaagagagataatttgacttcctctttttctatttggatgcattttctttcattctcttgcctgattgctctggctggaacttccagtactatgtggaatagtagtggtgacagtgggcattcttgtctcattccagttcataggaggcatgctttcagcttttgcttgctcagtatgatgttggctgtagatttgtcatagactgctcctattattttgaggtgtgttctttcaatggctagttagttgagggtttttatcatgaagggatgttgaattttattggatgctttttctgcatctattgagatgatcatatggtttgtttttaaattctgtttatgtgatgaatcacatttattgatttgcatatcatccatgcatcccatgaataaag

SEQ ID NO: 580500 - DNA, 560 bp, Homo sapiens
ttggttttcatcttgaatgttattagtggatagaaatgctactgatttttgtacatttacatttattttgtatcctgaaacattactgaagtcatttatcagggttaggggtcttttggaagaatctttagggttttctaagtgtagaataatgtggtctgtaaagagagataatttgacttcctctttttctatttggatgcattttctttcattctcttgcctgattgctctggctggaacttccagtactatgtggaatagtagtggtgacagtgggcattcttgtctcattccagttcataggaggcatgctttcagcttttgcttgctcagtatgatgttggctgtagatttgtcatagactgctcctattattttgaggtgtgttctttcratggctagttagttgagggtttttatcatgaagggatgttgaattttattggatgctttttctgcatctattgagatgatcatatggtttgtttttaaattctgtttatgtgatgaatcacatttattgatttgcatatcatccatgcatcccatgaataaag

SEQ ID NO: 580501 - DNA, 499 bp, Homo sapiens
gactattattctaagtgaagtraatcaggaatggaaaaccaaacattgtatgttctcactcataagtgggagctaagctatgaggatgcaaaggcataaaaatgacacaatagactttggggactcagggggaaagggtaggaagggggtgagggataaaagactacaaataggaggcagtgtatactgcttgggtgatgggtgcaccaaaatctcacaaatcaccactaaagaacttactcatgtaaccaaacaccacctgctccccaataacctatggaaataaaaaatgttttaaaaaagaagtatttgagagacacattgctgggaattaaatggttctgagggggttatttgaattaatggactcctgtttatattcataggctgatgaggactggggacattgagtttgttattttcagtctttccacaactgcaccgcaaactttgaggactggaactattctcatacttttgttgttgttgctacctggag

SEQ ID NO: 580502 - DNA, 461 bp, Homo sapiens
gaaaacctgagaactacatttctcccatttctttgccagcagatttctgatttgtagtcaattaatgagaggtactcactgtgagattagaaggcagaaggaaaacgtacgctattatttctcctcctgcaatgcagkggcctcagggcctttcctcccagagacatccgccttggcattgcaggcaactgtgatcattgtcagtggctgattttttgcagttgctgacttgggagagagtaacattttcttgattctctgaaagctagcaggaacctgagcactgtcaactatcttccctgatctatgcttatttgactcaataacttagaaaataaacagcaagtttttttttaaaggcagagacatgatgaaattgccactccagtggtttttgtgtgtttttttcaagttttttaagcatacgactccgtgtcctaaatcaggttttatctaagatc

SEQ ID NO: 580503 - DNA, 461 bp, Homo sapiens
gaaaacctgagaactacatttctcccatttctttgccagcagatttctgatttgtagtcaattaatgagaggtactcactgtgagattagaaggcagaaggaaaacgtacgctattatttctcctcctgcaatgcagtggcctcagggcctttcctcccagagacatccgccttggcattgcaggcaactgtsatcattgtcagtggctgattttttgcagttgctgacttgggagagagtaacattttcttgattctctgaaagctagcaggaacctgagcactgtcaactatcttccctgatctatgcttatttgactcaataacttagaaaataaacagcaagtttttttttaaaggcagagacatgatgaaattgccactccagtggtttttgtgtgtttttttcaagttttttaagcatacgactccgtgtcctaaatcaggttttatctaagatc

SEQ ID NO: 580504 - DNA, 643 bp, Homo sapiens
ggttatttcttgattatatgctaaacaaggggtggattattcatgagttttctgggaaaggggtgggcaattcccagaactgagggttcctcccatttttggaccatatagggtaactttctgaagttgccatggcatttgtaaactgtcgtggtgctggtgggagtatagccttaaggacgaccggaggtcactcttgttgccatcttggttttggtgggttttagctggyttctttactgcatcctcttttatcagcaaggtcgttatgacctgtatcttgtgctgaccttctatttcatcctgtgagttagaatgcctaattgtctgggaatgtagcccagtaggtctcagccttattttgctcaccctattcaagatggagttgctctggttcaaaggcctctgacaatatcacccctacttttctgttcttcagacttgttgaggaaatcagcaagcgttaatgctttaaaataaactatgcagactgagaaaaattttcagtagtacttatctctcactgtgctgttttgtggatatttgtgtgtccatcatgtctcacgaccgtatctcctcaaggaaagactgattagacatacatttttaaactgcttggcagggcagtgtcttggcacaaagg

SEQ ID NO: 580505 - DNA, 423 bp, Homo sapiens
ttactaagtggctggcattgttctaagcacttttacatgcattaactcgaggtgaaataaaacccaaatacacagaactggcaaatgagggtccatgcttgagggtttggaaagacttggaaataccctttgggcacatcaagcaggcaaaaaaaaaaaaaaaaaaaaaaaaaaatcagctgcattttggaagcttcctctgatcaaagatacccattcatccaacatttatttatraaatgcctgttgtttcccaggcattgttctaggcactgaaaacaggacagattccaggaaaaggagaagtccaggaacacaaaaagatagaaagaaatactcaaaagtgccatattttttaccttttcattgatactaccagaaaagggaaaaaataaatactgtttgattttgccaccaggcacc

SEQ ID NO: 580506 - DNA, 423 bp, Homo sapiens
ttactaagtggctggcattgttctaagcacttttacatgcattaactcgaggtgaaataaaacccaaatacacagaactggcaaatgagggtccatgcttgagggtttggaaagacttggaaataccctttgggcacatcaagcaggcaaaaaaaaaaaaaaaaaaaaaaaaaaatcagctgcattttggaagcttcctctgatcaaagatacccattcatccaacatttatttataaaatgcctgttgtttcccaggcattgttctaggcactgaraacaggacagattccaggaaaaggagaagtccaggaacacaaaaagatagaaagaaatactcaaaagtgccatattttttaccttttcattgatactaccagaaaagggaaaaaataaatactgtttgattttgccaccaggcacc

SEQ ID NO: 580507 - DNA, 423 bp, Homo sapiens
ttactaagtggctggcattgttctaagcacttttacatgcattaactcgaggtgaaataaaacccaaatacacagaactggcaaatgagggtccatgcttgagggtttggaaagacttggaaataccctttgggcacatcaagcaggcaaaaaaaaaaaaaaaaaaaaaaaaaaatcagctgcattttggaagcttcctctgatcaaagatacccattcatccaacatttatttataaaatgcctgttgtttcccaggcattgttctaggcactgaaaacaggacagattccaggaraaggagaagtccaggaacacaaaaagatagaaagaaatactcaaaagtgccatattttttaccttttcattgatactaccagaaaagggaaaaaataaatactgtttgattttgccaccaggcacc

SEQ ID NO: 580508 - DNA, 423 bp, Homo sapiens
ttactaagtggctggcattgttctaagcacttttacatgcattaactcgaggtgaaataaaacccaaatacacagaactggcaaatgagggtccatgcttgagggtttggaaagacttggaaataccctttgggcacatcaagcaggcaaaaaaaaaaaaaaaaaaaaaaaaaaatcagctgcattttggaagcttcctctgatcaaagatacccattcatccaacatttatttataaaatgcctgttgtttcccaggcattgttctaggcactgaaaacaggacagattccaggaaaaggagaagtccaggaacacaaaaagatagaaagaaatactcaraagtgccatattttttaccttttcattgatactaccagaaaagggaaaaaataaatactgtttgattttgccaccaggcacc

SEQ ID NO: 580509 - DNA, 422 bp, Homo sapiens
ctgccttggcctcccaaaatgctggaattacagacatgagctaccgcgactggccacttctgccatatttcattggtcaaagaagtcatggaaagggagatagcratatacctttcaatgggaagagtgtcaaataatttgtgactatctttaatctaccaataggcccttgtaggtcatagtaaagacttgggattttcctctaccagagatgggagccgttggagggtgttaaacagaagagtgacatgatctggctttcattttaacaggaccactctatctaccattttgagaaagcactgcaggtagggaagaagtaggaagaaccgttagggggctattgcaataaaccaagcaagagatagtggtggcttgggccagggtggaggcaaaggaggtagtgagcagtggttgaattc

SEQ ID NO: 580510 - DNA, 607 bp, Homo sapiens
aattttttgtattttagtagagatggggttttgccgtgttgcccagactggtctcaaactcttgagctcagataatccacctgccttggcttcccaaggtgctaggattacaggggtgagccaccgcgcctggctgaggctagtataattctaacagccaagtcacacgaaacaagtacatgacaaaaataatagcacaagtcagcttctaaacttaattttttaaatcttcaataaaatacatcctatttatttctgaaagtatattaaaatgaccatgactcaaggatggcttaaaataagaaaacccagcaatataacttctttttaayagactaataaagtttaaggttgcaatagtaatagagaaagcatgcagtaaatttcaacatggagagatgaggatggttaatgggtacaaaaaatattaatagttagaaagaatgtataaggtctagtatttgacagcacaacagagtgactatggtcaataataatttaattatacatttaaaaatagccaaaagagtataattggattgtttgtaacacaaaggataaatacttgaggggatggatgaaccattttatacgatgtgattatttc

SEQ ID NO: 580511 - DNA, 470 bp, Homo sapiens
  misc_feature 42: n = A,T,C or G
gaaagtagattcatggtagcctagagttgaggggtggggggngatgggagtgactgctaatgtgtactcttcatagggtttctctgtggggtaatgaaaatgctctaaaattagattatggtgatggttggacaactatgaatacactcawaactactgaattgttcacttttgtgcaacttttactgcatgtgaattatatcttaataaaagctattttaaaaaagagaatgcaagcctgacttgccaaggtacccttcttttgaaaactaaatgaacaaacatctgaaatttgctattttctgtatgaaagtatgcagaactgggggagatgacttccagtaaacaaatcagtaaagacgagagaaagcagcagttgagcatgaaaggttgagagcctttaaatgtgccttaaagaatgaaatagatttgggcataatagaaaggatattctaaatgcaaggaatggt

SEQ ID NO: 580512 - DNA, 373 bp, Homo sapiens
ttttttggcttattccttgctatctcccaagtgcctaaagcagggcttggcacataataggcactctgaatattttgggaaagggagaatgcatgagtgagtgaatgagtgcatagtggtagcaaatagatggcaggcacctcttatctccccagcccaatgtccagaggagatgagaaatggaccctgagactttatgcctccccttacctgaaagcagccacttcccattgattggggtccatggatttgtcatcatsagtcactctggaaaattttcacgagaatataagtgataaaatggtgttccattgagtgaaacggtatgagaagcatcattatatgtcttgtctgtccatgaaggagaaggtac

SEQ ID NO: 580513 - DNA, 373 bp, Homo sapiens
ttttttggcttattccttgctatctcccaagtgcctaaagcagggcttggcacataataggcactctgaatattttgggaaagggagaatgcatgagtgagtgaatgagtgcatagtggtagcaaatagatggcaggcacctcttatctccccagcccaatgtccagaggagatgagaaatggaccctgagactttatgcctccccttacctgaaagcagccacttcccattgattggggtccatggatttgtcatcatcagtcactctggaaaattttcacgagaatataagtgataaaatggtgttccattgagtgaaayggtatgagaagcatcattatatgtcttgtctgtccatgaaggagaaggtac

SEQ ID NO: 580514 - DNA, 570 bp, Homo sapiens
atttaaattttgtagctgagtgactgtggttcccactgttaaatctgacatacagagaagagcaattacagggctcttcaaagatgcaggtgctgccttcacaaatgtattttgtaaggcactggtcaakggtatatcttctggaccctcccagctaggatgagtatgtctaaagtgatgaacccactctaccatccaatctccctaagcctttggatcccttcctctgcattaaaccaagggagatcaggcatttccagctcactcacagtgggccatcttttaatccatatttcagcttaccaaacaaataaactattagaaccttttttaactccccaagctgcaacattaaatgtagagtccctactcattgggcccaaatcaataaattcagcctgatccaactctttgttccttccaccgttatcccacacccttaatatccatcccatgtctgttctccagatttatgtttatataaattagaaaactcaagcagttcttttcgagtgtagtgcacctcctcatgggtcatgctgtcaatgtcacctctagggacctgccagg

SEQ ID NO: 580515 - DNA, 570 bp, Homo sapiens
atttaaattttgtagctgagtgactgtggttcccactgttaaatctgacatacagagaagagcaattacagggctcttcaaagatgcaggtgctgccttcacaaatgtattttgtaaggcactggtcaagggtatatcttctggaccctcccagctaggatgagtatgtctaaagtgatgaacccactctaccatccaatctccctaagcctttggatcccttcctctgcattaaaccaagggagatcaggcatttccagctcactcacagtgggccatcttttaatccatatttcagcttaccaaacaaataaactattagaaccttttttaactccccaagctgcaacattaaatgtagagtccctactcattgggcccaaatcaataaattcagcctgatccaactctttgttccttccaccgttatcccacacccttaatatccatcccatgtctgttctccagatttatgtttatataaattagaaaactcaagcagttcttttcgagtgtagtgcacctcctcatgggtcatgctgtcartgtcacctctagggacctgccagg

SEQ ID NO: 580516 - DNA, 188 bp, Homo sapiens
agaatttcaactgaaaaatacaattaaaatattaaagttttaaaaatataaaattacctgaggatgttctaagagaagaaatcttggaaatcaacaggttaacttgtgatgcatttttatatttctcatgatgcctaggtcttagatattayaggcaaataccaaaacaccaaattatatttttattt

SEQ ID NO: 580517 - DNA, 396 bp, Homo sapiens
tacatgcaaggaggcaaggaggcaaggagtgagctgaratcgcgccattgcactccagcctgggtgacagagcgagactccatctcaaaaaaaaaaaaagaaaaagaaaaaaagaaatccttgcaaggtgccgtgaagtgcaaaggaaggggtttcactccccagggggtcttgctttcttgaaaaaagtctctacccatgagcagtatactcttttgtcagtttcctacttcctgcctcactcattgactctaaaaaagggggacagttttctactttctgtctgcatgatagtaaggcgaccaagcagcttgtacaagtgctccattcttccctctttggcctgaggtggatccataaaaggctagtctggggtcaaactcaaatttgctttaa

SEQ ID NO: 580518 - DNA, 396 bp, Homo sapiens
tacatgcaaggaggcaaggaggcaaggagtgagctgaaatcgcgccattgcactccagcctgggtgacagagcgagactccatctcaaaaaaaaaaaaagaaaaagaaaaaaagaaatccttgcaaggtgccgtgaagtgcaraggaaggggtttcactccccagggggtcttgctttcttgaaaaaagtctctacccatgagcagtatactcttttgtcagtttcctacttcctgcctcactcattgactctaaaaaagggggacagttttctactttctgtctgcatgatagtaaggcgaccaagcagcttgtacaagtgctccattcttccctctttggcctgaggtggatccataaaaggctagtctggggtcaaactcaaatttgctttaa

SEQ ID NO: 580519 - DNA, 396 bp, Homo sapiens
tacatgcaaggaggcaaggaggcaaggagtgagctgaaatcgcgccattgcactccagcctgggtgacagagcgagactccatctcaaaaaaaaaaaaagaaaaagaaaaaaagaaatccttgcaaggtgccgtgaagtgcaaaggaaggggtttcactccccagggggtcttgctttcttgaaaaaagtctctacccatgagcagtatactcttttgtcagtttcctacttcctgcctcactcattgactctaraaaagggggacagttttctactttctgtctgcatgatagtaaggcgaccaagcagcttgtacaagtgctccattcttccctctttggcctgaggtggatccataaaaggctagtctggggtcaaactcaaatttgctttaa

SEQ ID NO: 580520 - DNA, 643 bp, Homo sapiens
ttcttcacagggcagcaggacacactgaatgcaygcaggggaaatgtcagatgcttattaaaccatcagatctcgtgagactcactattaagagaacagcatggggaaaaccacccccactattcaattatctccacctgatccaccctcaaaatgtggggattatggggtttataattcgggatgagatttgggtagggacacagtctagtcatatcaaacccccaactaacatgtgatctcctccaaatacaatcaaaaacttattttgtgtccaacacctcaaaaaggcttacaatgggaagccatccaatttctagagattgcactgaggtgcttttatggctgaggcatcaatttgtaaagactgaatataatagtgtccagctgaaattaactccatatactgtctgcatagttatgtgggctctgtttaatgtaaaatattgcctttgactgtaggaattccctattttcactccaaaagtcaagcaattctgtagaagtggtctttgacagcatggggtaagataacaagtcaatctcttaaaaattgtactacacaatgccttgcctcttatttatttgctgttaatgtgtcaccatcaacactttaagtcataatcagaatacaatgttttta

SEQ ID NO: 580521 - DNA, 346 bp, Homo sapiens
gaacacatttttcacaaaaattaaagcttttcctatttaatgtccttccttttcagatttttttttctgatacagaattttattctgtcacacaggctggagtgcagtggcactaacagggctcacagcagcctccacctccctaggctcagatgatcctctcagctctgcctcccaagtagctgggaacacaagcacatgctaccacggctggataatatttttatgtttgtaaagacaaggtctccctatgtttcctaggctgtttttgatattctgcactcaagcaattcacycacgttggcctcccaaactgctgggattacagctgtgagccacccaccca

SEQ ID NO: 580522 - DNA, 583 bp, Homo sapiens
gtctttcttctccccacctctcctgctgtattctaaattcttcaaagttacatactttctataatttatatctgtattcctaaagcagaaagccttgaaaatggttttctgaaggaaaaaatggtgctactagccagttcatgtcttatgaatcaagtttaaagactctaaatccattaccygctcaaaatttcatcttctgtttttttctagtgtggttaaaaaaataggacattctttcatttttatatcaggcttaatggaatgcttatggaactgtgtgtttttaaacagacatgactcaaaaataggtgcataaagagagaattcttggcttcctgtgggaaaaaacaaataaagcaaacatttaaaaaacttccaccaaaagatatgcaagttatagtgtcataccaccaatgggactatacacattctgaagaggaaatagcccatgctgtgtctaagtattcccctactgaaatgagagagaaacacctataagtgagcatttgtgatcttattaccacctcagaaatcaacatcaactgaccctcaaaaggagtggtttaagcaaagaactttt

SEQ ID NO: 580523 - DNA, 505 bp, Homo sapiens
tgggcttgagcatgtgggcatagctgggttgtcctgcactgcctgaagagctgcaagagaccaggaatatcatgaacagtggtatccctctttgttcttatagcctcacctatggaggaagctacaaaagaggaaatacattcctagaggacaatcytaatctagtcattaacatagttgagtgcgtttgctgctaatggagcacatttcaagccagagatttctaggtatgcattacagggaggatctactttcatatttgagcataagtatttctacaagcatcttagataaaaacagagaggaagcttttcaaggccatgcatgataaaacactcaggaaacagtcaatgagtgatataaaatagttaaaatatgatttgttttcaaaggattcaaaccctaggataaaatttaatgggagcaggtcttaattaacactaattaatttttaaaatatgtgtttatccttttatttatttacctaatagacatggtagtaaac

SEQ ID NO: 580524 - DNA, 296 bp, Homo sapiens
ataggtaggtccacttggaaatatagtctgctcatttttaaagaaaacatatttcctgtgcttaggtttgtttactgagaatagaacaarggactgaaaatgtagaaaagaaaactattgtttctttgtcactgattttactgtacctatattttggtgaaatagattaaaataaaacacacaggcatatactaatacatactcatgtttatgtataacaaatagaaattttattaagcattgaaatatttttaaaagttttttattgaggtataattgacaaacaaaaattatat

SEQ ID NO: 580525 - DNA, 581 bp, Homo sapiens
tttaattgacaaataattttgtcatataataattttgttaatacttgacaaatawcaattgataaataattatatatttatggggtacagtgtaatgttttgctatgagtgtatgatgtagaatgattaaatccggctaataagcatatgtatgatctcaaatatttatcatttctctgtgccaagaatatttaaaatcctttctttaaaataaacaatacaaaattattaattatattttctttgctgtgcaatgaaacgtcagaactgtgtctcttatctaacagtagctttgtacccactgaccaacatctccccttttcccgtccacactctcttcagagccactggtaactgtctttctattttctacttctatgagttcaatgtttttatattccacatacaagtgagatgatacagtatttgtctctctgtgcctggtgaatttaacttaacataatatcctctaggttcagccatgttgttgcaaatggcagaatttcctgtgtttttaaagctgaataatattttattgcatatatacatcacattttaaaaatattcatctaatgatgaac

SEQ ID NO: 580526 - DNA, 581 bp, Homo sapiens
tttaattgacaaataattttgtcatataataattttgttaatacttgacaaataacaattgataaataattatatatttatggggtacagtgtaatgttttgctatgagtgtatgatgtagaatgattaaatccggctaataagcatatgtatgatctcaaatatttatcatttctctgtgccaagaatatttaaaatcctttctttaaaataaacaatacaaaattattaattatattttctttgctgtgcaatgaaacgtcagaactgtgtctcttatctaacagtagctttgtacccactgaccaacatctccccttttcccgtccacactctcttcagagccactggtaactgtctttctattttctacttctatgagttcaatgtttttatattccacatacaagtgagatgatacagtatttgtctctctgtgcctggtgaatttaacttaacataatatcctctaggttcagccatgttgttgcaaatgrcagaatttcctgtgtttttaaagctgaataatattttattgcatatatacatcacattttaaaaatattcatctaatgatgaac

SEQ ID NO: 580527 - DNA, 581 bp, Homo sapiens
tttaattgacaaataattttgtcatataataattttgttaatacttgacaaataacaattgataaataattatatatttatggggtacagtgtaatgttttgctatgagtgtatgatgtagaatgattaaatccggctaataagcatatgtatgatctcaaatatttatcatttctctgtgccaagaatatttaaaatcctttctttaaaataaacaatacaaaattattaattatattttctttgctgtgcaatgaaacgtcagaactgtgtctcttatctaacagtagctttgtacccactgaccaacatctccccttttcccgtccacactctcttcagagccactggtaactgtctttctattttctacttctatgagttcaatgtttttatattccacatacaagtgagatgatacagtatttgtctctctgtgcctggtgaatttaacttaacataatatcctctaggttcagccatgttgttgcaaatggcagaatwtcctgtgtttttaaagctgaataatattttattgcatatatacatcacattttaaaaatattcatctaatgatgaac

SEQ ID NO: 580528 - DNA, 391 bp, Homo sapiens
gcatgtacctttttctctctcgaacttaaagcaaattaaaatagacctaggtaaattctcagataaccctgatggctatattgatgttttacaagggttaggacaatcctttgatctgacatggagagatataatgttactgctaaatcagacactaaccccaaatgagagaagtgtcgccawaactgcagcctgagagtttggcgatctctggtatctcactcagtcaggtcaatgataggatgacaacagaagaaagagaacgattccccacaggccagcaggcagttgccagtgtagaccctcactgagacacagaatcagaacatggagattggtgctgcagacatttgctaacttgcgtgctaggaggactaaggaaaactaggaa

SEQ ID NO: 580529 - DNA, 391 bp, Homo sapiens
gcatgtacctttttctctctcgaacttaaagcaaattaaaatagacctaggtaaattctcagataaccctgatggctatattgatgttttacaagggttaggacaatcctttgatctgacatggagagatataatgttactgctaaatcagacactaaccccaaatgagagaagtgtcgccataactgcagccygagagtttggcgatctctggtatctcactcagtcaggtcaatgataggatgacaacagaagaaagagaacgattccccacaggccagcaggcagttgccagtgtagaccctcactgagacacagaatcagaacatggagattggtgctgcagacatttgctaacttgcgtgctaggaggactaaggaaaactaggaa

SEQ ID NO: 580530 - DNA, 391 bp, Homo sapiens
gcatgtacctttttctctctcgaacttaaagcaaattaaaatagacctaggtaaattctcagataaccctgatggctatattgatgttttacaagggttaggacaatcctttgatctgacatggagagatataatgttactgctaaatcagacactaaccccaaatgagagaagtgtcgccataactgcagcctgagagtttggcgatctctggtatctcactcagtcaggtcaatgataggatgacaacagaagaaagagaacgattccccacaggccagcaggcagttsccagtgtagaccctcactgagacacagaatcagaacatggagattggtgctgcagacatttgctaacttgcgtgctaggaggactaaggaaaactaggaa

SEQ ID NO: 580531 - DNA, 617 bp, Homo sapiens
atgtaactttaaagtaaattttattaagaaaaaaagcccagattattttgtaatttcttaagaacagaacaggtccaatgacacatcaattgaggcaaaatatctgatatggcttagatttgtgtccctgcccaaatctcaagttgaattgtaattcccaatgttggaggagaggcttggtgrgtggtgattaaatcatggaggcagactttccccttgcttatgataatgagtgagttctcatgagatctggttgttaaaaagtgtgtagacctccccactctctctcttcctcctgctccagccacataagatgcgcctgcttcccctttgctttccgccatgattgtaaatttcctgaggcctccccagccatgcttcctgtacagcctgcagaaccatgagctattaaacctcttttctttataaattacccagtctcaggtatttctttatagcagtgtgagaatggtctaaaccaatgtccaatgataatatctatcaagtcttaatgcatgtcactgcagcactgctgtgaagagacttgagacaatatttccctaaagtagtggttctcaagcttcaatgtgtagaattatctggcaagtgtgttaaaa

SEQ ID NO: 580532 - DNA, 617 bp, Homo sapiens
atgtaactttaaagtaaattttattaagaaaaaaagcccagattattttgtaatttcttaagaacagaacaggtccaatgacacatcaattgaggcaaaatatctgatatggcttagatttgtgtccctgcccaaatctcaagttgaattgtaattcccaatgttggaggagaggcttggtgggtggtgattaaatcatggaggcagactttccccttgcttatgataatgagtgagttctcatgagatctggttgttaaaaagtgtgtagacctccccactctctctcttcctcctgctccagccacataagatgcgcctgcttcccctttgctttccgccatgattgtaaatttcctgaggcctccccagccatgcttcctgtacagcctgcagaaccatgagctattaaacctcttttctttataaattacccagtctcaggtatttctttatagcagtgtgagaatggtctaaaccaatgtccaatgataatatctaycaagtcttaatgcatgtcactgcagcactgctgtgaagagacttgagacaatatttccctaaagtagtggttctcaagcttcaatgtgtagaattatctggcaagtgtgttaaaa

SEQ ID NO: 580533 - DNA, 617 bp, Homo sapiens
atgtaactttaaagtaaattttattaagaaaaaaagcccagattattttgtaatttcttaagaacagaacaggtccaatgacacatcaattgaggcaaaatatctgatatggcttagatttgtgtccctgcccaaatctcaagttgaattgtaattcccaatgttggaggagaggcttggtgggtggtgattaaatcatggaggcagactttccccttgcttatgataatgagtgagttctcatgagatctggttgttaaaaagtgtgtagacctccccactctctctcttcctcctgctccagccacataagatgcgcctgcttcccctttgctttccgccatgattgtaaatttcctgaggcctccccagccatgcttcctgtacagcctgcagaaccatgagctattaaacctcttttctttataaattacccagtctcaggtatttctttatagcagtgtgagaatggtctaaaccaatgtccaatgataatatctatcaagtcttaatgcatgtcackgcagcactgctgtgaagagacttgagacaatatttccctaaagtagtggttctcaagcttcaatgtgtagaattatctggcaagtgtgttaaaa

SEQ ID NO: 580534 - DNA, 536 bp, Homo sapiens
aatttatttttcaaaaaagaaatgcaggccgggcacagtggttcatgcctgtaatcccaacactttgggaggctgagacgggtggattgcctgaggctggaagttggagaccagcctgaccaacatggagaaaccccatctctactaaaaagacaaaatccrccgggcatggtggctcatgcctgtaatcccagctacttgggaggctgaggcaagagaatcgattgaacccgggaggcagaggttgtggtgagccgagattgtgccattgcactccagcctgagcaacaagagcaaaactccatctcaaaaaaagaaaaaaaaatgcaaataaataaagaaatattccatttcactactaatgaaagaaatgcaaattatactaaaaataagatgccattttctagttgtcatattgacaatggttaaaaaaataataataatgtgtcagagtggatgaggaaaaatgagtactcttatacactgttgacaagagtaaactagtcaactttcctggggggcattttggcaatagg

SEQ ID NO: 580535 - DNA, 610 bp, Homo sapiens
gaagctggaaaccgtcattctcagcaaactatcacaagatcagaaaactaaacaccacatgttctcactcataagtgagagttgaacaataagaacacatggacayggggaggggaacatcacacactggggaacatcacacactggctaggggagggataacattatgagaaatacctaatgtaggtgacaggttgatggttgcagcaaaccaccatggcacgtgtatacctatgtaacaaaactgtaccttttgcacatgtaacccagaacttaaagtatgttaataaaaaaaagaaaaccttccctgactactcatctagttgttcccatccctgatttacccaagctcttgtcacattattcattagtttatgtgtctgtcttgctgacaaatttgtaagattcttgcaagaatcatatctttttcattatatcctctttgtgcctggcatatagtaggtacaaattgatgtttagtcagtgaatgaattaattcattattagtaaacatgttcctcctcagccagtcattaaagaacaatgggtgaaagaggcactaagtcagtcaacaccttcaacagccttcagattgggaattaaacattca

SEQ ID NO: 580536 - DNA, 610 bp, Homo sapiens
gaagctggaaaccgtcattctcagcaaactatcacaagatcagaaaactaaacaccacatgttctcactcataagtgagagttgaacaataagaacacatggacatggggaggggaacatcacacactggggaacatcacacactggctaggggagggataacattatgagaaatacctaatgtaggtgacaggttgatggttgcagcaaaccaccatggcacgtgtatacctatgtaacaaaactgtaccttttgcacatgtaacccagaacttaaagtatgttaataaaaaaaagaaaaccttccctgactactcatctagttgttcccatccctgatttacccaagctcttgtcacattattcattagtttatgtgtctgtcttgctgacaaatttgtaagattcttgcaagaatcatatctttttcattwtatcctctttgtgcctggcatatagtaggtacaaattgatgtttagtcagtgaatgaattaattcattattagtaaacatgttcctcctcagccagtcattaaagaacaatgggtgaaagaggcactaagtcagtcaacaccttcaacagccttcagattgggaattaaacattca

SEQ ID NO: 580537 - DNA, 565 bp, Homo sapiens
cattcacataatttttttcatggaaaaatgtacagsatattattatttttgatgttaataagcatggagaggaatatttttgtgataatgtttcatgacctgtatatgatattgtgtgtaataattatctgctagattgtaactgtagaaaggacagataaacttatatattgttggtgatcttgtctgcagattacatacaattttttggtgcaaattatgtatagctacttgtatcaaacagataaattgcaacgtacatgttattttgagccttcccttccttacttttttttcttttgctttagagtataatttagaaaggagttattatcatcactggatacctgagtgtatagtacctactaaagttccaggcacaaggactaacttgtgaataatgtagttaagatccctgttatcatagaacttatagtctagtagtatggcagacaataaagaagtcttatagagtgagacaatttcagacaatgataagtactatgaagaaaattaagtaagaacatgtgatagagaattactgctttaaaaagactggggaagt

SEQ ID NO: 580538 - DNA, 565 bp, Homo sapiens
cattcacataatttttttcatggaaaaatgtacaggatattattatttttgatgttaataagcatggagaggaatatttttgtgataatgtttcatgacctgtatatgatattgtgtgtaatrattatctgctagattgtaactgtagaaaggacagataaacttatatattgttggtgatcttgtctgcagattacatacaattttttggtgcaaattatgtatagctacttgtatcaaacagataaattgcaacgtacatgttattttgagccttcccttccttacttttttttcttttgctttagagtataatttagaaaggagttattatcatcactggatacctgagtgtatagtacctactaaagttccaggcacaaggactaacttgtgaataatgtagttaagatccctgttatcatagaacttatagtctagtagtatggcagacaataaagaagtcttatagagtgagacaatttcagacaatgataagtactatgaagaaaattaagtaagaacatgtgatagagaattactgctttaaaaagactggggaagt

SEQ ID NO: 580539 - DNA, 524 bp, Homo sapiens
tagtagcctcaaattcctggtatcaagcaaccctcccacctcagcctcccaagtagccaggacaacacacatgtaccaccatgtctggctaatttatttttatttttgtagagataggatctcactatgttgcccaggctggtctcacactcctggtctcaagctatctgtcccacctgggcctttcaaaagagctaagattataggcatgagtcaccatgcctggccgagttctgcatcttgwttgctgcagtgcttgcatgaatctacatgtgacaaaatgaaacagaactacaacacatacatttaccaatgtcagtatactggtttgaaatattgtcctacaagtctgtaaaatgtaaccaatgggggagactgagtgcagagtacatgggcttctgtgtgccatttttacaactttcagtgaatctctaattatttctaaataaaaagatttttcaaaaggaagacagaataactaaatcaatagtaattagcagtatctacattctcaagtttccaaa

SEQ ID NO: 580540 - DNA, 439 bp, Homo sapiens
taaactcctgtctaaattacctcaattcgcaagtcaataacctagcagaaagagttggtccatttccaggcataagtactgtgcagtttctgctttctaaatactmtatctgacaatgaatggaaacattcaagatacaaaaaagcaaggaaaaaaccccacaatacgctatcaggagacaatatcttcaacagaatgagactaagagagccatatatgttggaattagtaggtagaaaattcaaattaactatgattactatgataacatctctcatgaaaaagttataaacaaataagaaacttcagcagaaagttagaaactctaagagtaaaatggaaataacaaattcagcttaaatttgattgctgtatacatgactatttttatatcttgttactctttccctcttgttactttaatctattgcatttttta

SEQ ID NO: 580541 - DNA, 574 bp, Homo sapiens
gtaacatgcctaatatctgcctagggatacattccttttattccattaaaatattaaaaataaagggagatatgggatgtctaggcttttggttcccaggtaactgatggggtgctagacaaagggggggcygtctgggtgtctgaatgggtttgtctgaaggctcagttctgcaatagtagcaaacctaagggactcattccctggtaattaacctaactttgaaccatttacatgggagcagatgttcattcttttttcttcctctcagactttttttttctattccatatcaataaaatgaaaatttaggcaagctagctggcaagctaatctctaagtttctttctagggctaagacttacaatttcccttatctcttcagttcaatttatcaactatttattgtgcttctttcttctctccttcttcaaaatagatttttaattaagtgactttatattcatctacactttattaggtgattgatttcctagatttatttgaaagggaaggatagcactcaattagacaactacatttatatctatactctgttctgttaacaatgtta

SEQ ID NO: 580542 - DNA, 574 bp, Homo sapiens
gtaacatgcctaatatctgcctagggatacattccttttattccattaaaatattaaaaataaagggagatatgggatgtctaggcttttggttcccaggtaactgatggggtgctagacaaagggggggccgtctgggtgtctgaatgggtttgtctgaaggctcagttctgcaatagtagcaaacctaagggactcattccctggtaattaacctaactttgaaccatttacatgggagcagatgttcattcttttttcttcctctcagactttttttttctattccatatcaataaaatgaaaatttaggcaagctagctggcaagctaatctctaagtttctttctagggctaagacttacaatttcccttatctcttcagttcaatttatcaactatttattgtgcttctttcttctctccttcttcaaaatagatttttaattaagtgactttatattcatctacactttattaggtgattgatttcctagatttatttgaaarggaaggatagcactcaattagacaactacatttatatctatactctgttctgttaacaatgtta

SEQ ID NO: 580543 - DNA, 562 bp, Homo sapiens
ggacagtaaggtggggcacatggggtagggattgaacttcagagggtggtttaggaaatagataatcctagaagtttagatttaatgtaatcagcataaagaagtcatakttctggagcaagaaagtaatttgatgggggctgtgttttgagattacttggtaatagcaagcaggaggacagctccccctcaggaccagaaagggaagggaaacagcctcctaggactgcaatctcagcaccactttcagtctcactgatggccagctctcctgggatgctttgatgtcacagaagcaactgataaggggaaatgcattcagttttgatcttccccttgagagggtctgaaatgatcaaagagtgaccaagcctacctgatatggttaatctttgtgtccccacccaaatctcatcttaaattataatccccataatccacatgtgtcgagggaaagaccaggtagaagtaactgaatcatgctcttctttcccccatgctcttctcatgatagtgagcaagttctcctgagatctgatggttttataaggggttcttctcc

SEQ ID NO: 580544 - DNA, 562 bp, Homo sapiens
ggacagtaaggtggggcacatggggtagggattgaacttcagagggtggtttaggaaatagataatcctagaagtttagatttaatgtaatcagcataaagaagtcatatttctggagcaagaaagtaatttgatgggggctgtgttttgagattacttggtaatagcaagcaggaggacagctccccctcaggaccagaaagggaagggaaacagcctcctaggactgsaatctcagcaccactttcagtctcactgatggccagctctcctgggatgctttgatgtcacagaagcaactgataaggggaaatgcattcagttttgatcttccccttgagagggtctgaaatgatcaaagagtgaccaagcctacctgatatggttaatctttgtgtccccacccaaatctcatcttaaattataatccccataatccacatgtgtcgagggaaagaccaggtagaagtaactgaatcatgctcttctttcccccatgctcttctcatgatagtgagcaagttctcctgagatctgatggttttataaggggttcttctcc

SEQ ID NO: 580545 - DNA, 562 bp, Homo sapiens
ggacagtaaggtggggcacatggggtagggattgaacttcagagggtggtttaggaaatagataatcctagaagtttagatttaatgtaatcagcataaagaagtcatatttctggagcaagaaagtaatttgatgggggctgtgttttgagattacttggtaatagcaagcaggaggacagctccccctcaggaccagaaagggaagggaaacagcctcctaggactgcaatctcagcaccactttcagtctcactgatggccagctctcctgggatgctttgatgkcacagaagcaactgataaggggaaatgcattcagttttgatcttccccttgagagggtctgaaatgatcaaagagtgaccaagcctacctgatatggttaatctttgtgtccccacccaaatctcatcttaaattataatccccataatccacatgtgtcgagggaaagaccaggtagaagtaactgaatcatgctcttctttcccccatgctcttctcatgatagtgagcaagttctcctgagatctgatggttttataaggggttcttctcc

SEQ ID NO: 580546 - DNA, 572 bp, Homo sapiens
atctcagcagtttgggaagctgaggtggcaggatcacttgagctcaggagttcaagaccagcctgggcatcaacacaagaccttgtctctactaaaataattttctaagaatagctggatatggtggtgtatgcctgcagtccctgctgctctggaggctgaggtgagaggattgcttgagcccaggagactgaagcttcagtaggctatgatcacatcactacactccagtctgtgtaacaraatgagatcctgtctcaaaaaatttaaaaaataaaatgaaaaagaagatgctacgtacattatacacatataaattagtaaccaaatggtttaacaacctcagtgattgtgttgttctgtagtttgatgacttttatcttgctccttctcattgccattgattgtaccaggttatttcctggagcatgttgtatatcaaggtttatgcaactgtacatttaacctttcagtgcctagctttccccttttcctatagaatcacaagaatttgaaggcaacacaatatgttttctatcttatagtctgaagttaatgcatattaatggcat

SEQ ID NO: 580547 - DNA, 545 bp, Homo sapiens
tagcagatgatgaatgctgccaggactgggttctttccttcaaataaaaaggtttccttctggcccagaatgtgtctagaaatgttgtctgggagctagggcctcatgactctgaccagtgtccaatcctgctatggctgagctggtatccaagatgcaggacaaagtcttccccactttttccctcccccatcttcaagtggaaggaaaggatctcttttggagccacaagatatgcagcctggggttaggggcagggtgatgttagcactcccttagctgccctggctagtgtctcagtagatcaggtgccccccccccmacccaagttgaatgtctctgggcctagtttagcactaggacttgcttaagagtttcagtccttatggcctggactgcctttcaaatttacttggagacacagagcactgtagcccttcagtggtgaggtttgtgggaactcaagttctgacctgctgacatcctcaattaccctttggctagagctggtttatatgctccctctgtgggtgggtatcagctga

SEQ ID NO: 580548 - DNA, 545 bp, Homo sapiens
tagcagatgatgaatgctgccaggactgggttctttccttcaaataaaaaggtttccttctggcccagaatgtgtctagaaatgttgtctgggagctagggcctcatgactctgaccagtgtccaatcctgctatggctgagctggtatccaagatgcaggacaaagtcttccccactttttccctcccccatcttcaagtggaaggaaaggatctcttttggagccacaagatatgcagcctggggttaggggcagggtgatgttagcactcccttagctgccctggctagtgtctcagtagatcaggtgcccccccccccacccaagttgaatgtctctgggcctagtttagcactaggacttgcttaagagtttcagtccttatgscctggactgcctttcaaatttacttggagacacagagcactgtagcccttcagtggtgaggtttgtgggaactcaagttctgacctgctgacatcctcaattaccctttggctagagctggtttatatgctccctctgtgggtgggtatcagctga

SEQ ID NO: 580549 - DNA, 397 bp, Homo sapiens
acattccagaaaaaaaattaaggcaaacaattcattgacaatagcctaataaaatacttggaaataaattcaatcaagaaggtacaaaatgtgtacaccaaacaaagaaacattgcaaaacaaaattaaagaagacacaaataaatggaaagatatcctatgttcatggattggaagacttaatattgtcaaggcagcratagtacccaaagaaatctacatagtcaaaataattcttttcaaaatcccaatgatatttttcgagaaataaaaatcccattctaagattcatacataatttcaagggacacagaatagtcaaaaacaaccttgaagaaacataacaaagttgaagaactctcacgctttctgatttcaaaatgtactacaacattac

SEQ ID NO: 580550 - DNA, 397 bp, Homo sapiens
acattccagaaaaaaaattaaggcaaacaattcattgacaatagcctaataaaatacttggaaataaattcaatcaagaaggtacaaaatgtgtacaccaaacaaagaaacattgcaaaacaaaattaaagaagacacaaataaatggaaagatatcctatgttcatggattggaagacttaatattgtcaaggcagcaatagtacccaaagaaatctacatagtcaaaataattcttttcaaaatcccaatgatatttttcgagaaataaaaatcccattctaagattcatacataatttcaagggacacagaatagtcaaaaacaamcttgaagaaacataacaaagttgaagaactctcacgctttctgatttcaaaatgtactacaacattac

SEQ ID NO: 580551 - DNA, 546 bp, Homo sapiens
ggaaacaacccaaatgtccatcaaaacatgaatgaataaacaaaatgtggtgtacacatacaatgaaacattatcgaaccataaaaaggaatgaagttttgacacatgctacaacatgggtaaaccttcaaaacatgctaaatgcccaatgttacacctgctgtgccaccaccactgccagtgcatagtacatgggcaccagcaatcctgcccctgctacatcactgctgcaggtgcaaccatgtgcagaggcactggggcaaccccaccaacaccctgtccctactaccactcctaccccaaatactagcgcaaatgctagcaattscacctctgcagatgctccttcccagacaatgcacatgcaccttatcacactgctacagctgttggcatgcatgagcaagcatggatccaactgccactgcctcaacaaagcactttggctggtacccctccaccagagtattgtggccagctgaatggggatacctaagaccatccagcacagcaggctcctaacctcaaggggccagaaaacaaagc

SEQ ID NO: 580552 - DNA, 551 bp, Homo sapiens
tcgtgaaacacatggctgccagtctaggttattacattgatcttcatcaaggaaaaaaaaaaaagaggtattactcaggagaagcatggtcaagagaaagtagcctcattatttttcaaaaccaagaaaagtattataagcgatttatatttttatatatatttcccagtccctaaacccttcagcagtaatcaaacgtcatttagaaattatgttactattacatatagaattccyattcgcctaaaaatgacttaaaagcaaaaaaaaataccatttgtagtatatttcttgaaacctctaagtaataaataaaattgtgaagcactcattttttcattttaacatttgaaacacatttgggaagatttaatagacttgctactgatcctttattttatttatttattttttttttgagacagggtcttgctctgtcatccaggctggagttcaggggtacaatcatggctcactgcagccttgaactcctgggctcaagctatcctcccacctcagcttcccaagtagctgggactacaggcatgtgc

SEQ ID NO: 580553 - DNA, 579 bp, Homo sapiens
tattttgagtacccccaaaagctattgccatgatgtttgcttttgactgtttttgctttgacgggaccactttcagctttggattgggctttgtcttcaggattgtacaggtaaagccacatttcatttcctgatacaattcttagaagaaatatttcaggatcttcatcccatttgcttaaaatttcccttgaaagctctttacttgtctgtagctaatctgggcacaaaagttttagtacccattgggtgaaaagtttgctcaactttaatttttcagtcagaattatataagctgaaccaattgagatgtctatggtattggttattgtttgtgctgttgttaatcatcagtcgtcttcaattagggtgccaacaagatgaaattttgccttgcaaattatgtggatggtctgctgctgcacgcttcctcttcaacataatctcgtttccttttattgacagttattcgtgttcaaactgctgatttatttgggkcattgtcctcataaacattttttaaagcatcaatgatttcagcagtcttccacccacatttcaccacaaatttgatgtttg

SEQ ID NO: 580554 - DNA, 433 bp, Homo sapiens
ctctcaatgaggcctactgtcaccatcctacttaaaatcacagtccctggcatttctgattccctttcccagctctagacggtgatagaatgtgtcatcatcttacatactagataacttatttatgtttattattatcatttgtctatcaagaatgtaagttctatgagggtagggatgtttatctattttgttcatggctatatccccaggggacagaatgatgcttgttatatagtaagcacttaataaactagttgaaaaatacmtacagtttatgagtgtatatacaaaatatttcctactcataatatatatgtatatatgtatgaatgtatgtgtatcccatcttatttagcaagaactcaagacaccaacacaaacatacatatgtgtgcacacacacacacacacacacacacatacacacatt

SEQ ID NO: 580555 - DNA, 619 bp, Homo sapiens
agatcttacttgcactggagtccagacagtgcagtggagaattctgtttttgtgatggcagrtatagtattagccaaatcttgcctccagattattgttataattgtttcaagtaaacgttttaagcaaggtggtcttcagaagggcacttgaaaggactgagagtgggaatgttatcaaattttcacagttttgttcatacttggtaaactgtgtttgtttaataatttggtttgagatttacatttatttataaactagtaataatgttgtggataaatatataaactgcatctccccccaaaattttgcagctaccaatattttctaaaaggaccttaacagttgcactgtctcaagtcagtttgcatcaacgtctgtccataagctcacagtcctatccagaattcctgcaatggataccttcctgggactcatgtcttaagcatcttctgggaattagtgtatggagaggctctagcaactaagcatctcttatgaaggtgtaaaacttttaataattaaggaaatgggagcatagtaaataagaattccaggggactccacagcctttattattcacataaactatgaatagagacattataaatatggaaga

SEQ ID NO: 580556 - DNA, 538 bp, Homo sapiens
tattttctttttaaaaattatttatttatttgtttattttatattttcaatatagagccaccaggattggctaattaattcaattcaaagtgtgaggaaaagagagaagttcaaggatgacttcaagttgtcttacctgagcaactgaaacagtggagatgccatttatgagtctgtaaagacttgggacaaatatttgtatggagaggagacaaaaaaagctttatttggggcttattaattttgaaataattagatttccaaatggagatgttgaaaaacttgagtttgaagctcagaggccaaaactgaaaacatacatttggkagacaaaaaaaaaaaaaaattaaaatcacctggagagagagtggctgaagacagcatcttggagcatcccctaaaattggaaataaccaaaataaagaagatacaccaaaagaaattgaaactggatatccatgggaaaaggaggaaaaccaggaaaagcttgctttcctggattgcaggtgaataaagtgattgaagaaggtagtgtggt

SEQ ID NO: 580557 - DNA, 538 bp, Homo sapiens
tattttctttttaaaaattatttatttatttgtttattttatattttcaatatagagccaccaggattggctaattaattcaattcaaagtgtgaggaaaagagagaagttcaaggatgacttcaagttgtcttacctgagcaactgaaacagtggagatgccatttatgagtctgtaaagacttgggacaaatatttgtatggagaggagacaaaaaaagctttatttggggcttattaattttgaaataattagatttccaaatggagatgttgaaaaacttgagtttgaagctcagaggccaaaactgaaaacatacatttgggagacaaaaaaaaaaaaaaattaaaatcacctggagagagagtggctgaagacagcatcttggagcatcccctaaaattggaaataaccaaaataaagaagatacaccaaaagaaattgaaactggatatmcatgggaaaaggaggaaaaccaggaaaagcttgctttcctggattgcaggtgaataaagtgattgaagaaggtagtgtggt

SEQ ID NO: 580558 - DNA, 538 bp, Homo sapiens
tattttctttttaaaaattatttatttatttgtttattttatattttcaatatagagccaccaggattggctaattaattcaattcaaagtgtgaggaaaagagagaagttcaaggatgacttcaagttgtcttacctgagcaactgaaacagtggagatgccatttatgagtctgtaaagacttgggacaaatatttgtatggagaggagacaaaaaaagctttatttggggcttattaattttgaaataattagatttccaaatggagatgttgaaaaacttgagtttgaagctcagaggccaaaactgaaaacatacatttgggagacaaaaaaaaaaaaaaattaaaatcacctggagagagagtggctgaagacagcatcttggagcatcccctaaaattggaaataaccaaaataaagaagatacaccaaaagaaattgaaactggatatccatgggaaaaggaggaaaaccaggaaaagcttgctttcctggattgcargtgaataaagtgattgaagaaggtagtgtggt

SEQ ID NO: 580559 - DNA, 583 bp, Homo sapiens
tccattaagtaggcttatgagagcaatctgttcttcaaagtaattatgrtgtcaaatagtttttattttcttctattcatttctgatttcctaccatgcataattctttttacttctcttctgccctggttctatcacatgcattgacatatattcacacattttcttctgacatacacccttccttctcatacactttgctatgtataattctcaaactgttgacacacacagttttgcttatactgtcatctctttcaaaccaattccaactgccttcaattctttcctgtatggttctaatgcactctgtgtcaattcctactctaagtaacttaacagtagttttaaatactgctaccacaaatactcaacaatgaggcctgctgaatgactacaaagactgtcatttcacagctgccttcctgttgtgaaatacttagtgggatgtgtggatatatgtgtgtgagagatttatatagaagaggagaaagaaaaattacacatatatatttataacctatttcctccctcttactactgctctggaacaagatatgggcagtagaatccctcaccaaga

SEQ ID NO: 580560 - DNA, 553 bp, Homo sapiens
agtaagcagcaagtttgtttttaggtaaatggagctgccatcttatcaatatttccttttcccccaaataaatatggtttctccaaacaagtatactttaaagcataggtattccctagtacccaaaataacaaaaatgctcagttctgtagtctttatattaatccccccaaaatagtgacacagaatgttcagtctttgaaagtgtgtggttagagcctttgctgcaaacaccattagaacaaaactgatttgaaattctgcttcctctaactaccagtgccagccagcccattgtyttctaccactgtggctatcagaagtgcaaaagggcacacatccattcaacaagtatctgcagggaaggaaaccacctctccttgctcagatgtcaaacaaaatcaataatcatttgctaaggaaaggaaaagggagacaagaactgacccctttcacctcaaatttctcatttcttccttgtctaggctgtacagaaatccatgtaactgttttccctttaatgatttcttctgccttctgcatctcaccaatt

SEQ ID NO: 580561 - DNA, 533 bp, Homo sapiens
ggttagcaggggaatgtcaattatgaaagagttttttttcagatagaatagaaaccaatgagggattgacataattgcaacatgccatttcactattgaggagaataaatgctcatttgtactatgtggccctacatattttaacatgtaactmcagatcattagagaagtttgatttcaaattaaatatttaattggttgggtgcagtggtggctcacccctgtaatcatagctttttgggagtttgaggctggaggatcacttgagctcaggagttcgagaccagcctgggtcacttgggaagcccttgtcttacaaaaaaaaaaaaaaaaaaaaaaaaaaggtgggcatgttgtgttggtgtacacctgtagttccagatactcaggaagttgagataggaagagtactggagtccaggagctagaagctgaagtgagcttgcactctggccagggcgacagagcaaggccctctctctgaaaaataaagaaataaaaatacgaataaacaaatatttaataaaattatg

SEQ ID NO: 580562 - DNA, 533 bp, Homo sapiens
ggttagcaggggaatgtcaattatgaaagagttttttttcagatagaatagaaaccaatgagggattgacataattgcaacatgccatttcactattgaggagaataaatgctcatttgtactatgtggccctacatattttaacatgtaactccagatcattagagaagtttgatytcaaattaaatatttaattggttgggtgcagtggtggctcacccctgtaatcatagctttttgggagtttgaggctggaggatcacttgagctcaggagttcgagaccagcctgggtcacttgggaagcccttgtcttacaaaaaaaaaaaaaaaaaaaaaaaaaaggtgggcatgttgtgttggtgtacacctgtagttccagatactcaggaagttgagataggaagagtactggagtccaggagctagaagctgaagtgagcttgcactctggccagggcgacagagcaaggccctctctctgaaaaataaagaaataaaaatacgaataaacaaatatttaataaaattatg

SEQ ID NO: 580563 - DNA, 512 bp, Homo sapiens
agatatgaactatcaagtcatgaaaagtcatggaggaaactcaaatggatattgtgaagtgaaagaagacaattggaaaaggctacataccatatgatttcaactatatgacacctgaaaaaggtgaaagtatggaaacagtaaaaggaccagtagttaccaggagttagtagggaaggaaggatgaagaggcatattactatggaatttttagggtcatgaaatggtatgtattggtggatacatatcattatacatttgtcaaaactaatagaatgtacaccactaaaattgaatgcaaattatggactttgaatgataatgttgtgtcaatataagttcatggattgtaataaatgtaccacttgggtgtaagagtttgataatggrggggagaggattgtgcataggtgggtgcaggaaggatatgagaaatctcaatacctcccactcaattttgctgtgaatctaaaactgctctaaaaataaagtctctttaaaaaaattaactt

SEQ ID NO: 580564 - DNA, 593 bp, Homo sapiens
ggaaccctgtgtcccagccactctagcttcaggcatagctgaaaggggcaaggtacagcttgatagcttgggccattgcttcagaggatgccagccccaagcattggtggcttccatgtggccttgggcttgtgggtatatagaagacaagagttgaggtttgggaacctttgcctagatttcagaggatgtatggaaatgcctggatgtccaggcaaaagtcwgctgcagaagcagagccctcatgaagaacctctactagggcgatgcagaggggaaatgtggggttggaacccacacacagagtccccactgaggcaccacctagtgcagctgtgagaagaaggccaccatcctctagaccccagaatgtcagatccactaacagcttgcaccatgcacctggaaaagcagtaggcactcaatgtcagctgatgaaagcagccgtgggggctgtaccctgaaaagccatagggacacagctgcccaaggacttgggagcccactcctggtgtcagtgtggtctggatgtgagatatgcagtcaaggcagattttggagcttaagatttaatggctgccatgctgggtttc

SEQ ID NO: 580565 - DNA, 689 bp, Homo sapiens
tattattttattcttataatgttagcagaaaacaaacattctaatttaaaacatacaatggagtttcttacactctgtatcacagaagtaatttcttttttttttggagtctggctctgttgctaagctggagtacagtgtcacaaactcggcttactgcaacctccacctcctgggtgcaagcaattctcctaccccagcctcccaagtagctgggactacaggcatgagccaccacacccaggtaatttttgtatttttagtagatacagggtttcaccatgttggctagtatggtctctatctcctgggtgagccaccatgcccagcccacagaaataatttctacaacacaactaaagatatagatgctgaaggcattgacacaacacctaataatatacaatgaacgtgaacaacacatacataaaktgtttgataaataatttaagtaaagcattgagaatctatgtgttttccttgcctcttatcaccattccttcattcaccaaacatttttagcatcatacagtgtatgaatcttataatatatcagtggtcatagagatctgtcactattagttaccactaattaagttgtttgaaacatcttagtctcttcaaatttttaggtcagcctattggcttaatttgtatagttaatttaactaagctgggaaaatgaagaa

SEQ ID NO: 580566 - DNA, 440 bp, Homo sapiens
aatctggacacatgtatacacacacacaggcacacacatctactttgatatgagtcagaaaaatagtttcctttggtgagaggagagggctgcttggggagtatcaccagtaacctttctttgttgacagaggcatttgctgatcaggatatgacttacactggcatatgcatttgtccaaactctttgaactgtacatttaagatttatgtattccattacttgcgaattttacttaattttttgcacatgaaaaattatattactggaaataatattaattcatgttgctgactgggactttcagaaaagaaagagtaattttcacttctcctccagattgagagatatttactaaggagaatactggagagagatctgccttccaacttctcgttttgtgagatgggtgggayactgctttctttctggtcctttcc

SEQ ID NO: 580567 - DNA, 590 bp, Homo sapiens
agacccattggtgtgctgtactcaagagacacatctcacatgcaaacacatataggctcaaaataagtggaatggaggaaaatttaccaagcatggaaaacatggagggggaagggcatctgccattactgargcttgagtaggcagttttcccttcacagtgtaaacaaagcctccaggaagttagaactgggcagagcctacctcagccctgcaaagccatactgcttgtctagattcctcctctctgggcagggcatctctgaaagaaaggcagcagccctagtcagaggcttacagataaaactcccatctccctgggacagtgcacctggaggaaggggcagctgtggtctcagcttcagcagacaaacgttcctgcctgctggctctgaagagagcagtggatctctcaccacagcactcaagttctgctaaggggcagattgccttctcaagtcagtccctgaaccctatgcctcctgactgagagaaacctcccatcaggggtcaacagacacctcataccggagagctctggctggcatctggcagctgcccctctggaacggagcttccataggaagaaa

SEQ ID NO: 580568 - DNA, 587 bp, Homo sapiens
ctgtagttttaactgtacaagtctttcacctccttagttaattcctatgtattttatttttcttgctgcaattacaaatggaatttaaaatttttttttcagattgttcattgttagtacatagaaattaaattgatttttgagtgcttactttgtatcctgctttttaaaattcatttattagttctcacatatttttatgtacttttaaaattttctacacacaacatagtaacatctgtcaagatagacaatttttcctttctttcctatttggttgtgtttatttcctaattgtgctgactagaactttccataatatgttgaataaaggtggtgaaattgagcatctctactttgtttctgattttattaaaaataatttcattcttttaccattgagtgtaatatttgctgtgagtttttaatctatggtctttattgtgttgaggtagctttyttctatttagtttattgagtctttttatcatgaagtgatgttgaattttttcaaatacattttctccaaaaattgagatgattttgtattattttctttattctgttattgtggtattgattagttt

SEQ ID NO: 580569 - DNA, 587 bp, Homo sapiens
ctgtagttttaactgtacaagtctttcacctccttagttaattcctatgtattttatttttcttgctgcaattacaaatggaatttaaaatttttttttcagattgttcattgttagtacatagaaattaaattgatttttgagtgcttactttgtatcctgctttttaaaattcatttattagttctcacatatttttatgtacttttaaaattttctacacacaacatagtaacatctgtcaagatagacaatttttcctttctttcctatttggttgtgtttatttcctaattgtgctgactagaactttccataatatgttgaataaaggtggtgaaattgagcatctctactttgtttctgattttattaaaaataatttcattcttttaccattgagtgtaatatttgctgtgagtttttaatctatggtctttattgtgttgaggtagctttcttctatttagtttattgagtctttttatcatraagtgatgttgaattttttcaaatacattttctccaaaaattgagatgattttgtattattttctttattctgttattgtggtattgattagttt

SEQ ID NO: 580570 - DNA, 479 bp, Homo sapiens
ttattatggctaggacttttccagaaattgaacattgacatgagtgtgattgacagatggaacagctcttaaagtgtggtcccagcacagtggttcacgcstgtaatcccagcactttgggaagctgaggtgggcggatcatgaagtcaagagatcaagaccatcctggccaacataacaaaattccgtctctacagaaaatacaaaaatttagctgggcatggtggtggggacctatagtcccagctacttgggaaactgaggcaggagaatcgcttgaatccaggaggtggagattgcagggaggcagaggttgcagtgagccgaaattgtgccactacactctagcctggagacagagaaagactctgtcttaaaaaaaaaaaaaaaaaaaaaaaaaaaaaattggtgtgatccagagaatcctggatgtccccagaaattctacaaggagtgcacaaggtcacagttatttttcc

SEQ ID NO: 580571 - DNA, 591 bp, Homo sapiens
tccaacactcctttaagtttataatttctttttctcttttcttttaatgattttcactagttctttttcaagtacctaatgttcatcattaaggtttttctgaaatagacaatggtctttaaaatacagggtttcaatgttatttccatctatgatgtgtcttcattttgaggaaacattttcctatttgggaaaaggttaccttgcaccctggtaataagsctgtttccaataaagaaaattaagatctctatctgttctcaaggtacaagacttgattacagcactatgaaaagcaattcttaaaacacacacacacatacatacacacacacaaagaaaagatgaaattgtgcagacaactcattctcaagatacatttaagagagtaaaaactgaattgcgcatatatattcctgaacaaggagtggaggtatttgttggggtaggcacttcctgtatctccatgaaaatatcccctggaggataggtaagctcaggacacacaagcactgtttccatgttgctgtaaaccacatgttattattatcattattattgagacgaagtctctctcttgtcacccaggtt

SEQ ID NO: 580572 - DNA, 628 bp, Homo sapiens
caggcacacaccaccatgcctggctaatttttaatttttattagagacaaggtttcaccatgttggccaggctagtctcraactcctgacctcaagtgatccacctgcctcggcctcccaaagtgctgggattacaggcatgagccactgcacctggtcctattggcatttcttatcttcaaaggagtttatttataggtaccatttcattcatgttgtttcttctatattttgtatcttaagagtcaatgttacctacctattatagtgattaacaataggaaacaattatagaatatgcatctaattaaaaaaactaaacgtttatttaaatataacaagataataaaagttacaaatgttaattaaatgtcagcaacaaagtccattccaatggatttaaaccttggagtccttaatcaaggtgtaaatttttacttgagattacatgtttatctctcataattgaatgtgcttaccagaggttaatatttcaattgtgttatggctttttcttaaataatttttgtgtctaatatttttaaaaattaaaaaaataagaacaagaatcttaaccaaatctgacaaatagctacaaaaattgctaacagtttgctggatataaaat

SEQ ID NO: 580573 - DNA, 297 bp, Homo sapiens
atcatctgtcattttgttttcaggatttattttctgcgtcatggagattagcttaattgtgatagatattttgttgtttttttcatatatatgattttcttttgctcatcatttctattgatctatgctcctgattttagtaattaaaacacagttcagtatgctagcattttcttcagccaaatttaataacytgtcagattcttatggtcacaattaagagaaaggtgtttgtaagtgtgttaatacttagatttctttataattaaaaaattatttgattggctatgctggatt

SEQ ID NO: 580574 - DNA, 461 bp, Homo sapiens
ccctcaaaaaactgggtatagaaggaacctaccttaacaaaataaaagccatatacaatagacccacagctagtatcatatggaatggggacaaactgaaagcctttcctttaaaatctggaacatgacaaggatgttcactttaccactgttattcaacacagtgctgaaagtcctagctagagcaatcagataagagaaagaaataaaggacattcaratcagaaaggaagaaatcaaattgtcactgtttgtagataataagatcttatatttggaaaaacataatgactccaacaagaaaactgctataactgataaacaaattcagtaaagttgcaggatataatactaacatacaaaaatcagtagcatttttatattccaacatgtaacaatttgaaaaagaaaaaagtaatccaatttaaaatagctacaaataaaatcaagtacctagaaat

SEQ ID NO: 580575 - DNA, 598 bp, Homo sapiens
tttaaatatatatgacaaataagcaacctgcagctacctacagcaaaaaaaaggtacagttagaacaaacagtaaagcacataatacctcaaaagaaaatccggagagattatttcaaaattagtgcattcaaaatcaaccacatatgctgggaatacaggatatcacacaaatgacccaggaaggacacatgctagaaataagtaaagaaaattctaagcttttagttctaactgatctctacgttcagtaaaagcaggaagtaaaaccaaggctgagttgtaaacaacctggctattcattggaggagtgtctgcatggagaaaatctgcaaaacctctaagaagctttttatttttttttctcccccctctctctctctctctctctctgtcttcctytcttgtcttcaggctttcaaggaaattgtcatgaaatcactggctaaataaacacaacctatagaaacagagactttacagaacacatgaccaagaatacaaactcgacaaaaatatataaaaagctgctaagtacacaaacagctaccaccacagcaaacacaaaaatataatttccatagttaccatattgtatg

SEQ ID NO: 580576 - DNA, 544 bp, Homo sapiens
ccccactagattagctagacacagagcagtgaatggtgcatttacaaaccttgagctagacacagggtgctgattggtgcatttacaaaccttgatctagacccagagtgctgattggtgtattyacaatcccttagctagacataaagatttcccaagtccccaccagattagctagatacagagtgctgattggtacatttacaaaccttgagctagacacaaagtgctgattggtgtatctacaatctcttagctagacataaagtttctccaagtgcccactagactcaggaacccagctggcttcacctagtggatcctgcaccagggctgcaggcgcagctgcctgccagtcacacgcggtgtgccagcactcctcagccattgggtggtcgatggaaccaggctctgtggagcagggggtggtgcttgtaggggaggcttgggcatgcaggagcccaaggggtggggggtggcggctcaggcatggcgggctgcaggtcccgagccctgccctgcgggaggcagctgaggcccggca

SEQ ID NO: 580577 - DNA, 639 bp, Homo sapiens
caagtaaagaaaaagtcattcccatcaactgccaacccaaatttgtctgtcagaggtaaccagtggttaccaatttatcacgtgtacttcgagatcattttgtacatacctatgtctctctctctctctgtctctctctctctctcattaaataagtatcatgctgtggataccagcctgaatcacatttcaagttttatttaatagccactcctgtctgactatcttggttatatgatgttacataacaagtaacattttaataaatgttgtagtacatggcttcttggtaaaataggaagtatttctctagagtaaacatgaagaacattactggatctttaactacataaatagtaaattttaatagatgctgacaaattgccctcgcaagtggctatatcaaattacaccctccgaagagtatgtgtatggaattgcctgcttccctatgctatcagacactcaatatttatttatttattataaatttatttatttactgcactttaggaagttatttctastgagattgagtatgactttgttatttgtgttttgtatttcttatgtaagttacttgttcatatattttattcatattagcttggttctgttgttgttgttgttgttgttgtt

SEQ ID NO: 580578 - DNA, 545 bp, Homo sapiens
aatttgttgagagtttttgtcaggaggggatgttggcttttatctaatgcttttttctgcatctattgagatgatcatatgatttttgttgttcattctactaaagtgatgtatcgtgttaattgatttgcatatattgacccatccttgcatccctgggataaatcccacttgatcatgttgtattatatatttgttgtgttgttggatttttgttagctagtgttttgttaaaaatttttgtgtctgtatttctcagwgatgttggtctgtagtgttctttttttgttgtgtgcttgtctggttttgtatcagagtactgctggcctcgtagaataagttaggaagaattctctcttctttaattttttggaatagtttgagatgaattgatgctagttcttctttataaggttgatagaattgagcagtaaagccatgcagccctgggcttttctttaatgtttgatgggaatctttttattacatattcaatctgttccccattattggtctgttcagattttctgtttctatctggttca

SEQ ID NO: 580579 - DNA, 571 bp, Homo sapiens
tggcagactgggcaggcccagcctcaggccagtagtgggtggggcagrgcaatccccaggccctcagatggcatgcttgagcattggggttgcagtgccaggcagtgcaggcatttactcaggcccctcaatggtgcacgtgggcacaggctgtgttggaccaagtgaggcaatccccagaccctcaaacaatgtgtttgagtgcaggcagtcagtggtttgggtctgttgttagaccccctgatggtgcagtgcatgccagaagcagcaagcagggtggatggatccccaagcctccagacagtgcactcaatcactgtgggaggtgccaccaggcagggaaggcctgtccccaggctcctctgttgtacctgtgggtgcaggctgtggtgaacagggcagtctttgggccactggacagcatattttgatgccagtggctgatagcctgagtctttcgtcatgcttcttgatcatatgtatgtgtacccagagtgatagacagaggggggcactccccaggcctcccaggtggtgtgctagggcactaggaggggtggcacttaaaggg

SEQ ID NO: 580580 - DNA, 610 bp, Homo sapiens
ttgattaagattcattcagtaattcattccacaaagttattgaacatctactacctaccaggtacagttctagatttcgggagcacaactttaaacaaaactccctgcctggtggattctacaggggaagttagacaataaataaaataaataagaaagatatacagtatgttacatggtgacaatgctatggagaacagtaaaacagggaaaggggtagtggatatgagagtggaggtgggtgaggaattcagttttcagtaggctctcaggaaggtatcactgagaaggtaargtttgaataaagtctagggaagatgaagaaacatccagataacaggggaaggttttctaggagtggaaatagcaagtgtgaaggccctgaggtaggagcatgtctcgtgtgcttggatgctcaaggaatggcaaggaggccaatgtggcagcaacagaagtgagcaggagataagatcaggagcggttttagggagggatcagttactatagaccagctctgtccaatggaaatataattcaagccacaaacatgaaccagatatgtaacttttaattttctagtagccacagtaaaaaagtaaaaagaaacaag

SEQ ID NO: 580581 - DNA, 547 bp, Homo sapiens
aagaaagcagaaaagtaattctgttaatatgacaaaacaggatgttatagcacccccaagagattgtactaatgcccagcaatggatccaaaacaagaagaaacctttgaagtaccagataaaaaattcagaaatttaattagtaagctagtcaaagagataccagagcaaggtgaaaatcaacatatagaattaaaaaaaaatcagtataaatattttaaaatttccagagagatagatatcataaacaaaaaccattcagaacatttggaaaygaaagacacacttataaaaacacaaagtatggtggaaatcttcaaaaatagactagaacaagtagaagaaagaatttcagagcttgatgaccaggctttcaaattaacccaatcacacaaagataaaaaagaaataatcaaaagaaatgaacagagtctctaagaaatatggggttatgtaaaatggccaaccctaagaattattggtgttcctgaggaagaaaaagctaaaagtttggaaaacatgtttgagggaataattcaggaaaatt

SEQ ID NO: 580582 - DNA, 543 bp, Homo sapiens
agcactagacaggtcatcaagacagaaagtcaacaaagaaacaatggatttaaactataccttggaatagatggacttaacagatatatacagaacatttcattcaacaactgcagaatacacattctattcaacagcacacgaaatttcctccaagatggaccatataataggttacaatatgagcctcagtaaatttaggaaaattgaaattatatcaagcactctctcagaccacagtgaaataaaactggaaatcaatcccaacaggaaacttcaaaaacatgtaaatacatggaaattatgtaacygtcccagaatgagcattgggtcaaaaacaaaatcaagatggaaattcaaaaattcttccaactgaatcacaagaacaacaaaacctatcaaaacctcttggatacagctgagacagtgctaagaggaaagttcatacccctaaatgcctacatcaaaaagactgaaagagcacaaacattcaatctgcggccacacctgatggaaatagagaaacaagagcaaagcaaatgc

SEQ ID NO: 580583 - DNA, 543 bp, Homo sapiens
agcactagacaggtcatcaagacagaaagtcaacaaagaaacaatggatttaaactataccttggaatagatggacttaacagatatatacagaacatttcattcaacaactgcagaatacacattctattcaacagcacacgaaatttcctccaagatggaccatataataggttacaatatgagcctcagtaaatttaggaaaattgaaattatatcaagcactctctcagaccacagtgaaataaaactggaaatcaatcccaacaggaaacttcaaaaacatgtaaatacatggaaattatgtaactgtcccagaatgagcattgggtcaaaaacaaaatmaagatggaaattcaaaaattcttccaactgaatcacaagaacaacaaaacctatcaaaacctcttggatacagctgagacagtgctaagaggaaagttcatacccctaaatgcctacatcaaaaagactgaaagagcacaaacattcaatctgcggccacacctgatggaaatagagaaacaagagcaaagcaaatgc

SEQ ID NO: 580584 - DNA, 605 bp, Homo sapiens
agatgttggcatggatgcggtgatcagggaacacttctacactgctggtgggaacgtaaactagtacagccaccatggaaaaaagtgtggagattccttaaagaattaaaagtagaacaacaatttgatccaacaatcccactactgggtatctactgcaaggaaaataagtcattattcaaaaaagacacttgcacatgcatgtttatagcagcacaattcacaattgcaaaatcgtggaaccaatccgaatgcccatcaatcaatgagtgaataaagaaactttggaatatatatatatatatatatttatttatatatatatatttggtatatatttatttatatatatatttgatatatatatttatatatatatttgagatatatatctttggtatatatatatatttatatatatttgatatatatatatatttgatatatatatttatatatatatatttgrtatatatatatttatatatatatttggtatatatatatttatatatatatatttggtatatatatttatatatatatatttggtatatatatatttatatatatatttggtatatatatatttatatatatatttg

SEQ ID NO: 580585 - DNA, 605 bp, Homo sapiens
agatgttggcatggatgcggtgatcagggaacacttctacactgctggtgggaacgtaaactagtacagccaccatggaaaaaagtgtggagattccttaaagaattaaaagtagaacaacaatttgatccaacaatcccactactgggtatctactgcaaggaaaataagtcattattcaaaaaagacacttgcacatgcatgtttatagcagcacaattcacaattgcaaaatcgtggaaccaatccgaatgcccatcaatcaatgagtgaataaagaaactttggaatatatatatatatatatatttatttatatatatatatttggtatatatttatttatatatatatttgatatatatatttatatatatatttgagatatatatctttggtatatatatatatttatatatatttgatatatatatatatttgatatatatatttatatatatatatttggtatatatatatttatatatatatttggtatatatatatttatatatatatatttgrtatatatatttatatatatatatttggtatatatatatttatatatatatttggtatatatatatttatatatatatttg

SEQ ID NO: 580586 - DNA, 433 bp, Homo sapiens
gggacacagccaaaccatatgattattgttgcaaaaattgtcaataaaatactagcaaactgaattcaacaacatattaaaatgatcattcattctgtaggttgtctgtttactgtgttgatagtttcttttgctgtgtaggagctcttaagtttaattagaccccatttgtcaatttttccttttgttgcagttgtttttggtgtcttcatcatgaaatctttgcctgttcctatgtccagaatggtattgcctaggttttcttccagggtttttgcasttttgcattttgcatttcagtacttcacccatcttgagtttatttttgtatatggtgtaggaaaggggtccattttaaacctcctgcatagggctagccaattatcccagcaccatttattgaataaggagtcttttccccaatgcttgtttt

SEQ ID NO: 580587 - DNA, 610 bp, Homo sapiens
attgctttgggcagtatggccattttaatgatatttatttttcctatccatgaacatggaatgtttttccatatgcatctgatgaaggcctaatatccagcatctataagaaacttaaacaaatttacaagaaaaagcctatgaaaaagtgggcaaataacatgaatagacacttttcaaaagaagacatgcatgtggccaatgagcgtatgaaaaaaaagttcaacacccctgataattagagaaattcaaatcaaaaccagaatgagacaccatctcacgcagtcagaatggctatgattaaaaagtcaaaaataggctgggcaccatggctcatgcctgcaatcctagcactttgggatgccacggagggaggatggatcacttgagcccaggagttytagaccagcccaggatacatagcaaaatgccacctctctatataaataaggcaaaaaaaaaaaaaaaaaacaaaactactgtcaaagttgcagggaaaaaggaacacagacactgttaagtgggagtctaaattagttcaactattgtggaaagcagtgtgacattttcttaaagacctaaaaatagaactaccattttacccagcaat

SEQ ID NO: 580588 - DNA, 570 bp, Homo sapiens
tgaggtcaggagtttcagaccagcctggccaacatggtgaaaccttgtctctactaaaaatacaaaaattagccagatgtggttgtggtggcaggtgcctgtaattccagttactcgggaggctgagacaggagtatcgcttgagcccaggaggcagaggttacagtgagccgagatcgtgccactgcactccagcctgagtgacagagcaagactcagtttcaatactactactactaataattaatctaattctattaatccattacggctcttgtctggagagtgctcctgatttccatcaatttctacattctaatgtttaaatctggagaaataaggccagtcttttcctggaatcaccaatccattcgccagatgatgggctgggaaaatgggaattagtatttgttgagccctattaaggcaagattctacaaccttcctctccttttaatcttcacagcaacccygtgaggcatgttttattctcctaatttacagataagaaaatgagggttcacaggactgtgtaactttaccgaggtcacacagtaatccaggagttta

SEQ ID NO: 580589 - DNA, 526 bp, Homo sapiens
aaaacaatttctaaaacaatcttaattagttgaatattttttaactgtctcactctacagcagctgttctcaggacaacagaactctgcatgttgacaaaaaacatagcaaaacaaaattaaactaccttacctttggtaacaaatgacaaaaaaatgaaaatgaaagaatgacaaataggaatatgaaagaatttaatagtayacacataaaaacttgtttaaaaagatagcaagcaacaaattagtaagaatgccccatcatataattcataaacttttacctctcacgtgcaaatgtatgtttcaaaagttattgtatgtcctcaaatatacaacttgaaatttttggtgagtagcaaacattctctgcgtcttagctcaaagacataaaagattttacaaattatgcctatgttcagaacaacataaattctgtcttacatgttcatgaactgacaatgcaaaataagccttttctccaccatgtccaatgttttaattggtcacttgtctttcatcaacac

SEQ ID NO: 580590 - DNA, 435 bp, Homo sapiens
aattatttacttaagatttcacaagactttagccatggaaatatcaccaacatttagagctggccccaagtccagtgctctttccactacattmatgggaagctccccatttatatagagttggagatcataccttacatcagctaaaccacatgtgaatgcaggaggcactgaatgctggggaggtgaattatcccacactgtcagggcagaagttagagagatgctgcatgtatttttttagcagctattatttatcctgaaggaagaaggacaaatcggaaatgtgaagtctcaacatagagtttttggaaggggatttcaagctatttggtctggccagggcaatcaggcaggagaaggaaataaagggtattcaattaggaaaagaggaagtcaaattgtccctgtttgcagatgacatgattgtatatc

SEQ ID NO: 580591 - DNA, 542 bp, Homo sapiens
aggatacagcttgattcttccccatatgagtagcctgttttctcagcaccaattattgaatagggagtccttttcccattgcttgtttttgtcacccttgtcaaagatcagatggttatagttgtgtggctttatttctaggttttccatcttgttcctttgttctatgtgtctgttttcgtaccagtaccatgctggttttggttacagtaactgtattaaggttctccagagggatggaagtaatagaatacatgtatatatgaaagggagtttattagagagaattggctcacatgattactaggtgaagttccacaataggctgcctgcaagctggggaagagagaagcccgtagtggctcagttggaatctgaaagcctcaaaaccaaggaagttgagggtgcagccttcagtctgtgacagaaggcccaaaaggcccaggtaagactctggcaagtctgagtccaaaggctgaagaaccagaagtctgatgtttaagggcaggaggagtggaagraagcatccagcacaggaaaaa

SEQ ID NO: 580592 - DNA, 564 bp, Homo sapiens
  misc_feature 544, 545, 546, 547, 548, 549, 550, 551, 552, 553, 554, 555,556, 557, 558, 559, 560, 561, 562, 563, 564: n = A,T,C or G
acagtaggcttaaaacattcagtaaaccgtgctataaacagatgcgctatcatccaggctgtgttccatatttagagcacaggcagaggtttaacataattcttaagatccctagaattcttggaatggtaagtgaatatcagcttcaacttcaagccaccagctggattagtccctaacaagagagtcagcttgtccattgaagctttgaagccaggcattgacttcttcctccattgtaggattattaactggcttaataaaagtcctggatggcatcttcttccaatgtaaagctgttccatctacactaattgtttagtcattgttccatctacatacattgttgtttagtgtagccactttcatcaattatcttacctgaattttctgaataacttgctgcagcttctccatctgaactttgctgcttctccttgcacttttaygttatgaagacagctttgttcttaaacctcacgaaccaacttctgctaccttccaaactttcttctgctgcttccttacccctctcagccttcannnnnnnnnnnnnnnnnnnnn

SEQ ID NO: 580593 - DNA, 594 bp, Homo sapiens
taccagatgtattggagctcctttgtatcatgaatcattctcttggttaaatttatctgatagaattctgaattctttctctgtgttatcttgaattgcagggatggagaacaggtggcatcagcaatttaagactgtctttcccactctcttcagtgcttctttcaatgacrcaaggttaaaaccaaatactgtgatggctcacctgatttttggttcttataaaggtagtttttcatgtaaatagatgcttaattgatgttcctgtggggggagcaattggtgaaggcttctattcagtcatctttcttcaccttctctcaaaattaagttttattggccacataagtgagaagaaatgtttgtagctgcaaaatgcagttagaaattgaggaaataatttttgagtagcagggagtaacagatgagagagccccaaaatgtaagtataactctgatatggtttgaatgtatccccagatcaatgtattgaagagttatattggaaaccagtgcaacagtgttgagaggtgacacctttgaggtgactaggtcataagggcctacaaatagattaatgccattatttgggca

SEQ ID NO: 580594 - DNA, 581 bp, Homo sapiens
aaatatgttgtttatagtatcctataagattatgtttcttatttcatccatggagattaaccaaaaaaaaaaaaaaatcataacaactaaaaattgtagagtcctctagagttgacaaagcattttttcctatatcttacttaattatttcaacaacctgtgagattaatgttattatttcacattaaaggcatagagacaaaataaagmaaaactaagtgcaaaactaagacatgaagaggttgaacaatttgtataaggatacacaataagctggtgaagttggggctcaaatccttttttcaggtaggtatagccacaggctcttggggtttcaatgtaagtattggtcttctggtaatatgctcagttcaagtggtgtaatcttgttgatgcctatacatatctactaaataaaagtgatgtttctgccttcttgtttcccataggaatctccttatgtgtctgtaatatagtttgctgtgtgaatatctattttcaccattgggttgttagctccttgcagtcagggactatggcttattcatttttacattcctccctttcctcatagcctagca

SEQ ID NO: 580595 - DNA, 499 bp, Homo sapiens
cctgagggagcattaaacttcatctttaagagatcattgctttgtgcaaggaaacactataaaaaagagtgaaccttatcatcagtttcactgtgtagttgagcctaggagtaaagtgcagagattgagaaatctcctgggccgagataggaggataactaatgaactagaagatatctggggtgtgtgatccttaattgtacatttcattgcttttactattttctattacaactttatagctggctaaccgtatttttcaagagccaatgcttggccgtaagaatgtgtttaagaaaataaaaagaacctcttaacttctttagaaacttttttctctttaatagattttctcttttctccccygaagcagtgattctttcaaaaacgagaacactaaatttatttccaaaatgaatatggaactttttaatatctcacactcattttccccttaccttcctaagttttttcttccttataatttaatataaggcaa

SEQ ID NO: 580596 - DNA, 582 bp, Homo sapiens
aagtgctgacctataaacctaaggacaaaagaaatgttgatgttttgacaattagaaacatcaaatgatgtttgacaagtatatcaaatgaaatcaggtaacagattaataaatcatttcttcgttatttactgaaatcttagatctgtggtatcatgtaggtaaataatttattcttaccatgtaraatcacattgcagagtatttgttaagaatatgtctttgtagctggactacccagcttgaattctggttcattcacttattaactgggtgaacttgagaaagtcacttaacacctgtacttcagtttctaagaatgaaaaatagaaataatgatagtacctaccttaggggtttttatggaatccaatcaattaatacatgtaaagcattaaagctgccatctaataagtgctcaaagttagcttttaacaattatgattacttattaaaaggctttctatattagtagacaacagagaagaataaaaagaagagactatagttaagatcattagctgggtgcagtggctcacgcctgtaatcccagcactttgggaggctgaggcatgagatcac

SEQ ID NO: 580597 - DNA, 559 bp, Homo sapiens
tcattaatttttaacatatttcattctagaaatgcaaatccagaatatgttaagcttttctaattgtaaatgggatatatgtacataattaaaacacaaagaagagtagtagatttataacacattaaaacatataactcaatatgactttctccctttctcagtttgccagaggtaacactcttacctctttactgctgctgcaatttctctctatattttaaaaataattagtgagtacttctatctcattcattgatttatattatcatctattaacttcctattattgcagatgagaattttatctcttatgtcctttcttcccatttctccacatttctactttatttttaatcacactttcccattattgtacttatttaagttttttaagttgagccaaaatgtttaataagatatttctttgtttatgaacctttgtgttggacctgggcttaaaaagcacgccttttgttttwcatttgtgtagttttctttgcatctctggctaagtcttcacatattcattccaataactataaattgcccataaaaa

SEQ ID NO: 580598 - DNA, 565 bp, Homo sapiens
ctctttttttttcttgtcttgggacaaaaaaaaaaaaaaaaagataattatccttcagaaaaagcatgctcctctcagaactttccaaaactctttktcaggaaagcttgtggagatcctgtagtatttcccaggtaatactttcttattcatgagtattctgtgtgattcttgggaaatattatttcaaacatggaatctcttgtaggtctcttgccaatgtgtctcctggtaggcactgagaatccctaatggaccctggcatcataccagcattgcctttgtatactaggtaaaagacatattgctgctcttatatttattagtttgtatattgtttttgagctttctaaggtgaaaacaactttcatgtataccgagactgtatctatacaggaacacttgcattattttctgctatgatgttgtgaacttaggacacacttgcagagccggccaagcatgagtcacccaacaaaagtgaaagctgggaggggattaaataagattaggattcagatacatgaggtgatagtggagctggccctcgtgtcaggcaaagcta

SEQ ID NO: 580599 - DNA, 595 bp, Homo sapiens
ttaaatatatataaaatgcctttactgagttcattatagaagtatttatttacaaagttttaataagaattgatacttttttctatcataatgtaattgaaaaatcaagtttgtaatccactttccattttaatatataacatttaaaggtaaggcagtaaactagtatggtggctcctattaaggaacgtggatttaatctttasgtgaaaatgatgcccactaggtcctcctaaaaaaccagctcgctcttttctatattggttagggattgccaactaatggaatgttacaggaaaacacatattgggaaatttgaggatattaaaaagagaaagggggtgcttttaccattatatgtaatgtaggtaaaacctggaagaagaaaattggatgattcctaattcctaacctcaatgaaaaaactgacaggggcaataaaaatcctgctacataaaatcattatgaaagaatataatgtgacaccaggggatttatcagtcttctagacagaagttactgatatgttagtatcatatgattctagttttgctaatgaaacaataaaagcatccatgttttaatccattcctta

SEQ ID NO: 580600 - DNA, 595 bp, Homo sapiens
ttaaatatatataaaatgcctttactgagttcattatagaagtatttatttacaaagttttaataagaattgatacttttttctatcataatgtaattgaaaaatcaagtttgtaatccactttccattttaatatataacatttaaaggtaaggcagtaaactagtatggtggctcctattaaggaacgtggatttaatctttacgtgaaaatgatgcccactaggtcctcctaaaaaaccagctcgctcttttctatattggttagggattgccaactaatggaatgttacaggaaaacacatattgggaaatttgaggatattaaaaagagaaagggggtgcttttaccattatatgtaatgtaggtaaaacctggaagaagaaaattggatgattcctaattcctaacctcaatgaaaaaactgacaggggcaataaaaatcctgctacataaaatcattatgaaaraatataatgtgacaccaggggatttatcagtcttctagacagaagttactgatatgttagtatcatatgattctagttttgctaatgaaacaataaaagcatccatgttttaatccattcctta

SEQ ID NO: 580601 - DNA, 648 bp, Homo sapiens
gccaggggtggaatgatatggtttggctgtgtccccacccaaatctcatcttgaatacccacattgtgggaaagacccagtgggaggcaattgaatcgtgggggcaggtctttccagtgctgttctcatgatagtgaataagtctcaggagatcggatggttttaaaaaggggagtttccctgcacaaactctcttctcttgtctgctgccatgtgagatgtgccttttaccttctgccatgattgtaagaccttaccagccacatgaaattgtaaatccaataaacctctttcttttgtaaattgcccagtcttgggtatgcctttatcagcagagtgaaaacagactaatataccagccttcccttcatcatcctcaatatrttttgcagaagccaagatccagcctgagctaggggtatgggaggcaatttgaactgtttgggagattgaagttttgatattagattagatttgactttttcttttttcttttttctttttttttgagacagggtgttgctctgttgcccaggctggggtgcagtgacacaaccatagctcactgcagcttcaacctctcagggctcaagtgatttttctgcctcagtctccccagtagctggaactacaggcatgcacaattat

SEQ ID NO: 580602 - DNA, 327 bp, Homo sapiens
gttaaggcattctaacttacaggataagataggaggttggcacaagatacaggtcataaagaccttgctgacaaaacaggttgaagtaaagaagctgactaaaacccactgaaatcaagatggtgaccagagtgacttctggtcttccwcactgctatgctcccaacagcaccatgacagtttacaaatgctgtagcaacgtcaggaagttgccctatatggtctaaaaaggggaggcacgaataatccaccccttgtttagcatgtcatcaagaaataaccataacaatgggcaaccagcagccctcggggctgctctgcctatgg

SEQ ID NO: 580603 - DNA, 554 bp, Homo sapiens
aaaaccccgtctctactaaaaatacaaaagttagctgggcatggttgtggctgcctgtaatccaaactactcaggaggctgaggcaagagaatcgcttgaatccaggagggggaggtttcagtgagccgagatcgtgccattgcactccagcccgggtgacrgagtgatactctatctcaaaaaaaaaaaaaaaaaaaaaaatgaagatggccagttagatgcagccaggaagaattgctcccacagagagaacaaaattttgagtaaacaaaaataatttgaaaagctcttcatagggaaaatgctgaatgtagatgaagacacattgcaaacacttaagctaaagaagaaagccagtagccctgtgtggggtacccaaatgctagagctagtttccactcttgaacgacttctggcaaatgaataagcgaaggaaatatgagactgctgggattctagctacaggggaccctactttccccattgacttttgagctgacaaaatgctccctaactccaaaggacagagccacacgctgatctggaaccccac

SEQ ID NO: 580604 - DNA, 623 bp, Homo sapiens
tgccattccttaagtgtgagatccatattgggactttcttataaagggcaagtgcagtatgaggggaagagtaaytttggagtggagaaaccctacctcagccaggtaattccccttttgtatataactaattacctgatcaggcagatcaccttctatgtcctgctctctatcagacctctgatctcactgccactttccattccccaggcatgctacttgtctgctaggcctctgaaactccttagccccttgtatgctaccattttcaagggaacaaagggaaagaaaaagaaaagagaaaataaattttcacttatttttaggtctaatgtcttcagggtccagtaaaagtacagcgtcataaaagacctccttctgctccctttgctgacacctaccttagcctcgtaagccagaagacttgaaaaggttctggtccacatctcaggtaacttctgagaaatcaagaaattcttcattgtaacagcaaggtttaactctcttgaattctgttctttctggattttggcccaatatttaaaaattttcttctcagttcagcaaaatgaaagaagcttaaagtaaacagaataaagtaaaaaaaaaataaaaacaattaa

SEQ ID NO: 580605 - DNA, 440 bp, Homo sapiens
gatctcagctagaaaccacagttaaggaaagttcattttgctcctatgtcaaagttcgggaaaaggcagcccagttatctaaataatttcacatctatagtgagaggtttaaaagacttaaaccaattttagattctaaaaggtgcttttctcctcctgctaaagtatttggttttactgaaggaagagttcaaagccataaagctcagtaatcgggataacttccccccaagtttcatggggtttccagagcactgagaggctgctggctggccatggctcctttaggaacaataaatcctccagaatcatattcyaaacctccccattaccagttatcctaattattagtttctcacagctttctccactctccatctctcctcttccttcatccactccccatctttgtggaaaagccatttgtaagaaaactacat

SEQ ID NO: 580606 - DNA, 548 bp, Homo sapiens
aaaatagagaaaaattatttccaaaggaagaacagtaaaataactgatttctcaacagtgataatgaaagcctgaagatagtggaataataaccttactatgtttaagaaacacaacttccaatctaaaattccgcaagcatctttcaggatgcttgataaataaagacaaagtagataaataaaaacaatgtgtttatgaccaacaaactttcatgaaggaaatagtaaaactgtactttagaataaaaaaaaaatgttcttagaagggagacctgaaatataagggaaaataaaattttcctttaaagatttaaaaagccaaaaatagtaaatataatcaattatctatgcattaacatataagttaargtattaaagagcagttgagttgtttatccaaaaagtgggtaaaatttttatgtatgcattttttagtatctacaatatcacttttaaaactgtacaactttcagactagcagcgggtttcaaacaacataataaaaagtaatgcaaatagggacaagaagggggagaaaaggaacaa

SEQ ID NO: 580607 - DNA, 548 bp, Homo sapiens
aaaatagagaaaaattatttccaaaggaagaacagtaaaataactgatttctcaacagtgataatgaaagcctgaagatagtggaataataaccttactatgtttaagaaacacaacttccaatctaaaattccgcaagcatctttcaggatgcttgataaataaagacaaagtagataaataaaaacaatgtgtttatgaccaacaaactttcatgaaggaaatagtaaaactgtactttagaataaaaaaaaaatgttcttagaagggagacctgaaatataagggaaaataaaattttcctttaaagatttaaaaagccaaaaatagtaaatataatcaattatctatgcattaacatataagttaaggtattaaagagcagttgagttgtttatccaaaaagtgggtaaaatttttatgtatgcattttttagtatctacaatatcacttttaaaactgtacaactttcagactagyagcgggtttcaaacaacataataaaaagtaatgcaaatagggacaagaagggggagaaaaggaacaa

SEQ ID NO: 580608 - DNA, 539 bp, Homo sapiens
aaataataataatgatgatgacattacttacataatacatttgactagcaagtcagcttacaaagcaacatcacatgtgatatgattttgattttcactacagtctctggtggaggcactcaaagcattttgtaaagataagaaacccattttgtagataaaggctcaaaagagtgacatggccagcctgagactacacacaagtgccaaaagtaggaattcaccccaggccttctgattctatgaagagcagctttttacatcattamatgtccttgcatttttggcctctggagcaaaaggcacatgcaatggaacacattggatattttttgtgtatgtgtgcatccagtgggtccatcacggataagaacagaacacctagatggaagaggacatttcagggtcagacttgatccctgatatggttaagctttgtgtccccacccaaatctcatcttgaattataaccgtcataatccccatgtgtcaagagagagaccaggtgaagataatcggtccatggaggtggtttcccc

SEQ ID NO: 580609 - DNA, 562 bp, Homo sapiens
aaccaaatgtgtaccttgatcgttgctcttcttttcttttttttttaattttatttttaatgttttcaactttaatttttttttttaacttttaggttcaggggtacatgtgaatttttgttagataggtaaattcatatcatggggtgtgttgtgcagattatttcatcaccgaggcactaagcctagtacccaatagttaagttttctgatctccctcctcccaccctccattgtcaagtaggccccagtgtctgttgttcygctctttgtgtccatgacttctcatcatttagctcctagttataagtaagaaaatgtggtagttggttttctgttactgtgttagtttgctaaagatgatgcctcttcttttttttcttttttttttttagatgaaatcttgttcttgtcccccaggctggagtgcaatggcgccatcttggctcactgcaaacttcccctcttgggttcaagcaattctcctgcctcagcctcctgagtagctgggattacaggcacctgctaccacggtcagctaattttttatttttaatagaga

SEQ ID NO: 580610 - DNA, 455 bp, Homo sapiens
tttccttttttcttttttttcttgttgagacagagtctcactcagtctctcaggctggagtgcagtggcatgatctcagctcactccagcctccacctcctgggctcaagtgattctcctgcctcagcctcccgaatagccaagattacaggcacacaccatcacgcctgagtaatttttgttttttttaattacagacggggtttcactatgtttgccaggctggtcttgaactcctgacctcaagtgattcacctgcctcggtctcacaaagtgcggggattacaggtgtgarccactgcacccagccccttttttttcccaaaatagatttttctatttctgcaaaagaaatgccactgggattttgatagaaattgcattgatcctgtagatcactttggatagaattggcatcataataatatcaaatcttccaatccatgaacacagaa

SEQ ID NO: 580611 - DNA, 455 bp, Homo sapiens
tttccttttttcttttttttcttgttgagacagagtctcactcagtctctcaggctggagtgcagtggcatgatctcagctcactccagcctccacctcctgggctcaagtgattctcctgcctcagcctcccgaatagccaagattacaggcacacaccatcacgcctgagtaatttttgttttttttaattacagacggggtttcactatgtttgccaggctggtcttgaactcctgacctcaagtgattcacctgcctcggtctcacaaagtgcggggattacaggtgtgagccactgcacccagccccttttttttcccaaaatagatttttctatttctgcaaaagaaatgccactgggattttgatrgaaattgcattgatcctgtagatcactttggatagaattggcatcataataatatcaaatcttccaatccatgaacacagaa

SEQ ID NO: 580612 - DNA, 445 bp, Homo sapiens
cacacacacacacacacatgcacacacataccacacatgtacatacatacacacacacatacacaaatatgtgtgtttatatgtgtgtgtatatgggggtatgtgaatgtgtacatatatatttatatatgtatgttycgagggcttatacctatatatgtgcacacacatatataagccctcaaaaccttctttggaaatacacacacacacacccctatatatatacacacacacacacacacatatatatatgtatatatactttttttttttttgagacaagttctcactcttttgcttaggttggaatgcagtgacatgatcatggctcactgcagccttgactactcaggcttaagtgattcttcttcctcagcctctcaagtatctgggactacaggcatgcaccatcatttattttttgtagggatgggggtctcac

SEQ ID NO: 580613 - DNA, 445 bp, Homo sapiens
cacacacacacacacacatgcacacacataccacacatgtacatacatacacacacacatacacaaatatgtgtgtttatatgtgtgtgtatatgggggtatgtgaatgtgtacatatatatttatatatgtatgtttygagggcttatacctatatatgtgcacacacatatataagccctcaaaaccttctttggaaatacacacacacacacccctatatatatacacacacacacacacacatatatatatgtatatatactttttttttttttgagacaagttctcactcttttgcttaggttggaatgcagtgacatgatcatggctcactgcagccttgactactcaggcttaagtgattcttcttcctcagcctctcaagtatctgggactacaggcatgcaccatcatttattttttgtagggatgggggtctcac

SEQ ID NO: 580614 - DNA, 615 bp, Homo sapiens
gttaaagcattttaaaagtttaatgcattcacattatgtgtatatgtgtatgcatgtgtgcgtagcagcttatagcttgaataaacttgctctacctcttcttagatattagttcaggttcagccaaaggcaaaaacaaattcctttgcaatttaccaaaacagacggtaaatctagtgaaaaccaaaaaagtaattttcactaacttcaaaatcaatgrggttaataatgtcttactgctttttcttttgatctcatggagactctttttatctcccataaattggacaattctattagtcagggtctctagagaaacagaaccaataggagattatatatatacgtatatacacatatatacacacacacatatacacatatacgtatatatatgtgtatacatatatatacacacacgtatacgtgtatatatatacacacatacatatgtatataagtggtgtgtatatatatacacgtatatatgtatatacgtgtatatatacccacacgtatatgtgtatatacgtgtatatatatacacacatgtgtgtatatatacacgtatacgtatatacgtgtatatatatacacacacatatatgtatatac

SEQ ID NO: 580615 - DNA, 615 bp, Homo sapiens
gttaaagcattttaaaagtttaatgcattcacattatgtgtatatgtgtatgcatgtgtgcgtagcagcttatagcttgaataaacttgctctacctcttcttagatattagttcaggttcagccaaaggcaaaaacaaattcctttgcaatttaccaaaacagacggtaaatctagtgaaaaccaaaaaagtaattttcactaacttcaaaatcaatggggttaataatgtcttactgctttttcttttgatctcatggagactctttttatctcccataaattggacaattctattagtcagggtctctagagaaacagaaccaataggagattatatatatacgtatatacayatatatacacacacacatatacacatatacgtatatatatgtgtatacatatatatacacacacgtatacgtgtatatatatacacacatacatatgtatataagtggtgtgtatatatatacacgtatatatgtatatacgtgtatatatacccacacgtatatgtgtatatacgtgtatatatatacacacatgtgtgtatatatacacgtatacgtatatacgtgtatatatatacacacacatatatgtatatac

SEQ ID NO: 580616 - DNA, 609 bp, Homo sapiens
aagtcatattatttctgattttgaarataagaaaattgtgaattaaataattaatttgcatacccattcacacagtgattgaaggtggatagggcacacccatgtccatctgccgtgaaaacctgtgcctctccaaggagccagggctgcctgattctcacatgaggctgaccatgaagtaagaattgacaaaatgctaagaacactggggaggagaactgggagaagtttatctacctgtgaggatcagaaaatactcactggaaaacatacctggaattagctgcagaggttatttcaccacaatgaggagaggagctgtgtgcacagtattggactcttggtagtcgctaaatttgttggattaatgaattcactcaaataacagagactcaaaacagccaggggaggttaatgtgctgagtgctttgcagaaggtttagtgagggacatttcctatctatgtgtgtcctcactgatgtctgttagtaagatcataaaccatatgctcaaggaccttatggtcctctgaagaaagccagtctatagaatcaagatatgattatggtcaatcactgtctcatcaggcaacataaattggagactgtt

SEQ ID NO: 580617 - DNA, 539 bp, Homo sapiens
actcttttaggtctttctagataaaattatttgcttagtcattttcagtttggttcattttcagtgtttcatggtgaaaagaaaacaggttttggagttagaatctaagcttgaccaggtactaactatgtaccttgaaaaaggtactgcatttttcagagacccagtaaataaggcatgtcttaaagaggtattataaatgtagaataacataatgaagttaaagtgcacactgtaataggtacttactaggacagttttatttgtgattgctaatcattattttggagggtaatacctttcatttttcaaccaaagtacctaaagattatatatagaatatatattctgatatatagatatatatattctgatatatatctgtatatatatgatatataatatatatatatatgcactttttttgagacagggttgcactctttcacccaggctggagtgcagtggctcgatctcagctcactgcaacctttatctccwgggttcaagtgattcttctgcctcagcctcccaagtag

SEQ ID NO: 580618 - DNA, 590 bp, Homo sapiens
tacatttgatgtggagtattttttcatatgcttatttgttatctttttatcttctttggttactcatggttttaaaatcccatgcttcaaaatagataaattaggaatgtgttcctttctgatacgaaaataaagggtttaccaagtagagaattacagagagtacaaataaacaaacagatgcttttacaaatatattaatatagtctstcagagaacaatgaattcttgaagttgtttgggcaacaaaactgaagtttctttgtgagtcttataaaacaaatttctgctatcatgtggctatttctcagatggaaaaagcttcttcttgactaaatatgaacagtcagtttgtcatctaagtttgaaataactgaaaaaaaaaaacgtatttaggttcaagtctgtgagtattatcagatattgagtacaaaaaattctataaagtaaaactctaaaaatcatatgatacctagagttttagtggcaaaatatatttctttgatataataaggaacataaaataatgccatattccaaatatattttctttattttctttaatactttagaaatcacctccctcacat

SEQ ID NO: 580619 - DNA, 422 bp, Homo sapiens
ccaggttcaagtgattctcctgccttagcctcctgagtaattggcattacaggcacgctcaactatgccctgctaatttttgtatttttagtagagatggtgtttcaccatgttggtcaggctggtctcgaactcctgacctcatgatctgcccgcctcagcctcccaaagtgtgggattacaggtgtgagccaccacacccagccaaaagcattttttataaagcttcaaatgatagtataaagaaagggaaaaaaatgacttacagatgggagaaaatatttgtaaatctttcatattacaagggacttgtatctaraatatataaaaatcgttcccaagttaataataaaaataactcaatgtttaaaataggcaataaatatatcttcatagaagatataaagtggcaaatgaataca

SEQ ID NO: 580620 - DNA, 582 bp, Homo sapiens
ttgcacaattacataatatataaatatattatcgagtgtaagtgaagtgcacatttatttgaataatgtgtacgtgtctatgcttctttgtgtgtgcacatatatgtagacatctataggtggggtttaatgactcacttcctcaaaaataatgtggcagaagtgacatcttttgactgtatggctaagtcattaaactgataagcttccagctggctcttactcccttaaattattagctgtagttgatcactgcccattatagaaggcagtcactatgctgtgaggaccctcaaaaagcctttggagaggactacgtggtggggaactgaaacctcccaccagaaggcagcaccaatagacaagcaagtgagtgacccctcttggaaacagatccttcagycccactcaaaacttcagatgatggtggccgggtgcagtggctcacgcctgtaatcccagcactttgggaggccgaggtgggaggatcacctgaggtcaggagtttgaaaccagcctggccaacacggcgaaaccctgtctctactaaaaatacataaaaattagccgggagtggtggca

SEQ ID NO: 580621 - DNA, 582 bp, Homo sapiens
ttgcacaattacataatatataaatatattatcgagtgtaagtgaagtgcacatttatttgaataatgtgtacgtgtctatgcttctttgtgtgtgcacatatatgtagacatctataggtggggtttaatgactcacttcctcaaaaataatgtggcagaagtgacatcttttgactgtatggctaagtcattaaactgataagcttccagctggctcttactcccttaaattattagctgtagttgatcactgcccattatagaaggcagtcactatgctgtgaggaccctcaaaaagcctttggagaggactacgtggtggggaactgaaacctcccaccagaaggcagcaccaatagacaagcaagtgagtgacccctcttggaaacagatccttcagtcccactcaaaacttcagatgatggtggccgggtgcagtggctcacgcctgtaatcccagcactttgggaggccgaggtgggaggatcacctgaggtcaggagtttgaaaccagcctggccaacayggcgaaaccctgtctctactaaaaatacataaaaattagccgggagtggtggca

SEQ ID NO: 580622 - DNA, 466 bp, Homo sapiens
caaaagatcagcgtcttggaatggaatkggcaaaatggacaaagcagaattcaccagtgcttttaagagtgatctgtaaacagaagaaactacaactgtatttggcttctaagagatggaaaaatagcccaggaagggagagactagaaaggttgagggcaggtgatggtttagaggccacagggagatgagcaattatgatttatttgacctggacacagctatcagcaaaggaaaacctgatatcacacatgcactttgtctgaaactcaacaagccagccactctcctccctagaagtcccactggaaacaactacaagcagtgtgtcttcacagatggctcccaaagcacacctctggctcagttactgttagtcattttagtgagtagtttgggatttgctttatgtgcatgaacaaaagaggtttttttttttaattttttttcagttttgcaaaagcta

SEQ ID NO: 580623 - DNA, 625 bp, Homo sapiens
ttttttattcttatactttccctttccccattctaaaaagtacctaaatcaggtacttccttttcctggcctcagggcttttgtctggacacagagcagaagtgttcttaaaagagctaccagacttctataaaaacgtgagccccttcaaaaggtagcactaggcattcccaaactaaggcaatcattctagatgctgtgactaaagagatataaaaactgaccatcttacattcttctatgtccatatataaagaatgtatatcctaatagggaggagaaagaaagggtgggagaaaggacagtaagccaataaacaaatactggatactgttaaaatgcaatgaaacaaatgaaacaatgaaattatggaggcatgaacagaggggaaaagagagcaaaaccaaaggcactaacaactttctagctcccacaaggctctttcttgagtctcagttccctcaataaatgagacaatataactcatagtagtattcaataaatgttaactgcctcctccatatacatattttccagatagcatattataascaaaatcattgtaaaagactggctactcacaggaacatgctgagttgaagaataagagtccactgaccgagga

SEQ ID NO: 580624 - DNA, 607 bp, Homo sapiens
aaggacatgaacagacacttttcaaaagaagacatatatgtggccaaccagcatatgaaagaaagtgcaagatcaccgattattaaagaaatgcaaatcaaaaccacaataagataccatctcacaccagtcaaaattgctaatattaaaaagtcaaaaaataacaggtgcccacaaggttgtgtgtactactagtgttgcttctgatataaatatagctacacctgcttgcttttggtttccagtaatatgaaatatatctctccacccctttatttggagtctataatgtcttcaccagttaagtgggtttcttgtaagaaatatattgttagatcctgtttttaaaatctattctgccaatcttcatcttttaagcggagcctttcattcatttattttcagggttaatattgatgtgttaggcttcgttcccattataatgttaattgttacctagttgctttgtagtctcaattgtgtaattgttttataagaccagtgagtttaatacttttatacgtttttatgatggtgagtcttgacatttagttctcatgtttagaactcctttgatcatttyttgtaggggtgggatagtggtgat

SEQ ID NO: 580625 - DNA, 323 bp, Homo sapiens
gaagatttggggctcaagggctggtgttcagattcttttgacccacagtgtgatcctttgattcagtactctcccccttttctttgggatgtggcttcctgagagcaaactgtagtgattgttatttcttttctggatctagccacccagcataagtgccaggctttgggctgtttttttttgtcagggggtgtacagagtcctgtgatgtgaaccatattcaggtctctcagccatggataccagcatctgctctggtgtarggggcaggggagtagaatgggctctgtgttggtctttagttgtagttgtttagtgcacta

SEQ ID NO: 580626 - DNA, 535 bp, Homo sapiens
tggtttccaggcctgcaacatcattatcacctgggaacttgttaaaaatatgaattttatggatccatctccaacctttaatatcagaaactctaagaatactactttgcagaagtaggcttcagaagatatgtaataaaaaactatgctgagctaaaggatcatgttctaacccaatgcaaagaagctaatttctcagcaatttgtattctaacaagtccttcaagtgactttggttcatgctaatgtctgataatcattttcctacaaggaatttaataaatattctcattgtggttgccactttgatggggaaagggcagattctataaagaaagcaatgaagagactgaatcctaaaggtgtagcttcttggcacctggctgtgaaatgtcttctttcagaaaaaagagaagctaggcacaaaaaragtgtattaagttggtggtagaaatggagatttgctatggttctaccattgttgcttgcccagatctacatgggctgatagtctaagaacctttctgtagcatct

SEQ ID NO: 580627 - DNA, 481 bp, Homo sapiens
gtcagggttcagggttttctatagaaacagaatatatatatatatatatattctgtttcaggctgaggatcaaagagagccagttcaagttccaaaactaaagaacttggagtctgatgttgaagggcagaagcatccagcagaggagaaagaggtaggytggggggctaggccaatctctccttccacatttttctgactgcttatgttctaaccgagctggcagctgattagattgtgcctactcagattaagtgtgggtctgcctttctcagctcactgactaaacctcaattctcaatctcacctctaggagcccatcaggactttagtctagttacaggtctagaagcaaacaggggtgttgggggtagctcctgaggaggatcaacattatcttgcctggaaactacctcaggggaggccatcattgttgcctcaggcagtgcagggtttatctcctcagacaaaggtggaaagg

SEQ ID NO: 580628 - DNA, 481 bp, Homo sapiens
gtcagggttcagggttttctatagaaacagaatatatatatatatatatattctgtttcaggctgaggatcaaagagagccagttcaagttccaaaactaaagaacttggagtctgatgttgaagggcagaagcatccagcagaggagaaagaggtaggctggggggmtaggccaatctctccttccacatttttctgactgcttatgttctaaccgagctggcagctgattagattgtgcctactcagattaagtgtgggtctgcctttctcagctcactgactaaacctcaattctcaatctcacctctaggagcccatcaggactttagtctagttacaggtctagaagcaaacaggggtgttgggggtagctcctgaggaggatcaacattatcttgcctggaaactacctcaggggaggccatcattgttgcctcaggcagtgcagggtttatctcctcagacaaaggtggaaagg

SEQ ID NO: 580629 - DNA, 566 bp, Homo sapiens
atgtagttgggatgaggtgaaacaacacctctggggaaacttacatgataatttaacagcagacgtaaggcaacttaaactaaaattctagaatccctaatcgccgtagatctacatgcccaacaaacagccacatggaatgatgtgcaaggacatctctcctggatagaccccccactcctggggggggtcacttcttgattggaaaagaatgatactgattatactcatttttgtcttatgttatttactaattctaggatgcaaagctggaatacgagttataaccactgcgcctgacaaacctgttgctgcatgcgtctgtactcttcaatcaacaaaacctgatgcaaaaaacagaaaagggggagatgtaggagattggtcaggattgtgggagaaattataggraaagatgcaaaccttcttggaaggccgggggttttgcaaagcttcagggaagaatgagctgaaggcagctgttcttacccaggggcaaagggcgtagatacaaaggaatgtagaggagtttatctaaatagcttgtttactcatgttgtcctaaa

SEQ ID NO: 580630 - DNA, 545 bp, Homo sapiens
tgctgaagtgggtgataaaaaattgattgaacttatcttggtgagctatttgacattatatgctaaaaatatccatatactctggtctactatcctttattctaggaatttattataaataaataatcagagaagcatagaaagatttatgcacaaggaggtgcattcatagcagaattayttataatcataaaacaacaattatttgaatcccaacaatggatgaatggcttaataaattatgatgcaacaaaatcatttttcaaaagattattaataacaaagagacaggcctaaaaagcagaatcagcactcaactctgtttttagttttctatttaggttcaaattttaaaatattatgtttttatataatctatatctttatataaaaacccacaaagaaatgcatcaacatattactagttgttatatttaggtggtggaattatgggtgactgttttcttctgtacactaaaagaagcatttttttaatattaagaaaacaaatataaaaataagctacaaggaagaatgaataatta

SEQ ID NO: 580631 - DNA, 550 bp, Homo sapiens
actgcactccagcctgagaccctgtctcaaaaacaaacaaaaaagcagtaaggctgcttagttcactgagggttttgtattatttgggcctataaatgttagacttacccaaactctacgaagcaaaaagacaagttattttctactttactgaacagtaaggcatcactagagcaggtttatctctaaggactgaatactttaaactgtgaatccagattataattattagaattattttcattacatctttcctcttggcctccttatttcttaatccctcaatataaactctayagacacgtaaaactctggttctacctcatttgtgtaataaggaaacagagttagataattactcttctaggtccctttccagctgtaacattccaacaactgggcagtaaaaaaggttatctacagaagcacaggaaagtgaaagaaactgttaaaaactggcagtgttcacttcagtaggaaaatggcattaattgtgctttgaacatggcaagtctcctctttgaagacacatcccatccttaaaaaacaa

SEQ ID NO: 580632 - DNA, 569 bp, Homo sapiens
gctcattctgtactttccctgccccagtcatgtgctatggacagcattgtgtctcctcaaaatttatatgttgaagccctaacctccaatatgactgtatttggagatagggcctataaggaggtaattaaggttaaatgaggtcatataggcagggccttgatttaataggattagtgtcttcagaagagaccagagaaagcttgttttctttctctctctcccactatgcaaggacacagtgagaagtcagccatctgcaatccaggaagacagcaccctcaagaatggaatcactggtatcttgatcttggatttcccagccttcagagctgtgagaaataaatgtctgtttcttagtacacctagtctgtagcattttgtagggcagctccagcacastaaggcatcatggaattagccatttttctttttcttttatcttttctttctttctttcttttttttttttttttttgatgcagagtcttgctctgttgcccaggctggagtgtagtggtgtgatctccactcattgcaccctcagcctcccagtttcaagcaattct

SEQ ID NO: 580633 - DNA, 205 bp, Homo sapiens
tcctgtgagtacttactgctggaggtcctagtgttgttgctgccaggagttctcctaatatcatcgattcatgcagtatttaagaataatatatgagaagratgtaataaaggtgttcccaaatttgacaaaatttggaagcacctgtatgtcctgggggaagctaatcaacctctctgtgcctcagtttcctcatccataacag

SEQ ID NO: 580634 - DNA, 549 bp, Homo sapiens
gctaattctctaatctgacttgtccttggaggttccctccccatcctgctggccrcaccagctgcctaggggagcacaactgagaagatatttggcaattatccagttaatttgatcagtggagacagccaaacaaataatccaggccaaaaatgtccagatcagctgtctacatggatcaaattccacttcactgacaccacgcaggttcagccctaaagaatgggtttcactgagaaacacatcccagtatcccggcatgctaggctgcaccagcctttagtggaattgcgagcttggctgcatttctctgtgacatcctttccattcccattcagtgcccttcccacccccaggactttggccccatagggccaggggtctttggtagctgtcaggggctagaatattcttgtgtccatctcctactctaggtatttgaaactcattaggaagagactttcaacatctgaaatgcctttgaaaattaaaggaatagcaatgtaatggtagaatgtcaggatccaaacaagccaaggtgcaggaagg

SEQ ID NO: 580635 - DNA, 589 bp, Homo sapiens
acacacaactagtagcaatgcaggaacttcacagagaaaatgaagttctgtcttcaagaccttaagaccacccgcaagtcaggcacatgaccaaaaacctgagtggaatgtgtgagtcagaggccccatggctggaggcacatgccamagtgccagagaaaagagaaggaagcatttgtgagactgctctgcatggttttgtttcttcttccttggttgtgtatgaacaacactggataatattgtgctttttttttaacggattaagagttagtttgaggcaaggaaggtatccctgtggttggaaaatagagcttctttctttctttctttctttctttctttctttctttcttttcttttctttctttccccatttgagcagcttctccctcctcctccctccagtctagggctcacacccccgcactgcaggcttgtgcaatcttcccatttcctgcatttcatgtgaaggagcattcaagagttggacaacaagggtttaattcaacttgaccatcttctcaaaaagaaaattaaaaaaaaaaaaaaagaaaaagaaaaaagaggaagaacaaaagttgggaga

SEQ ID NO: 580636 - DNA, 572 bp, Homo sapiens
tcagcactgcatggggagatgtagccacaatcaacctcccccaagagccatgctctcatctcacgtctcactcatcaactcccacatgcatggccctcgttggctgtttgtctttctgtgtatttaattattccagtccagtctctaccaggaagtttttaagctgttcaaggcaaagatcacatttctgcctttctctgtttccctctgttactcctagactgcaaacaggtgatgctcggtaagtatgcacaaaactactgaatctccatatgaccccaaatcccagtgaattcaggaggtgagtataagcttgaggtaacatcagacaattagatggggggaaaaaaaactagaatcatatacatcggtatcacatatacccaaaaaagtgcacttggaccttctttttcctctgtatccagttgtttgagmagtatggaattatggcccctcaccccccacacatgctataaaaccctttgcctccccagaacataatatatttggctgcaaaataaagatcaaggtcaatccagctttgctctaggtctgtaattcccaggagggca

SEQ ID NO: 580637 - DNA, 574 bp, Homo sapiens
cactggcaaaggctgaatgccaatctaacccgtgaagacaaacaaaactggccaatccgttattcgatttatttgaccatgataacagaggttaagagtrccgagtcctgccttccaccaaaatggcctcaactcaatccattttgccagaccatcattatctaccaggggcaaagccccatgctaggcaccaggcaagcacttagggataccgaaaggagaggccctccccacaggaaaatggctcgaacgggtgtccagcacagcgatgaaaatggcctgtgcctttggcaccctttgatggctgaactctgagatgaaaaccaaactcaaacctcaggcttgaccttggtttggcctgctgaaggtcaggaacccctcctgccctcccagtctgagctggagaggtgagaggaaaagacagaaggttttattataccacccaggccacgcctgccaagttctccctacaaccgcttcaaaaaaaaaaaaaaaaaagatggagtgaaagggaattggaaaaatggaaccccctacatcccagaaatattactttcatgagctgtatgaatta

SEQ ID NO: 580638 - DNA, 541 bp, Homo sapiens
ccagttgtgcccccaggacttaacgatatatatgtaatcttcttactcgtctcctgaccacgtgtttgcccatggcatggcagttgaggaaagagtgctgacttgagccaaaattcctgggacctatcatatctggctgtgtggcctggggtaacttaacttctctgtgcctcagtttcttcatctgtaaaagggagcaattctatctcatagaattaatgagatataagagtaaatcgggtaaagcacttagaatgttgcctagcatatggtagagtgcctgggcccattttacagctggagatgtgaaggtattaggcagctctagagttacatagccgagaaaaartgtgcaaaatttcttttaactctccatgatgttcttccaagcatagcataaatccctcaccactgtagtccactgtatttccagttggaaactttcagcaaacatctggatgcccaactccatcctcttctctgctgtgcccctctccctcggtacaaatagctccccttgaacaggttccagttctcaaac

SEQ ID NO: 580639 - DNA, 535 bp, Homo sapiens
cagtggcctgcactctagccctggcccagagccctgctggtcagaccttcagtgcatcacctgactgccccaggtctgatgtttcacccaccaaataaaaagtctgtatggacccatcgctaagatgctttccgattctaatctttcgtgattctgcaatccacagaagccagctccaatttgccagtcattccaacatccttaccccctstcacccttcctggtgcatctaggtagacccagagccagctagactgtgcaccaggctgagggatctgagaaaagctggcaggacagggccccaagaggtgtgcaccactagggaagagcaaggaaaggtgtttgtctccaacaagggctccaagcagacacacgggcccacctttgaggagtcgttgcctaacaatcaccaagaaagctgatttaatatgtgtattcctggatctcactgggtctgaagccaaggaatctgatttttaaacaataatcccaggtgatcccgatgtaggtgctgcacagatggtaggctgagaaa

SEQ ID NO: 580640 - DNA, 621 bp, Homo sapiens
ataggtccagctcctgcctcagcctcccaatgctgagattacaggtgtgagccactgcatccagccaagagttagtattaatcatagatcaatcatagggagaccctatagtcaaacacaactgggttaaactctgattgacagtcacctgtggatctgttttcttgcccaatctcagacagaaattgtagaagcctccttccaactgagaagcttcaaagagcctatctttatagtatgtgtttcctttaccttctatgattacttcrtctaatttcttgggaaaaaagaccttcacttcccttgcctcttacaatattgtggcccctgagaaactctctgttcccagatccccagtcttgccaccagcaccccctcccacgagacacaaaatttagaggataaattttaaagcaaacatatttaatttttcatcatttgcatgtttcaattaataatttgtacttattacttgatacacagcttttataatattttatttttaaacaggtttttccaaattttagaattacagtagagaatattgaagaacgcctcagttcattttgcaccttttacaccacttccatgcacattctgttttgctcatcaatgaacaca

SEQ ID NO: 580641 - DNA, 596 bp, Homo sapiens
cttttcatgctgacaaatcttcatcttctaaattcattttgtgtgtctactaaaatctagctaccactttaaaagtgttcaaaatctagccctgtaatttgacatctaagaattgatcccagggaaataatcagaaatgcccacgaggattttggtggaaaacattccatttcagtgttaattattaaagtaaatatgtacatgtacttaattaaatataatctgaaaataaactaaatctaaataatataaaaatcatcaaatatgtttttgtagacccagcaattgctacattagtcattaaaatgttttagaaaacatttgacgacaagaaaacatatacccaatcatatacaaaacatgtaccaaataagatacaaaattttatatacgtgtgtgaataaacatatgtgaatataagtatatacactatacatacatatatatgataccaattttrtaatacatatgtttgtgttctaagaaaaaaactaaaaggcaatacagtaaaatgttaaattatctctggatggtaagataacatataacttcattttattgtttgccttgaatattttccaaattttctataatga

SEQ ID NO: 580642 - DNA, 552 bp, Homo sapiens
gttcaacaggaactagaagattgaaacttaaaatgaaaataattattctgaggcctggggaaagtagcaatcatgaaggaagggttggctctgcttagactgaccctgggctacctagtgccaggtgagccttcgcagtcacctagtcgtcttccactggcttactgatgggaaatcaaggccttgatcaggtaagaggcttgtcaaatgtcacagagctacttggaggaagttctaatacaaagacccagttctggatacctctcgagtctatcatgattcttacttatctgtcttaaaggtgaaactgcccatttccagcatggaatgtattgagcagaattgcacggtgggacagagctgagaaaatgagatagtttttagtttcacagctccacaggtagtttttcttcagggtgcaatttcacgattttgtgtgcaatatcatgaataactaggacatcagatctccccataaraaaaagcaagcagaaccagagactgtagcacatatataccaggacaatttgacataaggaattattttgtgtt

SEQ ID NO: 580643 - DNA, 605 bp, Homo sapiens
gcattgtttggttgtactactagggccatactagcatgtgagcatttgcttatggtatgtgagaaatacaaacaggaacaggccttgttcatgtacctgtgtgtgaaccgtggcctagtcacttgtgaatctgaacacaaatgtccactgtgactgcctggtccaggtacctctgcttacagtgcctggaaacagtctctttaccttttttaggataaagtcaatgcaaaggattagccgagaatacttgagtccacatgatggaaggaactggatgccatttaatgaataagtaatttaagtgtaagtatacatacctagaaataactatatgtggtttgrgtttttattttagtgtgtattttttttagagacaggatcttactctgtcacctagcctggaatgtagtggtaacctcaagctcccgggctcaagtgatcctccctcctgggcctcccaagtagctaggactacaggcatgtaccaccacactaagctaatttacaaaaaataaaatatttttgtggtagggacaaggtctcactacattgcctaggctagtctcaaactcctggcctcaaatgatcttttcacctcccaaagg

SEQ ID NO: 580644 - DNA, 584 bp, Homo sapiens
tgtgccccatttcagtgcaggccactgccttggcccagcaggtttatgttatgcagaagtggcagggtttcttattttgtaaagtgaaagccagagatctgaatcattatgtaaaatatcttcatttttaaatatttgccaaccactaggatagccactattaaaaacaaaaaccaaacaacaacaaccagaaagtaacaagaagatgtggagaaattagaatccttgtgcactgttggtgggaacgtaaagtggctcagccactatggaaaacagcatggcaatttctcaaaatattcaacatacagttaycagatgattcagcaattccacttttgggtatacacccaaaagaattaaaaacagggactcgagcagatatttgcacacccatgttcatcacagcagccaaaagatggaagctgccaaaaagtcccattgacaaatgaacggatcaacaaaatgtggtgtctacataacagtggaatattattcagccttaaaaaggaaggaaattttgacatgcaacaacaggatgagccttgaggacatcatagtaagtgaaataagccagacacaaaaag

SEQ ID NO: 580645 - DNA, 549 bp, Homo sapiens
acacctcaacatgcagtctggtgcaggtgccactgtcacacagagatgggaagggcatgtgcgggtcacttggaagaaaccctgtgaccccgatgagtgcaatgtggtataatttagtagcccatgctcctagtttgtcttcttgcatgtgtgtggattccctcccaggcagggatgtaggacaaatctatcccagagctccatccttccagctcagtctccttgttgtgtgtgtgttttctcctctaatttttaacgtctgtgggtacatagtagatatacatatatgtgtgtgtgtgtgtgtgtgtgtgtgtgtgtgtgtgtgtgtgtrtatgtatatatatatgtatggggtatgcatatatttgtatggggtatatgagatatgttgatagaggcatgcaatatgtaataatcacacagggtaaatgggatatccatcacctcaaatatttatcctttgtgttacaaacagtgcaattatatttttatttttaaatgtgcaattaaattattattgactatagtcacactgttgtattatcaaat

SEQ ID NO: 580646 - DNA, 423 bp, Homo sapiens
attctgaggtactgggggttaaaacttcaacatgtccttttgagggaatataattcaattagtaaaactgcctctaatttatagttacatttttatgatactgagtatttctatctatgaacatggtatagctttccacttacatatstccatttaaattctttaatcatttttactaattcccttcataaagttttcagacacctttgttatatgtatttggaaatagcttatgtattagttttctattgttgctgtaacaaattaccacaaacttagtggcttataccaacacaaacttaccttcttacagtactagaggttagatatcctaaaatcagagaatcagtaaggctatgttctttctggaggctctaggggaaaatctgcttccttgcctttcccaggggattctgtctcttg

SEQ ID NO: 580647 - DNA, 423 bp, Homo sapiens
attctgaggtactgggggttaaaacttcaacatgtccttttgagggaatataattcaattagtaaaactgcctctaatttatagttacatttttatgatactgagtatttctatctatgaacatggtatagctttccacttacatatctmcatttaaattctttaatcatttttactaattcccttcataaagttttcagacacctttgttatatgtatttggaaatagcttatgtattagttttctattgttgctgtaacaaattaccacaaacttagtggcttataccaacacaaacttaccttcttacagtactagaggttagatatcctaaaatcagagaatcagtaaggctatgttctttctggaggctctaggggaaaatctgcttccttgcctttcccaggggattctgtctcttg

SEQ ID NO: 580648 - DNA, 618 bp, Homo sapiens
acgatgaaaccccatctctactaaaaatacagaaaattagccgggcgtggtgacgggtgcctgtagtgccagctacttgggaggctgaggcaggagaatcacttgaacctgggaggcagaggctgcagtgaaccaagatcgcaccactgcactccagcctgggctacagagtgagactctatctcaaaaaaattaattaattaaaaataaataaatgaataaagtgagtgctcagagctgtgttgctttgttgtgtgcatgtgtgtgagtgtgtgtgcttgtgtccctaagtcccagcartgagacaaattgtgtggttccttatcgtacctgagaagcagggagcagccaccaagaagactgttacagtgggtgagttgtttatgccctgcttaaggccagcccctccacttaatcttcatctcctctctcctagtcatggacttcacacccaccgttaacccctcactcctgcattatcaatctttctctcttgactggctcattcttggctacatacaaagatgatgtaatatttcccatctaaaaaaaaaaatccatgaccccaggttcctctttaggtcctgccctgtttctctgttcctttttatagcagaa

SEQ ID NO: 580649 - DNA, 578 bp, Homo sapiens
gccttcttttttttttttttttaaaagcttaatgaaattttattttgaaaatatggcaaaagtctaaggcacttcaaatatttaaatacatgtaggaccaaagtaaatgtgacacagtataaaggaatccataaatacagagaactacactatatttctctagaggcaaatacatagccaattcctctaacacaattcaacctttatcattagatacagaattgtgcaattattaacaaaaatatgataatgttacatgtagttcttcatgtctttaattagtatgaaatataaaagttgaaaatactgtgccaatttcatatactcttttttttwaaaaaagtcatatttacatctacctagatgaaaccaaatgaaaatattttcttttgtaagtttcatagtttttgagagttctatctagcccagactgaagttactgatgatcaactttcttactttaaaataatacaagaaaaatcaacaaaactgtgctgggatggaattttggaagagctttctaatggtgccacatttggtaaatataaatatttgtggaaaaattttaaaacgtgatg

SEQ ID NO: 580650 - DNA, 521 bp, Homo sapiens
ggctcacacctgtagtctcagctactcaggaagccctggagtttgagaccagcttgggcaacaaaggaagacckcatctctactaaaaatcaaaattagctgggcatggtgttgcattcctgtagttccagctactcaggaggctgaggtaggaggattgcttgagcccaggagatcacggcttgatcatgtcactgcactccagcctgggcgacagaacaagacccccatctcttaaaatttcatctcgcagccaggtgtagtggtgcatgcctgtagtctcagctattcaggaggctgaggtgggaggactgcttgagctgagtagttcaagtccatactggacaacatggcaagaccaccatctcttaaaaaagaaacttttggctgggcacaatggctcacgcctgtaatcccggcactttttgggagaccgaggcaggcaatcacctgagttcgggagttaaaaaccagcctcaccaacatggagaaaccccgtctctactaaaaatacaaaatta

SEQ ID NO: 580651 - DNA, 521 bp, Homo sapiens
ggctcacacctgtagtctcagctactcaggaagccctggagtttgagaccagcttgggcaacaaaggaagacctcatctctactaaaaatcaaaattagctgggcatggtgttgcattcctgtagttccagctactcaggaggctgaggtaggaggattgcttgagcccaggagatcacggcttgatcatgtcactgcactccagcctgggcgacagaacaagacccccatctcttaaaatttcatctcgcagccaggtgtagtggtgcatgcctgtagtctcagctattcaggaggctgaggtgggaggactgcttgagctgagtagttcaagtccatactggacaacatggcaagaccaccatctcttraaaaagaaacttttggctgggcacaatggctcacgcctgtaatcccggcactttttgggagaccgaggcaggcaatcacctgagttcgggagttaaaaaccagcctcaccaacatggagaaaccccgtctctactaaaaatacaaaatta

SEQ ID NO: 580652 - DNA, 549 bp, Homo sapiens
caaggcgggcagatcacctgaggtcaggagttcaagaccagcctggctaacatggtgaaaccccatttctactaaaaatacaaaattagccaggtatggtggcggactctgagtagtaatcccactactcaggagcctctggcacgagaatcgcttaaaccctggaggtggaggttgcagtgagctgagattgtkctactgcactgcagcctgggtggcaagaatgaagctctgtctctaaataaataaataaatagataaataaatgtgggacatcgaattttatcaagtgccttttctacaagtgataacataattatataattttattttattgtctgttaatgtgatatattatattattaattgattttttaacattagtaccagtctattcttgaaacaaatcttattagattgtgatgtgtttcactctgtatagattcactttttatggttaaaaaaagatttacatttatagtaaaaaatacatagatttattttttatagtaaaaaatgtagatttactttttatagtaaaaaatacta

SEQ ID NO: 580653 - DNA, 549 bp, Homo sapiens
caaggcgggcagatcacctgaggtcaggagttcaagaccagcctggctaacatggtgaaaccccatttctactaaaaatacaaaattagccaggtatggtggcggactctgagtagtaatcccactactcaggagcctctggcacgagaatcgcttaaaccctggaggtggaggttgcagtgagctgagattgttctactgcactgcagcctgggtggcaagaatgaagctctgtctctaaataaataaataaatagataaataaatgtgggacatcgaattttatcaagtgccttttctacaagtgataacataattatataattttattttattgtctgttaatgtgatatattatattattaattgattttttaacattagtaccagtctattcttgaaacaaatcttattagattgtgatgtgtttcactctgyatagattcactttttatggttaaaaaaagatttacatttatagtaaaaaatacatagatttattttttatagtaaaaaatgtagatttactttttatagtaaaaaatacta

SEQ ID NO: 580654 - DNA, 557 bp, Homo sapiens
atatatatatggacacaaagatccagaccatatgctataataatttgctgaggaatgtcaaactccccaaaacctttaatgtgatatgcccaatcatttcaattattttaaatgtctacctttattggacatgagtaaataaaacattttaacacagcyataattttatagtcattaagttaacaaggtaaagctgatgaccttatcacacaacagattttacaatttccaattaacttattttctggagctaaactgatagataaaatagagacaattttctacttgggagtgcaggcactttatcctccattgctcttataaacatttttttgatgcaacattgactatgttaaaaataagtctgagattagacattcaacttcattaacaataggaatgaggtattaggagaataaggtatcaactgaatagccattcagactttacccaaggtgagaaaattataaaagagaagcttcctaaaatgcaaatgatgctttctagcaatgtgaaggacatatgagacccaatataagcagttaactaagccatgt

SEQ ID NO: 580655 - DNA, 557 bp, Homo sapiens
atatatatatggacacaaagatccagaccatatgctataataatttgctgaggaatgtcaaactccccaaaacctttaatgtgatatgcccaatcatttcaattattttaaatgtctacctttattggacatgagtaaataaaacattttaacacagctataattttatagtcattaagttaacaaggtaaagctgatgaccttatcacacaacagattttacaatttccaattaacttattttctggagctaaactgatagataaaatagagacaattttctacttgggagtgcaggcactttatcctccattgctcttataaacatttttttgatgcaacattgactatgttaaaaataagtctgagattagacattcaacttcattaacaataggaatgaggtattaggagaataaggtatcaactgaatagccattcagactttacccaaggtgrgaaaattataaaagagaagcttcctaaaatgcaaatgatgctttctagcaatgtgaaggacatatgagacccaatataagcagttaactaagccatgt

SEQ ID NO: 580656 - DNA, 286 bp, Homo sapiens
ccttggtaccaattttctatattagtcatttctggcattgctataaagaaatactggagrctgtgtaacttataaaggaaagaagtttaattggctcgtggttctgcagtctatatggaaaacatgatgctggcatctgctgcatttctgaggaggcttcagtaaacttacaatcatagtggaaggcaaagggggagcaggcatgtcgtatggccagagcacgagcaagagaagaagggaggctaccacaacacacacttttaaacaacaagatctcatgagaatt

SEQ ID NO: 580657 - DNA, 452 bp, Homo sapiens
tatcagcattttggtcacaaccatttaaccatttaaccagtctgtaagaagttcctaactttccctcaccttcctgtcttcttctgagctctcagcacacttacctactctacctgttacctaattccaaagctgcttccacattttcaggtgtctttatagcagtgcatcactccttggtaccaattttctatattagtcatttctggcattgctataaagaaatactggaggctgtgtaayttataaaggaaagaagtttaattggctcgtggttctgcagtctatatggaaaacatgatgctggcatctgctgcatttctgaggaggcttcagtaaacttacaatcatagtggaaggcaaagggggagcaggcatgtcgtatggccagagcacgagcaagagaagaagggaggctaccacaacacacacttttaaacaacaagatctca

SEQ ID NO: 580658 - DNA, 515 bp, Homo sapiens
tgactacagaattggtacaaactcccaattaaaaaattcaaaaattcccataacttaatttttattatgtattgaattttgtcattctcactgtgacctttctggtatgggggctgataccgttctttcctagggacgtcgagacttgattatttgtgttgcacttcatcccccaattttaactcccatctctgaacttcaatttccttcactcaatatcctggaaggtctagcatactttctctctggtgtacttccttacctctcttgcccaagttaaacatccatttttgtcttagtttatagtaagcactgtagttacatatttatgtacatatgtgttgaataagctggtagcactcmatttacagtgtgtttgaagaagctccagatttataatatatccctgttaattttttttttacaaataatatggtttaattgtgcatatgtaataacaattctacaataacacttacttcctacaacattagaccctgagaaaacatgtggca

SEQ ID NO: 580659 - DNA, 267 bp, Homo sapiens
gttacttatacagcaggctggagagggaaggagagaatggatagggctgggtggtaggaggaaggaggtgggagaaaagatagggcacacattcagggtaagaagaggttaagaggctgggccaggatggggccagccccaaacccatctccttctgcctggatcttgtgggctcccaggactctcctttgctttggccatcarcgaaaggaggtaagggatgttgagcatcagactccttctgcatccttcccccaggaagcagaa

SEQ ID NO: 580660 - DNA, 552 bp, Homo sapiens
tgagtggaatggtaattctgttttaaattcttttagaaattgccacactgctttctacatgactgaactaatttacatttccaccagcagtgtataaacattcccttttccccacaatcttgccagcatctgttatattttgacttcttaacaatagccattatgattaatgtgagatggtatctcattgcggctttgatgtgcaattttttaatgattagtgatgttgagcatttttcgtttttgttttctacccagtttctgtttccttttttttcttttacctcattctttgtcygagacagagtcttgctctgctgcccaggatggagtgcagtggcacaagctcggctcaatgcaacctctgcctcgtaggttcaagcgattcttctgcctcagcatcccaagtagctgggattacaggcacctgccaccacacccaggtaatttttgtatttttagtagagacgggatttcaccatgttggccaggctggttttatatgcttgttagcctcatgtatatcttcttttgaaaagtgtctgttcatgt

SEQ ID NO: 580661 - DNA, 552 bp, Homo sapiens
tgagtggaatggtaattctgttttaaattcttttagaaattgccacactgctttctacatgactgaactaatttacatttccaccagcagtgtataaacattcccttttccccacaatcttgccagcatctgttatattttgacttcttaacaatagccattatgattaatgtgagatggtatctcattgcggctttgatgtgcaattttttaatgattagtgatgttgagcatttttcgtttttgttttctacccagtttctgtttccttttttttcttttacctcattctttgtccgagacagagtcttgctctgctgcccaggatggagtgcagtggcacaagctcggctcamtgcaacctctgcctcgtaggttcaagcgattcttctgcctcagcatcccaagtagctgggattacaggcacctgccaccacacccaggtaatttttgtatttttagtagagacgggatttcaccatgttggccaggctggttttatatgcttgttagcctcatgtatatcttcttttgaaaagtgtctgttcatgt

SEQ ID NO: 580662 - DNA, 552 bp, Homo sapiens
tgagtggaatggtaattctgttttaaattcttttagaaattgccacactgctttctacatgactgaactaatttacatttccaccagcagtgtataaacattcccttttccccacaatcttgccagcatctgttatattttgacttcttaacaatagccattatgattaatgtgagatggtatctcattgcggctttgatgtgcaattttttaatgattagtgatgttgagcatttttcgtttttgttttctacccagtttctgtttccttttttttcttttacctcattctttgtccgagacagagtcttgctctgctgcccaggatggagtgcagtggcacaagctcggctcaatgcaacctctgcctcstaggttcaagcgattcttctgcctcagcatcccaagtagctgggattacaggcacctgccaccacacccaggtaatttttgtatttttagtagagacgggatttcaccatgttggccaggctggttttatatgcttgttagcctcatgtatatcttcttttgaaaagtgtctgttcatgt

SEQ ID NO: 580663 - DNA, 592 bp, Homo sapiens
gttccttcctgggagcctcctgcagctgaaatgtacactggaaatactcctgcccctccccctgcatgactacataaatcatctatcacttgggcaatcctacctcactaccaagtggccctggcatgggtgtctcttgtgtatgacaagctccttggctcttggacaaaasagtacccactatctccaccagcaccagactcacagccaggccatttgctagtcctcaagcctaactagtgcttgttgcccatcaatccccaaaggtctctgttgttgatgttctggcatggtcaatggccaagcccttctcaagttgtgaataagagcttggcaatttcagacaacatccccaacatcccatgcattagtaagacatgcagctgaggttttaggctcaagactaacacataagtggtgaaaagtctggggcttccattgggtgtggtgctggttgagtggcgtgaaggtgattttgatggtttagattttgggaacaggacagttatattagatcaatattcccaggcatttggatttcatggacaattacaatttcaaaaatactctctgggagagtttataatattgg

SEQ ID NO: 580664 - DNA, 571 bp, Homo sapiens
tgaggcaggtccatggttggtagatcaatcataatcmaaaagcatcatctaatagagcaaaggagggtatgggaagggggactcaaatgcctacatatgagtggtggtgagttctctggccaacagaaagggatagggtcagctacaggaagaagccatcacccaggtgtagcctattgtggccacaagaggcctggccaagttggagccagaccccagtgaaggtagaaatctagatttgccaattaaaagtgctgcaagcacataccaatggaaaaacaaacactgtgtcacacacacacacacacacacacacacacacacacacacaccacaactgtgggccaaatacaacctatagctgtcagtttgcaatgttaggattaaacatttgccattaaccagagaaaggcagtgacacaaggctctattctctaatctgtcctcttcaatattttcatttccaacttgaatgaggacacagaagccataattatcacacagacagatatcaggaaactggaagctgggggcagacaggatcaaaattcagagtgattttcacaggctg

SEQ ID NO: 580665 - DNA, 571 bp, Homo sapiens
tgaggcaggtccatggttggtagatcaatcataatccaaaagcatcatctaatagagcaaaggagggtatgggaagggggactcaaatgcctacatatgagtggtggtgagttctctggccaacagaaagggrtagggtcagctacaggaagaagccatcacccaggtgtagcctattgtggccacaagaggcctggccaagttggagccagaccccagtgaaggtagaaatctagatttgccaattaaaagtgctgcaagcacataccaatggaaaaacaaacactgtgtcacacacacacacacacacacacacacacacacacacacaccacaactgtgggccaaatacaacctatagctgtcagtttgcaatgttaggattaaacatttgccattaaccagagaaaggcagtgacacaaggctctattctctaatctgtcctcttcaatattttcatttccaacttgaatgaggacacagaagccataattatcacacagacagatatcaggaaactggaagctgggggcagacaggatcaaaattcagagtgattttcacaggctg

SEQ ID NO: 580666 - DNA, 571 bp, Homo sapiens
tgaggcaggtccatggttggtagatcaatcataatccaaaagcatcatctaatagagcaaaggagggtatgggaagggggactcaaatgcctacatatgagtggtggtgagttctctggccaacagaaagggatagggtcagctacaggaagaagccatcacccaggtgtagcctattgtggccacaagrggcctggccaagttggagccagaccccagtgaaggtagaaatctagatttgccaattaaaagtgctgcaagcacataccaatggaaaaacaaacactgtgtcacacacacacacacacacacacacacacacacacacacaccacaactgtgggccaaatacaacctatagctgtcagtttgcaatgttaggattaaacatttgccattaaccagagaaaggcagtgacacaaggctctattctctaatctgtcctcttcaatattttcatttccaacttgaatgaggacacagaagccataattatcacacagacagatatcaggaaactggaagctgggggcagacaggatcaaaattcagagtgattttcacaggctg

SEQ ID NO: 580667 - DNA, 571 bp, Homo sapiens
tgaggcaggtccatggttggtagatcaatcataatccaaaagcatcatctaatagagcaaaggagggtatgggaagggggactcaaatgcctacatatgagtggtggtgagttctctggccaacagaaagggatagggtcagctacaggaagaagccatcacccaggtgtagcctattgtggccacaagaggcctggccaagttggagccagaccccagtgaaggtagaaatctagatttgccaattaaaagtgctgcaagcacataccaatggaaaaacaaacactgtgtcacacacacacacacacacacacacacacacacacacacaccacaactgtgggccaaatacaacctatagctgtcagtttgcaatgttaggattaaacatttgccattaaccagagaaaggcagtgacacaaggctctattctctaatctgtcctcttcaatattttcatttccarcttgaatgaggacacagaagccataattatcacacagacagatatcaggaaactggaagctgggggcagacaggatcaaaattcagagtgattttcacaggctg

SEQ ID NO: 580668 - DNA, 613 bp, Homo sapiens
acacacacacacacatttattgtctcataatttctgtgagtcaagggtccatgttctgtgggtcaagggttgcaatcaaggtgtcagccaaggctgggttttcctgaaatttgattggagaaggatccacttccaagctccctcaagttggcagaattcatttccttgtggctgtcagattaatggtaactttcttcttcaaagctagcaatggagagagaggctctaacaagatgggtgctatatgatcatataaacataatcatgtacctacctcatcatctctactgcattctgttggttagaaacaagtcatacttgctgaccatatttgaggggaaaaattattaaaaagtgttaattaaaggaggtgggaatcatgtggaccattttaaagtttgtctaccacagtaacattcttaggaccaatttttataattaygcaaactaaattaatttctagtaccatttctgatcctagttcgtagaggagcttcttgactgctattttggtattattttcaaatttctaacgtataatcattactattaattgttacaatttatggagtatttgcttaggggctgacattactatgtactttttatatat

SEQ ID NO: 580669 - DNA, 613 bp, Homo sapiens
acacacacacacacatttattgtctcataatttctgtgagtcaagggtccatgttctgtgggtcaagggttgcaatcaaggtgtcagccaaggctgggttttcctgaaatttgattggagaaggatccacttccaagctccctcaagttggcagaattcatttccttgtggctgtcagattaatggtaactttcttcttcaaagctagcaatggagagagaggctctaacaagatgggtgctatatgatcatataaacataatcatgtacctacctcatcatctctactgcattctgttggttagaaacaagtcatacttgctgaccatatttgaggggaaaaattattaaaaagtgttaattaaaggaggtgggaatcatgtggaccattttaaagtttgtctaccacagtaacattcttaggaccaatttttataattatgcaaactaaattaatttctagtaccatttctgatcctagttygtagaggagcttcttgactgctattttggtattattttcaaatttctaacgtataatcattactattaattgttacaatttatggagtatttgcttaggggctgacattactatgtactttttatatat

SEQ ID NO: 580670 - DNA, 546 bp, Homo sapiens
aaaatatttattagccatttgcattcattttctgaaatttttgsttaattttttccctgttggagatatttctttctttccatttttaaaagaggatgtttaatgattaatgctgcttatactggattgactttatcttttagtgttttattacttcagatgtttctagtgagctgaatttggcttggttctacattttcatccagtgtgatcatcttcatctttcagtaagaaagtcttaattttttatgtattcgattatcaacatatttgaacttttcaaatattcattttgttcatttttttttgtttattttttcttctcctgactcttcaatattggattggtggagccttctttattcccctgttacttccctctgaggtagaagttatataggctatttctgttctttttgtttgtttgttttcttcatttttgtatttttaatagtacttatctgatcacactaagacttggcaaagagtaacttagagaacgactccaaacctccctattccccaattctatccatgttatggctg

SEQ ID NO: 580671 - DNA, 644 bp, Homo sapiens
accattcttgcaccctacacttttgagacagagattcccatccactctgtgtttattattggagggataagaactaaatgagagaggaagcaatagatggggcataatgacggagwtgccggttgactaagggagtggccaggcctcttatacttgctttccagggtatccttgaggagttctccaggagttgcttcccctgggctctgtattcatagttaaggaagtaatctatgcctaatgatgccataagcatgatcacaccttcttttgtgtaaataatgtctgataaaatgaggtgtgagcctgctgttgcaaagaacacttagctgttaaatgctttcttttccactccattgactttccctatttatagcttttccagcagagcatttgtgtcatattcctttcctaccagctgctgggttcctcaacttagttctgaaggaaaacccacaggtaccttcctggaactacctgttccctatggtgctggcctctgcttgggtcaagagtcaacagacaaagtatggggtgaggtcttgtattagtctgttttcttttgcttataacataatacctgaaactgagtaatttataaagaaaagaaatatatttcttacagttatggaggctgagaagtc

SEQ ID NO: 580672 - DNA, 476 bp, Homo sapiens
aatcctttaacttgattcagcaatatggagacggactctagaaccagaaagctttgtacttgtccaatggtaggaagacttataaaaatgaactktgaggcttgttgagttttattggggtacaattttggttttgttatttttataaaattgtagagaataatgaaactgagaaatgaggctattaagttaaaattgtttttgaaatggagatagtcagtttcccatgttcttttaagcacagtgtgatgcattcataaatttattgtaataattttcacctaattacacttttgatttaaaatgtgtaattctctttcagaatcaatataatctagcaagagcccaacaatcctataattccattgtacagatacatgagaaaaatggtatgtttaattcaataagtgtttattgccatttaagaagttttagataatgtattaatacttaccattttatttttctgtttttgc

SEQ ID NO: 580673 - DNA, 551 bp, Homo sapiens
agcaaattctaattaattttgatttgcattttctaacttgcaatagaaatgtaagattatccacaagataccaacttaatgacacaagataccaacttaacaacagttattatratctactttcaaataaagtagctcacctttcatctatatttaacagacataatgaaaggtatagaggttgatgtaagcttggtaaagtacaatttcatttaacctcctattatttagatctttaaacatgtgaatccctaatgagtgactacaaaacctcttcattatgtatgatttaattcattttaaacagttcagaataactcttctacatcaaaatctgcgggctctattccataaagtctataccctggaactcaggaatccagattttacagaaataaaaagttcctcagggaggaaaaaaaggttgaggatgactgttaaaatgaagtttcagttaccttagtacatattaactcagaaacagactctcagactctataaaggatctcagaaagttatctgagatcttaacatcttagccatctaagtta

SEQ ID NO: 580674 - DNA, 305 bp, Homo sapiens
acccaacagattctgaagccaaagctgagggcattkgaagccaaagccaggccagacagagatgaggctcctgggggggaacaggtgcagtcctgctcaggctgcggtgtccctgggctacagctggacaagggctccctctgggtcacagcttctagggacagagtttggggtagtttgactgtctgatttgtaggactctggtgatgagctcagctgggaaactgtgtggtaatgggaagagaatgcttttgcttttccaaatcatctccccctgcatgcttggatccacatgggaactcagt

SEQ ID NO: 580675 - DNA, 305 bp, Homo sapiens
acccaacagattctgaagccaaagctgagggcattggaagccaaagccaggccagacagagatgaggctcctgggggggaacaggtgcagtcctgctcaggctgcggtgtccctgggctacagctggacaagggctccytctgggtcacagcttctagggacagagtttggggtagtttgactgtctgatttgtaggactctggtgatgagctcagctgggaaactgtgtggtaatgggaagagaatgcttttgcttttccaaatcatctccccctgcatgcttggatccacatgggaactcagt

SEQ ID NO: 580676 - DNA, 305 bp, Homo sapiens
acccaacagattctgaagccaaagctgagggcattggaagccaaagccaggccagacagagatgaggctcctgggggggaacaggtgcagtcctgctcaggctgcggtgtccctgggctacagctggacaagggctccctctgggtcacagcttctagggacagagtttggggyagtttgactgtctgatttgtaggactctggtgatgagctcagctgggaaactgtgtggtaatgggaagagaatgcttttgcttttccaaatcatctccccctgcatgcttggatccacatgggaactcagt

SEQ ID NO: 580677 - DNA, 305 bp, Homo sapiens
acccaacagattctgaagccaaagctgagggcattggaagccaaagccaggccagacagagatgaggctcctgggggggaacaggtgcagtcctgctcaggctgcggtgtccctgggctacagctggacaagggctccctctgggtcacagcttctagggacagagtttggggtagtttgactgtctgatttgtaggactctggtgatgagctcagctgggaaactgtgtggtaatgggaagagaatgcttttgcttttccaaatcatctmcccctgcatgcttggatccacatgggaactcagt

SEQ ID NO: 580678 - DNA, 647 bp, Homo sapiens
ttattttattttattttatcttatttattttttttgagacatagtcctgctctgtcacccaggctagagtgcagtggtgcgatctcggctcactgcaacctccrcctcccaggttcaagcgattctcctgcctcagcctcctgagtagctgggattacaggcacccgccactgcacccagctaatttttgtatttttagtagagatgggatttcaccatcttggccatgctggccttgagctcctgaccatgatccaccctcctcagcctcccaaagtgctgggattacaggcgtgagccactgcacccggccattttatgtttttattatttttagagatagggtctcattctgtcacccaggctggagtatagtggcatgatcatagctcactgcagtgttgaactcttgagctcaagcaatcctttcacctcagtatcctgagtagcttggactgcaggcatgtgccaccatgcctggctaatttttaattttttttgtagagataaggtctcactgttttgcctaggttggtctccaactcctggcctcaagcaacccttctgtcttggcctcccaaagcattgggcttacagacatgagccacttcacctggcctgtcttttaaattatatagaaaagaaag

SEQ ID NO: 580679 - DNA, 442 bp, Homo sapiens
agtggcatgatcatagctcactgcagtgttgaactcttgagctcaagcaatcctttcacctcagtatcctgagtagcttggactgcaggcrtgtgccaccatgcctggctaatttttaattttttttgtagagataaggtctcactgttttgcctaggttggtctccaactcctggcctcaagcaacccttctgtcttggcctcccaaagcattgggcttacagacatgagccacttcacctggcctgtcttttaaattatatagaaaagaaagagttacaaacaaaaaacacatttttattgtcttttatatttatctatgtaattaccttttctgtgctttttatttctccttgtcgatttcagttactctctagggttcttttatttaattctgaaggacactctttaatatttattttagtatggtcactagtaagga

SEQ ID NO: 580680 - DNA, 470 bp, Homo sapiens
ttgatctgcatctgatatatagacagtggttttctgcttggacagtggtaaaagtaactgagtaaatgaaaccaagaagttgaagaaagaattagtacaaagaagaaggctgttagaaggcagaatttattcccgtttgacagctccttactctgggttttaggttgtcttgcaaggcagaagtccctagttattggtaagtcttttctatgtagraaaaccccattatgtgttttttggctgcataaatgtcttcttttgagaagtgtctgttcatgtccttcacccactttttgccatcagagaaatgcaaatcaaaaccacaatgagataccatctcacaccagttagaatggcaatcattaaaaagtcaggaaacaacaggtgctggagaggatgtggagaaataggaacacttttacactgttggtgggactgtaaactagttcaaccattgtggaagtcagcgt

SEQ ID NO: 580681 - DNA, 554 bp, Homo sapiens
agaattcacaccaaactgtagaaaataataaaaattgaaaaacatcagccaagactagtatctaacattaggagtactatagtttttgaaacaattctctcttcagtttcccatttttactaaagacaaatcatggtagaagagatttgctttattatacttggccagattatttgtataaagtgaagaaagaataattattttttcacataggcttttaaaattggctttgatggtactttgttccatagaaagaatctcagataaggctttttaaaagccaatccctgggccgggcatggtggttcatgcctgtaatcccagcactttgggaggctgaggtgggcagatcacctgaggttaggagttcaagatcaacctggccaacatggtgaaaccctgtctctactaaaaatacaaaaattatstgagggtggtggtgagtgcctgtaatcccagctacttgggaggctgagacaggagaattgcttgaacgcaggaggcagtggttgcagtgagccaagatctcatctctgcactccagcctgggcaac

SEQ ID NO: 580682 - DNA, 644 bp, Homo sapiens
agtgtgtaataatcacatcagggtaaatgagtttccatcaactcaaccatttatcctttgtgttacaaacaatctaattatactattttagctatttttaaaagaacaataaattattgctgactgtacccatcctctgtgctatcaaataatatatcttatttattacatctaattgtatgttagtatcccttagctaatccaactccccacccccaattcccttctcagcctctgataatcctcattctccttttatctctatgaattcaattgtataattttgagctcccacacataagtgagaacatgtaaagtttgcctttctgtactggcttatttcacttaacataattacctccagtttcacccwtgttgttgcaaataacagaatctcattctctttatggctcaggagtactccattgtgcatatgtaccacattttctttatccatttgtctgatgatggacacttaagtgtctttcaaatcttggctatggtgaacagtgctgaagtaaatatgagagtgcagatatctcttcaataatctgaattgtattctttgggcatatacctagcaatgggattgctggatcatatggtaattctatttttgcttttttgaagaacctccaaactgt

SEQ ID NO: 580683 - DNA, 644 bp, Homo sapiens
agtgtgtaataatcacatcagggtaaatgagtttccatcaactcaaccatttatcctttgtgttacaaacaatctaattatactattttagctatttttaaaagaacaataaattattgctgactgtacccatcctctgtgctatcaaataatatatcttatttattacatctaattgtatgttagtatcccttagctaatccaactccccacccccaattcccttctcagcctctgataatcctcattctccttttatctctatgaattcaattgtataattttgagctcccacacataagtgagaacatgtaaagtttgcctttctgtactggcttatttcacttaacataattacctccagtttcacccttgttgttgcaaataacagaatctcattctctttatggctcaggagtactccattgtgcatatgtaccacattttctttatccatttgtctgatgatggacacttaagtgtctttcaaatcttggctatggtgaacagtgctgaagtaaatatgagagtgcagatakctcttcaataatctgaattgtattctttgggcatatacctagcaatgggattgctggatcatatggtaattctatttttgcttttttgaagaacctccaaactgt

SEQ ID NO: 580684 - DNA, 644 bp, Homo sapiens
agtgtgtaataatcacatcagggtaaatgagtttccatcaactcaaccatttatcctttgtgttacaaacaatctaattatactattttagctatttttaaaagaacaataaattattgctgactgtacccatcctctgtgctatcaaataatatatcttatttattacatctaattgtatgttagtatcccttagctaatccaactccccacccccaattcccttctcagcctctgataatcctcattctccttttatctctatgaattcaattgtataattttgagctcccacacataagtgagaacatgtaaagtttgcctttctgtactggcttatttcacttaacataattacctccagtttcacccttgttgttgcaaataacagaatctcattctctttatggctcaggagtactccattgtgcatatgtaccacattttctttatccatttgtctgatgatggacacttaagtgtctttcaaatcttggctatggtgaacagtgctgaagtaaatatgagagtgcagatatctcttcaataatctgaattgtattctttgggcatatacctagcartgggattgctggatcatatggtaattctatttttgcttttttgaagaacctccaaactgt

SEQ ID NO: 580685 - DNA, 550 bp, Homo sapiens
ggcagaaagcctcaacaatggcatcatttagacattacytaaaatgtttatcgtatggtttgtggtcaatttagacctagccacactaaaggaggacttcctatgccagtagggttgattttgacttgctttgtattcacagagctataaccaaagttgatgcaaacattggtagtgtcatggcaggctctttactcagtgaagtaggggaacagcttctggaataataatggacctggcactggggagttcctctctaatggacagtagcaagtctgatattttatcaagacccactttcaaaacctgtgactttgccgcaaggctctgctctgcttctctttgcagccccatggtgtgctatttttatgctgcacatgtttaattttgcaacttgtgacaatttgaaaggcataacaatgtctgttcccactgagatacacagaacacaccacgatgttttgagaggagcagtctttgagagaaaactccactgtgagaagagtcttcttgggaatcactacactcgtcattccttgaagagaagcca

SEQ ID NO: 580686 - DNA, 587 bp, Homo sapiens
tatttgttgagttcttactgttggtaaaatattgagctcagctttgtaggataaaaacatgaatgccaagatgaatacggcattttcctgtcctcataggtgtaatctcctttcatataaagcatatcttatgtttagtaatttttctagcaagtagcatgataccagtcactagctggtaaattcataattgtttagtaataagatttgactcagtgtgtgatataattcaccatctataaagtgctcaaaaattacaaatctgttttcctgctattaaaatgaagacacacaatgtcaaattcagaatgtttatgatattatgatttcaaattaagccgatggaaaaaactaattggaaatcatagtactgcactgaacacaaggacatttgctgctagtattgtagttggctaagctcagacatctttaatctcatttaagtgatgtcataagctccatcatattgaatgttaaatacttatacaaaaaatataaatgactggatattttcacctattgtatttkaaatcttcccagttattaagttctgagtgatggcagaagaaatataaaaaacaagtcac

SEQ ID NO: 580687 - DNA, 587 bp, Homo sapiens
tatttgttgagttcttactgttggtaaaatattgagctcagctttgtaggataaaaacatgaatgccaagatgaatacggcattttcctgtcctcataggtgtaatctcctttcatataaagcatatcttatgtttagtaatttttctagcaagtagcatgataccagtcactagctggtaaattcataattgtttagtaataagatttgactcagtgtgtgatataattcaccatctataaagtgctcaaaaattacaaatctgttttcctgctattaaaatgaagacacacaatgtcaaattcagaatgtttatgatattatgatttcaaattaagccgatggaaaaaactaattggaaatcatagtactgcactgaacacaaggacatttgctgctagtattgtagttggctaagctcagacatctttaatctcatttaagtgatgtcataagctccatcatattgaatgttaaatacttatacaaaaaatataaatgactggatattttcacctattgtatttgaaatcttcccarttattaagttctgagtgatggcagaagaaatataaaaaacaagtcac

SEQ ID NO: 580688 - DNA, 580 bp, Homo sapiens
ttttccttgcttacagtatttagtctgcttatccaattcaacccttttgcattaatattttatttcttgcttccccagttagattgtggtctagactatgcctcatatgctttttttgccctttaaggctcagcttagctattaccttctctagaacccttgccttactatccttttctccgaccctgaacatgtatatatatatgtacatatatacatacacatgtatatatatacaygtgtatatgtacatgtatatatgtatctatacacatatatatgtatctatacatatatgtatctgtatagatacatatatgtatatatgtatctgtatagatacatgtgtacttatatatgtacacatatatatatatatatatatatatatatatatatatatatatatacacacctccatttttgtgcccctacagcactgagtccaggatatcctaactgattacttagactattttatagtaatctggtttcttcttttcgtctctcactattgcattatttccatttccatatgatttgactttcttttatctctattcccagtgctcaccatggc

SEQ ID NO: 580689 - DNA, 530 bp, Homo sapiens
aaaaccatcagatcttatgagaactcactcaccatctcaagaacagcatggrggaagccacctccatgatccaatcacctcccatcaagtctctccctagatacatggggattatggagattacaattcagtatgagatttgggtggggacacagccaaatcatatcagtgagcaattaaggaattaacagtgtcgaatcttggtttgttaacattgatgaagacaaatatatagccaccaatatccactctatctcttcacctggtttaaggtttttttgtttgtttgtttgtttgtttttgtttttgtttttttcctttcatcatggcaagaggtgctttaactcttcattctgtaatcccatgaacagctatacagatgtaccatacattttttggaggggtgggggataacattcttcaatgtcactaggtttttgtaggaccaactcaagccggcaggtatagttagagagacggaaaggtacaagaccaactatggaagaatccaatgcctccaagcattacat

SEQ ID NO: 580690 - DNA, 350 bp, Homo sapiens
ggttactgggcttaatacctgagtgatgaaataatctatacaacaaacccccatgacacgtgtttacctatggaacaaacctgcatgtgtacccccaaaccgaaaataaaatttaaaaaggaagaaagtcttcttaaagaagagattggacctgggcataaaggctggacttggggagtcagataggtgtcaggaggatgtttttcaagggtrgatattaaaataagaaccaaaaataaggatgagcacaggggatgtttggggttcacccagtgctctagcctaaggggaaaggaatggacatttgttgagccctatgtaagtgccgtatgctttactcagtggtgaat

SEQ ID NO: 580691 - DNA, 270 bp, Homo sapiens
ggggatgtttggggttcacccagtgctctagcctaaggggaaaggaatggacatttgttgagccctatgtaagtgccgtatgctttactcagtggtgaatacatgtcatctcacattctcagctctagccctgttagactccggcggctcttcaaacaactagaccttcagatttgcacatctcttggccacaaagacttcttaccactgtcttttcctgaagaaaatctgtcaactgwtgcaagaaatctgagcggaccttttgcagct

SEQ ID NO: 580692 - DNA, 513 bp, Homo sapiens
gagtggtcactcatatcatgagcatagatattggatcattgctaattatatatawatatttgtccatttaaccttttattttgatacacacacacacacacacatatatatatacacacgtatacatatatatatgtggctgagagggaatgcaaaaatcatacaaatcctaaatgtggaatttagcaatatctagcaaaattacagatacatttaaactttgacccagaaacaccatgtctagtgatctgctccaagaaacactggtaaaaaatgggggaaaaaagatgtttccatatttttttaaaaacaccatttgtgcttgcaaaaagacagaaatcatcctcggtgttcatcaattgaggactagttgaataaactatgttgcactcatggaatatagttcagctttgaacaggaatgaagcatccccacacgtaacactacaagctgagcttctgaatatatagctatgagagaaaagcacagacaatgcatgtatactatgctaat

SEQ ID NO: 580693 - DNA, 513 bp, Homo sapiens
gagtggtcactcatatcatgagcatagatattggatcattgctaattatatataaatatttgtccatttamccttttattttgatacacacacacacacacacatatatatatacacacgtatacatatatatatgtggctgagagggaatgcaaaaatcatacaaatcctaaatgtggaatttagcaatatctagcaaaattacagatacatttaaactttgacccagaaacaccatgtctagtgatctgctccaagaaacactggtaaaaaatgggggaaaaaagatgtttccatatttttttaaaaacaccatttgtgcttgcaaaaagacagaaatcatcctcggtgttcatcaattgaggactagttgaataaactatgttgcactcatggaatatagttcagctttgaacaggaatgaagcatccccacacgtaacactacaagctgagcttctgaatatatagctatgagagaaaagcacagacaatgcatgtatactatgctaat

SEQ ID NO: 580694 - DNA, 513 bp, Homo sapiens
gagtggtcactcatatcatgagcatagatattggatcattgctaattatatataaatatttgtccatttaaccttttattttgatacacacacacacacacacatatatatatacayacgtatacatatatatatgtggctgagagggaatgcaaaaatcatacaaatcctaaatgtggaatttagcaatatctagcaaaattacagatacatttaaactttgacccagaaacaccatgtctagtgatctgctccaagaaacactggtaaaaaatgggggaaaaaagatgtttccatatttttttaaaaacaccatttgtgcttgcaaaaagacagaaatcatcctcggtgttcatcaattgaggactagttgaataaactatgttgcactcatggaatatagttcagctttgaacaggaatgaagcatccccacacgtaacactacaagctgagcttctgaatatatagctatgagagaaaagcacagacaatgcatgtatactatgctaat

SEQ ID NO: 580695 - DNA, 619 bp, Homo sapiens
ttctatacatatgagcaaactgaaggtctgaaaggttggcttgcttgagatttagtgtagaaggctaacatactgatactgttgctgttttcctctctcctcattccgagaaggcagtcaggctctttgtagttgtcctcctagctcttcaggtggggaggtggaaacagtggctgcttattgacatctctatcctcagtttctcatgaaagattaagttcattttggaaatcgtgtttcatttcctagagaggtaggagagagcagggattgccttggagaatagtgagagagaaaaatcagaaagagggacactgctccaggaagggaacaggcagtggattgtggctactactttggagtacataaattatatatccagttccctattaccacctgtggtggaagcagagcctttgctagaaatggtcatgtggtatagcagagacccatacctgccaccacacccggctaatttttgtatttttagtagaggcaggrttgcactatgatagccaggctggtctcgaactcctgacctcaggtgatccacctgcctcagcctcccaaagtgctgggattaaaggcgtgagccaccgtgcccggccccagagaccca

SEQ ID NO: 580696 - DNA, 582 bp, Homo sapiens
aggagacaaagaaacaaattaaatatagtatattaaatgtggtaagtgctgtggagaaaaattaggcaagaaagtggtactaggcctgatttcaaactacattataaggccayagtgaccaaaacagtgtggtactggcacaaaaaaaggcacatagaccaatggaacagaatggagagcccagaaataaacccaaattcttacattcaactgatcttcaagaaagcaaacaaaaagataaagtggggaaaggacatccttttcaacaaatggtgctgggatgattggctagccacatgtaggagaatgaaactagatcctcatctctcaccttaaacaaaaatcaactcaagatggattaagggcttaaacctaagacctgaaactactgaaattctagaagaaacattggaaaaacccttctagacattggcttaggcaaggatttcatggccaaggacccaaaagcaaatgcaataaaaacaaagataaatagctgagacctaattaaactaaagatcatttttgcatggcaaaaggaacagtcagcagagtaaacagataacctacagagtgggagaa

SEQ ID NO: 580697 - DNA, 603 bp, Homo sapiens
tgtttgctagctttttactaacaaataaggctaaaagcaccttgcattaagaaactgtcttattttgcatttgttacaatatttagaaatattaagcctgtagcacacatgcagttgatttctaagtcttgttttagatcaacttatcatcttgtttgtgtatgtaaaacaagtaaaaaatatctgatgttatagctcctcatttattgatttaattttttcactgacagtgaatattcatatgaattcttggattactttaaaataaatrtgacttaacacctagttcatattctggttttcttttaaaaataacattaataaagtttatatttgaggcttcatatgcaaaaaattaagtaccatgaaatatggagtgtgcaaatattcttaactttcatattaagtagtaaaaaaaccctaagtttttaaaaagacgtgttgacttagtttttaaaataaaactcattgtaacatttattcagctcattttctacattaaattttaacagaggttatatattattgatctaaggctgcataacaaattatctcaagatatattgccttaaaacaacaataaacatttattatgttatggct

SEQ ID NO: 580698 - DNA, 516 bp, Homo sapiens
agactaatgtagattctgatgttttggggtgaagtgttctataggtagatgtctgttaggtttatttcgtcaagggttgagttcaggtcccgaatatctttgttagttttctgcctcaatgatctatctaacaagtggtgtgtagaagtctcccactattattgtgtggttacctgtttctttgtaggtctctaagracttgttttatgaatctagctgctcatgcattggatgcatgtatatttaggagagttaagtcttcttattgaattgaacattttaccattatataatgcccttctttgcctttatttatcattgtcggattaaagtctgttttgtctgaagttagaatagcaacccatgcttttgttttgttttgtttttcatttacttggtagatttttctccatccctttactttgagccaatgagagtcattgcatgtgagatgggtcacttgaagacagcatacagttgggtcttgcttctgtgtgcaacctgtcgcttggtgcc

SEQ ID NO: 580699 - DNA, 677 bp, Homo sapiens
gtgtttttttggtggctggtaatggtctttttttaattttagcatttccttaagaacctcttgtaaggcaggtctgctagtaacaaatttctttagcatctgctagtctgaaaaggattttatttctccttcttttatgaaggtttgtttggctagatatgaaaaatctttgttggaatttcttttctttaagaatgtttactataggtaaccagtrtcttctgaactgtgggatttctgctgaaagttctgcctttagcctgatgggattccttttgtaggtgatctgttccttctctctagctgcttaaaattttttttttctttcatgtcaaccttggagtgtctgatgactatgtgcattggggatggtcatcttgtatagtatctttcagggattctctccatttcctgaatttgaatgttgacctctctgttgaggttggagaaattgccatgaatgatttcctctaatatgccttgcaagttgcttgctttctctccctctctttcagggattccaatgagtcatagatttgatctctttacattatcccatatttgttcattctttttaattctttttttctttatttttgtttgacagttaattcagagaaccagtcttccagctctgagatatttttttgtctcagcttggtctattctgctgttaa

SEQ ID NO: 580700 - DNA, 575 bp, Homo sapiens
ctggctttttgagttgccagagtwcttgcactggttctttctcaactgtggaaggtgatgttccttaatctttgaagttgctgtcctttagatggggtgttttgcttttatattctttgatgccctcaaaccctggcatttaatcgtggtataagatggtttcagttgactggcttcatttttggaagatttcaggggccagggctcagcccaaacactcctggactgtgtgatttaatgctagagggctggtactgggccccagttctatcctgtctcccctggaggttaggaacctgctgcactggagaggctgaggagtttccattttgctggccacaacactgatgggggttgccaaccaaagtgcttcatcagaacagtggcagagttacatgtgctggcttttgcatgccagcagccacagtgcagtggcacagtgtggtgtctgcacatcagcttgggcacaatggtggtaaaagtcggttggcagtgtccatgtgtgcatttgcacagatggtggcatggtgggatgccttcatgccaacaggggcattgcaatggcattcatgcac

SEQ ID NO: 580701 - DNA, 575 bp, Homo sapiens
ctggctttttgagttgccagagtacttgcactggttctttctcaactgtggaaggtratgttccttaatctttgaagttgctgtcctttagatggggtgttttgcttttatattctttgatgccctcaaaccctggcatttaatcgtggtataagatggtttcagttgactggcttcatttttggaagatttcaggggccagggctcagcccaaacactcctggactgtgtgatttaatgctagagggctggtactgggccccagttctatcctgtctcccctggaggttaggaacctgctgcactggagaggctgaggagtttccattttgctggccacaacactgatgggggttgccaaccaaagtgcttcatcagaacagtggcagagttacatgtgctggcttttgcatgccagcagccacagtgcagtggcacagtgtggtgtctgcacatcagcttgggcacaatggtggtaaaagtcggttggcagtgtccatgtgtgcatttgcacagatggtggcatggtgggatgccttcatgccaacaggggcattgcaatggcattcatgcac

SEQ ID NO: 580702 - DNA, 575 bp, Homo sapiens
ctggctttttgagttgccagagtacttgcactggttctttctcaactgtggaaggtgatgttccttaatctttgaagttgctgtcctttagatggggtgttttgcttttatattctttgatgccctcaaaccctggcrtttaatcgtggtataagatggtttcagttgactggcttcatttttggaagatttcaggggccagggctcagcccaaacactcctggactgtgtgatttaatgctagagggctggtactgggccccagttctatcctgtctcccctggaggttaggaacctgctgcactggagaggctgaggagtttccattttgctggccacaacactgatgggggttgccaaccaaagtgcttcatcagaacagtggcagagttacatgtgctggcttttgcatgccagcagccacagtgcagtggcacagtgtggtgtctgcacatcagcttgggcacaatggtggtaaaagtcggttggcagtgtccatgtgtgcatttgcacagatggtggcatggtgggatgccttcatgccaacaggggcattgcaatggcattcatgcac

SEQ ID NO: 580703 - DNA, 575 bp, Homo sapiens
ctggctttttgagttgccagagtacttgcactggttctttctcaactgtggaaggtgatgttccttaatctttgaagttgctgtcctttagatggggtgttttgcttttatattctttgatgccctcaaaccctggcatttaatygtggtataagatggtttcagttgactggcttcatttttggaagatttcaggggccagggctcagcccaaacactcctggactgtgtgatttaatgctagagggctggtactgggccccagttctatcctgtctcccctggaggttaggaacctgctgcactggagaggctgaggagtttccattttgctggccacaacactgatgggggttgccaaccaaagtgcttcatcagaacagtggcagagttacatgtgctggcttttgcatgccagcagccacagtgcagtggcacagtgtggtgtctgcacatcagcttgggcacaatggtggtaaaagtcggttggcagtgtccatgtgtgcatttgcacagatggtggcatggtgggatgccttcatgccaacaggggcattgcaatggcattcatgcac

SEQ ID NO: 580704 - DNA, 641 bp, Homo sapiens
catcagaacagtggcagagttacatgtgctggcttttgcatgccagcagccacagtgcagtggcacagtgtggtgtctgcacatcagcttgggcacaatggtggtaaaagtcggttggcagtgtccatgtgtgcatttgcacagatggtggcatggtgggatgccttcatgccaacaggggcattgcaatggcattcatgcacacttaccccagtagtggcagtgtggcagactgcacatcattgggagcagggctgtggaatgtgctcatgttgcatgcacacatgtgtgccagcaggggaggggaggcgaggtctacttgcacttgcatgccctggaaaaacagtgggaaggctgtaggtgagtgcctgctagcagagcaggagcgggaggwtgctgtgtggagaggctgtatgcaggctagtctgctagggctctcggatggtcaggttcagtctgctggtgagggagctatgatgagggcctccaggaagcaccctggttgggcatccaaggctacattaaaagtgggcatggccaggctggagctccagtacaggccagcagacagtcaggtactcagatcagactggccccatcccacaagtaagaccaccctgctttcttcagttctgacagtc

SEQ ID NO: 580705 - DNA, 637 bp, Homo sapiens
taatgagagcagaaataaaaagtccagtaattgattgatatttataaaaatgttaaactaatgtctttgtttcaaggagtttcacagcataaataacaaaaagtctactaaaacagataccttgggatagatttattrtgccattttaggatttcactttcaagttgcttaatagaaaatcagtgactatcatagtatttgcattcccaagatatttttcttagccagagtttcccagaagcagtttttaaatagtcagttactaaaaagtggattgttgtaactgatatctactataattgatatgtctatataaactagaatatatcagctatagatttttattgtttttaataaatatggcctatttgtttttagacaattttgataggatttttttgccaattatacgaatttgtaaattttaaataatttgtaagtagaggagcctgaaatttttaaaaacatttcttttaggttttagggtacatgtgcagttttgttatataggtaaacttgtgtcatgcgggtttggtgtgtagactattttgtactcaggtactaagggcctagtacccaatagttatttttttctgctgctcaccctcctctcacctttcaccctcgggtgggccct

SEQ ID NO: 580706 - DNA, 637 bp, Homo sapiens
taatgagagcagaaataaaaagtccagtaattgattgatatttataaaaatgttaaactaatgtctttgtttcaaggagtttcacagcataaataacaaaaagtctactaaaacagataccttgggatagatttattatgccattttaggatttcactttcaagttgcttaatagaaaatcagtgactatcatagtatttgcattcccaagatatttttcttagccagagtttcccagaagcagtttttaaatagtcagttactaaaaagtggattgttgtaactgatatctactataattgatatgtctatataaactagaatatatcagctatagatttttattgtttttaataaatatggcctatttgtttttagacaattttgataggatttttttgccaattatacgaatttgtaaattttaaataatttgtaagtagaggagcctgaaatttttaaaaacatttcttttaggttttagggtacatgtgcagttttgttatataggtaaacttgtgtcatgcgggtttggtgtgtagaytattttgtactcaggtactaagggcctagtacccaatagttatttttttctgctgctcaccctcctctcacctttcaccctcgggtgggccct

SEQ ID NO: 580707 - DNA, 565 bp, Homo sapiens
ttatatactttaggttaaaattagcaaactaatcttaaaatagcacacatttaataataccctcttactcatgacttgtatgcagcttttaccaaatgtttctcaccttatggatttgacagtaacasaaatctgtaccctgttcaaaaacacaagtccactgatcttgcgcttggatgtctcagcattgtcaaattgctagaaaagttcctaaacttctgtgcttatgtctttacagactagcaacaaatagtgggccaactatactttgagtagcactactctacaaaaagattgtgaattcagtcatccttagaaaagggtgaatcatatataggaaacttgtatataaatatttaagatagaatatttataatatcaaaattgtgtgtaggaaaatctcaaaacacttctttttaaaacagtgtttctctttttacaccctttattaagatgcatatattcctttttatttcaatatttttggagtacaggtggtttttggttacatgggtaagttctttagcggtgatttctgagattttggtgcacccatcaccctaat

SEQ ID NO: 580708 - DNA, 565 bp, Homo sapiens
ttatatactttaggttaaaattagcaaactaatcttaaaatagcacacatttaataataccctcttactcatgacttgtatgcagcttttaccaaatgtttctcaccttatggatttgacagtaacagaaatctgtaccctgttcaaaaacacaagtccactgatcttgcscttggatgtctcagcattgtcaaattgctagaaaagttcctaaacttctgtgcttatgtctttacagactagcaacaaatagtgggccaactatactttgagtagcactactctacaaaaagattgtgaattcagtcatccttagaaaagggtgaatcatatataggaaacttgtatataaatatttaagatagaatatttataatatcaaaattgtgtgtaggaaaatctcaaaacacttctttttaaaacagtgtttctctttttacaccctttattaagatgcatatattcctttttatttcaatatttttggagtacaggtggtttttggttacatgggtaagttctttagcggtgatttctgagattttggtgcacccatcaccctaat

SEQ ID NO: 580709 - DNA, 519 bp, Homo sapiens
ttctttggtaatacgctatcctgtttaaagtgtccttaattcaaatagataatagaaggaagacaggatttttttwaaaaaaactacttgaactctcagaattactatgagttttaaatgcctaataacacaatctcttaatatattgaaatggatttgaaaaactaagttttagtaattattgctgtttggttttcctacataatattatttgattcttctctttcaataccttttcataatgttttggattttgttgtattgtaaatatccaaatataaaggacagaagcattatggaatatacattctggtggtggacgtgctgctgaattgcagtcatcttggacaaggaacttaaactgtgcttgagttttcttattatctaaaaaacccccagaaaattagccagatattatctatttataataaaagaaatattatactttatgttgtgaacgcgtctagccttaacattctctaaactcggactccctctaagtttaggtaaggaccaaga

SEQ ID NO: 580710 - DNA, 519 bp, Homo sapiens
ttctttggtaatacgctatcctgtttaaagtgtccttaattcaaatagataatagaaggaagacaggatttttttaaaaaaaactacttgaactctcagaattactatgagttttaaatgcctaataacacaatctcttaatatattgaaatggatttgaaaaactaagttttagtaattattgctgtttggttttcctacataatattatttgattcttctctttcaataccttttcataatgttttggatttygttgtattgtaaatatccaaatataaaggacagaagcattatggaatatacattctggtggtggacgtgctgctgaattgcagtcatcttggacaaggaacttaaactgtgcttgagttttcttattatctaaaaaacccccagaaaattagccagatattatctatttataataaaagaaatattatactttatgttgtgaacgcgtctagccttaacattctctaaactcggactccctctaagtttaggtaaggaccaaga

SEQ ID NO: 580711 - DNA, 213 bp, Homo sapiens
acattctggtggtggacgtgctgctgaattgcagtcatcttggacaaggaacttaaactgtgcttgagttttcttattatctaaaaaacccccagaaaattagccagatattatctatttataataaaagaaatattatactttatgttgtgaacgcgtctagccttmacattctctaaactcggactccctctaagtttaggtaaggaccaa

SEQ ID NO: 580712 - DNA, 478 bp, Homo sapiens
gatacattttcctgtgatacttgtatactaagtagtaagtgtcttgtcacgtacatatcaaataaatactaatggttctttaaaatatacatgtgattattaccattggtaattaactgctgtatagacttacttatgaatttcattttaaaatactgatgcctagtcccaaatctcgaagttttatcgagtctgtttttcacacaacccatattctaatatgaatcttgggaagggaaggaacctctggtctgttatagttctatttcaaacatccaagacgtattttccccaactactgtttgggcattaaatcagggtctcctgcctgcctgttttgcgtaccaggagttgaaagcaggactccatgaaatgaaaacctctggtattattttcccgaagcaagagctttaggagcctaggattggaggacaggattgggaagrggacgattgagtagcaaaaagagaaactacag

SEQ ID NO: 580713 - DNA, 524 bp, Homo sapiens
cttggtattcagttctctagcttgaaatgatttcagtgcctgtaagttattttcagtatttcaaaaatcttaagtaaattcctatatttcatgtaatatctcactggtaacttcaaagatcaccatttaagttatcaaacttctaagagttcacaaagttgtaacactgattttttttttgtcaacaaaaatagtagytttattgtccttcgtctttaaaaaataatatttaaggacctataacagtcctacaatcactctctgagaaattctgtcccttatactgcttcatttggagactgttttagaaatacgcaactatataaacacaccagaaaataaatcctgtatggcagggagctctgtcctctttcctgcctgtatgtcccaacacctccaaatcaaagcagttcatgtataatgctgttaatgaatctttattagctatacagacaattatgatttgccacaaaaccaaagttcttaaaaaataaatccatggctacattaattggtagggttca

SEQ ID NO: 580714 - DNA, 497 bp, Homo sapiens
taaaaacagatttaattatcagttgtaatagtaaaatatcatatcttggaaatcatagtagtaatgatcattcttayataacacttcttaatttataaataattttcacatacactatctgattttaacttacaatatctgtttctataatatgaagctggttttttttgtttgtttgttctttgtttttgagatagagtcttgctctgttgcccaggctggagtacagtggtacaatcttggctcactgcaacctctgcctcctgagttcaagcaattctcctgcctcagcctcctgagtagctggattacaggtgcccactgccatgcctggctaatttttatatttttggtagagatgaagtttcaccatgttggccaggctggtcttgaactcctgacctcaaatgatctgcccatctcggcctcccaaagtgctgggattacaggcatgagccaccgcacttggtctggttttattctcataagtaaggaaa

SEQ ID NO: 580715 - DNA, 591 bp, Homo sapiens
cattcagttgattgggactactaacttaaaaacagatttaattatcagttgtaatagtaaaatatcatatcttggaaatcatagtagtaatgatcattcttatataacacttcttaatttataaataattttcacatacactatctgatttkaacttacaatatctgtttctataatatgaagctggttttttttgtttgtttgttctttgtttttgagatagagtcttgctctgttgcccaggctggagtacagtggtacaatcttggctcactgcaacctctgcctcctgagttcaagcaattctcctgcctcagcctcctgagtagctggattacaggtgcccactgccatgcctggctaatttttatatttttggtagagatgaagtttcaccatgttggccaggctggtcttgaactcctgacctcaaatgatctgcccatctcggcctcccaaagtgctgggattacaggcatgagccaccgcacttggtctggttttattctcataagtaaggaaaataaggctttaggatgtcatatggacttgcatacaaccacagttggtttattattacaatattttaac

SEQ ID NO: 580716 - DNA, 538 bp, Homo sapiens
ttgtttggtttttgctgttgagatgtttgagttccttgtgtattttggatagtaatgccctattggatgaatagtttgcaaatattttctctccttctttaagttatcttttcactctgttgattatttcctttactgtgcagaagcctttcagaytgatataagtttatttgtttattttcacttctgttgcctgtgtttttgaggccttattcaaaaaatcttttcctaggctgatgtcttgaagcatttcctcaatattttattattgagttttgcagtttggggtcttacatttcgatctttgatcgattttgagttttttctttttctctttttttttttttttttttttgtagggtgagaggtggaagtctagtttcattctgcatattggtacccagttttcctagcaccatttattgaagggactgttctttctccagtgagtggtcttggcacctttgtgaaaaatcagttggctatagataagaggattaattttgagttctctagtctggtctatttttttctgtgt

SEQ ID NO: 580717 - DNA, 564 bp, Homo sapiens
atgtccttctttgtctctgtttggagtttatgacttaaatcttgttttgtctgatgtaactatagctactcctgttggcttttgttttccatttgtgtgaagtatcttttcccatcccttccttttcagtctgtgtgtgtctttacggctcaggtgagtatcttgtagccagcatatggttgggtgttgtttttttttttctctttaatccatttagccaatctatatttttcaaatgagaaatttaatccattttaactcaaggttattattgacaggtgaagacttattcttgtcatttgattcatttttttcttgttgttttgtatatcctttgttcctttcttcctcccttgtttatttttgtggttgggtggttctctrtggtgataacatttgattcatttttctttttcctttctgtattaacgctgctggtgacttttatagtgttgcatgttttcatgattctaattattttttcattttcaaatgtgtgacttctgggagcatttcttctaaggccagtctactagtgatgaattcccttagcttttgcttgtt

SEQ ID NO: 580718 - DNA, 464 bp, Homo sapiens
taccttttgatttctctttcctttctgaaatacccataatatgaatagttgttagcttaatggtccctcataaatcgtttaggctttcttcattactttttattattttatctttttttcctctctttgtctgcctgygttattcaaaagagctgtctccaagatcagaaattctttcttttgtttggttagtctgttgttgaagttctcaactgtgtttttaaatttattaattaaattcttgagctctaaaatctatttgattcttaatatctgtctctttgttgaatttctcattcaaatcatgaattgtttcccggatttgtttaaattgtctatctgtaatctcttatatctcactgaatttacttagaattattactttggatttttctttggacattttgaacgttcatttggacgtgtagtgttgtcttgtttttcatgtgtttgatgtgtcccag

SEQ ID NO: 580719 - DNA, 577 bp, Homo sapiens
tttcctaccgtccagggccagagtcatagctaatcctgggcctaggctcttcacagcttgggttatggcattcagccacccatgtgggcttggtgtaatgaagatggagccccactgctggataaaagtgtagtgcctactggcacctagaggagggcatactccagatgtggctctggtctcaagatggtgccatgmtgcaacagcttggcttacaaagcctgggtgggggtgagggagtgcgcatgttgtgttcctaatctagagcaatgcagccatgtgaattcatggcagctcttcaaactgagctctgggcttgcaatgactatgggattctctgtaatatgaattatccttatttgtgatggcaatgggggctgctagtgttcttccatttaccttttccctacagggggaagtccctcctgtctccaggtcaatccaatgtgtgtagaggagatgaggctgcagaggtcaggtgcctccctgctgccctcctgggcttccagtcaccatgggtgcctcactatttcagtgcattccctttgacactccaatgaaattttagctgtttgtt

SEQ ID NO: 580720 - DNA, 466 bp, Homo sapiens
cagctcttcaaactgagctctgggcttgcaatgactatgggattctctgtaatatgaattatccttatttgtgatggcaatgggggctgctagtgttcttccatttaccttttccctacagggggaagtccctcctgtctccaggtcaatccaatgtgtgtagaggagatgaggctgcagaggtcaggtgcctccctgctgccctcctgggcttccagtcaccatgggtgcctcactatttcagtgcattccctttgacactccaatgaaattttagctgtttgttcattgctttgtccccttcgtcmatctatattattttattttgttaaagttttgctttttaaaatgttactattcaagaaaataaaaatgaaacagttaagaaattaataaaattaactttgtattattcaagcacataatactgccaatatttgaacatttttagcctacaaaaatgaca

SEQ ID NO: 580721 - DNA, 577 bp, Homo sapiens
ttcaacctatgattttataagtaatttctgctgttgtgattactgcacagtacttaagaattaaaacactctcatccatatcatgatatattatttaatttagaggctgaatttccttctagatgtaccagtgtttatcaaattataattttaataatttcataaacatttctaaattaatctattcataggcttgttttataagcctaggccttttactattttttgtaatcttagcaatgttacagctatacataaaaataagggatttttaatctctgcactgttgacatttcaggtgtgctagaccatttttatgttactatcaagaactacctgaagctgtgtaatttatatagaaaagagatttaattggctcacaattctgcaggttcatcagggagcataatgctggcatctgctactgctgtggccctcagaaagcttccaattatggcagaaggcaaagaaggagcaggcatatcacatggcaagagcagaaacaagagrgggtgggagaggtcccagacttttaaacaactagatcatgtatgaagtaacggagcaataactcact

SEQ ID NO: 580722 - DNA, 597 bp, Homo sapiens
atcaaattataattttaataatttcataaacatttctaaattaatctattcataggcttgttttataagcctaggccttttactattttttgtaatcttagcaatgttacagctatacataaaaataagggatttttaatctctgcactgttgacatttcaggtgtgctagaccatttttatgttactatcaagaactacctgaagctgtgtaatttatatagaaaagagatttaattggctcacaattctgcaggttcatcagggagcataatgctggcatctgctactgctgtggccctcagaaagcttccaattatggcagaaggcaaagaaggagcaggcatatcacatggcaagagcagaaacaagagagggtgggagaggtcccagacttttaaacaactagatcatgtatgaagtaacggagcaataactcacttatcacgaagaggatgatgctcaaccmttcatgagggatccacccccatgatccagtcacctcctaccaggctccacctccgacactgggaaccacatatcaacattagacttggaaggaacaagcatccaaactgtattattctgctgctggccc

SEQ ID NO: 580723 - DNA, 640 bp, Homo sapiens
aggctgataaggtcaagagttccactcattcatcccagaccaggggttcccaatcaccaggccatggactgctccatggcctgttaggcacctggacacaaagcagsaagtgagcagtagacaagcgagcattactacctgagctctgccccctgtcagatccgcggcattagattctcataggaaagcaaaccctattgtgaaatgcacatacaagggatctagcttgggcactccttatgagaatctaatgtctgataatatgaggtggtacagtttcatcctgaaaccatttatcccaccctcaatccatgggaaaattgtcttctacaaaaccagtccctgatgccaaaaaggttggggactgctgccctagacccctcatgctctggtggatttatttccattgccagttatcaaattagttgattttgaacctactacattttaaaagaatgatactgatcaggttgtaatatttgcattctgtttacagatgcaaggaaagcaaaaagtagatttatcctgccattgagggctgttgtcagctttttagagccacatctttaataatgagtattctcatttatatccttaagctgctctttagaatttgaaagcattgataatcctataatca

SEQ ID NO: 580724 - DNA, 640 bp, Homo sapiens
aggctgataaggtcaagagttccactcattcatcccagaccaggggttcccaatcaccaggccatggactgctccatggcctgttaggcacctggacacaaagcaggaagtgagcagtagacaagcgagcattactacctgagctctgccccctgtcagatccgcggcattagattctcataggaaagcaaaccctattgtgaaatgcacatacaagggatctagcttgggcactccttatgagaatctaatgtctgataatatgaggtggtacagtttcatcctgaaaccatttatcccaccctcaatccatgggaaaattgtcttctacaaaaccagtccctgatgccaaaaaggttggggactgctgccctagacccctcatgctctggtggatttatttccattgccagttatcarattagttgattttgaacctactacattttaaaagaatgatactgatcaggttgtaatatttgcattctgtttacagatgcaaggaaagcaaaaagtagatttatcctgccattgagggctgttgtcagctttttagagccacatctttaataatgagtattctcatttatatccttaagctgctctttagaatttgaaagcattgataatcctataatca

SEQ ID NO: 580725 - DNA, 486 bp, Homo sapiens
ggcaggtgcctgtaatactagctacttgggaggctgaggcaggagaatcgcttgaacccaggaggtggaggttgcagtgagctgagattgcactagtgcactccagcctgaacaaaaagagtgagactctgtctcaaaaaaaaaaaaagacaaaaaaaaaaaacaaaaaaaaaactattccaaatgtcatttaacactgtggatttttattaactaggatctttatttcaaaggacagcctacatttcaagtaagtaataactaccttgtttaacaaacaacatcaacaaataacttaaaacatatacaaagaaagcaaaaggcaaatcttcctttttagaagcaagtactataaccagtttcctctgggatcccttcagagattcaaatacaattaacttgtatttaagttaaaattggttgcttttttaaaatgtaygatttttagaggagcagaatgtgggaagtaaacaataatttggacga

SEQ ID NO: 580726 - DNA, 617 bp, Homo sapiens
tggaattactaattttataagaaagtagtattgtttacaattgcattaaaataatcatggatgtttttggtagacctctactttatcctttcagcttctgctaggatttgtctagcagggtgtgaattgagcagtgatcacatttctcaacttaacatgcactcaaaaaccaacagcataacctatcttacttgtaaatgatattattttacttaaatgaactctaactaataatttaaatccccagggagacatagtccagaaatccaaatacgctaaaatgattgaaattgaatccaaataaaaatcacaaatgggatctaatgaaactaaagagcttctgcacagcaaaagaaaccaccatcagagtgaacaggcaacctacagaatgggagaaaatttttgcaacctactcatctgacaaagggctaatatccagaatctacaatgaactcaaacacatttacaagaaaaaaacaaacaaccccatcaaaaagtgggcaaaggacatgwacagacacttctcaaaagaagacatttatgcagccaaaaaacacatgaaaaaaatgctcatcatcactgaccatcagagaaatgcaaatcaaaaccacaatgag

SEQ ID NO: 580727 - DNA, 604 bp, Homo sapiens
tgtcaccagcttcttacaaaaaaaaaatataataatattttgagaagacacccaactatcaaatgtattcaatttctcataaaactggaaagaatttaccttcactggcattttgcaacagatatgaaaagtakgccttttttaggagagatacagaggttattttaataagaatttctaattacagcagcatcaaacaccctgcttacggaaaaagtctgagtttaatcagtaaatagcatggattccactgccccctgccttatctcacttttcactgactatcaactcttttatctgcaccttaaatttctcctcatgattacataatccttgacatatagtagtttgccacatttttaagtgatatgtttgcaaagcacgatatgatgaactatctatctccttttccaaacgagctcttgaacatttctctatgtcagcaaccttagcatctgattcataataggacaaatatgggtcaattaattaattttaaaagattaattgagaagtggtatttagaaccagaattttcaaatgctatccaatgtatttaaaagaaatataccaacccatcaacccaaggtcaatagttattttg

SEQ ID NO: 580728 - DNA, 439 bp, Homo sapiens
tttcacaaatgacacaaagtcttaaagcaaggacaaaatgtttaaaaataaaacgtttaggtaatgtccttcggcaggaggaaaacatggcatgttgagtatccgaacagatgaatattcttctcaggtatgtattagggttggggagcaraaggaaagctgaaagaatacatctggccgagacgggtggatcacttgagttcaggagttcaatatcagcctggccaatatggtgaaacccggtctctactaaaaacacaaaaattagccaggcatcgtggcgggtgcctataattccagctactcgggaggctgaggcagaagaatagcttgaaccctggagacggaggtttcagcaagccaagatcacgccactgcactctagcctgggtgacagagcaacactctgcctcaaaaaaaaaaaaaaaaaaaaaaaaat

SEQ ID NO: 580729 - DNA, 485 bp, Homo sapiens
aggtaggttatccccacatgtggctagctgttgggaaggaattgcatatgcaatttggagctaagaatttctttctttgggagggatattgcatctttcattatcttatttgctcatctgcaaaacagtgccattgtagtaaaacactgtagaacaggaccattcaaagaggtattatgtgaaaacataactattggaagctaactgtaaattaagagaaaagtaagccctctggatttcaaatatatctttatttttcaaacctgaatattgtaactttcmacagaaaaataaacaccttgaatttcagtccaagaaaatcaattactttgtgtttgtcttggtatctttctgtgtgtctgtgtgtgtctctctctctttgtgtgggcatcttccctctgtctctttgcatgtctatttctccatgtgtgcctttctctcctctctttgtgtgtttgtctccttatgtctgtctgtctgtctca

SEQ ID NO: 580730 - DNA, 643 bp, Homo sapiens
ggtcacatagcagttaactagcagggcccaggcttggacccaggtctagctggctacaggttcacgcttttaactggttcaaaagacttcacttatagcaaaaggaacttgtttcatttggataggaaaacaggaagagacaattctagtgcattctcctttcaataatttaatatgaactgttcaaatgagcaattgagatgcttctcagcatctgtgactcactccttctggatcccagagtgctgttatggaaataagttgcagtgtagatcatacttttgttctaatatatgcaatgcaatgcaatgcaagaaattcagttctgagatatccagggtagttggctcctttcttttgtcttttggaaagagtaaaatttcagtttgtttgagttagagcttctctgactttgatgctgaccggactgctcaaatatttagtaaaagtgatttgggagagtactcgtcataattgatttaggggactgctcacttatctcattctacagagctgcttcacatcccaaaatctcayaaaaattgcaccatatcatcactgaggagagtcacctggtcaaaaaggtggcctcttggggagaagacaatgaaatcccaacatttaggtttcaccagctagaggg

SEQ ID NO: 580731 - DNA, 643 bp, Homo sapiens
ggtcacatagcagttaactagcagggcccaggcttggacccaggtctagctggctacaggttcacgcttttaactggttcaaaagacttcacttatagcaaaaggaacttgtttcatttggataggaaaacaggaagagacaattctagtgcattctcctttcaataatttaatatgaactgttcaaatgagcaattgagatgcttctcagcatctgtgactcactccttctggatcccagagtgctgttatggaaataagttgcagtgtagatcatacttttgttctaatatatgcaatgcaatgcaatgcaagaaattcagttctgagatatccagggtagttggctcctttcttttgtcttttggaaagagtaaaatttcagtttgtttgagttagagcttctctgactttgatgctgaccggactgctcaaatatttagtaaaagtgatttgggagagtactcgtcataattgatttaggggactgctcacttatctcattctacagagctgcttcacatcccaaaatctcataaaaattgcaccatatcrtcactgaggagagtcacctggtcaaaaaggtggcctcttggggagaagacaatgaaatcccaacatttaggtttcaccagctagaggg

SEQ ID NO: 580732 - DNA, 563 bp, Homo sapiens
gggaaatgcaaaatgagcttacattttagtctttcaaattgaggaaacaaatctttttttttcctttctcttcatttttttctttccttttatctttcttttcttcctggcttcctgtgttacttgcttcctgtctttctcttctctctctcccctatctctcttctctctctctctcatttctgaccacaataaggcaatgcatggcaccaatctcaagaataaatgttctaagcagacctaatcaataagacagagacataagtacggttacctggagctggtgggtagggggttaattattgcctggaaagcggcatgagggaataccctggggtactggaaatgcctatatctttatctgagtgattgtcacatggctgcatacccgtagagaaattccttgagctgtacactacaaattaggacattttataaaacactttattttgtgtatgttttggttcagtgaggaagaacaaaatagtgtggtgcccacaggtaggattttacctataatgaggcgaagggtaaccrttagcagcacaattcaggatgacctc

SEQ ID NO: 580733 - DNA, 416 bp, Homo sapiens
  misc_feature 1, 2, 3, 4: n = A,T,C or G
nnnnccttttgaaaattagggggataaaaaccaagaaaatagtagagaacatataaraaaattgagtgagttaggcagaacaatatccctctaggagatgtctcagaaagagacaacagaggaaatactggggaagaaattaagaaggaaataatacaagagaaaacaatctcagaactataagaaataagtctccacattagaagggctcaccaagtgtccaagaaaatgaatgtaaaaggattcactctgaggcatgtagtcatacattttcttcaaaatactgcttataaaacacatatcctgaaatcctccagatactgataataaaaaagtttcatacaaagaataggaaatcagcatgacatgaggctctttatctgccacaccaaatgaaagttagaagacaatggata

SEQ ID NO: 580734 - DNA, 630 bp, Homo sapiens
tgtaaccaataacttgtgaacttctgttgctgattgtatcttttaaggtttggtgcaaataacagaaatatcccaacagcagaacaccccgtcctccgtgttcctcctccatccccacagatcacttttaatatttctgtgtgtccttcccccattttctgtaggtctttacttttaaccacccacacctctccagaggactgccctcgggttcctggagccactttgtctgcaagcacagggcatccgctgcaccccacagtatggttcatacccagtaacgacagcgtgagggtttgaaagcccagctgtcttacctcaatttaggacaacctctgagctgtaatttcccctccagagcacttctgaaggatctggctgggtaggcctaaaattgcaccctcacttaactttttccctttcctagtcccacctccctcatctcctgagtggtttttcctggaagcacttccttactcaatcattggcacataaatcttcatctcaragtctgcttccaggaaaactgacccaagacacagcataagtattttctttagaagaaagggatctaatgcagggaattgggtgcttataaaatcattggaagggaacaggaatcagaggcca

SEQ ID NO: 580735 - DNA, 561 bp, Homo sapiens
acaagcaacaccacagaaatataaaagaacatttgagactgctatgaacacctctagcacataaacaagaaaatacagaggaaatgtataagttccaggaaacatataaccctcctagattaaattaggaagaaatagaaayactgaacagaacaataacaggccatgagattaaaccagtaattttaaaattgccaacaacaaaaaaaagtccagggccagatgggcaacgattcaaagaagaatgggtgccaattttaatgaaactattccgaaagattgagaagaaggaaatcctccctaattcatgaagccagtatcaccctgataccaaaatcagtataaggcataacaaaaaaggacaactacagaccaatatccccaatgaacacggatgtaaaaattctcaacaaaatactatctaactgaatccaatagcatatcaaaaagataatacattatgatcaagtgggcttcatcccagaaattcaggaatggtttaacacatgcaagtcaataaatgtgaaacatcacattaacagaatttttaaaaagacgtga

SEQ ID NO: 580736 - DNA, 623 bp, Homo sapiens
aaaaaaaaattacattatttattggtctctacaaaaataaaagtatatgggagcagagaattaggagagattagctcaaagggaggcatttccagagaatccttctggagatgtgatggataagttcatattaactttactctgaggattttgtaggcttctattgaggatctaggttaatagaactggttaaaaaataatatacagacataaatatgtggtatatggcagaatgatttgaagataaatgaacattaagattcattataagaaacaggatcagaataaattartatgggcaggttgaatcaggatgcctccctctttgagacctcacaaatgacccactatgttaagtcccttttcagattttctgggactatgacaaagaaccaagttagagcagaaatgggagctgatagtgacagcctattaaaagttcctcacacttctgatcagagaatcgcaatagagatagttgcatgccctcctggcaatgatggatgacagtcccataactctgtagatgggccaatgctttctggttcaccaagcactttcaagttattatgttatttatcattctatattctcagtgaatgaaagaaacaagtttcagaaga

SEQ ID NO: 580737 - DNA, 577 bp, Homo sapiens
ggtatttcagttactattagtcaatacagtatgtctaactttcaaaaacattataagcatgataaaaggtaagaaaagcacaatctaaaggacaaagcaagcaacagaactagacccagacatggcagatattttggaattatcagattgtgaatttaagacaactatgattaatatgctaagggctttagcagaaaaagtggatgttgtccaggaattgatggttaaagtagccatagagatgggagctctaataaggaataaaaaggagaagctgaaaataaaaagcactaacagacataaagaatgcctttgatgagctcatgagcacactgaatatagccaaggaaaaaaataatgagcttgaagttaggtcaataaaaacttctcaaactcaaatgcaaaaaaaataaaaaataagggggggacaaaaccctagaatatccaggaagtgtgagacaattacaaaaagtacaacatatgtataatgrgaataccagaagatgcacacaagagaaaggagcagaaaaaaatatttaaattatgtggctaagagtttttttaaattaatgacaga

SEQ ID NO: 580738 - DNA, 602 bp, Homo sapiens
gcgggtgcccataatcccagctactcgggaggctgaggcaggagaattgcttgaacccaggaggtgaagattgcagtaagctgagattgtgccactgcactccagcctgggtgacagagcaagactccatctcagggggaaaaataagtaatattttttaagcaatctctgagcaaagcattgtgtatgtagcaccccgattgatattcataactctatcattgttctctcttttcaaaactcgatatttgaaagcagaacagggtcactatagtcaatactaacttcaatgtacacttttaaataactaaaagagtgttattggactgtttrtaacacaaaggataaatatttcaaagaatagataccctcatcctccatgatgtgattatttcacattgcatgcctgtatcaaaacatctcatataacacataagtatatacaactactatatacccccaaattaaaatataataataataataataatagatttttaaaaagaaagagaaaaaacttgcctttttctaatacaagtaaatataaaaattatcctctcaaatctcattcaaaagtttcttcaaattagaattcagatatt

SEQ ID NO: 580739 - DNA, 602 bp, Homo sapiens
gcgggtgcccataatcccagctactcgggaggctgaggcaggagaattgcttgaacccaggaggtgaagattgcagtaagctgagattgtgccactgcactccagcctgggtgacagagcaagactccatctcagggggaaaaataagtaatattttttaagcaatctctgagcaaagcattgtgtatgtagcaccccgattgatattcataactctatcattgttctctcttttcaaaactcgatatttgaaagcagaacagggtcactatagtcaatactaacttcaatgtacacttttaaataactaaaagagtgttattggactgtttgtaacacaaaggataaatatttcaaagaatagataccctcatcctccatgatgtgattatttcacattgcatgcctgtatcaaaacatctcatataacacataagtatatacamctactatatacccccaaattaaaatataataataataataataatagatttttaaaaagaaagagaaaaaacttgcctttttctaatacaagtaaatataaaaattatcctctcaaatctcattcaaaagtttcttcaaattagaattcagatatt

SEQ ID NO: 580740 - DNA, 602 bp, Homo sapiens
gcgggtgcccataatcccagctactcgggaggctgaggcaggagaattgcttgaacccaggaggtgaagattgcagtaagctgagattgtgccactgcactccagcctgggtgacagagcaagactccatctcagggggaaaaataagtaatattttttaagcaatctctgagcaaagcattgtgtatgtagcaccccgattgatattcataactctatcattgttctctcttttcaaaactcgatatttgaaagcagaacagggtcactatagtcaatactaacttcaatgtacacttttaaataactaaaagagtgttattggactgtttgtaacacaaaggataaatatttcaaagaatagataccctcatcctccatgatgtgattatttcacattgcatgcctgtatcaaaacatctcatataacacataagtatatacaactactatatacccccaaattaaaatatwataataataataataatagatttttaaaaagaaagagaaaaaacttgcctttttctaatacaagtaaatataaaaattatcctctcaaatctcattcaaaagtttcttcaaattagaattcagatatt

SEQ ID NO: 580741 - DNA, 601 bp, Homo sapiens
tttacagtgctagtatctaccaccttttaattaaatgtcaatgatggcatttaccaagattgctccaaagcataacaaacagtatatgcagtgaaaggactagtgtgtgacatattttagaaatacagtaaccagaacctttgcttcattatagcagcaaaaattttttcagcatgtgccacagatgtattcaaaccatagagacatggatcttaccattttcaaacttgctttgattatttcatattttctggaaaagaaatacttagtttatgtccaagtttaattgaattgaaacaacggccttatctcccatagataaatttagyttataatgaacagaggaagatggacatacttttattaccattcctctttgagatttatgatgaaattaagttatgttgttttcatcaacaaatttactttaaaaagtgaaaaattatccatgacaaagaaatgagggtattagtccttcatttctattatacatgtttaataaaatatatgtatgttcttttcatttttattataattttttgttttacatatgaagaatatttctttgaaattggttaattattaacaaaaatcaatagat

SEQ ID NO: 580742 - DNA, 545 bp, Homo sapiens
aaagagactctgtctcaaaaaaaaaattagctggcatggtggcatgtgcctgtggtcccagttactcaggaggctgaggtggaaggatcgcttgagcccaggattccaaggctgcataaaaagtctcagaggctgggtgcrgtggcttacgcctgtaatcccaacatttggaagggatcacaaggtcaggagtttgagaccagcctggccaacatgatgaaaccccgtctctactaaaaatacaaaaattagcagggtatggtggagcgtgcctataatcccaggtacttgggaagctgaagcaggagaattgcttgaacctgggaggcagaggttgcactgagctgagatcaagccattgcactccagcctgggctacagagtgcgactacgtctcaaaaaaaaaaaaaaaaaaaaaaggctgggcgtgggggctcacgcctgtaatcccacagcactttgggaggccaaggcaggtggatcacatgaggtcgaccaacatggagaaaccccgtctctactaaaaatacaaaattagctgggcg

SEQ ID NO: 580743 - DNA, 507 bp, Homo sapiens
ttatgttcctttattttgtgcatggtatagctttcttwgtaaaatctttttcaagcttttttctcagtattgctcaatttgtgtgtgtgatatcagttataaatgcttataattttactttattagtttaagaaaatcctcccattcattcactcatttattcaacaagtgtctgttcagtatgcactgaggcagtcactgtgaagcacagaaaaactaaccagacagagatttgagttcaagcataaattggctgggcacggtggatcatgcctgcaatcctagcacttgggaggctgaggcaggtggatcacttcagatcaggagttcaagaccagcctggccaacatggtgaaaccccatctctactaaaaatagaaaaattagccaggtatcatgtaatcccagctacttgggaggctgaggcctgagaattgcttgaacctgggaagcagaggttgcggtgagtggagattgcgccactgcactccagcctagggaacagag

SEQ ID NO: 580744 - DNA, 507 bp, Homo sapiens
ttatgttcctttattttgtgcatggtatagctttcttagtaaaatctttttcaagcttttttctcagtattgctcaatttgtgtgtgtgatatcagttataaatgcttataattttactttattagtttaagaaaatcctcccattcattcactcatttattcaacaagtgtctgttcagtatgcactgaggcagtcactgtgaagcacagaaaaactaaccagacagagatttgagttcaagcataaattggctgggcacggtggatcatgyctgcaatcctagcacttgggaggctgaggcaggtggatcacttcagatcaggagttcaagaccagcctggccaacatggtgaaaccccatctctactaaaaatagaaaaattagccaggtatcatgtaatcccagctacttgggaggctgaggcctgagaattgcttgaacctgggaagcagaggttgcggtgagtggagattgcgccactgcactccagcctagggaacagag

SEQ ID NO: 580745 - DNA, 421 bp, Homo sapiens
atcctaacatttgctgctatcaagcattttaattttctccagttctgttataacatttaaattagtttcttgaggtcactgtgcctagtggatgctgtgaattctcacccaacataatcatgtgtcattggcctcatgttataaatatttgcaggtgactgtttccaccaagggcctcaggatactgctttgatgttttccctggtttagaktccccagtttctctaatgggaagattttccttactccaggctttatgcaagtagttcatctctaattcttctcaaagaactgtggaacttgggctcatgttcccaagtgggttttgaagctccaagacccagccattatgctaattaaaatttttccttggttttttgcttcaatgcatgctcagcgttctgatcatgttgaagatgga

SEQ ID NO: 580746 - DNA, 621 bp, Homo sapiens
gtctcaaaaatgaaaataaaaataaaataataaaataaagaaattcaaaagcaaacactataatttatacaatgtaattaaaagactaaagaaaaaagattaaatcaattaaagaagataaaacatttgaaaataatccaatatctattcttggttaaacattcagcagactagrgatagaagcaaactttattagcttgataaagagcatttaccacaaacaccatacttaattgtgaaacataaaaagcaagaatgtccactttcacaacttctattcacatagtactagaagcctttgctagggtaataaggcaagaaagaaaaataaaaggcattcagattggaaacacaggaacaaaattgtctctgttcataaattacctgattgtctacatagaaaaaccacgcaatgggtctccaaaaaaacgctcttataactacaaagtgagtttaacaaattcataggatgcaaagtcaacatgtaaaaattctttttatttgtaatttagcagcgaacaattagaaaccaaaaataaaatctaacatcacttacagttgctcaaaaaattgaaatacttagttgtaaacctaataaaatagatacaggatctgtatcct

SEQ ID NO: 580747 - DNA, 287 bp, Homo sapiens
ggatatgtatatgttattgagattaaraaaaaaaaagtattctataatgtttataatgcccaaaattatagatgtcaaatgatcaggcaaataaactgttctttatgtaaaaattaccaaataaattaacatgaaatattcatattttacctcctctaagccaaggaatgaaaaaaaataggatgataaaaatgtgttaaaaataagcttacattttcatggtaaaaatattgtctgttgaacagatattttggggaaaagcagaggtggaaatattaaagacgcat

SEQ ID NO: 580748 - DNA, 287 bp, Homo sapiens
ggatatgtatatgttattgagattaaaaaraaaaaagtattctataatgtttataatgcccaaaattatagatgtcaaatgatcaggcaaataaactgttctttatgtaaaaattaccaaataaattaacatgaaatattcatattttacctcctctaagccaaggaatgaaaaaaaataggatgataaaaatgtgttaaaaataagcttacattttcatggtaaaaatattgtctgttgaacagatattttggggaaaagcagaggtggaaatattaaagacgcat

SEQ ID NO: 580749 - DNA, 565 bp, Homo sapiens
tgattacataaaagtggacaaggaagaaagaaacctttgtgtttgtgtgggtaaggaagtaaacagttcaggaataaaaatcagagatggatgtaaatgtttctgaaaaggaaataaacttacagggtgttcagatgctataatattgctagaacttgggccaactgtaggaacagtttagcaggtttccagcaagttgggtttgaccctcttccacatgatgtgttggttcaggaagaaactttccttcttgtcttcagtactgagacaatatctggaatagttctgaatagtaatatttattcctctaaattgaaatcataaatttatttatttttcttttctctatgctgtgagctgcttaaatccagaaaggatttaatttctttatttcaaaggtatggtaggtgcccctctacctcttttgtttcttttgtccaggggaagagtaaggctggcagatcattgtgagaattaataagttgaggcctataaagagtttcgaagagggcctgtatcattgactcaataaatatgaacaaytattaccacctagcaaataatt

SEQ ID NO: 580750 - DNA, 642 bp, Homo sapiens
  misc_feature 603, 604, 605, 606, 607, 608, 609, 610, 611, 612, 613, 614,615, 616, 617, 618, 619, 620, 621, 622, 623, 624, 625, 626,627, 628, 629, 630, 631, 632, 633, 634, 635, 636, 637, 638,639, 640, 641, 642: n = A,T,C or G
tcctgtgactatagtacactataatataatatactgcaaaacttttccttaatttctatataatttctatccatttctgtaactggactgtttgtaaaagcaattgtcagagttatcatttttcaygttttatttcatgatttttctcagatacagttgagaaaatttttctcaaagtttatattttccaaaattatgtatcttataactgctgaattgttaaaaagcagatacagtggcctctgattctttgccttccattcctaagattgaattgtgctgtgtcacaaagtcacaatcaagcattcccaagtcatataaggatgatacttcacactttgacattttcctctttctagaaaggcaactgaatgaatatagtagaaggataggagggaataaatgcataagcatacccagaatgggagaagacagcagcaggcaggggaaaatggttacggtagcattgagtgaccaaccgctgttcagatgaatgcagacacaacagaagactgcataggagggagaagcttttcctcagagatggaaaagcctcaaagtacctccggcctgagagtgagcagcatacaggagtgaatgatnnnnnnnnnnnnnnnnnnnnnnnnnnnnnnnnnnnnnnnn

SEQ ID NO: 580751 - DNA, 570 bp, Homo sapiens
catgttccataccccacattaagcacagcactagacaacaaaaaggtgatcacgtctctattgttccaatagtctagaagaagttttaaatattgcctgacttaatgtcatttaacagataattattgagcatctactgtttgccaggaactgttcctgaatctagtactaaagtaggcagacaaaattcccattgtcttagtccattctgtgttgctataaaagaatacttgtgtctggataatttatatagaaaaaagtttattggactcacaattctgataggtagaaaagttcaagattaggcwtctgcatttggtgagggcctcaggctgcttccactcatggcagaaagtgaagtggagcctgagtgtgcagagaccacacagccagagaggaagcaaatgagagatggaggagatgccaggctctcttttaaacaaccaactctggaggccacttatagagtgcgaattcactcaccttgagggagggcattaatctatttaggagggacccacctccatgacccaaaaaccttccatcagaccccaccaccaacactgggac

SEQ ID NO: 580752 - DNA, 593 bp, Homo sapiens
ttgcagtgagcagagatcatgccattgcactctagcctgggcgacagggtgagactccgtctcaaaaaaaaaaaaaaaaaaaaaaagccctcttaaaaggtgcatggtttgaagtcaagctttccagtgttaaaatgctaccaaattttaagctcaattcctgtgtggttttggagatgctggcattctaaaaactgctgattctcacttggtaaatggaaactgagttatagcaactaaggtctgaaraatcaaaagtagatttatgcttaacaaagatctatgtaagataaaaattattatgtggaaatttagggcccttccaattttaggtttctgacttctctggagtggttttctggcacaactaagacactggtgctcaattatgagcaacacagcacttctctgaattatgtgtccactcccttatattctggatactttcctagttgctcctaaatttccacattactaccattatatgctgcgcagtatatgaaaatgcccttttggcatcatctgtgaactgctgaaaactgaagtgtgggcaaatgtcccatgtggatatgtatctatataaaccaagccac

SEQ ID NO: 580753 - DNA, 581 bp, Homo sapiens
tttttaaactcacaggttcaactcataacttttttctccttaatcttgagtttatatattttggctggtgctaaacaccaatgtcaccctctccaattataacagcaagaagacattttaacctaaacagtgttcttcagattaatgaaatctaatagcaactctttcacctctgggctattccaaaccaagtggtaatgaccaaagaccattcctcatcttgtgcttggataggaaaccctgagaaatgagtcttgggcttggtccagtttttagtggaaagtgcacacatcacaaaacttagtttcaaaattcgcctccatgctgacagtctctgttagaagggcagagcatccaggctcagaccttgaactgaaaaatccttctcacttttcaacaatgcccctttggttagaatgcaggtcaggcatacttgtccagccatggccattactgggctgtctgctctagggctaaaaaaagatgttgatttcctgkaatatctgccctgcaatttttacaggaaccatgttcattaaattaaaaataataaaccaggcaatgttcttgtgtaacctgtt

SEQ ID NO: 580754 - DNA, 493 bp, Homo sapiens
tgacatagttgaatcagtatctaccaccttcgttactgttttctatctgccacccttgttcttttttcctttttttgtctttcgctcttttctcctctttatctgccttttgtggttttaactgagcattttatatgattccatctttttgtaatttcttagcatgtcagttatccttcttataactttttttagtgtttgccctagaatttgtaattgacatttataactaatggaagtccactttgaaataataccataccacttcacaggtaatgtgaataccttgcaataacaaaataatcataatttctttcttcttttycttctatcattgttgttattcatttcactgatatataagcatacataagcataaataatatatatacataagcatgcataattgaatacatcatgctattattttgttagctcatttttttattttacgaagtaaaataaatttattcattttccaatgttctttctt

SEQ ID NO: 580755 - DNA, 588 bp, Homo sapiens
tggggttttggtgactatggccttaagtatagtttgaaatcaggtagtgtgatgactcccgatttgttctttttgcttagtcttgtttgtctgtgtgggctctttttttgattcatatgaattttagaattattatttctaattctgtgaagaatgatggtggtattctaatggagattacattgagtttgtggattgcttttgtcctatggtcattttcacaatattgattctacccatccatgagcatgggatatgtttccatttgcttgtgttggctatgatttcttttagcagtgttttgtagttttccttgtagagatcttttgactcctttgttaggtatattcctaagyattatattaatttattttgcagctactgtaaaagggatcgagttcttgatttaattctctgcttggttgctcttgctgtatataagagctactgatttgtgtacactaatcttgtatctggaaactttgctgaattcttttgtcaattctaggagctttctagaggagtccttagggttttcaaggtaaacaatcacatcatcatcaaacaatagcagtatgacttcctctt

SEQ ID NO: 580756 - DNA, 596 bp, Homo sapiens
ttattttgtaaaattacaatgtattyatggtaaattaaaaccaacattgtcattaataaaatgattgttttgagcaaagcaagttaataattacaagatgccatgtgtagggccacacaggacacaaaggcagataaagcctggttgcaatctctttcagttttaactttagcttttgaaaataatatgtggctagtcacaaactcatattatatgaaacgttatgatgagataactattaaatgaggggtgcttatagtatataccatcaaagtttaaatgagaaaatttagtacatgtgtcaggccagggaatttttaagtgaaaatgttaatttttaggacttgatgggtttcttaaacattgattggaatggagaatgttatattgcaatgcttaatatggagttggcattcaataatatttaataatataactgatttactttcagtgtgcaggagcacagaattatgtggagaaaaaaagagcagggtaaggcagtgaaaaagaacagaaatacctgggaggaatgactttggtagaagtaaagaagtagaaaaggcaggaaaacccagtaaggaaaagcctgtagaaga

SEQ ID NO: 580757 - DNA, 596 bp, Homo sapiens
ttattttgtaaaattacaatgtatttatggtaaattaaaaccaacattgtcattamtaaaatgattgttttgagcaaagcaagttaataattacaagatgccatgtgtagggccacacaggacacaaaggcagataaagcctggttgcaatctctttcagttttaactttagcttttgaaaataatatgtggctagtcacaaactcatattatatgaaacgttatgatgagataactattaaatgaggggtgcttatagtatataccatcaaagtttaaatgagaaaatttagtacatgtgtcaggccagggaatttttaagtgaaaatgttaatttttaggacttgatgggtttcttaaacattgattggaatggagaatgttatattgcaatgcttaatatggagttggcattcaataatatttaataatataactgatttactttcagtgtgcaggagcacagaattatgtggagaaaaaaagagcagggtaaggcagtgaaaaagaacagaaatacctgggaggaatgactttggtagaagtaaagaagtagaaaaggcaggaaaacccagtaaggaaaagcctgtagaaga

SEQ ID NO: 580758 - DNA, 569 bp, Homo sapiens
tctacttttctatcaattgccgagagaggggtgctgaagttttaattatgattgcaagtttatccagtgtttcttttaattatattagcatttggtgtttatagcatttgtattttatgtagttattgatataattcaaatttaggtctaccatttattgttttcagtttttcctcctcctctcccattcaacctttcctttcttccttcaaaatattttaaattttttacatctccaaatttaatatactcattaacttttttgctgtgtattattgtactctaaggagtatagtatacacacctaaattatagccttcttaaagtcatcatttataatatcaaagaaaatgtaacatttttactgccatatcaattaatttttccctcttgatttagctttaattttcatacatattacytattacaacttcaagtccaccagtaaatgttataatattgactttaaacagtcaaacatattttaatgaatttaagaggagaaagaccactttatatgtttaaacttttatatttatggtgattttttaaaactatttctactgttc

SEQ ID NO: 580759 - DNA, 569 bp, Homo sapiens
tctacttttctatcaattgccgagagaggggtgctgaagttttaattatgattgcaagtttatccagtgtttcttttaattatattagcatttggtgtttatagcatttgtattttatgtagttattgatataattcaaatttaggtctaccatttattgttttcagtttttcctcctcctctcccattcaacctttcctttcttccttcaaaatattttaaattttttacatctccaaatttaatatactcattaacttttttgctgtgtattattgtactctaaggagtatagtatacacacctaaattatagccttcttaaagtcatcatttataatatcaaagaaaatgtaacatttttactgccatatcaattaatttttccctcttgatttagctttaattttcatacatattacctattacaacttcaagtccaccagtaaatgttataatattgactttaaacagtcaaacatattttaatgaatttaagaggagaaaraccactttatatgtttaaacttttatatttatggtgattttttaaaactatttctactgttc

SEQ ID NO: 580760 - DNA, 642 bp, Homo sapiens
ctacatgttttaagccactctctaaatttctactcttttgagaattgtaaaatctgattttaggtgacctttttgaactgatggcattacaaactgtgctgccgatatgaatttgggaatttcattctttatctggagaattcacctttaagccagataccttgactagcctctatcattttataatttatagttggttttgttttgcctttaatgctccacagaaaagttcactacttgttgtaaatatcaacccagttgctcagcctgccatttcacaggtcgttatgaatctgactttacaaaatagaataatacctgtcaatctcgtttttttccctgttggtaaataatttatttgttcttatcaatccatccactcggaatgctcttgttttgccccccattttttccacaaataccttatgattcagttctactgtactttatayttctcatacttaaaaactgattgtgaaacctctgaagttttatgtataaacttttttttgtatgagtgaattcttcagttatttcatatggttttaacatgtctttaaaacttaagtgggagcaagaactacgtctaaatactcactggaattactaattccagatcttttcatgtcgattacacaattt

SEQ ID NO: 580761 - DNA, 568 bp, Homo sapiens
aaaaggcattttgcaaaaatcaaaacccattcctactaataaaacaagaataaatagaaatttatataataggtttaaaagtaaatattagtccaaaaatcagattttacttactggatacacattggaagcatttctcctaaggttaggagaaagaaagagaaacccactgttacttctacaattgagcatattttcaatgtaactaggtaagagagagcaacaatatgttcaaaaagtagaaagaaaaagacaaaactacatttgctgatgttatgattatatatttgaaatgtccaagaggatctaataaaaagctactgcaaatagcagaatctagtaaattaatgctttaatagactgcatatgtactaaactaaaactaagcttgtttcatttttttaaaaagttacaaggtaaaatgtgtaatwcttatttataaaataattaaaaacttcatataaatttcctaaatattgtatgaagaaatctttaagacattttaaagatgcaaaacagaattgaacaaataaaaaagtatttcacatttttaatagaaaagttcaat

SEQ ID NO: 580762 - DNA, 557 bp, Homo sapiens
actttttttatttcttgctgtttttaggattctgtcttagtcttcaacttttgagagtttgactgtgatcttcctcagagagaacatttttgaattaaatctacttgggaatttttaagcttcttgtatctggatgtctatacctcttgtaagacctggaaagtttttagctattatttcattaaacatgttttctatccctttgctcatctcttctgcttctggaactcccaaaatgtgaattttgtttgcttaatggtgttccataggctttctttattcttttttattccttttttttttttttcgcctcactgggttatttcaaaagacctgtcttccagttcaraaattctttattttgctcaatctagtctactgttttttaatttttaattttatatatatattttttttttgagctggagttttgctcttgtcacccaggctggagcatagtggtgcaatctcagctcgctgcaacctctgcctcctgggttcaagcaattctcatgcctcagcctcgcaagtagctgggattacaggtgcctgccacc

SEQ ID NO: 580763 - DNA, 525 bp, Homo sapiens
cttctgaggtctttcaaaaaaaagcagctatcttttttactagcagacagggaaggaaactatatatctaacatgaataatcatttatatatgtatatatataatgtcatcatatcccattcgttttaaactatattcccctttcttggttgcagagaggttgaaaagttaatatataataaccagaccaccacatctgtggctttctcttggttacttaatgtattcagtcgtrgaaataaaattttcatggctatactaatctaccactaactagaaatgatgttcactagtggacttttaacataaaaatattttaaccttatgattggtttgccttttattgctgttgcaaatgaatataaaaggcagaatagcataacatcatggtttaagagaagataaggtgcattttgttatgtataaatgagccagacatgaagcaagtcagtgttcagcaaagtctaatgaggaactacgaagtgtaaggcattagacattgtccaccactctacataaagtcca

SEQ ID NO: 580764 - DNA, 600 bp, Homo sapiens
agatgaaacttctgagtccagcaacagatttagacatccagatacaagatgctcagaaatccctaaatagacacaatgagaaaaggtctttatcatggcacaatatagtcaaactgtcaaaagtcaaaagtcaaagtcaaagagagaattccaataacagcaaaaggaaagcctctagtcacctataaaggaatccacattatactaacaatgaatttctcagcaaaaatcttacaggccaggagagaatgggatgytatattcaaaataccgaaagaagctgatcacggtgtctcatgtgtgtaatcccagcactataggaggctgaggtgggcagataatttgaggtcaggcatttgagaccagcttgcccaatatgatgaaacctcatctctactaaaaaatacaaaaattagccaagaatggtggcacaagcctgtaatcccagttacttaggaggctgaggcaggagaattgcttgaacccaggaagtggaggttgcagtaaactgagattgcaccactgcactccagcctgggtgacagagtgagactctgtctcaaaaaacaaacaagcaaaaaacaaaacaaaacaaaacaa

SEQ ID NO: 580765 - DNA, 575 bp, Homo sapiens
tccagatacaagatgctcagaaatccctaaatagacacaatgagaaaaggtctttatcatggcacaatatagtcaaactgtcaaaagtcaaaagtcaaagtcaaagagagaattccaataacagcaaaaggaaagcctctagtcacctataaaggaatccacattatactaacaatgaatttctcagcaaaaatcttacaggccaggagagaatgggatgttatattcaaaataccgaaagaagctgrtcacggtgtctcatgtgtgtaatcccagcactataggaggctgaggtgggcagataatttgaggtcaggcatttgagaccagcttgcccaatatgatgaaacctcatctctactaaaaaatacaaaaattagccaagaatggtggcacaagcctgtaatcccagttacttaggaggctgaggcaggagaattgcttgaacccaggaagtggaggttgcagtaaactgagattgcaccactgcactccagcctgggtgacagagtgagactctgtctcaaaaaacaaacaagcaaaaaacaaaacaaaacaaaacaaaacagcaacaa

SEQ ID NO: 580766 - DNA, 618 bp, Homo sapiens
tgtttaatttcttactttagtaatttgaatcatttctttgctgatcttttcaaagaagcaacttcttttcaaagaagttctcaattgtattccatttgtttatatgtctgtattctagtaccagaatattgtgattactgtagtttttaagtaatttttgaaatgaaaaagtatgagtcctccattttactcaagattgttttagcatttcagggccctktttaattccacataaatttgaggactggcatttgcatttctgcagaataggctgttggaattttgattgggattgcattgaatctgtagtttgttttgagtagtattgccatcttaaaaattttaagccttctatgataatatgtcattccatttattaaggaattccttattttcaataaaatttttctgttttaagtaagttttcagtgtgtaggtcttgtatttcttttgataaatttatttctaagtattttcttgttttactttctcttgtaagtggaattgtttagttaattttattttcagattgttcattgctggtgtagggctttctatgtacaaaatcttgtcatttgtgaagggagatagtattatttattgctttctgtattagtt

SEQ ID NO: 580767 - DNA, 338 bp, Homo sapiens
gttcatttttccaagaattccatttcaagaatttgatgtcctttcccctttctcctaaacatttttcttcttggctactcactaggcaacatattaaaatcctgtggaaaacttccactcctgggaagatggaacatatgtacttttccttatttctcccaataagtacaaataaaaactctaaacaaataygataaaagtctgagaggcagaagaaggcagactagcaaggaagttcaggatccagggaacaacttgataatgaattccctgggtttgctttctgcctcagcaaacccaggggtgctttctgggtgctgctttctgggtgctgaaga

SEQ ID NO: 580768 - DNA, 542 bp, Homo sapiens
ctctggagaacccagactaatacacaaagtcattgggcatggtggctcttgcctgtaatcccagcactttgggcatccaaggctggaggattgcttgagcccagttcaaaactagcctggcaacaaaataagaccctatctttgccaaaaaaaaaaaaaaaaaaaagaatagctgcgtgtggtagcacrcacctgtggacccagtcactcaggaggctgaggtgggaggattgcttgaacctgggaggttgtggctgtagtgagctgcgattgtgccactgcattccagtctgggtgacagagcgagaccctgtcttcaaaacaaaacaaaactaaggtggttacaatgatgtataatgccgtgcatcttcaggccttattattccctgttcattcctttagtccaggggtctacaaactatggcccataggcatacagcctgattttgtaaataaagtttgattggagcagtctcgcccattcatttacgtattgtcctgctgctttcataccccactggtagagctgagttgttgtgatg

SEQ ID NO: 580769 - DNA, 576 bp, Homo sapiens
gcaatggcgcgatcttggcccactgcaacctctgcctcccgggttcaagctattctgctgccttagcctcccgagtagctgggattacaggcacacgccaccacgcccggctagtttttgtatttttagtagagacggggtttcaccatgtcagccaggcttttcttgaacttctgatctcaagtgatcctcmctcctcagcctcccaaattgctgggattacaggcgtgagccaccacgcccacctgtaaccattatttttaagattgctaccattggatagttctgtcatggtccaacttttggatatttaaaattgatccctgtgtggctaacagaattaatgtttccaaaaatgttgaaaattatatagttctcttaattccccacctctaactatatttttgggttatttctttaggaacagatgcccaggagtcatattactgagaatctagaaatcttttgcaaagttcttgttatattgccaaattgcttcccaaaagggttgttctaaaccataatttcaccagcaatgtaggggagaaccatttttatgctgcccttgtgagaatt

SEQ ID NO: 580770 - DNA, 576 bp, Homo sapiens
gcaatggcgcgatcttggcccactgcaacctctgcctcccgggttcaagctattctgctgccttagcctcccgagtagctgggattacaggcacacgccaccacgcccggctagtttttgtatttttagtagagacggggtttcaccatgtcagccaggcttttcttgaacttctgatctcaagtgatcctcackcctcagcctcccaaattgctgggattacaggcgtgagccaccacgcccacctgtaaccattatttttaagattgctaccattggatagttctgtcatggtccaacttttggatatttaaaattgatccctgtgtggctaacagaattaatgtttccaaaaatgttgaaaattatatagttctcttaattccccacctctaactatatttttgggttatttctttaggaacagatgcccaggagtcatattactgagaatctagaaatcttttgcaaagttcttgttatattgccaaattgcttcccaaaagggttgttctaaaccataatttcaccagcaatgtaggggagaaccatttttatgctgcccttgtgagaatt

SEQ ID NO: 580771 - DNA, 576 bp, Homo sapiens
gcaatggcgcgatcttggcccactgcaacctctgcctcccgggttcaagctattctgctgccttagcctcccgagtagctgggattacaggcacacgccaccacgcccggctagtttttgtatttttagtagagacggggtttcaccatgtcagccaggcttttcttgaacttctgatctcaagtgatcctcactcctcagcctcccaaattgctgggattacaggcgtgagccaccacgcccacctgtaaccattatttttaagattgctaccattggatagttctgtcatggtccaacttttggatatttaaaattgatccctgtgtggctaacagaattaatgtttccaaaaatgttgaaaattatatagttctcttaattccccacctctaactatatttttgggttatttctttargaacagatgcccaggagtcatattactgagaatctagaaatcttttgcaaagttcttgttatattgccaaattgcttcccaaaagggttgttctaaaccataatttcaccagcaatgtaggggagaaccatttttatgctgcccttgtgagaatt

SEQ ID NO: 580772 - DNA, 515 bp, Homo sapiens
aaaggttggatgctgccttacatccccttctagccctcctcccatccacacacacaggcacccacccacaccaggtcggcttgtttctcacatgtagggagagaggggagaccaacccctttgtgtcttttgaaatacgaagaaaaatgtgtgttcaggagcatgactccagtgctgsgctcttgggcccagttcagtctgtcttgtctcaaatctaggcatttttgcttcaattttattttttttaagaatacaaaaacagaaatctgcactaatttacctggtttcgtaggaaaacttttttttattttttacattttttggtgtccgtttgtattgaataatttgctacatttgtaaaatgtaagaggtatataatatatgtatatttctaacgtaaaaaacataatttttttcttttcaagattttttcttaaaaagatgagagaaacatattttttcaggaaaaacaaactttaaaaaaaaaagaggagaaataaaaccttttctcccct

SEQ ID NO: 580773 - DNA, 515 bp, Homo sapiens
aaaggttggatgctgccttacatccccttctagccctcctcccatccacacacacaggcacccacccacaccaggtcggcttgtttctcacatgtagggagagaggggagaccaacccctttgtgtcttttgaaatacgaagaaaaatgtgtgttcaggagcatgactccagtgctgcgctcttgggcccagttcagtctgtcttgtctcaaatctaggcayttttgcttcaattttattttttttaagaatacaaaaacagaaatctgcactaatttacctggtttcgtaggaaaacttttttttattttttacattttttggtgtccgtttgtattgaataatttgctacatttgtaaaatgtaagaggtatataatatatgtatatttctaacgtaaaaaacataatttttttcttttcaagattttttcttaaaaagatgagagaaacatattttttcaggaaaaacaaactttaaaaaaaaaagaggagaaataaaaccttttctcccct

SEQ ID NO: 580774 - DNA, 541 bp, Homo sapiens
tgggtaatttataaagaaaataagtttatttggcttgcggttttgcagactatgcaagaagcatagaacccactcttgtatctggtaggggcctcaagctgctttcacttacaataaaaggcaaagaggagctgatatgtgcagagatcacagggtgagagagaaagcaagggatgggtgaggtccaggttcttttttaaaataatcagctcttttgggaacttaacagagtgagtcctcacttacccatgagggagggcattaatctattcatgaaggatctgctcccatgacccaaacacctcccactaagccccacctcccaataccaccacactaggaatttaatttctttttttgttgttgtttttattattatactttaagttctagggtacatgtgcataacgtgcaggtttgttacatrtgtatacatgtgccatgttggtgtgctgcacccataactcgtcatttacattaggtatttctcctaatgctatccctcccccatgccctcaacccacgacagaccctggtgtgt

SEQ ID NO: 580775 - DNA, 313 bp, Homo sapiens
tctggcctgcagacctgtgagagaatgaatgtctgttgttttaagtcaccagcttaaggtactctgctccrgcagccctaaggaactaatacacaatgttactttcactgtttgcccactttacaaacaacctccacatgtgatttcataactatcttgacacaagggaagtatcttatatgcctgttttccagatggaaaaaattgagtctcagagactttgtgttacttgccagttgagtgggttgtcttagtccattcaggttgctacagtgaaatcctgtaaattatgtaatttataagcaacagaaat

SEQ ID NO: 580776 - DNA, 567 bp, Homo sapiens
ttaatacaagaaaaatagttaaaatggtgtctaggatatagtaaatgcttaatagatgttagcatattatttgtattattgttactatcactgtcattattatcttccttttcaggaaggccttcttttgttcctcacaccacaccaaatcctccaagtatatgctcttacaacattccaaaatcttcattcactagatttaactcaactatgtttaattaactattcgtataatcccctacaaaactccaaactccataagggcaggtacttcattgtgtatgttgtcttttacaggcaagtctagtgtatgcctggtgcatattaggtccataagacataacgctaaagttaaaaacaagtgaatgaatcacaatttactcttygctattattttgtctcaaatatctgggagcactcatgtcctattgccataactgacctaacccccttgggtagtgccagaagatgtaatttgtctccttgggtccttgaatcacaatctgctcttcattcattttttttttgtctcaaacatcttggagcactcatatcctattgccataa

SEQ ID NO: 580777 - DNA, 557 bp, Homo sapiens
gtggaactgtaagtcaattaawcctctcttctttataagttacccagtcttgggtatttctttatagtagtgtgagaatagactaatacaccctctctctagttttctccttttctagtatgtccccccttgattttcagtggttgtggttgactgatgaactctctttgctggttaatcaagcaaacttgtaggattttcatcagtttttttttttctctacaagtacaaactggggcctccccccagggtagacatttcaaaaacaggaatctcaccagacttcgttcccttcgtccatctcccctctaatcctaagttagagtgtcatctcccttctaatttctgcctgctttttttttcactctccaatgtcataagatggttgttttatatgtggtttttcaatggttgatagtttttatcaaccctaggaagagtggtctgataagagctatttggccctactggaagcagaatgcttctgcaagactttttatagtctaactttttcagtcttaagtcctctttgtcttaacctctcagacagatgaagt

SEQ ID NO: 580778 - DNA, 557 bp, Homo sapiens
gtggaactgtaagtcaattaatcctctcttctttataarttacccagtcttgggtatttctttatagtagtgtgagaatagactaatacaccctctctctagttttctccttttctagtatgtccccccttgattttcagtggttgtggttgactgatgaactctctttgctggttaatcaagcaaacttgtaggattttcatcagtttttttttttctctacaagtacaaactggggcctccccccagggtagacatttcaaaaacaggaatctcaccagacttcgttcccttcgtccatctcccctctaatcctaagttagagtgtcatctcccttctaatttctgcctgctttttttttcactctccaatgtcataagatggttgttttatatgtggtttttcaatggttgatagtttttatcaaccctaggaagagtggtctgataagagctatttggccctactggaagcagaatgcttctgcaagactttttatagtctaactttttcagtcttaagtcctctttgtcttaacctctcagacagatgaagt

SEQ ID NO: 580779 - DNA, 430 bp, Homo sapiens
taaatttcttcctaattattttatttttttgcgcctattacaaatgggatttctttcttgacttatttttaactagtttgctattagtgaataraaatactgctgatttttgtaggttggtttttgtatcctgaaactttactaatttttttatcagttttaaaagcatttggtagagtctacatttctctagatataagatcatgacatctgcaaacaaggataatttggctttctcttttgtaatttggatgccttttatttcctttccttggcgaattccttcattttaaatctttgtgtgactttataagagaaaagagttttctaggctacatatacttgtgtcttgttttttattcgttagccagtctatatcattttatttttaaaattttcctttattattatttttttcaaggaaagatct

SEQ ID NO: 580780 - DNA, 548 bp, Homo sapiens
tacaaatgagtgaattcatgaaaagcacttagagaaacacacggcacacaagggacagtcagctgggtttgttattagtcgagttgtgcagttcgccctcggtgcctttaacaatgctgctttccatgcctggaactctgttcctgctccctctccctccacccagcaaactcccactcccttcgacatgctttctaaaatgtaactcctgcgtgaaacttgcccctgttcctggtcttttgtggcagacattctggcttctgattcccaggcctgtgtccttctccaggccccgcttcctctagaatgtgtgcacgcctcaggctctcagcatcttgtcctccatarctactcactgagcccttgtcgggtaccaggcaccacccctcctcccacaccttctcaatactctagtgcttactaaggtagagtctgtgagccaagagtcatgtactttttggcaagcctgagttgagctgtgttttcttcacttctaatgcacaccaccaggttctgtgagcacctgctatgcactaggtgatggatcc

SEQ ID NO: 580781 - DNA, 586 bp, Homo sapiens
gtagtgacatgaccttggctcactgcaacttctgcctccctggctcaagtgatcctcccacctcagcctcctgagtagctgggactacaggtgcacaccactacacccrgctattttttgtatttttaggagggacaagtttttgccatgttgcccaggctggtcttgaactcttgggctccagtgatctgcccaccttggcttccaaaagtgctgagattactggtgtgagccaccgcacccagcctaaagcaacatttaagacattgagagtataataaggtatcaatagaaacaacaaaaaattaaaaagtggggggatgaagttcaagtgtagagtttttttctattagccttatatttgcttgtttgttagcttgttattacaatcagtgttaagttgtcatcagcttaaaataatgagttataagatattatttccaagcctcatggtaatatcaactcaaaaacatacacatacaacagatacacaaaaaataaaaagtaagaaattaatacatatcaccagacaaaatcagcttcagtaaaaagaagacaagaagaaaagaaagaaggaaggaagaga

SEQ ID NO: 580782 - DNA, 554 bp, Homo sapiens
ctcctcagcacatggatcattctcaaggatagaccatatgttaggccacaaaacaggtcttgaaatattcaaaataattgaaatcatatcaagtgtcttcagtgaccacaaagaataaaactagaaatcaataacaagaagaattttgaaaactatacaaaacatggraattaaacaatatgcccctgaataactagtgggttaatgaaaaaaagtaagaaggaaatttaaaaatttcttgaaacaaatgaaaatggaaacacaacacaataaaatctatgggatacagtgaaagcagtattgagtatctacatcaaaaaaagtagaaaaacctcaaataaacaacctaatgatgcatcttaaagaactagaaatgcaagagtgaagcaaacccaaaattagtagaaataaagaaataataaagatcagggcagaaataaatgaaattgaaatgaagaaaatgcaaatgcaaaagatcaatgaaactaaaataaatgaaatggaaatgaaggaaatacaaaagatcaatgaaactaaaagtcattttgttgaaa

SEQ ID NO: 580783 - DNA, 618 bp, Homo sapiens
agattcaatgcaattcctataaaaatattagacatttttcacagaaatagaataaataattctaatgtttatatggaaccacaaaatacccagaatagcaaaagtcaaccagagcaaaaagaacaaaactggagaaatcacattacctgacttcaaattatactacagagatatggtaaccacaacagcatggtactggcatgaaaacacacatagaacaatggaacagaatgaagaacccaagaataaatctacatatctacactaagctcatttttgacaaaagtgccaagaacattcactggggaaaggacagtctcctcagtaaatcatgctgggaaaatggtatatccatatgcagaagaatgaaacyagacccttctgtttttcaccatatacaaaatggattaaagaggccgggtgtggtggctcatgcctgtaatcccaacactttaggaggccaaggcaggcagatcacctgaactcatgagttcaaggccagcctggacaacatggcaaaaccccatctaaaacaaacaaaaaaaaccccaaaaaacagctgggcatggtgtatgtgcctgtagtcccaggaactggggagactgaggtgggaggatg

SEQ ID NO: 580784 - DNA, 569 bp, Homo sapiens
atcacatcaagttaaaaagcttctgtacagcaaaagaaacaatcaccaaaatgaagcaacaatccacagaatgggagaaaatatttgcaaacacccatttgacaagggattaataaccagaatatgtaaggagcccaaataacacagtaggaaaaaatataataatctaattaaaaaatgggcaaaagatctgatagacatctttcaaagaagatctacaaaaggcaaacaggtatatgaaaacgtgctcaacatcattgatcatcagagaaatgcaactcaaaactcaatgagattgtcacacacgtacatgtgaagataccaccaaacaagctttgtgtgagcaacaaggttgtttatttcatctggatgcaggcaggctgagtccaaaaaatgagtcagcaaagggtggtgggattatcattagttcttataggtttgggataggcataaaaagtacattctcaagggcggggagaatattacaaagtaycttcttaagggcaggggagaatatagcgtatcagttagggtggggcaggaacaaatcacaatggtggaatgtcatc

SEQ ID NO: 580785 - DNA, 452 bp, Homo sapiens
tcccgcggtgttgggggctgctgtcacctccctagagagcggaaggagcagggtgcaggcgagggtgagaaggccccgggaccccgacgcaggaacccgcgggtggcccaatccggacgggggttgaccgggagcaggtgcaggcactgggcgcctggggaaggcgagcaggtgcgagagcaggcggcaggcctgagaggcgctggcgcgcgctgggacaaaaacagagtgggaaggagagtggaaaaggggaaccctcgggtggtcagctcccggaagcggcggtggagagtaggggaccgcctgtccacccctgacctcagccgggcggaatagcggtttcaagatgggaccgctgtcctcaggagccgccagagtgctggggaaggcggcagcaacgagcgckcgacgggctctgtccatggtccttaacccccttctgctttccctgg

SEQ ID NO: 580786 - DNA, 592 bp, Homo sapiens
caattaggcaagaaaataaaataaaaggcatccagttggaaaatgaagaagtaaaactacctctatttgaagatgacataatcttgtatttagaaaatcctacggattccactaaaaaattattagaactaataataagtgagttcagctaggttgtaggacacagatcaacwtacaaaaatcaattggatttatagatagtaacaataaacaaacaaaataaaattaaacaattccatttaaaatagcatcagaagaacaaaatatttaagattaaaatacttgtacattaatagaagtataaaatttatactctgatattacaaaaccttctgggttttttggtggaaaggtggccaagatcttgctctgtcacccaggctagagtgcagtggtgtgatcacggattactgcagcctcgacttgctgggctcaaacgatcctcccacctcagcacctccaagtagctgggactacaggcacgtgccactgtgctgatttgttaaaaaatttttttgtagagatgggttctcactatattgcccagactggtcttgaactcctgggctcaaacgatcatcccacctcagca

SEQ ID NO: 580787 - DNA, 576 bp, Homo sapiens
ccttgattatctgcaaacatcctatttccaaataaggtcacatttataggtactgggggttaggacctcagtatcttttgggtgagacataactcaacacataatagcatgcaacatgaggattgaaataaaaagactaatttatggagtttttctcatttaattggaaagactgggccacatttcttgacacttaaaggcagcagtgggatattgaagtatatggaactatagtctatgtatgaggtcttctgctagaaaataggatttattaatatcccaagtgaagatctaacctcagtttttctagtacattttagtatttcccagatttgatgtgcttttaatccattcttcagtaacatttaaacttaaaaatataatcaaggatatgractcctttatgaaattaggagctgtttacccatttgtatttggatactttaagcatttcaatctacttgaagaaactaatttttttttagccaagataaaataatttatttgaaaatcaaaatgtggccgggcacagtggctcatacctgtaatcctagcactttgggaggctgaggcagg

SEQ ID NO: 580788 - DNA, 570 bp, Homo sapiens
gcaggatgttgacagtgagtcctccggcttcctctgcttagtgcctgtatcagtcgcttatgcaggcaacctataagctgagccctgagagggaactcagaaaggcttatctacagcagaaccccctctaagggagtaaacttctaggtcgccttgggccaattccacagctctttctgtttctactcccagagtctcaccaaatcagaaagtggcttttggccctcctcttctctgtgtacctggctgctgtctgtcctgggtttcagtctcagtcctttctgaaactacccctttcctctcctgtggccactggcctccgtgacccacaaaacatataccttttcccaccaacaagcctgactcagggtttgtctcagcttgaatcagaggcttttctacgccaatactagcaattaggggtgagggcttcaacataggaatttgggaggacacayttagtctataatactgtggcagcaccacatcggggcagtctaatgattctacatctgtcatgtctgcctcccaagctgtgtactcaaggcccaagggtgtcctccttaggag

SEQ ID NO: 580789 - DNA, 528 bp, Homo sapiens
actgtcatcagaatgagcaaattgaactgtctactgatagtttccatgagaaatgacctaaatccctgtgtttgcacactgtgatttcagcacaaatgaaagtgtgaaagagtcacctcaaaggaagaaaataagcaaatgaaactctggctcttattctgaaaacactctttaaaaattttaaaggaaaatggagttttaagatgagaaatattaggtgacttggttaaagacaaagcttatcatgtaaggaaaatatatggatttgcatgtgtctttacagtagaatggtttataatcctttgggtatataccagaaatgggattgctgggtcaaatggtatttctggttctagatccttgaggaatagccacactgttttctacaatggttgaactaatttacactcccaccaacagtgtaaaagctttcctatttctccacatcctctccagtatctgttgtttcctgacattttagwgatcgccgttctaactggtgtgagatggtatctcattgtggtttta

SEQ ID NO: 580790 - DNA, 528 bp, Homo sapiens
actgtcatcagaatgagcaaattgaactgtctactgatagtttccatgagaaatgacctaaatccctgtgtttgcacactgtgatttcagcacaaatgaaagtgtgaaagagtcacctcaaaggaagaaaataagcaaatgaaactctggctcttattctgaaaacactctttaaaaattttaaaggaaaatggagttttaagatgagaaatattaggtgacttggttaaagacaaagcttatcatgtaaggaaaatatatggatttgcatgtgtctttacagtagaatggtttataatcctttgggtatataccagaaatgggattgctgggtcaaatggtatttctggttctagatccttgaggaatagccacactgttttctacaatggttgaactaatttacactcccaccaacagtgtaaaagctttcctatttctccacatcctctccagtatctgttgtttcctgacattttagagatygccgttctaactggtgtgagatggtatctcattgtggtttta

SEQ ID NO: 580791 - DNA, 537 bp, Homo sapiens
gacagtgttggaatataaccaatgatagcttcagggtattgaaacacacacatgcacayatatacacacacagtcacattcacatacacacattcccattctcaaaggaggaaataaatgttggaaacaaacatggcaaacaatgtacagagtattaccccagtagcacccctcatatataataacttcattatttctcaaatgattatttcagtgctcttattttgtaagccatgataaatttcaaacatacttttaaaaaaagagacaataaccctctcattcttagtgttcacatgttactaaaaaaagacatgcaccttcctttcctccccctcttttgttatcagattcatggcattatctctgggcctgttgctctctgacatctccagcactttgcaggacccagttttttgagtttgcccttctctttgtctcagataagcccacttctaaagccaaaaggcaaatgatcaattcattttggcccccttgtaactaggactcaaacagtattttttccctagccagcat

SEQ ID NO: 580792 - DNA, 530 bp, Homo sapiens
taaaattgctggtttcttaatatgaggatgacatactcaggtatatgcaagactatccattgtggtagaaaactgtgacatttgtaattacttatttttaaaatagttaatttattttaaacttaaggaatgaataatgctaatgaatataaaatataagaactgatctggtcccctgtgcagtagggagatattgattaggatattgaacatgtcctggggaacactcaagattttctcaaaatcataaggttccacagagttgcttgcatttttcatttgttttcaatgtaagtctagggactacagtttgcctatgaaagtggagttttctagttttaactaaaatcttattcctaaaatgaacagtagtcttaaaaaasagtcccccatagaaattgtagctcacagataacactatcgtgaaagcggtgactagtaagaaagtggattaagaaaacgtggcacatatacaccatggaatactgtgcagccataaaaaaggatgagttcatgtcctttgcagggac

SEQ ID NO: 580793 - DNA, 550 bp, Homo sapiens
ggggaagaacaacacacactggggcctgtcaggggggttgggggcagggagagcatcaagaagaataggtaattgatgctgggcttaatacctaggtgatgggatgatgtgtacagcaaaccgccatgacatacatttacctatgtaacaaacatgcacatcctgcacatgtacccctgaacttaaaagttgaaggaaaaaaattctcagttggcattattgcatcagatagcctttccaaaatagtgtgaagctcagagaaacactaggtagaaackgctcataaaaccagtggtaggagcataggggaggataaggccaaagggtttctatctgtgacaagaaccctagacagaagcaagatagcatttattgatatgccagaaactttataaatattctctccattagtaattagaagcagatattttgattaggtatttttacccatatttctcagagtcatttctccagatacatatttttgtaagcatttactacataactccgtctgagctcgcaacttgtgatgcaaggaagaaaacggtaa

SEQ ID NO: 580794 - DNA, 503 bp, Homo sapiens
aaaggcttctgcacagcaaaggaaacaacgaagtaaaaatacagcctacacaatgagacaaagtgttttcaaaccatatatcagggctaatatattataaaccatataataggagcaaaccatataataaggggcaaatataacatataatagagacaaaataaaccatacaataggggtaaaccatgataaggagctaatatttaaaatatataagacagacataaaactcaacagtgataaagtaatttacgtgattgaaaatggtgtggggtgccagcartgaaggtagatgtagaaaagggacacattggtcaatgggcacagagtttcagttacatgtaagtagtacgttctggtatgtattggaaaacatggtgactatggttaataatgaggtcttatatatttcaaagtagtaaaacagaggattttaaatgttttcacaacacagaaatgataaatatttgaggtgatgaaattaaaaaaaaaaaggcaaagga

SEQ ID NO: 580795 - DNA, 397 bp, Homo sapiens
tgtgggctgtagtgcattttttttttaggtctaraaattggaaacatggatatttattgcagttaaggaactaagaattttaaagaggcaatttctggaagctggctgaaaaatgacctcattctccttcaagtttattgtccacacagtgctgtgctggcattccaagatgcacgacgtggttaaagtctttctgcacaggcttcaggggcatgattctcaataacaaattgtgcccgaatgcctgattttacttgtttcctaaagaatgctcattttataattcattccagtaggaaaacaacactataaacatttcaaaatatttataatttaaaatattaaataacattttctatgctttgatagtttagaatgagtcaaacattttaacctc

SEQ ID NO: 580796 - DNA, 600 bp, Homo sapiens
cataactttaaccactctttctttgactggggatgtctagttatattctctgcagtaaactttgtcttttagtggcaaaaaartggagaggattgcagaaacaaataaataaaaagatttcagttccattaccttttcttcctacaactattcaaagaaaacagtttccttcctcagttcctggggcagctaaactcaccaattaagttattcagtagaatcaataagcagacagattttgaatatttagatctattttactgaaagatttaacaaacatatctttgaaagcaaaatgacaagagagagtaaaaatatctatattcactaaaaatccttgctatatttattcattgagaaatctttttttgaattacaggtggtaacctttatgtgtatttcatgtaggtcaataatcacaaaactaatccacctagttggtttgggatattctgggcagcttcttttgtattgaagtagccttttttttttttttttttaccctgttaaaatgaggattgagcatctcatagaatcttgggggctgcaagatagaaattcaaattactagtgctagattaaaaattaccccacaagttg

SEQ ID NO: 580797 - DNA, 396 bp, Homo sapiens
aactttaaccactctttctttgactggggatgtctagttatattctctgcagtaaactttgtcttttagtggcaaaaaaatggagaggattgcagaaacaaataaataaaaakatttcagttccattaccttttcttcctacaactattcaaagaaaacagtttccttcctcagttcctggggcagctaaactcaccaattaagttattcagtagaatcaataagcagacagattttgaatatttagatctattttactgaaagatttaacaaacatatctttgaaagcaaaatgacaagagagagtaaaaatatctatattcactaaaaatccttgctatatttattcattgagaaatctttttttgaattacaggtggtaacctttatgtgtat

SEQ ID NO: 580798 - DNA, 578 bp, Homo sapiens
ctttgccttgactatctctaccatctttacttgactcatctcaaatatcactgtctcattgatttgtttcctacctactaataatcataaatcagttgtgaattcactctacagcatacttgcctcaatttgcttttatttacttattaytattattttttagtttcaagaaatagtgactaacaggttttgttgtttggattgcataatgctaaataaggaagaggcagctcttatgcctattccagaacattactcatagtgagcctggcctcatagagattaacagtgcagctacttctggttttcaaagcaactatagcaactggacaaccagaacccatgaaattccgtttttcttggtctgcatgacccagctataacccgcatgctcttttttcttttcacaacttagttcactttcagcttttgtgcctcactgcacaacactttccccacattgctttaatttgcacctggctcatcagggcattctgctttcactgcatcctcatagtctgtttgctataactccagcaacacactgccataatatatctgtttcttagtttggaaaa

SEQ ID NO: 580799 - DNA, 578 bp, Homo sapiens
ctttgccttgactatctctaccatctttacttgactcatctcaaatatcactgtctcattgatttgtttcctacctactaataatcataaatcagttgtgaattcactctacagcatacttgcctcaatttgcttttatttacttattactattattttttagtttcaagaaatagtgactaacaggttttgttgtttggattgcataatgctaaataaggaagaggcagctcttatgcctattccagaacattactcatagtgagcctggcctcatagagattaacagtgcagctacttctggttttcaaagcaactatagcaactggacaaccagaacccatgaaattccgtttttcttggtctgcatgacccagctataacccgcatgctcttttttcttttcacaacttagttcactttcagcttttgtgcctcactgcacaacactttccccacattgctttaatttgcacctggctcatcagggcattctgctttcactgcatcctyatagtctgtttgctataactccagcaacacactgccataatatatctgtttcttagtttggaaaa

SEQ ID NO: 580800 - DNA, 301 bp, Homo sapiens
ctcatcagggcattctgctttcactgcatcctcatagtctgtttgctataactccagcaacacactgccataatatatctgtttcttagtttggaaaaaacattgtgaataattaagctatatcattttgtaagaaaggtgacagagtccatatatatgattgggtagtcttcagattgattgccctttaytgtttattctggtgctaggatgacatgtttaaaactgtgactatctagttaaaggagtaggggctcaaaaactttacattagggaggtgtatgaatgaggttgagattaa

SEQ ID NO: 580801 - DNA, 588 bp, Homo sapiens
atatacggatataaagtgtcacagccatttgaagtgttttaaattttagagccccagaagttcaagtcatattcaccattttcatagttcatagtttcgtagctcacatgagttatatttagacatcttttctaattattggcagcctatgaaataaatagcgaatgttaacaccaataacactaccatatgaaataattagaaaagagcagcaagactgcagaagcagttcctttttagggaaggagataaaggacagcttacagcacaaagctctggccgtctctctaaaataaccatctgtcaagataaagtatgtagtaargcagtcagttacatgggctttctctctttttccttccttcctccctctcttgttttcttccattttgtttattcatttgtttttggtgtgtgtgtgtgtgtgttacagtatattaagttctttagataacacatctgattttttaggattctgcctgccggagagctactctgtaagacgatgcttctccatagaatttcacttatacctgaggctggcattttttgttctgagaccttaagttggtctgatgagcagtgggt

SEQ ID NO: 580802 - DNA, 588 bp, Homo sapiens
atatacggatataaagtgtcacagccatttgaagtgttttaaattttagagccccagaagttcaagtcatattcaccattttcatagttcatagtttcgtagctcacatgagttatatttagacatcttttctaattattggcagcctatgaaataaatagcgaatgttaacaccaataacactaccatatgaaataattagaaaagagcagcaagactgcagaagcagttcctttttagggaaggagataaaggacagcttacagcacaaagctctggccgtctctctaaaataaccatctgtcaagataaagtatgtagtaaagcagtcagttacatgggctttctctctttttccttccttcctccctctcttgttttcttccattttgtttattcatttgtttttggtgtgtgtgtgtgtgtgttacagtatattaagttctttagataacacatctgattttttaggattctgcctgccrgagagctactctgtaagacgatgcttctccatagaatttcacttatacctgaggctggcattttttgttctgagaccttaagttggtctgatgagcagtgggt

SEQ ID NO: 580803 - DNA, 451 bp, Homo sapiens
tatattaggtaatactggctgtggatgatgggattcccaagcactcccttcctcaaacggaaatggctacctcaccagattacaatttcttagttctttattgttgttgttgtygtaagagacagaaccttgctctgtcactcaggcttcagtcagtggcacaatcacaactcactgtagcctccatctcctgggcacaagccatcctcctgcctcagcatccctagcagctaggactgcaggtgcagaccaccacatctgaccctcagttcttgagttcttgaagatagactacatgtatgtcattaataaacaggctgcgaatctgtgtcttttcccattaagtagttaggacagatgctattactaacagttctgttttcctccgtgttctctaacctggtatcagatcctgtactcaatcaaatgactgtccaatacagtgagtcat

SEQ ID NO: 580804 - DNA, 445 bp, Homo sapiens
aggtaatactggctgtggatgatgggattcccaagcactcccttcctcaaacggaaatggctacctcaccagattacaatttcttagttctttattgttgttgttgtcgtaagagacagaaccttgctctstcactcaggcttcagtcagtggcacaatcacaactcactgtagcctccatctcctgggcacaagccatcctcctgcctcagcatccctagcagctaggactgcaggtgcagaccaccacatctgaccctcagttcttgagttcttgaagatagactacatgtatgtcattaataaacaggctgcgaatctgtgtcttttcccattaagtagttaggacagatgctattactaacagttctgttttcctccgtgttctctaacctggtatcagatcctgtactcaatcaaatgactgtccaatacagtgagtcat

SEQ ID NO: 580805 - DNA, 451 bp, Homo sapiens
tatattaggtaatactggctgtggatgatgggattcccaagcactcccttcctcaaacggaaatggctacctcaccagattacaatttcttagttctttattgttgttgttgtcgtaagagacagaaccttgctctgtcactcaggcttcagtcagtggcacaatcacaactcactgtagcctccatctcctgggcacaagccatcctcctgcctcagcatccctagcagctaggactgcaggtgcagaccaccacatctgaccctcagttcttgagttcttgaagatagactacatgtatgtcattaataaacaggctgygaatctgtgtcttttcccattaagtagttaggacagatgctattactaacagttctgttttcctccgtgttctctaacctggtatcagatcctgtactcaatcaaatgactgtccaatacagtgagtcat

SEQ ID NO: 580806 - DNA, 445 bp, Homo sapiens
aggtaatactggctgtggatgatgggattcccaagcactcccttcctcaaacggaaatggctacctcaccagattacaatttcttagttctttattgttgttgttgtcgtaagagacagaaccttgctctgtcactcaggcttcagtcagtggcacaatcacaactcactgtagcctccatctcctgggcacaagccatcctcctgcctcagcatccctagcagctaggactgcaggtgcagaccaccacatctgaccctcagttcttgagttcttgaagatagactacatgtatgtcattaataaacaggctgcgaatctgtgtcttttcccattaagtagttaggacagatgctattactaacagttctgttttcctccktgttctctaacctggtatcagatcctgtactcaatcaaatgactgtccaatacagtgagtcat

SEQ ID NO: 580807 - DNA, 603 bp, Homo sapiens
taccatagccacttcattcacaggttcattttcatattgggtcactctactcagtttatttggtagatgagctccagtggaaatttacatgctatataaagctctgcgtgctttatgctcatccccagaagttcactcacatgcttcctcctaggactgcctgatctctaattttccctaatctttcttcttccagatccttgaccaaatagttatgacatttgacatttcaaaagatttataagtatcacaactgctatctacttttcyctgtgatatggtttgcctatgtcccacccaaatctcatcttgaactatagttcccacaatccccacatgtcatatgagggaaccggtgggaggtaataggaacatgggggcagttacctccatgctgttcttatgaaagtgaatgagttctcacaacatctgttggttttataaagggcttcctctgcttcattctgtacttctccttgctactgccatgtgaagaaggacgtgtctacttcccctttcatcatgattgtaagtttcctgatgcctccctagccatgctgaattgtgaatcaattaatcctctttcctttataaattaccaag

SEQ ID NO: 580808 - DNA, 603 bp, Homo sapiens
taccatagccacttcattcacaggttcattttcatattgggtcactctactcagtttatttggtagatgagctccagtggaaatttacatgctatataaagctctgcgtgctttatgctcatccccagaagttcactcacatgcttcctcctaggactgcctgatctctaattttccctaatctttcttcttccagatccttgaccaaatagttatgacatttgacatttcaaaagatttataagtatcacaactgctatctacttttctctgtgatatggtttgcctatgtcccacccaaatctcatcttgaactatagttcccacaatccccacrtgtcatatgagggaaccggtgggaggtaataggaacatgggggcagttacctccatgctgttcttatgaaagtgaatgagttctcacaacatctgttggttttataaagggcttcctctgcttcattctgtacttctccttgctactgccatgtgaagaaggacgtgtctacttcccctttcatcatgattgtaagtttcctgatgcctccctagccatgctgaattgtgaatcaattaatcctctttcctttataaattaccaag

SEQ ID NO: 580809 - DNA, 603 bp, Homo sapiens
taccatagccacttcattcacaggttcattttcatattgggtcactctactcagtttatttggtagatgagctccagtggaaatttacatgctatataaagctctgcgtgctttatgctcatccccagaagttcactcacatgcttcctcctaggactgcctgatctctaattttccctaatctttcttcttccagatccttgaccaaatagttatgacatttgacatttcaaaagatttataagtatcacaactgctatctacttttctctgtgatatggtttgcctatgtcccacccaaatctcatcttgaactatagttcccacaatccccacatgtcatatgagggaaccggtgggaggtaataggaacatgggggcagttacctccatgctgttcttatgaaagtgaatgagttctcacaacatctgttggttttataaagggcttcctctgcttcattctgtacttctccttgctactgccatgtgaagaaggacgtgtctacttcccctttcatcatgattgtaagtttcctgatgcctccctarccatgctgaattgtgaatcaattaatcctctttcctttataaattaccaag

SEQ ID NO: 580810 - DNA, 468 bp, Homo sapiens
tatatgctttttctgattttttaaaacttatttagttaccatctcccctttacatgtcttaagtcatttacatttcaaagcaacaaaatgttaaacataaaagtctattagatgaggaactgggggaggtgaaaataaagaaagtaaccaagaaacttacatatatgtggcactcctgccatcttgtgggttttctgtgttttccactgacttaatttattatttttgtttcagggagttttttgaaagagcatagaggtacatattgagaactaagctgtcaattacccaaacctatcatactcaccaaaagttaaaaaaaattaattagggagacaagttaagtacaaaatgcagcttaatctcaaatagttttgaaaaatatcaatatttgtgcttatgtctatatctayctatacctccatctatagctatacctatacatacactgacatttattcctatgga

SEQ ID NO: 580811 - DNA, 502 bp, Homo sapiens
ctcctttctgtaaagtggtctagaattatttaatacctggatttaaaaagaacataaaataatgaggcacataattgaggtaatcagcaaaataaagctagtgagacttaagttaatataaagttgatcactaagttttaccttagttttaacaaaaagaatatatcttgaaacataaactaagccttaattaaaattttggtgtagaccatggttatcttaaatgcactttttctccaactgcaattcttctcttcttcccacaactaaacatcagtagtgacatgttgccttctatttactcagtaatgagtattactagcactcttagttctttccaaattcctcctttcttttctctccttttcactcatcctcaattttctctttctttattcaccatccacyaacagtttttaggaaatttcctctcaataatgttgcagaatgatttgttttcttactttgtagtggatattattgactgaaaagcagccaatct

SEQ ID NO: 580812 - DNA, 477 bp, Homo sapiens
atactttgatacatgtatacaatgtatcaaatccaatgggtaagtggaaaatccattgtctcaaatatttattatttctttttgatggatacatttcaaatctcttctagctatttttaaatataaawtaaattctttttaactatagtcaccttgctgtggtatcaaacactagagcttattccttccatctaattgtatttttgtacttattgaccaacctctcatgatccccctcatccctttctcagtctctgctagctatcattctactcactacttccatgagatcatttttttaactccacatatgaatgagaacatgcaatatttgtctttctgtgcctggcttatttcactaaaaataacgttctccagtttcatacatgttgctggaaatgatagaatttaattatttttagggctgaataacattccattgtgtatatgcaccatatttcctttatccattcatcc

SEQ ID NO: 580813 - DNA, 477 bp, Homo sapiens
atactttgatacatgtatacaatgtatcaaatccaatgggtaagtggaaaatccattgtctcaaatatttattatttctttttgatggatacatttcaaatctcttctagctatttttaaatataaattaaattctttttaactatagtcaccttgctgtggtatcaaacactagagcttattccttccatctaattgtatttttgtacttattgaccaacctctcatgatccccctcatccctttctcagtctctgctagctatcattctactcactacttccatgagatcatttttttaactccacatatgaatgagaacatgcaatatttgtctttctgtgcctggcttatttcactaaaaataacgttctccagtttcatacatgtygctggaaatgatagaatttaattatttttagggctgaataacattccattgtgtatatgcaccatatttcctttatccattcatcc

SEQ ID NO: 580814 - DNA, 563 bp, Homo sapiens
caaatccactctgctcttctggaaactgctataaaaggaacccagaacctgaccatggctgggcatggggggagatttcttacttgttagactcctgtgtgtctcagtggaaactgacagaggatataataaaaatttgtttttcttttttttttccaaattaagattgacaggagttaagtatttcaactctcagtatccatagaaagatcaaatttaaagggggatacaaatgaaatatagcaactacctaaactacccttgaagagattaaacatcagaaatcagatttaagacaaagttaaaatcatttgatctctccaactgcctgccttggatgctctacaggatttgttaaaaaggtgctccagactgtggtctcctggctgggatctaacactttcaccatygtgacccggttttactcttatctgtggcaccagtcacttggataagtaaatcttttgactcaggagaaaacatttctaaaacttattttagtaagtttcttttgatttaaacaaaaagtttgctgcttaacctatacgaatacctaataataa

SEQ ID NO: 580815 - DNA, 563 bp, Homo sapiens
caaatccactctgctcttctggaaactgctataaaaggaacccagaacctgaccatggctgggcatggggggagatttcttacttgttagactcctgtgtgtctcagtggaaactgacagaggatataataaaaatttgtttttcttttttttttccaaattaagattgacaggagttaagtatttcaactctcagtatccatagaaagatcaaatttaaagggggatacaaatgaaatatagcaactacctaaactacccttgaagagattaaacatcagaaatcagatttaagacaaagttaaaatcatttgatctctccaactgcctgccttggatgctctacaggatttgttaaaaaggtgctccagactgtggtctcctggctgggatctaacactttcaccattgtgacccggttttactcttatctgtggcaccagtcacttggataagtaaatcttttgactcrggagaaaacatttctaaaacttattttagtaagtttcttttgatttaaacaaaaagtttgctgcttaacctatacgaatacctaataataa

SEQ ID NO: 580816 - DNA, 563 bp, Homo sapiens
caaatccactctgctcttctggaaactgctataaaaggaacccagaacctgaccatggctgggcatggggggagatttcttacttgttagactcctgtgtgtctcagtggaaactgacagaggatataataaaaatttgtttttcttttttttttccaaattaagattgacaggagttaagtatttcaactctcagtatccatagaaagatcaaatttaaagggggatacaaatgaaatatagcaactacctaaactacccttgaagagattaaacatcagaaatcagatttaagacaaagttaaaatcatttgatctctccaactgcctgccttggatgctctacaggatttgttaaaaaggtgctccagactgtggtctcctggctgggatctaacactttcaccattgtgacccggttttactcttatctgtggcaccagtcacttggataagtaaatcttttgactcaggagaaaacatttctaaaacttattttagtaagtttcttttgatttaaacaaaaagtttgctgcttaacckatacgaatacctaataataa

SEQ ID NO: 580817 - DNA, 453 bp, Homo sapiens
ggcttttataaaaagtccaatttcactaaatctttgaactttttaggtaccaaatatcaaggattttgagtaataagcactcctattaagactttagaaacttgtgtctaaaacttcgttgctatttctgaacttgcagcaatccgaacgtgaaatctgaatgagcctgtaagaaaaaaaatgaaatattcaaagctgtacattaacccttgaagtccatagctgaatttttcaaaaagaaatgaatagaagaaaattaaacctcaattgaaacatgagagaatagtgctgtaacataaacagtatctcttttttgtggcaccagtttttcagtgattcaaaggaaraatgtttctagcgaaaaaaaatggttgctatggagttaagagttgagttaataccaacaaggcagaaatgctgtgggttaataattacatttgaatagattagctt

SEQ ID NO: 580818 - DNA, 533 bp, Homo sapiens
ctcagctctctgtaaaatgagccaatcagctctctgtaaaatggaccaatcagcaggatgtgggtggggtcagataagggaataaaagcaggctgcctgagccagcaaaggcaactggctcaggttcccttctgtatcgtggagggtttgttcttttcctctttgcaataaatcttgctgatgcttgctctttgggtccacgctgactttataagaaggtgtgcagcttcactcctgaggccagcgagaccataaacccactggcaggaagaacawctccagacgtgccgccttaagaactgtaacactcacgcgagggtctgcggcttcattggtgaagtcagagagaccaagaacccaccaattccggtcacagaaggggggaaagacaaaaaagttcctacattatttcctactggccgttttataaggcactaatccattcttaagggcagagcccccatgaattaatcatgtcccagaaggccctgcctcttgataccaccacagtgggaattatgtttcaacataaa

SEQ ID NO: 580819 - DNA, 626 bp, Homo sapiens
taattaataacaataatgtctagattttggcagcagctgagggtctattctctaaaatcaatttgcagaacatatttattccttcagtttgcatagatgatagcccaaacatgaagtttctctcagctagtaatttagcacaggcaggaagaagcaaatagatatcatggtttgaatgccataatattatctgttccttctcagttatgtttctgtaacagaaagattttttaacaaattacataaatagaactttaaaaagtttgaaacgtctgtatttttatccaagcagaagatagttgcactcctgctgaaggtgtggtttttaaaaactatttgtaattatataataaatatgggacattcaccatgctctttgaatgtaaaattagatgtctatgttaggcatattgwtcaagtaccatttagtgtaccatgagatttacagagaaattcatggaaaaactgagaagacttgaagtcagagacgtgatgactgttcagtatattaaataagtactgaattaagaaataaaaccaggtgagctaagtattcagtggatgacagctaccccaaatacaattaattattccctaataaaccacttgcatttcttgcaaagtta

SEQ ID NO: 580820 - DNA, 626 bp, Homo sapiens
taattaataacaataatgtctagattttggcagcagctgagggtctattctctaaaatcaatttgcagaacatatttattccttcagtttgcatagatgatagcccaaacatgaagtttctctcagctagtaatttagcacaggcaggaagaagcaaatagatatcatggtttgaatgccataatattatctgttccttctcagttatgtttctgtaacagaaagattttttaacaaattacataaatagaactttaaaaagtttgaaacgtctgtatttttatccaagcagaagatagttgcactcctgctgaaggtgtggtttttaaaaactatttgtaattatataataaatatgggacattcaccatgctctttgaatgtaaaattagatgtctatgttaggcatattgttcaagtaccatttagtgtaccatgagatttacagagaaattcatggaaaaactgagaagacttgaagtcagagacgtgatgactgttcagtatattaaataagtactgaattaagaaataaaaccaggtgagctaagtattcagtgratgacagctaccccaaatacaattaattattccctaataaaccacttgcatttcttgcaaagtta

SEQ ID NO: 580821 - DNA, 611 bp, Homo sapiens
tgaatatcagttacaaattttcttatgacaattgtttttcagatattgtaacagcaggattttgttttttaytgctagtcaaacccaggcttatgcaaaacatgtaaatttaacatgatgtaaattttagtgcttaatgtacttaaaaacaaaacctttcccaaaacaaattattttactcttttgctgaaatagatgtagctattttttgaatcaggtgcagattgtatacttgcatgtgatatatttccattgtcctgtaagaaaatttatattaatacattcaagttttaatactgatttttttctaaaatttgtatgaattaatcaaagaaaacatgatgaggctcttggagaccttatgtgagggtcatatatatgtaaagtggctagcacactgtctgatgctcattagatacatgtttcaatatcctattctcatgaatccttaactttaggatttacattccaggtattctaggaggaaaagaaatgtaacaatattattttttacatagacagaacacactattcttaattcctgaacaatctcatttacacctaaagttttagcttccatctctagcctggtgacaatcaactttttaatt

SEQ ID NO: 580822 - DNA, 630 bp, Homo sapiens
actaagcttcctaaataaaggaaagatacagtatttttcagacaaataaacgctgagagaattcaccactaccaagccaacactacaagaactgttaaaaggagctctaaatctttcaacaaatctttgaaatacatcaaaattgaacctccttaaagcctacatctcacaagacctataaaataataactcaaggggaaaaaaaagaakgtattcaggaaacaactagaagaattaatagaataataactcacttctcaatactaaccttgaatgtaaacagcctaaatgttccatttaaaagatacagactggcaggatgaataagaatttaccaagcaagtttctgctgtctttaagagactcacctaacacataaggactcacataaggtaaaggactgaaaaagatattccatgcaaatgcataccaaaagcaagaaggagtagctcttcttatgtcagacaaatagactttaaagcaacagcagtttaagaaagacaaagagggacactatataatgataaaaggactagactgacaggaaaatatcataatcttaaatatgtatgtacctaacactggagctcccaaatttataaaacaattactactagatagtgggggact

SEQ ID NO: 580823 - DNA, 630 bp, Homo sapiens
actaagcttcctaaataaaggaaagatacagtatttttcagacaaataaacgctgagagaattcaccactaccaagccaacactacaagaactgttaaaaggagctctaaatctttcaacaaatctttgaaatacatcaaaattgaacctccttaaagcctacatctcacaagacctataaaataataactcaaggggaaaaaaaagaatgtattcaggaaacaactagaagaattaatagaataataactcacttctcaatactaaccttgaatgtaaacagcctaaatgttccatttaaaagatacagactggcaggatgaataagaatttaccaagcaagtttctgctgtctttaagagactcacctaacacataaggactcacataaggtaaaggactgaaaaagatattccatgcaaatgcataccaaaagcaagaaggagtagctmttcttatgtcagacaaatagactttaaagcaacagcagtttaagaaagacaaagagggacactatataatgataaaaggactagactgacaggaaaatatcataatcttaaatatgtatgtacctaacactggagctcccaaatttataaaacaattactactagatagtgggggact

SEQ ID NO: 580824 - DNA, 630 bp, Homo sapiens
actaagcttcctaaataaaggaaagatacagtatttttcagacaaataaacgctgagagaattcaccactaccaagccaacactacaagaactgttaaaaggagctctaaatctttcaacaaatctttgaaatacatcaaaattgaacctccttaaagcctacatctcacaagacctataaaataataactcaaggggaaaaaaaagaatgtattcaggaaacaactagaagaattaatagaataataactcacttctcaatactaaccttgaatgtaaacagcctaaatgttccatttaaaagatacagactggcaggatgaataagaatttaccaagcaagtttctgctgtctttaagagactcacctaacacataaggactcacataaggtaaaggactgaaaaagatattccatgcaaatgcataccaaaagcaagaaggagtagctcttcttatgtcagacaaataractttaaagcaacagcagtttaagaaagacaaagagggacactatataatgataaaaggactagactgacaggaaaatatcataatcttaaatatgtatgtacctaacactggagctcccaaatttataaaacaattactactagatagtgggggact

SEQ ID NO: 580825 - DNA, 630 bp, Homo sapiens
actaagcttcctaaataaaggaaagatacagtatttttcagacaaataaacgctgagagaattcaccactaccaagccaacactacaagaactgttaaaaggagctctaaatctttcaacaaatctttgaaatacatcaaaattgaacctccttaaagcctacatctcacaagacctataaaataataactcaaggggaaaaaaaagaatgtattcaggaaacaactagaagaattaatagaataataactcacttctcaatactaaccttgaatgtaaacagcctaaatgttccatttaaaagatacagactggcaggatgaataagaatttaccaagcaagtttctgctgtctttaagagactcacctaacacataaggactcacataaggtaaaggactgaaaaagatattccatgcaaatgcataccaaaagcaagaaggagtagctcttcttatgtcagacaaatagactttaaagcaacarcagtttaagaaagacaaagagggacactatataatgataaaaggactagactgacaggaaaatatcataatcttaaatatgtatgtacctaacactggagctcccaaatttataaaacaattactactagatagtgggggact

SEQ ID NO: 580826 - DNA, 359 bp, Homo sapiens
tcacatggccaacgtcatcaacagttatgtaactctcaccatatagtcaattttgggtgaagagattgaagcaaagatcatttcacttaaaaaaataaatattacatgtaccaaaatgttcaatagctagaaagaagaggttttatagataattaacacatcctttgccatactgagttgtatgtgaactctaaagttaaagaatcactgttctgtacaaatttctttagaaacatattttgaaacgtcaaaaagcattactagtaactggacagtaaatctatcatccattccactcctcccccaaccaagatattatgccttrtaaaaaggtttcttcatgtctacgtatgaatcta

SEQ ID NO: 580827 - DNA, 579 bp, Homo sapiens
cagcctttataagtagatgtataaataatatataacrgtttataaacatttttcaatgaacatatgtaattaaatattttcaaaactaattgaagtgagactaacttaaattagtaaactatagcaaaagcacaatcttcatagagctaacattctctgagtacgactccttcaattgaagagcaggctggaaaaataatactatattgctgacacacgaaactcaccaatctcggacagggtttggtaatggaaaaacaagcagactgttatggtttggctctgtgtccttactgaaatttcgtgttgaattgtaatcctcagtgttggaggaggggcctgatgggaggagaccaataagaaatttaataaatataagttagacaaaattactagctgcatagtcttccctatacacaaaaatgctaagtagcatcaatatacatagccaatatcaaataaattaaacttttcttaatttatttaagttaatgtactttagaaaccttttgaaaacaactgttgcacagaatgatgaagaaaactatgtatagttgcacagcatgatgaagaaaacta

SEQ ID NO: 580828 - DNA, 579 bp, Homo sapiens
cagcctttataagtagatgtataaataatatataacagtttataaacwtttttcaatgaacatatgtaattaaatattttcaaaactaattgaagtgagactaacttaaattagtaaactatagcaaaagcacaatcttcatagagctaacattctctgagtacgactccttcaattgaagagcaggctggaaaaataatactatattgctgacacacgaaactcaccaatctcggacagggtttggtaatggaaaaacaagcagactgttatggtttggctctgtgtccttactgaaatttcgtgttgaattgtaatcctcagtgttggaggaggggcctgatgggaggagaccaataagaaatttaataaatataagttagacaaaattactagctgcatagtcttccctatacacaaaaatgctaagtagcatcaatatacatagccaatatcaaataaattaaacttttcttaatttatttaagttaatgtactttagaaaccttttgaaaacaactgttgcacagaatgatgaagaaaactatgtatagttgcacagcatgatgaagaaaacta

SEQ ID NO: 580829 - DNA, 579 bp, Homo sapiens
cagcctttataagtagatgtataaataatatataacagtttataaacatttttcaatgaacatatgtaattaaatattttcaaaactaattgaagtgagactaacttaaattagtaaactatagcaaaagcacaatcttcatagagctaacattctctgagtacgactccttcaattgaagagcaggctggaaaaataatactatattgctgacacacgaaactcaccaatctcggacagggtttggtaatggaaaaacaagcagactgttatggtttggctctgtgtccttactgaaatttcgtgttgaattgtaatcctcagtgttggaggaggggcctgatgggaggagaccrataagaaatttaataaatataagttagacaaaattactagctgcatagtcttccctatacacaaaaatgctaagtagcatcaatatacatagccaatatcaaataaattaaacttttcttaatttatttaagttaatgtactttagaaaccttttgaaaacaactgttgcacagaatgatgaagaaaactatgtatagttgcacagcatgatgaagaaaacta

SEQ ID NO: 580830 - DNA, 510 bp, Homo sapiens
atacatacaagccacacatcacacatgcacatactacacatacaaaatgtgtatgtatgattgtgtgtgtcacaacaataattcaattgtttgacacataattcaaatgtgtgaagttagttttgatataaatgttctattttacaaaatatgcatatgtatctgtatgtatttagacacaaaatatgtatacattctttgtaatctaaaaattggatggaattagtttatgtgaaaattctgcctttttgtaattctgaattaagtgtaattttttaaaatccttatcacacattttcatcacctattttctgaggcacattttaacctaccagatctcatcctaatcaagcagtatctgttagatctgtgacaggggtgtaatttcartaaagtgattagaactgtctgtgaatatgagaaaggtgtgatatataaaagtatttctgtgaactactctaaagctgtataacctgaatccactcccaccctcccaaaaaggaagtggct

SEQ ID NO: 580831 - DNA, 604 bp, Homo sapiens
aaaggcctggtcatctattgcattgttttgggctaacaactctctaagaccagcccaaatccaagggtgagaatattgtctctacctctcaactggagaagtagcaaagcatttacaaatacctctactcaatcatatagtctaatttcaattaaatgtgcttatgtttttaaacccgatgttatrtgcctgttacaactttgatttagaagttgagttaggaggcataacatgtaggaaatattgaaaataaataggtaggtttctgcttaaactgaagttttttgaacattgaaaggttagcagagctaatctctcagttgttatcttaggtttgatgctattgtattaatgaagttggtttcagattgggaataattttcttctctatatttttatggtaatgttaaagatgtgtctggttcaaaggtggaaagttcgtttttgcagatttttggtgacattacaagtaatgtattttctaagtctctattttgttgataaaagttttaggccaattgtaaagaatatcaaaaacaagaaacacagcattagaataaaattagtcttagtatttgtaatgctgaatgtcttattttcaata

SEQ ID NO: 580832 - DNA, 604 bp, Homo sapiens
aaaggcctggtcatctattgcattgttttgggctaacaactctctaagaccagcccaaatccaagggtgagaatattgtctctacctctcaactggagaagtagcaaagcatttacaaatacctctactcaatcatatagtctaatttcaattaaatgtgcttatgtttttaaacccgatgttatgtgcctgttacaactttgatttagaagttgagttaggargcataacatgtaggaaatattgaaaataaataggtaggtttctgcttaaactgaagttttttgaacattgaaaggttagcagagctaatctctcagttgttatcttaggtttgatgctattgtattaatgaagttggtttcagattgggaataattttcttctctatatttttatggtaatgttaaagatgtgtctggttcaaaggtggaaagttcgtttttgcagatttttggtgacattacaagtaatgtattttctaagtctctattttgttgataaaagttttaggccaattgtaaagaatatcaaaaacaagaaacacagcattagaataaaattagtcttagtatttgtaatgctgaatgtcttattttcaata

SEQ ID NO: 580833 - DNA, 538 bp, Homo sapiens
cctgcatatcttaaattccttagattgttctgatttgcataccattaagyggtactacttttatagagattttggggagaataatgtcaaacagttttatggaattattcatttgccataaggtgagactgaaacacgcaatagcatatagcactcattatgtggttacaagcttgtttctttgctttcttgcatagggagccaggtaaacaggcaacctttttactattttgtcaattattaaatgtacttaagaatgtatgataacaatatattaaatattttgaaagttcaacttatcgtctatgaaggtttggccactgaaaaacaaataatcagtgcataaatacaacaaacttattttaaatgtcatacctctgtaaataatggtattttcttacattctgtcaaaacagctgtaacattaatctaataaaaagaatcagattgacacatttgagacattttcctttctaatatatgactgcttgggatttaatacatgacttaatttaatgaaaatatcagactaactgaa

SEQ ID NO: 580834 - DNA, 538 bp, Homo sapiens
cctgcatatcttaaattccttagattgttctgatttgcataccattaagtggtactacttttatagagattttggggagaataatgtcaaacagttttatggaattattcatttgccataaggtgagactgaaacacgcaatagcatatagcactcattatgtggttacaagcttgtttctttgctttcttgcatagggagccaggtaaacaggcaacctttttactattttgtcaattattaaatgtacttaagaatgtatgataacaatatattaartattttgaaagttcaacttatcgtctatgaaggtttggccactgaaaaacaaataatcagtgcataaatacaacaaacttattttaaatgtcatacctctgtaaataatggtattttcttacattctgtcaaaacagctgtaacattaatctaataaaaagaatcagattgacacatttgagacattttcctttctaatatatgactgcttgggatttaatacatgacttaatttaatgaaaatatcagactaactgaa

SEQ ID NO: 580835 - DNA, 514 bp, Homo sapiens
taccaaaataagctttataaaataagcatctaattatgctactcccttgtcataaaacccttaaatgatgtgagttttagccagcagcccaagtcaggacccctgatgaaggttattaaaataataatgataatgatcaatactggttcccaaacactactattccagccttactaaagtagaatctcaatttaggtgttttmtctctctctctctctcaacttagaaggtaaataaatgcacactctagattaggagtcactagtgtaatggcctgctattacctacaacataaaatgtggcttgactcacaaggctattaaaatataactccacttagctttctagccttacatgctgcacctgaggaatacttaagtgctcacagttctctgaattctcaatgatctttaattgttttgtgtctttaatctatatggaatgcttttcaccactttgcccactggccgatttctattctattattaacagtaattcccaaggcaaatgtcag

SEQ ID NO: 580836 - DNA, 595 bp, Homo sapiens
tgtatcttccactctgcacatagttttttttgtaaaacaaggggagcaggtggtgtgagagagaattgtgtacagcaaggaataaaaggacacccagcataagggttgcttccagcagatttatacaagaaaataaattgtggaaagaatgtcattataattgcttaaaaatactttgcaattttgcttttccattctccttttcctatttctactgccacccatttcacctctcataacaacgtctttactagcttttgcttttattacgtgygacataagctagggaagaatagtggaaatgactatatgaatgaaaaaaagacatctatattttgaccaagggtgacatcattctccatattccaactggatatgattccaaaggcagacagtaaaaagaagaagaatgagacttaaccgaagtatgaaataaagaggagatgtcaactgtagtttctgttcaacaagggctgaaagtagattcttttaaacaaaatgtgaggcattttatcaaacaagccatttctatttttgaccgaactctataaataacaatgtaaagcaaaagtgctctttaagtataatgtagtag

SEQ ID NO: 580837 - DNA, 442 bp, Homo sapiens
aaagcaaaactgttctctctttcaaattatgattttaggaagtagtgtaatttagtggtgattcttaaaggagttaaggacaattgagcttatactttagtgtcataccacttactagcttggacacacatgtgccacaggtttcctatctataagagaaagtaagctgggtatakaagctaaataacatatggatcaggaactgttctgaaaaactgaatatacagtgatgaacaagaaagacaatgtgcttagactagaaacctaaattctcataagtggataaaacaacaaataaatgaccaagatagattgtatggtgtggcatctgttatgaggtaaataaaaaagacagtttgttaaaagtgactctgtgaggaagatgtttttaattgggtggttctggagtgcctcaatgagtaggtgacgattgtaatgttcc

SEQ ID NO: 580838 - DNA, 511 bp, Homo sapiens
attaaaaaaataaaaagcagccatggatgatgacatgatttatgacctaagtgatatgttgagataaatcctgagatacaatgggcttaaaatatcactgtgtgtccaacttatcatcattgcaaatttttttttgagagcagaaggcatagtcaaaataaaaaatatgtagcaaactaaaatcaattttagtttaggaattatttggtgagttcacaacagccccaatattctctgagtgtgcttatggaaagttctttgggaaaatccaagtaaactatayttggaaattcttgaggccaagatatatactcaatatgactggggccaagatatatactcaaactgtaatgaattaataaaatcaatgacaacaacaaaattgatcaaaggaggggaggaaatattttgctagtgatttacaatagctcactaatgtccaaaactcctctggaagcattttgtacaagtttgtctacattatttctttaaaaatgcctagattgattat

SEQ ID NO: 580839 - DNA, 630 bp, Homo sapiens
aacaacaaaattgatcaaaggaggggaggaaatattttgctagtgatttacaatagctcactaatgtccaaaactcctctggaagcattttgtacaagtttgtctacattatttctttaaaaatgcctagattgattatttacacctgacttatgtggttacacagactaagtttaggtatgtggagaataaaaaagaaaagcaggcagtggagaaaagaaaagtgggtgaaaatgcccctcagtaaacatgtgaaaagctatgttgggtatatatcttggtgcttgacaatcctargagaaagcatgacctctgccactgagaacggaccctgaaagctttaactagatgttttggatgcgtttgatatttgcatgtttgcaggtgcttgctttctcctgctaaagcatgctatttgcctttattaaagttttatgtaagtaatacctggagtcttgtgaatccctttgactctcatgttttataaaacttcttcatcttacaaaattcacttcttatactctattgttcttttgtattttggaaatatttttggtattttgaagttatttgttgtataatacaaaagtattaatgtaaacactcggaaaagcacaagatataacaaat

SEQ ID NO: 580840 - DNA, 558 bp, Homo sapiens
actcctctggaagcattttgtacaagtttgtctacattatttctttaaaaatgcctagattgattatttacacctgacttatgtggttacacagactaagtttaggtatgtggagaataaaaaagaaaagcaggcagtggagaaaagaaaagtgggtgaaaatgcccctcagtaaacatgtgaaaagctatgttgggtatatatcttggtgcttgacaatcctaagagaaagcatgacctctgccactgagaacggaccctgaaagctttaactagatgttttggatgcgtttgatatttgcatgtttgcaggtgyttgctttctcctgctaaagcatgctatttgcctttattaaagttttatgtaagtaatacctggagtcttgtgaatccctttgactctcatgttttataaaacttcttcatcttacaaaattcacttcttatactctattgttcttttgtattttggaaatatttttggtattttgaagttatttgttgtataatacaaaagtattaatgtaaacactcggaaaagcacaagatataacaaat

SEQ ID NO: 580841 - DNA, 552 bp, Homo sapiens
agttttacatgacatgggagcccttgtaaggaaatggaagaccaaaggaaacagagtcaaacacttacattctsaattagaaaaagaagatacattgtgaaaatttgataagacaaagggcttggtccaggatacgtaactggggagagaagtgcctgggaagatatgggttgttggcacagatttcccttagtctcaacttctcattcttgatgttaagaatgttactttcctcgttgtatagggagggcaactttcaaataggaatgtcatctagctgcttttaagaaacagaaatgaagtcaaagtgagctttctgcacctgctatttttcaagtttctttgcttcaaaataattcttatgctgaagtgacttatttgagggtggtgtgttctgaactcctgcagcatgaaattaggaagttgaaacaagaagatgttgaggactcttcatattcaagcatactaaaattgtgttacaaacctcaagtatgtccaacagatgcaacagaatgctggaaaaagtattttattcatgactgcatatcaatg

SEQ ID NO: 580842 - DNA, 552 bp, Homo sapiens
agttttacatgacatgggagcccttgtaaggaaatggaagaccaaaggaaacagagtcaaacacttacattctgaattagaaaaagaagatacattgtgaaaatttgataagacaaagggcttggtccaggatacgtaactggggagagaagtgcctgggaagatatgggttgttggcacagatttcccttagtctcaacttctcattcttgatgttaagaatgttactttcctcgttgtatagggagggcaactttcaaataggaatgtcatctagctgcttttaagaaacagaaatgaagtcaaagtgagctttctgcacctgctatttttcaagtttctttgcttcaaaataattcttatgctgaagtgacttatttgagggtggtgtgttctgaactcctgcagcatgaaattaggaagttgaaacaagaagatgttgaggactcttcataytcaagcatactaaaattgtgttacaaacctcaagtatgtccaacagatgcaacagaatgctggaaaaagtattttattcatgactgcatatcaatg

SEQ ID NO: 580843 - DNA, 587 bp, Homo sapiens
cttccatgtgcattttaatataaaagtgataagcatagaaaatgtcaagttaaatataacactggtatttaattatgtgaaagttttatttcctgttgactttagccaggtagaaaataatggtacaaattggagggaatttttaaatatgaatctggaaaattttacttagaatattcatttttatgtgctatacaaaagttgcctttaattatagatgtacttatctttcgctttagagttttaaatattggctcatttagcttgtttggttttcttgatawaaatatataaaccagagcatatcaacaaattctgcaggatctctcctatacacaggttaacagattttgttttgtaaaactcgttttgagaatcttgtacaaaaatttccgagtgttttattgttccaaatttaccagagactaaatgttcaaaagtaagtgataaacaattaaacctgtgttttctttttatccattgatttaaaaaaacaaattgctttttgaattattttagacagaattatcattgcttttttaaataatgttaaaatccagtttgatggcttatacagcatttctatt

SEQ ID NO: 580844 - DNA, 475 bp, Homo sapiens
gaaaacaagactttgacccaattaacataattcttgaggagaacaacactgcatgccctacgcaagtcttgaatatttatgtacacttcaaattttcctgattcatgacaattctctcatttttaatctaggaataccaccaagactttctgacttccaaggggctttagaaatattcaaatcttcagaggaatcacttcatggtagtcaaattctagaaaacaatgtatatccttgygttaggactaaattaaaataattaattaagacataaatataactaaagttccttttaaaagtcctgctcttaagtaaaattatgttaatattaccctgcactaaaatatgaaaaaataaagttattcatagcttattatattatttactgttttaatctttctgttatggttgtttgaatgttaaatttgatgcctttgttttatcattgtaccaagaatgatagttctcaatataa

SEQ ID NO: 580845 - DNA, 577 bp, Homo sapiens
aaattctagaaaacaatgtatatccttgtgttaggactaaattaaaataattaattaagacataaatataactaaakttccttttaaaagtcctgctcttaagtaaaattatgttaatattaccctgcactaaaatatgaaaaaataaagttattcatagcttattatattatttactgttttaatctttctgttatggttgtttgaatgttaaatttgatgcctttgttttatcattgtaccaagaatgatagttctcaatataaagtgaaagctgcaaaaaaaaaaaaaaagtaagcctttttgttttttccgacaggaaattactttcacacaggcagacttactggattaaccattcatggctacccacttaaatggaaagagacccacagtagcagattgtggatcgttctacaacatctttagcgtaaacttaaaggcaaaaggaattagtcttgacaaacccctaaactggtcaagtagaaaaatgcccctgatagaaacttccctcactatgttgtgttattagtgaaaagaggacaagggagtaaaacaatgttaagaaggaggaaga

SEQ ID NO: 580846 - DNA, 577 bp, Homo sapiens
aaattctagaaaacaatgtatatccttgtgttaggactaaattaaaataattaattaagacataaatataactaaagttccttttaaaagtcctgctcttaagtaaaattatgttaatattaccctgcactaaaatatgaaaaaataaagttattcatagcttattatattatttactgttttaatctttctgttatggttgtttgaatgttaaatttgatgcctttgttttatcattgtaccaagaatgatagttctcaatataaagtgaaagctgcaaaaaaaaaaaaaaagtaagcctttttgttttttccgacaggaaattactttcacacaggcagacttactrgattaaccattcatggctacccacttaaatggaaagagacccacagtagcagattgtggatcgttctacaacatctttagcgtaaacttaaaggcaaaaggaattagtcttgacaaacccctaaactggtcaagtagaaaaatgcccctgatagaaacttccctcactatgttgtgttattagtgaaaagaggacaagggagtaaaacaatgttaagaaggaggaaga

SEQ ID NO: 580847 - DNA, 607 bp, Homo sapiens
tgtattattcttgtatgtttattggtttataacaatgcaactgtctcagggacttcaaaatggattgagatagtctggatcactccaatttacatcttcattatgttatcatagatcacgttatsaatgtaattagcataagggtagaaaatttttttaaaatgctgaagttcttagtgtaatggacgaaataagaaagaagggaaacatggctaggagaatgaagtatgcacacttttgaaataatcttaggaaaagcttacactttcttgatatttaaaaatatttttagttctcgcatatcattgattatgtgaatatataaacacatacagaacatttttgcctcccaattatttagaatgccattgtttttgtcatttccttcgtccttagagttgtattaaactgtatagcaatttatttcaaggtacaaatggtggtaattaagtggatgatagatgagcagaaacttgggtataatagaatacattaaatttctagcatttacttcagtgtcatttgtcatttctaacaaagaatgattcaccacgggattgtgagaaattttctatactgggtagatattggtatctttagtatagct

SEQ ID NO: 580848 - DNA, 590 bp, Homo sapiens
tgtattattcttgtatgtttattggtttataacaatgcaactgtctcagggacttcaaaatggattgagatagtctggatcactccaatttacatcttcattatgttatcatagatcacgttatgaatgtaattagcataagggtagaaaatttttttaaaatgctgaagttcttagtgtaatggaygaaataagaaagaagggaaacatggctaggagaatgaagtatgcacacttttgaaataatcttaggaaaagcttacactttcttgatatttaaaaatatttttagttctcgcatatcattgattatgtgaatatataaacacatacagaacatttttgcctcccaattatttagaatgccattgtttttgtcatttccttcgtccttagagttgtattaaactgtatagcaatttatttcaaggtacaaatggtggtaattaagtggatgatagatgagcagaaacttgggtataatagaatacattaaatttctagcatttacttcagtgtcatttgtcatttctaacaaagaatgattcaccacgggattgtgagaaattttctatactgggtagatattg

SEQ ID NO: 580849 - DNA, 607 bp, Homo sapiens
tatcattgattatgtgaatatataaacacatacagaacatttttgcctcccaattatttagaatgccattgtttttgtcatttccttcgtccttagagttgtattaaactgtatagcaatttatttcaaggtacaaatggtggtaattaagtggatgatagatgagcagaaacttgggtataatagaatacatyaaatttctagcatttacttcagtgtcatttgtcatttctaacaaagaatgattcaccacgggattgtgagaaattttctatactgggtagatattggtatctttagtatagctcagtttctggtaaaagcaggaattaatatgaggtaatcactcaagaaatttctaatctaattactatatgatttaaggggtaaaagtctctaaatcttggaaataacctctggattatatgcccaagagcaagttggcagtacagtagatattccagaatgaaccactcttctatagtttacaaaaattacagtcactcataagacgccataacaaccaggactctaaagcagagtgtaaaatagttatgaatgtagtcaagtatacatgctattttctaaaattgcttctgtacatcat

SEQ ID NO: 580850 - DNA, 607 bp, Homo sapiens
tatcattgattatgtgaatatataaacacatacagaacatttttgcctcccaattatttagaatgccattgtttttgtcatttccttcgtccttagagttgtattaaactgtatagcaatttatttcaaggtacaaatggtggtaattaagtggatgatagatgagcagaaacttgggtataatagaatacattaaatttctagcatttacttcagtgtcatttgtcatttctaacaaaraatgattcaccacgggattgtgagaaattttctatactgggtagatattggtatctttagtatagctcagtttctggtaaaagcaggaattaatatgaggtaatcactcaagaaatttctaatctaattactatatgatttaaggggtaaaagtctctaaatcttggaaataacctctggattatatgcccaagagcaagttggcagtacagtagatattccagaatgaaccactcttctatagtttacaaaaattacagtcactcataagacgccataacaaccaggactctaaagcagagtgtaaaatagttatgaatgtagtcaagtatacatgctattttctaaaattgcttctgtacatcat

SEQ ID NO: 580851 - DNA, 607 bp, Homo sapiens
tatcattgattatgtgaatatataaacacatacagaacatttttgcctcccaattatttagaatgccattgtttttgtcatttccttcgtccttagagttgtattaaactgtatagcaatttatttcaaggtacaaatggtggtaattaagtggatgatagatgagcagaaacttgggtataatagaatacattaaatttctagcatttacttcagtgtcatttgtcatttctaacaaagaatgattcaccacgggattgtgagaaattttctatactgggtagatattggtatctttagtatagctcagtttctggtaaaagcaggaattaayatgaggtaatcactcaagaaatttctaatctaattactatatgatttaaggggtaaaagtctctaaatcttggaaataacctctggattatatgcccaagagcaagttggcagtacagtagatattccagaatgaaccactcttctatagtttacaaaaattacagtcactcataagacgccataacaaccaggactctaaagcagagtgtaaaatagttatgaatgtagtcaagtatacatgctattttctaaaattgcttctgtacatcat

SEQ ID NO: 580852 - DNA, 607 bp, Homo sapiens
tatcattgattatgtgaatatataaacacatacagaacatttttgcctcccaattatttagaatgccattgtttttgtcatttccttcgtccttagagttgtattaaactgtatagcaatttatttcaaggtacaaatggtggtaattaagtggatgatagatgagcagaaacttgggtataatagaatacattaaatttctagcatttacttcagtgtcatttgtcatttctaacaaagaatgattcaccacgggattgtgagaaattttctatactgggtagatattggtatctttagtatagctcagtttctggtaaaagcaggaattaatatgaggtaatcactcaagaaatttctaatctaattactatatgatttaaggggtaaaagtctctaaatcttggaaataacctctggattatatgcccaagagcaagttggcagtacagtagatattccagaatgaaccactcttctatagtttacaaaaattacagtcactcataagacgccataacaaccaggactctaaagcagagtgtaaaatagttatgaatgtagtcaagtatacaygctattttctaaaattgcttctgtacatcat

SEQ ID NO: 580853 - DNA, 530 bp, Homo sapiens
atgctattttctaaaattgcttctgtacatcatgtaatttcctcaggtgaagkcatctaacatattatgtgtggtacctaggaagagaacttttcatgaacaccatctgcattctgccattttgtggtcttaataagagccttcgcaatgcagggggtgtggagaattgacagattttgtgcatattcatgctttttcaccatgtttgctatattcatcagaatataagctttcaggtttaaaagatgagctgaagttcatttcgctgtgcaaatcagcacattaaggaagccaagcagaaaagccttcgaggtaaacagaaaacctgaaaggggctttgctctcaactataatgggaaataagatttaaatgttaatttgacctaagagtcagaatcaagaagtacagaaaaaaaagtcctgaaaatgtgtatacagttgcaccttagagtgtgaaaaatgacagaacttacttaaaagttaaaaaatattctattaaaacttaccattcatgtaggttaaaccactgt

SEQ ID NO: 580854 - DNA, 530 bp, Homo sapiens
atgctattttctaaaattgcttctgtacatcatgtaatttcctcaggtgaagtcatctaacatattatgtgtggtacctaggaagagaacttttcatgaacaccatctgcattctgccattttgtggtcttaataagagccttcgcaatgcagggggtgtggagaattgacagattttgtgcatatycatgctttttcaccatgtttgctatattcatcagaatataagctttcaggtttaaaagatgagctgaagttcatttcgctgtgcaaatcagcacattaaggaagccaagcagaaaagccttcgaggtaaacagaaaacctgaaaggggctttgctctcaactataatgggaaataagatttaaatgttaatttgacctaagagtcagaatcaagaagtacagaaaaaaaagtcctgaaaatgtgtatacagttgcaccttagagtgtgaaaaatgacagaacttacttaaaagttaaaaaatattctattaaaacttaccattcatgtaggttaaaccactgt

SEQ ID NO: 580855 - DNA, 530 bp, Homo sapiens
atgctattttctaaaattgcttctgtacatcatgtaatttcctcaggtgaagtcatctaacatattatgtgtggtacctaggaagagaacttttcatgaacaccatctgcattctgccattttgtggtcttaataagagccttcgcaatgcagggggtgtggagaattgacagattttgtgcatattcatgctttttcaccatgtttgctatattcatcagaatataagctttcaggtttaaaagatgagctgaagttcatttcgctgtgcaaatcagcacattaagsaagccaagcagaaaagccttcgaggtaaacagaaaacctgaaaggggctttgctctcaactataatgggaaataagatttaaatgttaatttgacctaagagtcagaatcaagaagtacagaaaaaaaagtcctgaaaatgtgtatacagttgcaccttagagtgtgaaaaatgacagaacttacttaaaagttaaaaaatattctattaaaacttaccattcatgtaggttaaaccactgt

SEQ ID NO: 580856 - DNA, 530 bp, Homo sapiens
atgctattttctaaaattgcttctgtacatcatgtaatttcctcaggtgaagtcatctaacatattatgtgtggtacctaggaagagaacttttcatgaacaccatctgcattctgccattttgtggtcttaataagagccttcgcaatgcagggggtgtggagaattgacagattttgtgcatattcatgctttttcaccatgtttgctatattcatcagaatataagctttcaggtttaaaagatgagctgaagttcatttcgctgtgcaaatcagcacattaaggaagccaagcagaaaagccttcgaggtaaacagaaaacctgaaaggggctttgctctcaactataatgggaaataagatttaaaygttaatttgacctaagagtcagaatcaagaagtacagaaaaaaaagtcctgaaaatgtgtatacagttgcaccttagagtgtgaaaaatgacagaacttacttaaaagttaaaaaatattctattaaaacttaccattcatgtaggttaaaccactgt

SEQ ID NO: 580857 - DNA, 503 bp, Homo sapiens
tgacagaacttacttaaaagttaaaaaatattctattaaaacttaccattcatgtaggttaaaccactgtaacggaaagactcaaagrgtatttatttatttatttatttatttactaatagtataggtaggtgttcctggttggtagctagctctcttccacatcgggacgcaggctacgtttttaatagtacttttttgtcttctagggccttgccattgttcatatcataaagctggtctatcatgcccagtgcttggacagaagaagaagagagcaatggagacagcccacctgctgggttaaaggcttgagcattacagcagcacattcagctctcattttattaaaaagaatttggtcaaatgaccacactgactgcaagagaggctagtaaagtagttttgctgtgcatccaggaagaggagcagaaatgattttgtgctacagtcatctacatgtaatacacatcaacaaacaaaaacatgtatgtttccaacat

SEQ ID NO: 580858 - DNA, 581 bp, Homo sapiens
atgaatttatctgttaatgctgccttagctgtgtctcagagattctgctatgttgtatcttttttctcattagttttaaagaacttcttgatttctgacttaatttcattatttacccaaaagtcatttaagaacatgttgttcaatgtccatgtaatgacatggttttgaaaggttttcttagtcttctatgtttaatgtgctgtggtctgatattatgtttggtgtgatttcggcttttacatttgctgaggattgttttatgttcaattatgtggtcagttttagagaatgtgccatgtgacaatgagaagaatgtatattctgctgtttttgggtggagagttctgtagagttctatcagatatagttgatccaatgttgagtttgggccctgaatagctttgtaaattttctgccttgatratctgtctaatactcttggtgaaaagttgaagtctcccactattgttgcgcatgagtctatgtctctttgtatatctctaaaaacttgctttataaatttgggtgctcctgggtttggtggatatgcatttagatacttaggtcttcctgttgaa

SEQ ID NO: 580859 - DNA, 342 bp, Homo sapiens
taaattttctgccttgataatctgtctaatactcttggtgaaaagttgaagtctcccactattgttgcgcatgagtctatgtctctttgtatatctctaaaaacttgctttataaatttgggtgctcctgggtttggtggatatgcatttagatacttaggtcttcctgttgaattgaaccctctatcattatgtartgcacttttttgtctttttttaatccttgattgtttaaagtatgtttcatctcacattaggagtgcaactcctgctcttttgttttccattttcttggtaggttttccttcaactcttgattttcagcctatggatgacatttcc

SEQ ID NO: 580860 - DNA, 342 bp, Homo sapiens
taaattttctgccttgataatctgtctaatactcttggtgaaaagttgaagtctcccactattgttgcgcatgagtctatgtctctttgtatatctctaaaaacttgctttataaatttgggtgctcctgggtttggtggatatgcatttagatacttaggtcttcctgttgaattgaaccctctatcattatgtagtgcacttttttgtctttttttaatccttgattgtttaaagtmtgtttcatctcacattaggagtgcaactcctgctcttttgttttccattttcttggtaggttttccttcaactcttgattttcagcctatggatgacatttcc

SEQ ID NO: 580861 - DNA, 621 bp, Homo sapiens
ggggctgattttttccttctggattagaaacattggcattgaaactagtatacaaggtgcatattgaatatgacagcttctgaaggatttctgagttgtagacacctgtgaataaatcagcatgtattatctaagaataaaatttgtttggcaacaaatatatttatacacacacacacacacacacacayatacatatatatgtatatatagtcataggtattatttttgataacttgcttttaattttgtgaaaatttccatgcattgaattttgaatatccctttgtgaaatgtagaatttggagaaactctaaagagtaaagcacgaccaaagtgaaatctattctgtttcttcttaaattcatggatacatttgaaaacatgtgtctacactacacatgtatgcaaacacacacctgaacttcgctactctatcccttggaatttcttataagagattttttagaaattttttttaatcataggaaaaatgccaaatgttaatatttctggagaaagagtacctgctatgtgcaaaaaccaggattaactaaaatgtagatagaaaattcaacatctcctcaccctaagaggataatcacaacaaagactcaacct

SEQ ID NO: 580862 - DNA, 497 bp, Homo sapiens
acagcagttaagatctctatgggaggtatagaagtagaaatgaaaacataaaggatcaaaattgtggaagatgttcattccatcttyataggtctagaagaaggaggctggggaatagctagagaagaaacaaagaagtaggtagcttcacaggaacccaaggaaaatggggattcaggaaagaaggcttagcaaatagatcatcctgaataatttcacccttactctactaatgtttggagagtctatgaaggctgtactctgggaagtgaaataatcaaattcaatttttatgaagataactttgccattgtatagagcatgggctgaattttaagagaaattgaagtcaaggcagccagaaagagaagagtggaaggcaatttagcatctaaaaaaacttagcagtaaagctaacttaagcctttctactttatttctttcagtgataaatgaggtatattttaaaaatatgctttgtgttgtgttggtaacta

SEQ ID NO: 580863 - DNA, 497 bp, Homo sapiens
acagcagttaagatctctatgggaggtatagaagtagaaatgaaaacataaaggatcaaaattgtggaagatgttcattccatctttataggtctagaagaaggaggctggggaatagctagagaagaaacaaagaagtaggtagcttcacaggaacccaaggaaaatggggattcaggaaagaaggcttagcaaatagatcatsctgaataatttcacccttactctactaatgtttggagagtctatgaaggctgtactctgggaagtgaaataatcaaattcaatttttatgaagataactttgccattgtatagagcatgggctgaattttaagagaaattgaagtcaaggcagccagaaagagaagagtggaaggcaatttagcatctaaaaaaacttagcagtaaagctaacttaagcctttctactttatttctttcagtgataaatgaggtatattttaaaaatatgctttgtgttgtgttggtaacta

SEQ ID NO: 580864 - DNA, 497 bp, Homo sapiens
acagcagttaagatctctatgggaggtatagaagtagaaatgaaaacataaaggatcaaaattgtggaagatgttcattccatctttataggtctagaagaaggaggctggggaatagctagagaagaaacaaagaagtaggtagcttcacaggaacccaaggaaaatggggattcaggaaagaaggcttagcaaatagatcatcctgaataatttcacccttactctactaatgtttggagagtctatgaaggctgtactctgggaagtgaaataatcaaattcaatttttatgaagataaytttgccattgtatagagcatgggctgaattttaagagaaattgaagtcaaggcagccagaaagagaagagtggaaggcaatttagcatctaaaaaaacttagcagtaaagctaacttaagcctttctactttatttctttcagtgataaatgaggtatattttaaaaatatgctttgtgttgtgttggtaacta

SEQ ID NO: 580865 - DNA, 497 bp, Homo sapiens
acagcagttaagatctctatgggaggtatagaagtagaaatgaaaacataaaggatcaaaattgtggaagatgttcattccatctttataggtctagaagaaggaggctggggaatagctagagaagaaacaaagaagtaggtagcttcacaggaacccaaggaaaatggggattcaggaaagaaggcttagcaaatagatcatcctgaataatttcacccttactctactaatgtttggagagtctatgaaggctgtactctgggaagtgaaataatcaaattcaatttttatgaagataactttgccattgtrtagagcatgggctgaattttaagagaaattgaagtcaaggcagccagaaagagaagagtggaaggcaatttagcatctaaaaaaacttagcagtaaagctaacttaagcctttctactttatttctttcagtgataaatgaggtatattttaaaaatatgctttgtgttgtgttggtaacta

SEQ ID NO: 580866 - DNA, 623 bp, Homo sapiens
aaatgttttcttcatatttcattaggtgatattgcatgagtgaattcacatccaacattcctttttaattctgagtttataacatcgtaagtgcctagataatttcccttytattattatctcttaatctcttaaggtattaattattttcaaatgtcctctcttcccagctttcttaattagaattttactgtgatttattttttagcttgatattaaccttaaattaattttttgctatttttccaaaggagtaagaagggacataaatataacttctgaagtcattaatctttgtttattactgatataaacaaagaagatatccacaagaaaaatcttatctacttatttttatggtatcatgttcaggccagaggtgagagcttttgcttagataacttgtaacttttcaccttggaggtttgactccaagtttttctctattgctgacacctgcagatatgaagtataagcaggactataaaatggacacacacatacaaataaataaaaaagattacttggtattctgtctgtttcacaaatccagcttatgtgtgcctttcactttttagtcattttaaagctctgtaaattgtagaaaattgacaattcaactg

SEQ ID NO: 580867 - DNA, 623 bp, Homo sapiens
aaatgttttcttcatatttcattaggtgatattgcatgagtgaattcacatccaacattcctttttaattctgagtttataacatcgtaagtgcctagataatttcccttctattattatctcttaatctcttaaggtattaattattttcaaatgtcctctcttcccagctttcttaattagaattttactgtgatttattttttagcttgatattaaccttaaattaattttttgctatttttccaaaggagtaagaagggacataaatataacttctgaagtcaktaatctttgtttattactgatataaacaaagaagatatccacaagaaaaatcttatctacttatttttatggtatcatgttcaggccagaggtgagagcttttgcttagataacttgtaacttttcaccttggaggtttgactccaagtttttctctattgctgacacctgcagatatgaagtataagcaggactataaaatggacacacacatacaaataaataaaaaagattacttggtattctgtctgtttcacaaatccagcttatgtgtgcctttcactttttagtcattttaaagctctgtaaattgtagaaaattgacaattcaactg

SEQ ID NO: 580868 - DNA, 623 bp, Homo sapiens
aaatgttttcttcatatttcattaggtgatattgcatgagtgaattcacatccaacattcctttttaattctgagtttataacatcgtaagtgcctagataatttcccttctattattatctcttaatctcttaaggtattaattattttcaaatgtcctctcttcccagctttcttaattagaattttactgtgatttattttttagcttgatattaaccttaaattaattttttgctatttttccaaaggagtaagaagggacataaatataacttctgaagtcattaatctttgtttattactgatataaacaaagaakatatccacaagaaaaatcttatctacttatttttatggtatcatgttcaggccagaggtgagagcttttgcttagataacttgtaacttttcaccttggaggtttgactccaagtttttctctattgctgacacctgcagatatgaagtataagcaggactataaaatggacacacacatacaaataaataaaaaagattacttggtattctgtctgtttcacaaatccagcttatgtgtgcctttcactttttagtcattttaaagctctgtaaattgtagaaaattgacaattcaactg

SEQ ID NO: 580869 - DNA, 623 bp, Homo sapiens
aaatgttttcttcatatttcattaggtgatattgcatgagtgaattcacatccaacattcctttttaattctgagtttataacatcgtaagtgcctagataatttcccttctattattatctcttaatctcttaaggtattaattattttcaaatgtcctctcttcccagctttcttaattagaattttactgtgatttattttttagcttgatattaaccttaaattaattttttgctatttttccaaaggagtaagaagggacataaatataacttctgaagtcattaatctttgtttattactgatataaacaaagaagatatccacaagaaaaatcttatctacttatttttatggtatcatgttcaggccagaggtgagagcttttgctyagataacttgtaacttttcaccttggaggtttgactccaagtttttctctattgctgacacctgcagatatgaagtataagcaggactataaaatggacacacacatacaaataaataaaaaagattacttggtattctgtctgtttcacaaatccagcttatgtgtgcctttcactttttagtcattttaaagctctgtaaattgtagaaaattgacaattcaactg

SEQ ID NO: 580870 - DNA, 596 bp, Homo sapiens
attttacaaaagctactccaattatacaatctcgtaaaaytccagtcgattttactggtttcttctaaaacgtttattgaaatcctaccaaaggagtcatctttcctttctgacctctaccgcaaagcaatcagtcttgcccaagattttctccattttcccttctatctaatccttcaatctttattatgtaactttctcctctagtcaaaaacttaaagccagcccaatttccaaactctggaggcttcatgcatcccatggagagtttgtgcaagcatcttccaacaaagatgtagtgttcttcacagaggtaaaattcactagaatgtagtttccagcagttagctttttacagactcatccttagttttgtgtgtcatttactccatttttcttagtaacaagatttattgcagaagcaacaccaattcatgccactgagccaggtttgagataatgagtacttccccatgcaacaaaatggttatcaaactgatatttagcatttcttttttaataaggatatttacattgattctttttaatgacttaaaaaatacttctatttagtggatgaggaatgtcatcaaaat

SEQ ID NO: 580871 - DNA, 596 bp, Homo sapiens
attttacaaaagctactccaattatacaatctcgtaaaactccagtcgattttactggtttcttctaaaacgtttattgaaatcctaccaaaggagtcatctttcctttctgacctctaccgcaaagcaatcagtcttgcccaagattttctccattttcccttctatctaatccttcaatctttattatgtaactttctcctctagtcaaaaacttaaagccagcccaatttccaaactctggaggcttcatgcatcccatggagagtttgtgcaagcatcttccaacaaagatgtagtgttcttcacagaggtaaaattcactagaatgtagtttccagcagttagctttttacagactcatccttagttttgtgtgtcatttactccatttttcttagtaacaasatttattgcagaagcaacaccaattcatgccactgagccaggtttgagataatgagtacttccccatgcaacaaaatggttatcaaactgatatttagcatttcttttttaataaggatatttacattgattctttttaatgacttaaaaaatacttctatttagtggatgaggaatgtcatcaaaat

SEQ ID NO: 580872 - DNA, 596 bp, Homo sapiens
attttacaaaagctactccaattatacaatctcgtaaaactccagtcgattttactggtttcttctaaaacgtttattgaaatcctaccaaaggagtcatctttcctttctgacctctaccgcaaagcaatcagtcttgcccaagattttctccattttcccttctatctaatccttcaatctttattatgtaactttctcctctagtcaaaaacttaaagccagcccaatttccaaactctggaggcttcatgcatcccatggagagtttgtgcaagcatcttccaacaaagatgtagtgttcttcacagaggtaaaattcactagaatgtagtttccagcagttagctttttacagactcatccttagttttgtgtgtcatttactccatttttcttagtaacaagatttattgcagaagcaacaccaattcatgccactgagccaggtttgagataatgagtacttccccatgcaacaraatggttatcaaactgatatttagcatttcttttttaataaggatatttacattgattctttttaatgacttaaaaaatacttctatttagtggatgaggaatgtcatcaaaat

SEQ ID NO: 580873 - DNA, 596 bp, Homo sapiens
attttacaaaagctactccaattatacaatctcgtaaaactccagtcgattttactggtttcttctaaaacgtttattgaaatcctaccaaaggagtcatctttcctttctgacctctaccgcaaagcaatcagtcttgcccaagattttctccattttcccttctatctaatccttcaatctttattatgtaactttctcctctagtcaaaaacttaaagccagcccaatttccaaactctggaggcttcatgcatcccatggagagtttgtgcaagcatcttccaacaaagatgtagtgttcttcacagaggtaaaattcactagaatgtagtttccagcagttagctttttacagactcatccttagttttgtgtgtcatttactccatttttcttagtaacaagatttattgcagaagcaacaccaattcatgccactgagccaggtttgagataatgagtacttccccatgcaacaaaatggttrtcaaactgatatttagcatttcttttttaataaggatatttacattgattctttttaatgacttaaaaaatacttctatttagtggatgaggaatgtcatcaaaat

SEQ ID NO: 580874 - DNA, 210 bp, Homo sapiens
tccgtcttcatctgccacttcatgaaaccaggccatctagattttgctacctgtcctcctgtatatatctttccgtagctcttcaggtgctattgtcartaattttctgggttctacttttctaaaatacatagttcagactttttcatgtgatatataaagcccctcatgtcatcttatttccattcctctgtttgtctacccaaattg

SEQ ID NO: 580875 - DNA, 210 bp, Homo sapiens
tccgtcttcatctgccacttcatgaaaccaggccatctagattttgctacctgtcctcctgtatatatctttccgtagctcttcaggtgctattgtcagtaattttctgggttctacttttctaaaatacatagttcagactttttcatgtgatatataaagcccytcatgtcatcttatttccattcctctgtttgtctacccaaattg

SEQ ID NO: 580876 - DNA, 563 bp, Homo sapiens
cttgctcactggctgcctggaaataaactcagtgctgttagggggacatggtggaggtgagactagccctttgggctgcctgagtgctgggtgaggcctgtcactgctgactttccccyacttccctggcaacctgtatgacacagcagaagcagccataattcccctgggaacatattccatcagcccgagaaccacaccctgatgctcctcagccgccacagcatgccctgcccaaggagagtctgaactcagacatgcctaaccctgcccctacctgatggtctttctctacctgccctgatagctgaagacaaaggacatactctcttggaagctctgtggcctcatccaccacctgagaaacctgaatacttatccaggtggccctaagacaagcttgcatcctccttatactagggcagctgatgctcccttgaaagggccacctcctggcttgaagccaaccaacacaaaaccagtgcactaaccaaaactacaaccaagaccctcacagagtccacttcactcccctgctacttccaccagagcaggtgctgcta

SEQ ID NO: 580877 - DNA, 336 bp, Homo sapiens
tactctcttggaagctctgtggcctcatccaccacctgagaaacctgaatacttatccaggtgrccctaagacaagcttgcatcctccttatactagggcagctgatgctcccttgaaagggccacctcctggcttgaagccaaccaacacaaaaccagtgcactaaccaaaactacaaccaagaccctcacagagtccacttcactcccctgctacttccaccagagcaggtgctgctatccatggctgagagatctacacatggatcacaccacaggactcttgcagacactcccaagtaccagagcctagtagctccaccaggtggctagacc

SEQ ID NO: 580878 - DNA, 549 bp, Homo sapiens
tgatccaggtttcagtggagggaaaatggaaattctgcagggaaataaaagacaggagataaaaaggagcagatttgtttgcaacaaaaatcccttcagtagttaggtgaaggagagtatatgtaagataaatgatgtaggaaggaaarttcaaagaagaaaagacataaaaacagagagagaaataaaatttaacaaattccatgtagataacaacactgtctccttctccactgcctccatttggaagctgagttcttcccgtggcctgaaggatgaatcaagtttacacaaaggtggtttttgtgttttgtttttttggttgtttgtttttgttgtttttttttttttttttagttttcaaaactgatagccagcattagaattatctgatcacaaaagtgacattttggatcatgtagtgtaaaataattcatagtgaatcagcaataaatacataggtgatatgtagactggcccttatgtgagcttgattatctctgtcctctttccctaaagaggctggaagcattgctaccattaaaacct

SEQ ID NO: 580879 - DNA, 549 bp, Homo sapiens
tgatccaggtttcagtggagggaaaatggaaattctgcagggaaataaaagacaggagataaaaaggagcagatttgtttgcaacaaaaatcccttcagtagttaggtgaaggagagtatatgtaagataaatgatgtaggaaggaaagttcaaagaagaaaagacataaaaacagagagagaaataaaatttaacaaattccatgtagataacaacactgtctccttctccactgcctccatttggaagctgagttcttcccktggcctgaaggatgaatcaagtttacacaaaggtggtttttgtgttttgtttttttggttgtttgtttttgttgtttttttttttttttttagttttcaaaactgatagccagcattagaattatctgatcacaaaagtgacattttggatcatgtagtgtaaaataattcatagtgaatcagcaataaatacataggtgatatgtagactggcccttatgtgagcttgattatctctgtcctctttccctaaagaggctggaagcattgctaccattaaaacct

SEQ ID NO: 580880 - DNA, 549 bp, Homo sapiens
tgatccaggtttcagtggagggaaaatggaaattctgcagggaaataaaagacaggagataaaaaggagcagatttgtttgcaacaaaaatcccttcagtagttaggtgaaggagagtatatgtaagataaatgatgtaggaaggaaagttcaaagaagaaaagacataaaaacagagagagaaataaaatttaacaaattccatgtagataacaacactgtctccttctccactgcctccatttggaagctgagttcttcccgtggcctgaaggatgaatcaagtttacacaaaggtggtttttgtgttttgtttttttggttgtttgtttttgttgtttttttttttttttttagttttcaaaactgatagccagcattagaattatctgatcacaaaagtgacattttggatcatgtagtgtaaartaattcatagtgaatcagcaataaatacataggtgatatgtagactggcccttatgtgagcttgattatctctgtcctctttccctaaagaggctggaagcattgctaccattaaaacct

SEQ ID NO: 580881 - DNA, 567 bp, Homo sapiens
ctttcacttatttggttaagtgtatttcaattttttttctgctgctattgtaaaagaaattgagttcttgatttgattctcagcttgatcattgttggtgctatgcagtagtactaatttgtgtacattcattttgtaacctaagattttatgaattcattcatcaaatagaagagtcttttggtggaattcttaggcttatctaagtatatgcttaaatcatcagcaaacagagataatttgacttcctcttttccagttcggatgccctttatttcttcctcttgcttgattgctctgggtaggacttcyagtactatgttaagtagaagtggtgaaaatgggcatccttaacttgttctagccctcagtgggaatactttcaacttttccccattcaatatgatgttggccatgggtttgtcatatatagcttttattattttgagatatgtttattctatgtctagtttgtttagggtttttatcataaagcaatgctggattttactgaatgtttttatgcatctattgagatgatcatatgtatttggtttttaattctgt

SEQ ID NO: 580882 - DNA, 567 bp, Homo sapiens
ctttcacttatttggttaagtgtatttcaattttttttctgctgctattgtaaaagaaattgagttcttgatttgattctcagcttgatcattgttggtgctatgcagtagtactaatttgtgtacattcattttgtaacctaagattttatgaattcattcatcaaatagaagagtcttttggtggaattcttaggcttatctaagtatatgcttaaatcatcagcaaacagagataatttgacttcctcttttccagttcggatgccctttatttcttcctcttgcttgattgctctgggtaggacttccagtactatgttaagtagaagtggtgaaaatgggcatccttaacttgttctagccctcagtgggaatactttcaacttttccccattcaatatgatgwtggccatgggtttgtcatatatagcttttattattttgagatatgtttattctatgtctagtttgtttagggtttttatcataaagcaatgctggattttactgaatgtttttatgcatctattgagatgatcatatgtatttggtttttaattctgt

SEQ ID NO: 580883 - DNA, 530 bp, Homo sapiens
gtaaaagaaattgagttcttgatttgattctcagcttgatcattgttggtgctatgcagtagtactaatttgtgtacattcattttgtaacctaagattttatgaattcattcatcaaatagaagagtcttttggtggaattcttaggcttatctaagtatatgcttaaatcatcagcaaacagagataatttgacttcctcttttccagttcggatgccctttatttcttcctcttgcttgattgctctgggtaggacttccagtactatgttaagtagaagtggtgaaaatgggcatccttaacttgttctagccctcagtgggaatactttcaacttttccccattcaatatgatgttggccatgggtttgtcatatatagcttttattattttgagatatgtttattctatgtctagtttgtttagggtttttatcataaagcaatgctggattttactgaatgtttttatgcatctattgagatgatcataygtatttggtttttaattctgtttatgaaataca

SEQ ID NO: 580884 - DNA, 611 bp, Homo sapiens
  misc_feature 1, 2, 3, 4, 5, 6, 7, 8, 9, 10, 11, 12, 13, 14, 15, 16: n = A,T,C or G
nnnnnnnnnnnnnnnnctcctgaatagctggggctacaggcacctgccaccatgcccagtgaatttttttktgtgtgtgtttttagtagagacagggtttcaccatgttagccaggatggtctcaatatcctcccaaagtgctgggattacaggtacaggcatgagccaccatgcctgacctttcattttttaaaattcttcttttctttatttattttctggctgtgttaacttaaataatcagtcttcaatctctgagattcttttcttggcttagtccattctgctgtgaatatttccaatcattttatgaaattcttgtagtgtattttgtaactctacctgctaggtttggtttttgtttgtttgtcttgttttgttttttcaaatggctaatttttttctctttaatcattttaatggattcctcagattcttggaaatagtgttcaactttctattgaatttcaatgatcttcattttcttctacctctcagttctatatctgtcatttcagccatttccttctatttaacaaccattgctgtagaactagtgcagtcatttggaggtaaagtgacactctgatttttgagttgctagagttct

SEQ ID NO: 580885 - DNA, 560 bp, Homo sapiens
ctcagtgactggcttttgaaagttattatgcccttgaggctgttacaattccaaaatgagatggagcaaagtttgtgatagttgtgattgcacttataattcacttataggtgttgaattctcagtaaggataatccaggtacttcacttccatttatcctttgtaacatttacttaatacacactttgtgctcttatcaaacctttctgttatatttttaaaaggtttatttgccctccagtttaactggagaaatagtgttttattcaaagttatgaaaaaggacttcctcattctattatttctacacaaatatttattacaaatatatagattacttaagtagctacttatctgatgacttacaaaatgatttgagaacaatttaaagttacgtggtgtgctttctgtacacataacccacatamtaagtaatttataaaaatacataaaataggaaattaacttaaaggtcactaggctctcagaagaataaatgacctttgatgttggaaatcactatttttttcaggttttgcataatatattatgtatcact

SEQ ID NO: 580886 - DNA, 560 bp, Homo sapiens
ctcagtgactggcttttgaaagttattatgcccttgaggctgttacaattccaaaatgagatggagcaaagtttgtgatagttgtgattgcacttataattcacttataggtgttgaattctcagtaaggataatccaggtacttcacttccatttatcctttgtaacatttacttaatacacactttgtgctcttatcaaacctttctgttatatttttaaaaggtttatttgccctccagtttaactggagaaatagtgttttattcaaagttatgaaaaaggacttcctcattctattatttctacacaaatatttattacaaatatatagattacttaagtagctacttatctgatgacttacaaaatgatttgagaacaatttaaagttacgtggtgtgctttctgtacacataacccacataataagtaatttataaaaatacataaaataggaaattaacttaaaggtcactaggctctcagaagaataaatgacctttgatgytggaaatcactatttttttcaggttttgcataatatattatgtatcact

SEQ ID NO: 580887 - DNA, 261 bp, Homo sapiens
cactcaacaccagcccttgagagcagctgtaggagctgaaccctgcaaagtcacaggagtggagcagcacaaggctttgggagctcamtccttgcagtggtatgccctggatggcatcaaaggagatgttaagctttaagacttaataactttcctactgggtttcagacttgcatggggcccgtagccccttacttttggccaatttctcccttttgaaatgggagtatttacccaatccctgtacccccattatacatt

SEQ ID NO: 580888 - DNA, 261 bp, Homo sapiens
cactcaacaccagcccttgagagcagctgtaggagctgaaccctgcaaagtcacaggagtggagcagcacaaggctttgggagctcaayccttgcagtggtatgccctggatggcatcaaaggagatgttaagctttaagacttaataactttcctactgggtttcagacttgcatggggcccgtagccccttacttttggccaatttctcccttttgaaatgggagtatttacccaatccctgtacccccattatacatt

SEQ ID NO: 580889 - DNA, 583 bp, Homo sapiens
gatttacttcatgtgtacatttcaatgaatgactgcatgtctaaaatatattttatacttttttactgagattattcacacttcagtcttcctgttttggtacaaaatattttagacaaactattatacttgttcatgtataactgtcactttagttataaaaawgatgcttaagttaaaaataaaataattttaataaagaagtgtgagaagtaatatataacctctgagtcagtcagaatctagcaaagctttataggtcacattcattaaacattcttacattcactgtcagtggctctaattaagaatgatcatataaaaagatcttttcatttttcttggctttttctagtttgcccaaatcgcaccaattatttcttctatactgttggttcatgagtttgtgactgtacatagttagtaattacttaaaatcagatttttttttacattttactgaaacatagtttaattcacctttgcttttctcccactagcttgatatattattgaactataataattttaaaaagaaaattcacactatgctaaagataaggaagcatttaaatgacagaac

SEQ ID NO: 580890 - DNA, 583 bp, Homo sapiens
gatttacttcatgtgtacatttcaatgaatgactgcatgtctaaaatatattttatacttttttactgagattattcacacttcagtcttcctgttttggtacaaaatattttagacaaactattatacttgttcatgtataactgtcactttagttataaaaatgatgcttaagttaaaaataaaataattttaataaagaagtgtgagaagtaatatataacctctgagtcagtcagaatctagcaaagctttataggtcacattcattaaacattcttacattcactgtcagtggctctaattaagaatgatcatataaaaagatcttttcatttttcttggytttttctagtttgcccaaatcgcaccaattatttcttctatactgttggttcatgagtttgtgactgtacatagttagtaattacttaaaatcagatttttttttacattttactgaaacatagtttaattcacctttgcttttctcccactagcttgatatattattgaactataataattttaaaaagaaaattcacactatgctaaagataaggaagcatttaaatgacagaac

SEQ ID NO: 580891 - DNA, 335 bp, Homo sapiens
tgcccaggctggagtgcaatgacatgatcttggttcaacacaacctccacctcccaggttcaagcaattctcctgcctcaatctcctgagtagctgggattacaggcatgcgccaccacacacaactaattttgtatttttagtagagacgggatttctccatgttggtcaggctggtctcaaactccaggcctcaggtgatctacctgcctcggcctcccagaatgctgggattacaagcatgagccactgcacctggccctaactctttcataatcaaattgtatagctattakagaaagaatcaatatattttgatatctacaaatacaatg

SEQ ID NO: 580892 - DNA, 523 bp, Homo sapiens
tgctcatgtgttaatgtgcaaaccactgaagtggctagagactcatacataatataagaaagtctttcaaaagcggccatcttacctgatttgctactacagcatcctgtggatcatctggctctgcagctgccaatagtgcttgcaatgacaataataccgtgcggagagtcattgcagctgccctaaaatgcaaaacatgaaaatatcccaattaagagggctctgcaggcaaaagcaaagtattttcttaataaaaattaaaaaattgtagagctaaaagttacttagatctttatcttaattatatagttaagtcatagacatttataattatgtatctgcctatcatatattttcttccttactttacaatttgcctatttcttttttctttttttccccygagacggagtctggctctgtcgcccaggctggagtgcagtggtatagtctcggttcactgcaagctccgcctcccgggttcacgccattctcctgcctcagccttcagagtagctga

SEQ ID NO: 580893 - DNA, 473 bp, Homo sapiens
aagcttgtccatcctgcagcctgcaggctgcatgcggcccaggatggctttgaatgcagctgaacataaattcgcaaactttgttactgtttcttaaaacattatcagttttgaccaggcacggtggctcacccctgtaatcccagcactttgggaggcaaaggttcgtggctcacttgagatcaggagtttaagaccagactgaccaacatggtgaaacgtcatccctactaaaaatacaaaaaaattagctgggtgtggtggcrggcacctataatcccagctactcagaaggccaaggcaggagaatcacttgaacccagggggcagaggctgcagtgagctgagatcgcgtcattgcactccagcctgggcaacaagagcaaagctctgtctcaaaagaaaataacaacaacaacaacaacaacaaaacaaaaaacatcaggtttgtttgtgggttttttgcaattttt

SEQ ID NO: 580894 - DNA, 570 bp, Homo sapiens
gtatgcctagaaaacctaaagaatcatccaaaaagctcttagatctgatgaattaatttagtcaagttttgggatataaaatcaatatacacaagttagtagctctgttatatgccaaaaacaatcaagctgagggtcgagtcaataactcaatcccttttgcaacagctgcagaaacaataaaatacttaggaatatacttaaccaaggaggtgaatgatctctgcaaggaaaactacaaaacactgccaaaagaaataatagatgacacaaagaaatgaaaacataycctatgctcatggatggatagaatcaatattgtgcaaatgatcacattgccaaaagcaatctacaaattaaatgcaattcccatcaaaataccatcatcattcttcaaagaactagtaaaagcaatcctaaaatttatatagaaccaaaaaaaaaaaaaaaaaaaagctcacatagctaaagcaagactaaacaaaaagaacaaatctggaagcatcacattaccagacttcaaattaaactacaaggctataattaccaaaacaacatggtactggtata

SEQ ID NO: 580895 - DNA, 570 bp, Homo sapiens
gtatgcctagaaaacctaaagaatcatccaaaaagctcttagatctgatgaattaatttagtcaagttttgggatataaaatcaatatacacaagttagtagctctgttatatgccaaaaacaatcaagctgagggtcgagtcaataactcaatcccttttgcaacagctgcagaaacaataaaatacttaggaatatacttaaccaaggaggtgaatgatctctgcaaggaaaactacaaaacactgccaaaagaaataatagatgacacaaagaaatgaaaacatatcctatgctcatggatggatagaatcaatattgtgcaaatgatcacattgccaaaagcaatctacaaattaaatgcaattcccatcaaaataccatcatcattcttcaaagaactagtaaaagcaatcctaaaatttatatagaaccaaaaaaaaaaaaaaaaaaaagctcacatagctaaagcaagactaaacaaaaagaacaaatctggaagcatcacattaccagacttcaaattaaactacaaggctatarttaccaaaacaacatggtactggtata

SEQ ID NO: 580896 - DNA, 660 bp, Homo sapiens
aatccttttaatggatatatacccaaaggaatataaataattttattataaagatacatgcacgcatatgtttcttgcagcactattcacaatagcaaagacatggaatcaacttgaatgcccatcagtgatagtctggataaagaaaatatggtatgtatacaccatgagatactgtgtakccatgaaaaggaatgagattggttttctgcagggacatagatggagctggaagccattagcctcagcaaattaatgcaggcatagaaaaccgcacaccccatgttctcatttataagtgggagttgaatgatgagaacacatggacaaaaggagggaaacaacacacactaaggcctgttgggagggagagtatcaggaaaaatacctaatgcatgctggccttaatacctagacgatgtgttgataggtgcagcaaaccaccatggcacacatttatctacataacaaacctgcacatcctgcacatgtatcccagaacttaaaattttaaaaaagctggtctttcaaacaaatgttgctggctcaactagaaatctacatacaaataaataagtgtggtaccagaccttacacactttacaaaattaaatcaaaataaattataaacctaaatgtaaagctcaaaaatataaaatt

SEQ ID NO: 580897 - DNA, 594 bp, Homo sapiens
atacccaaatagtgaacactgtacacarcaggtacaatttttcagctctcatcaacctcccaccacactcccttctttggagtccccagtgtctagtatttccatctttatgaccatgtgaacccattgtttagatacaaacgtatatataatttttttaagaataaaagtgctcatgagaagcacaaccaattttgtttctgtgaccaaatataatatttctggactctcaagttaaggacacagtgtaacttggtgaacacaacccaaactatcttttataataaatgaagtgataagcttttaatgttttttataataccaatgatataataatattaggtgaaatttaacctaaacccttcaagatttctttgtaaaacccatgttcaaatatgctggtaaaattcttgcaaaaggagtgatacctggaaggtcactgtcaatggctgaatgttcacaggggtagtaatatgttatattgctgagccaatcataaatggacacctagtattcatctttgaagcaaacctcttttagggtcaaaacatggtcaggtaatggattctgtgtaaggacacattgatgaataac

SEQ ID NO: 580898 - DNA, 577 bp, Homo sapiens
ctatcaaaataccaatgatgtttttcacagaaatataaaaaaaatcttaaaatatgtatgagacacaaaaaaagcctcaatacctaaagcaattctgagtaaaaagaccaaagctggaggcatcacattacctgactacaaatatattacaaggttatagtaaacaaatagcatggtattggtataaaaacagacacacaggctgatgaaacagaatagaaaacccagatttaaaaccacatatttacagctaattgatttttagcaaaggccaagaatacgcattaaggaaaggacattctcttccataaattatgccaagaaaactggatttccatatgcagaagaatgcaactaaacttctattttttaccatataatcaactcaaaatggagcaaagacttaaacataagactcaaaattataaaactatcaggagaaaagataggggaaaccctctaatacatagacgtagggaaagattttatgggtaagacctcaaaaacacagcaacaaaacaaaaaataracaaaggggattatattaaatggaaaagctcttatacagcaaaggaaa

SEQ ID NO: 580899 - DNA, 380 bp, Homo sapiens
ggaaaaccgccttagggctggaggtgggacatgcaggcagcaatactgctctgtaaggcattgagatgtttatgtgtatgcatatctaaagcacagcayttaattctttaccttgtctatgatgcagagacctttgttcacgtgtttatctgctgaccttctctccactattatcctatgaccctgacacatccccctctccgagaaacacccaagaatgatcaataaatactaagggaactcagaggctggcgggatcctccatatgctgaacgctggtcccctgggtccccttatttctttctctatactttctctctgtgtctttttcttttccaagtctctcgttccacctaacgagaaacacccacaggtgtgga

SEQ ID NO: 580900 - DNA, 495 bp, Homo sapiens
tttgaaaaacagccttccatgtaattctcttttttctctaagaagtgttggcagcacaacctttttgttctgcaatatttggttctttatgccatcatcaggaaataatcaacattttccggttttcaggaaagagaaaataatccatggagagtccatagagtgtcatgatctttgggatcttttcttattctgactcatgaaaccctcacttagaacccaagtagctcgatctcagtcaccaagtattaataggtatgtcatagactaagagagacagcagcccttcagaaggaatcacaaatgccaacaagctagcatgagagtgaacagggaacagaaaaggggatagagggaggaggactgagcacagctgaagtctaatagagyggaatcattaccaaaggagaggccaggataccatcatgtaatacaaagaacttagaacaagggcttactatgtgctgcatgcttgtattaacatttttaattttc

SEQ ID NO: 580901 - DNA, 495 bp, Homo sapiens
tttgaaaaacagccttccatgtaattctcttttttctctaagaagtgttggcagcacaacctttttgttctgcaatatttggttctttatgccatcatcaggaaataatcaacattttccggttttcaggaaagagaaaataatccatggagagtccatagagtgtcatgatctttgggatcttttcttattctgactcatgaaaccctcacttagaacccaagtagctcgatctcagtcaccaagtattaataggtatgtcatagactaagagagacagcagcccttcagaaggaatcacaaatgccaacaagctagcatgagagtgaacagggaacagaaaaggggatagagggaggaggactgagcacagctgaagtctaatagagcggaatcattaccaaaggagaggccaggataccatcatgtaatacaaagaacttagaacaagggyttactatgtgctgcatgcttgtattaacatttttaattttc

SEQ ID NO: 580902 - DNA, 633 bp, Homo sapiens
ttgtggtcactaacattggagtacagagtgagcagcatacacatgtccagtataagactgaaaacagaatatttaattaaggttctgaaaaattggagaaacaacattgtttactttaatccatataactggaaaatcaaggccacatgttaaatgtccagacacaagattgaagagatgaatgggggacaaacaggcaatcactaaactgggtctacaaatttatttattcatttatttttccataagttattgggtacaggtggtatttggttacatgggtatgttctttagtggtgagttgtgagattttgatgcacccattatccgagcagtatacactgcaccatatttgtagtcttttatccctcgcctgcctcctgctcttacccccaagtccccaaagtccattgtatcattcttatgcctttgcatccycatagcttagcccccacatatcagtgagaacatatgatgtttggttttctattcctgagacacttcacatagaataatagtctccagtcttattcaggtcactgcaaatgctgttaattcattcctctttatggctgagtagtagtccatcatatatatatatatatatatatatatatatatatatatatatat

SEQ ID NO: 580903 - DNA, 510 bp, Homo sapiens
ctttacaatactggaaatgactattccactagatgaaaagatatcgatgtagagatcttcatattggaataatttttcccttttatttttaattgtaatactctcttaagcatttagtttaagtctagtccagtggtaatgaaattcctcagcttttgtttgtctgggaaggccctgatttgtccttcatttctgaaagatagttttgctggacatagcattcttcgttgacagctttttttttgttttcagtactttgaatatatcatcttattctcttctggcctacgaagtatctattgcaaaatctgctgaaaatctattagagattttcttacaggtaacttgawactttttttttttttttttttttttttggcttttaaaaaaattatctttgtcttttgacagtttgagtataatgggccccggggaggacattttgcagttaaaccaatttggaaatcttggggctttttatctggatggctatatctttttcaaaaattg

SEQ ID NO: 580904 - DNA, 510 bp, Homo sapiens
ctttacaatactggaaatgactattccactagatgaaaagatatcgatgtagagatcttcatattggaataatttttcccttttatttttaattgtaatactctcttaagcatttagtttaagtctagtccagtggtaatgaaattcctcagcttttgtttgtctgggaaggccctgatttgtccttcatttctgaaagatagttttgctggacatagcattcttcgttgacagctttttttttgttttcagtactttgaatatatcatcttattctcttctggcctacgaagtatctattgcaaaatctgctgaaaatctattagagattttcttacaggtaacttgatactttttttttttttttttttttttttggcttttaaaaaaattatctttgtcttttgacagtttgagtataatgggccccggkgaggacattttgcagttaaaccaatttggaaatcttggggctttttatctggatggctatatctttttcaaaaattg

SEQ ID NO: 580905 - DNA, 578 bp, Homo sapiens
agttttgcagtatataccaaaagcaaaacacaaaacaaaacaaaacaaacccccacatatttaaatttaataagtaaagttctcttggcagagttttaagtatctgcagtagaggaagcagctggctgcattatagctctgtaaatgaagaaatattaagccaaacaaaaataccaagatgaaacttatagttttatacctggcaatgctgagcatcaaggcagtgtgtgtgtgtgtctataaagttggctgtgtaaatagtctttgtatctgttcacagctctgttatacggcaatgttttccagaatatctcatttggtatttccattaactgtgaggaaaacccagccagtaaactggtatgcaaatgtaacaaaaaatgataatgattttgatgattaataaaagaaaagggaagagtatctgtaagattcatttacctaccatccctaactacatccttggtaataacatcctaagttttcagtgagtaccactttgtccaactctgaatctatgtcattgaaatgttgttaactaggtagsatcacccaggtttagtcaatgagaactttta

SEQ ID NO: 580906 - DNA, 604 bp, Homo sapiens
atgactgcctttgcctttatactaaaatagaactaaaaaggtgcaacagagactatttagcacacagagcctaaaatatttactatttggccctttagaagtatagtgtgctaagccctgacataaacaaataatctcagagaatagtcattcaggagaatcttgctgctgtataatacgtgaaatgcaaacaatctygttgttcaaactgctccaaagtttcatttctacagggatcacaacacaatgctaacaactgatatttatcactttctaagacctttgggtttacttttcctcattatgtctttaaaaatgtgccatgcttatagttcatgttatagaatgtgttgccttatttccttgggtgacaggtacttaggtggaaatggtttggacattaaaatcagatatgtctcttaataaatgtgtgacttggataactcatcagtcctccaaattttacttcctaatttgtaaaaaaaaaatacatacacacacacacacacacacacacacacatatatggttcccagtacatggtggggctcattagttttacttttaccccacatttattttaacaataaatttgttaagcaaa

SEQ ID NO: 580907 - DNA, 604 bp, Homo sapiens
atgactgcctttgcctttatactaaaatagaactaaaaaggtgcaacagagactatttagcacacagagcctaaaatatttactatttggccctttagaagtatagtgtgctaagccctgacataaacaaataatctcagagaatagtcattcaggagaatcttgctgctgtataatacgtgaaatgcaaacaatcttgttgttcaaactgctccaaagtttcatttctacagggatcacaacacaatgctaacaactgatatttatcactttctaagacctttgggtttacttttcctcattatgtctttaaaaatgtgccatgcttatagttcatgttatagaatgtgttgccttatttccttgggtgacaggtacttaggtggaaatggtttggacattaaaatcagatatgtctcttaataaatgtgtgacttggataactcatcagtcctccaaattttacttcctaatttgtaaaaaaaaaatacatacacacacacacacacacacacacacacayatatggttcccagtacatggtggggctcattagttttacttttaccccacatttattttaacaataaatttgttaagcaaa

SEQ ID NO: 580908 - DNA, 430 bp, Homo sapiens
tataccacaacatatgcataatgggagtgccagaggaggtagtggggtctaataggaagaatacttgagagaaataatgggcaaaaactttccaaatttgatggaaaacattagtctatacatctaagaaactccaagtaggataaactcaaagaggtccacactgagacacgttataattaaactgttcaaagataaagacaaagatagaatcttgaaagcagcaaaagagaagcagcttatcacgtagaagtaatgcttaataagattaacagcttatttatcattakaaaccatggaggtaaggaagcaatgggatagaacattaaaaggactgaaagaaaaacagctgtcagccaagaatgctatatcaagcaaaactatccctctggaatgaaatagaaattaagaaatttccaaataaaaaaag

SEQ ID NO: 580909 - DNA, 553 bp, Homo sapiens
ttctaccttttcaagatgatttagtggttacgttaacaagtggctttgctggaccctctgggtctgaatcttagttcttacctctactagctgtaggactttgtgtaaattatttaatctttctatatctaagtttacttatctgaaaagtagggagaataatcatacttcattacttaaacatttgtgttccttaatattttttaagtgtcacttaatgaaaacacattttaattttgtaggatgatgtacagtacaaataatttataaaatagcattttataataaaataatataaaccatattagttacatgagattgaattttactgaagttaaaaatatctaacgtttttataaattaaaagcaatttggtcatttaygggcttttcttcttacagctccatattcgtactttgtctgaatctttctttgcagctaaataaaaagcttccagatttccaaagccatatcttttttcatggctgcatttcaaatgtctggcctttaaccttagacacaagtttttgctcaataaatattagttaaatga

SEQ ID NO: 580910 - DNA, 622 bp, Homo sapiens
ttctgtgaagccagtatcaccctaatatcaaaaccaagaagggacataacaaaaaagaagactacagactgatatccctggtgaacgtacgtgcaaatatcctcaacaaaatactagctaaccaaatctaacagcatatcaagaagataatctaccacaatcaagtgggtttcataccagggatgcagggatggtttaacatacacaagtcaataaatgtgatacatcacgaaacaaaatttaaaatcgtatgatcatctcaatagatgcagaaaaagcatttgataaaattcatcatctctttatgattaaaaccctcggcaaaatcagcatagaaggaaaacaactaagggtaataaaagccatctatgacrgatgtacagacaacattttacggaatgggggaaagctgaaaacattccttctgagaattagaaaaaaacaaagatgcccactttcaccacttctagtcaacatagtactggaagtcctagccagagcaaccagacaagagaaataaataaagggcatatgaatcagtaaagaggaaatccaactgtcactatttgccaatgataagattgtatgcctagaataccctaaagacacatccaaaaagcac

SEQ ID NO: 580911 - DNA, 473 bp, Homo sapiens
gtatgtcaccatacctggctaattattttatttttttgtagagatgtcttgccttgttacccagggtggtctcaaacttctggcctcaaacaatcctcccaccttagcttcccaaagtgctgagagtmtaggcttgagtcaccatgcttggccaagagccattttataattgtcagaaaaacgtgtttccctataacatatttttatgcatatttagtctttctcttagtatttctagtctttctattaaatttaagaagccaaggacaaccctatttatgttcagcagtttgtttcagtttttatcgtatttgaaaatgacttgtacatttaatgagtcatctattatttaatttaggatttcaaattacataaaaatttatagctatttatcccatttacctttatttatttattttagcagtgtgctgagattacttatgaaaactgagataatagacaaactagtcatc

SEQ ID NO: 580912 - DNA, 612 bp, Homo sapiens
ggtgatcctttaaagatggttaatgtcatctatattctctaaatttttatataccatagctgacattcagttgaaattaagagaaatgccaagaaacaggattttatgataaaaaaaaaacaagaagaaagaaaaacaggcaaaaaataggaattagtactcagctgtttgaacttacattaatggaataagtagaaaatgactttaaaatatgtgtgattwatttgttgtatgaaggtgattaagaggctttacaaattcatgggaaaactgtacgctatttaagaggaagatatatatcatttaagactaaaaatgcaaggcctgaagtgaggtttaactacagaatgaaatagattagaagtcagggtcatgaacttaaagacaagggagtagaaaaacattctaagaggcaaatgagacaatgtgaaaagacttaatatgtgtggagataaaatgtaaggattaaaaaaagcatcaatatttgaagaaaataaaggccaagaagctataaaaaccaatgaaacaaattgaaacctgtatatccagtaactacttcaaacctcaataaatataatgagataactgcacctagaaacatcttcttaaaat

SEQ ID NO: 580913 - DNA, 494 bp, Homo sapiens
ttaaccatctattacagtgacttgggaaaatttacataattgctccttgctatagtctcattagttaaatgggaaaatttatttaaatgtcaagtaaagttctcgttaactctcaatgttttgtgagtaccttcctctgctttggcccccataataaaatactatagacagtgtggcttaaacaatagacactgattttcttccatttctggaggctggaagtctgagatcagggtgccagcatggtcagatctggagaggcctctcttcctggcttacaaatagccactgtcttgctgtgttctctcaaaatggagagaggaagagaacaatctctctgatgtctttttaataaggactccagtcctattggatcagtacccaccttcatgacctcactcatctaaccctaattacttcttaaagaacccatcatcaaacaccwtcacattggatgttaaggcttcaacatatgaattgggagaggagggcat

SEQ ID NO: 580914 - DNA, 641 bp, Homo sapiens
aagtggcacatggtacatagtggcttgataatgttgatagctatccatggaatttcatcaatatttattttttatagggagcctgtgtagtcctagagcatatacagggcattttggatgaaaatackttgcacagaatttggatttaaatcaaaatattgaaccttatttttgaaaaataaaaacgtggattttttttctcatagagtttagaggttacattcgtttgcaagggctgctataaaaataaatctaaactgtgtggtgtgagcgacagaaatttattgtctcaccgttttggaggctaaaatagaagatcagggtggtggcggggttggttccttctgaaggctgagagggagaatgtgttccacacctctcctctacctttggatggttgctgggaatctttgtcattccttgactcagatgtatcactcccatgtccaccttcatgtttaaagggtatctcccctctgggtgtgtctgtgtgcccaaatttcctcttttttaagggcacaatcacattggattagtgccccccataatgacttcagcttcacttagtcatctgcaaaaacattgcttccaaataaaatcacattcacagataatgaggattaggacttctacatatttgg

SEQ ID NO: 580915 - DNA, 641 bp, Homo sapiens
aagtggcacatggtacatagtggcttgataatgttgatagctatccatggaatttcatcaatatttattttttatagggagcctgtgtagtcctagagcatatacagggcattttggatgaaaatacgttgcacagaatttggatttaaatcaaaatattgaaccttatttttgaaaaataaaaacgtggattttttttctcatagagtttagaggttacattcgtttgcaagggctgctataaaaataaawctaaactgtgtggtgtgagcgacagaaatttattgtctcaccgttttggaggctaaaatagaagatcagggtggtggcggggttggttccttctgaaggctgagagggagaatgtgttccacacctctcctctacctttggatggttgctgggaatctttgtcattccttgactcagatgtatcactcccatgtccaccttcatgtttaaagggtatctcccctctgggtgtgtctgtgtgcccaaatttcctcttttttaagggcacaatcacattggattagtgccccccataatgacttcagcttcacttagtcatctgcaaaaacattgcttccaaataaaatcacattcacagataatgaggattaggacttctacatatttgg

SEQ ID NO: 580916 - DNA, 517 bp, Homo sapiens
tcagaataacaaagagaaacagaccaaaaaaacaaactaaaacaaaaccaaaaacaataaacaaataacagaagtcagaccctcagctctatggacctatggagctatgataaagatgttttagatgtgcacaaagtgagagaattttgaattttactccaaaaaagaaccaaattagaggaaaaaaattaaaaaggaagaaaggcaaaataaaaaaagacaaatagtgtgtttaaacttagcagtagtaattaatacattaaataaaaatagactaaacacccagactaaaatacaaagactttctcagatttcttagaaacccagtactcagtcatatgcagttgaaaagaaagaaaagttaaaatatgtaaatacacaaatggaaasatataaggaggaaaatagcagaaaattataagccatgcaaacactaatttaagatgctgacattgatatattgtgagaaaagtagactttaaaacaaaatgttctgtcagggatcaagggtcatttt

SEQ ID NO: 580917 - DNA, 590 bp, Homo sapiens
ttggccaggctgctctcgaactcctaaccttgagatctgcctgcctcaggctcccaaagcaccgggattacagacataagccaccacacccagccctcatattaattttttaaaagtgcatatccacaacaatttttactcagtcatgatttttatctttttatatattaatggagtagatttgcaaacatttcaccaaagatttttgacattacattaaaatgggatattactctagaaatttttaactgtaataaccttttcagtttttggtatatagatgttgctagacttacaaaacgagttggtaagcatttattcattctgtattttttaaaagttttctggaaaattgctaatatttgttctttaagaatttgacaaaatgtttaygtgaagctattcaggcttggccttttatgtttggaatgtatttgactatgaatttcaattgtttaatagatgttaggctaacttttattattaaattcctgtaataaatatagttctatttagattttctatttattcttggaacaatttctgaattgaattttataaggaaacaatttattactgaacttaacaca

SEQ ID NO: 580918 - DNA, 565 bp, Homo sapiens
atgtttacgtgaagctattcaggcttggccttttatgtttggaatgtatttgactatgaatttcaattgtttaatagatgttaggctaacttttattattaaattcctgtaataaatatagttctatttagattttctatttattcttggaacaatttctgaattgaattttataaggaaacaatttattactgaacttaacacaaagttgtccacaatacatttcatcatacacataattatataatgttatctaataatataatatgtaattgtatattatatatagtatatttttacaattctaagatctatggcctacaactttttacattcttgatgttggaacttttttttttattcaatcttgccaaggtttaycaattttattattactttacagaaccagattttggctttgaaaatgttctatattgcttgcttgtattttatgccattaacttttttgtaaattattcattatttcttgtcttacactttttgaggtttaattcaccagctttttatctattcataagattgactttcaaataacttatttttc

SEQ ID NO: 580919 - DNA, 548 bp, Homo sapiens
agacaaatcctacatcatccctcattctttccccaaaagagaaagtcacagcaagacccacacacatatattcactcccaaatgcacacagttataataaagaaaatgtgaagaagtcctaatgagcccatctttttccaagtgagcatggtgctctgagcaaccccttcttccaaacacacatggaagattcaamagaacatcaaattcatttaacgttcattccttttagcagcctgccaaagcttatgtcacatggttataaaatagtagagtgattattacaattcatttctttctgtagccaagtccatactttctccccacttttttcaacatgtaactattccttgatagtgaatgcaataaaagcaaatatattaatcacttatgcttctatcacaattaagtgaattaacactcaacaattagcagcccagcccagtgtttatgattttaaaatacaacttgactcacctcttaagctaaatctcagcaataatgctttgattctatacaatagaacatatagtctctgtgaagaattc

SEQ ID NO: 580920 - DNA, 425 bp, Homo sapiens
tagagccagaaacctcttacagatgggggaagctttttgaaaagaggcagggaggccatgaagggatgtgaagcggaagatgttctcagaggaaaagagggcagagtgtgtacctgcaagaacaccctcaactcccatgaaggttttacaattttatattttccccttggtttatgaggacaatcatagattatgtatggttttaaaaatcagctttattgaggaataattgttttataattagctgtgtatttttaagggtacgacttaatatgtttgacctatctacatacctgtgggaccagcgccacaatcaaaataatatccatcatctccccaaatttactttgtttctttgctcctttgtaattcatctctctccccatgccatacccagrcagccaccgatctgcttcctgtcactg

SEQ ID NO: 580921 - DNA, 482 bp, Homo sapiens
aacaacataccttaggctgcataatttatacacaatagaaatgtgttgcccacagttctggaggctgagaattccaagatcaargcaccagcagatttggtgtctggtgagggatctcagcttccaagatggctctgtgttattgtttcctcacatggtggaaggaacagaggggcaaaagcagggctcaggcactccctgcaacctcttttctaaaagcactaatcccattcactaaggtggtagtgctcatgacttaatcacttccttaaaggtctcaccttctaatactatctaattgggtattgaattccaacatacgaattttggaggaacacatacattcaaacaatagcagcgatatacacagatcctgtgtctgaggtgtcccgaggtatccctctaactcataagccctctttggagaggaggcttttgttgtatacaggtatcctaatgtgtcttacaggatagcactgtgc

SEQ ID NO: 580922 - DNA, 482 bp, Homo sapiens
aacaacataccttaggctgcataatttatacacaatagaaatgtgttgcccacagttctggaggctgagaattccaagatcaaggcaccagcagatttggtgtctggtgagggatctcagcttccaagatggctctgtgttattgtttcctcacatggtggaaggaacagaggggcaaaagcagggctcaggcactccctgcaacctcttttctaaaagcactaatcccattcactaargtggtagtgctcatgacttaatcacttccttaaaggtctcaccttctaatactatctaattgggtattgaattccaacatacgaattttggaggaacacatacattcaaacaatagcagcgatatacacagatcctgtgtctgaggtgtcccgaggtatccctctaactcataagccctctttggagaggaggcttttgttgtatacaggtatcctaatgtgtcttacaggatagcactgtgc

SEQ ID NO: 580923 - DNA, 493 bp, Homo sapiens
ggctcaacaccacatggaaggtgccaaggcttggggcttgcaccctctgaagcaatagcccaagatgtaccttcatcccttttagccatgrgtggagctggagcagctgggacatagggtgccatgtcccaaggctgcacagagcagggggcagcgggtggtaggttcttgcccatgaaaccatttttctccctcaggcctctaggcctgtgatgggagaggctgctgcgaagatctctgaaataccctggagacattttccccattatcatggctgttaatacttggctcctcattacttatgcaaatttctgcagctcacttgaatttctccccagaaaatgagttttattttctaccacctagtcaggctgcaaatttaccaaatttttatgctcttcttcccttttaaatataagttcctatttcagaccatctctttcttcatgcatatgcatgtacacttttagaaacatctgggtcacctcatgaa

SEQ ID NO: 580924 - DNA, 553 bp, Homo sapiens
tacttaaagttctgtgccacagacacctccaaaaacagtggtgcctcagggcagaaaattaattttccatcttgaacaaaacgttggagcacacctggaaaagcttatcatataccatggtgtctggaccactgactggtatggagtagggagacagacttttgatcctcatggggtagtgactcactcttcctgggtccctgagtcccaaaatcctaatcacagtatgtagatgataatacctacccctattcatctcccagggttgagaaagataagaataggatggatgtgaaattgaacmaagggccataccgtaataacagcagcatggcacgagctaataccacaaatataatcgctgctcttagggtcacacaagcagcacagtggttaagagtagtgtggctaaggctgggcacgatggctcacaccttaaccccagcactttgggaagccgaggcaggcagatcacttgaggtcaggagtttgagactagccttgccaacatggtaaaactctgtctctactaaaaatacaaaaaacagccagg

SEQ ID NO: 580925 - DNA, 553 bp, Homo sapiens
tacttaaagttctgtgccacagacacctccaaaaacagtggtgcctcagggcagaaaattaattttccatcttgaacaaaacgttggagcacacctggaaaagcttatcatataccatggtgtctggaccactgactggtatggagtagggagacagacttttgatcctcatggggtagtgactcactcttcctgggtccctgagtcccaaaatcctaatcacagtatgtagatgataatacctacccctattcatctcccagggttgagaaagataagaataggatggatgtgaaattgaaccragggccataccgtaataacagcagcatggcacgagctaataccacaaatataatcgctgctcttagggtcacacaagcagcacagtggttaagagtagtgtggctaaggctgggcacgatggctcacaccttaaccccagcactttgggaagccgaggcaggcagatcacttgaggtcaggagtttgagactagccttgccaacatggtaaaactctgtctctactaaaaatacaaaaaacagccagg

SEQ ID NO: 580926 - DNA, 623 bp, Homo sapiens
ctcagtatttcaaagagatagttgcatttctatgttcattgcagcattattcataattgccaagatatggaagcaacctaaatacccaccgatagatgaatgaataaggaaaatgtggaatatcaygtggcagctcaatttttagtttcttaaggaacctgcaaactgtcctccatagtggttgtgtaggggaacatagggagatgttgctcaaagggtacaaagttttggttgtgcaagatgaatgggttctggatagctaatatacagcatggtgactacagtgaacagtactgtattgtatacatgaaattagctagagagtagatcataagtgttctcactgaaaagggaagaaaaagggagagagaaaaaagagagggagagaaaggaaggaagaaagaaagaaaaatagttgttatatgaggatcataaatttgttaatcagcttgattatggtgttcatttcacaatatatcacagcagcaagtgtgtatcttaaatgtatataattcctggctggatgtggtggctcacgcctataatcccagcactttgggaggctgaggcgggcggatcatgaggtcaagagatcgagaccatcctggccaacatggtgaaac

SEQ ID NO: 580927 - DNA, 293 bp, Homo sapiens
ctatcccaagtttgcaaagatttttttcctctacattttgtttaaaaaattttataatttcaccttttacatttaggtaggtgatctattttaggttaactttagtgtatgasgtaagataaaagtctgtgtttaatttttttcccattcagataatcaattattccagcaccatttgttgaagagatttttccattccctattggatttcctggcacctttattgaaacatcaattaatcatatatatgggtctatttctgactccctattctgttttattgatctatatat

SEQ ID NO: 580928 - DNA, 633 bp, Homo sapiens
gtggtgcagcaccgtgtaagaattctatttttcttgatggctaaataatattccattgtttatgtttgcaacattttgtttacccatttatctgttgatgaatacttgggctgtttccactttttggatattgttaagactgctgtgaacatggttatacgagtatctcttcaagtttctactttccattctcttgggtatgtatctaggtgttgaattgctaggtaatatgctaggtttatgtttaactttatgaggaacctcaactgcatggttttgcattcccaccagcaatgcctatgggttctaatttctccraatccttgccaacacttgttgttttcctgtttaaaaaaattgtagccatcccaatagattggaagcagtatctctttgtggttttacctattttttcatagtctttaacattatatgaaatggtcttgttattttcctttactgggtttattagtctggaagttcatgaaggcagaaccatttcttttacgttcgtttctacatttccagcattcagaactgttcctgtcacacctaggaattatgttaaataaatgaatgcatggatgttcttcttgcagaactatatgactatcattgctaatttatttgtcc

SEQ ID NO: 580929 - DNA, 503 bp, Homo sapiens
acttcaaaacattttgtaaattcacatctgatttttttttttttaatttagagacagagtcttgctatgttgctcaggctggagtgcagtggagagtagaacacagtatgctccagcctcaaactcctgggctcgagggatcccccctgcaacagcctcccaaggagctgggaccataggcacgtgccaatgtactcggctcttcatttgatttccagacccatggktaatttagatatatgttatattatttttcaacattcaccaagtttccagttatctttctgctattgatatctagtttaattagatcataatcagagaacatatttaaacctcttgagctcagtgatccttttacctcagcctccccaggagctgggaccacaggcatgtgccaccatgctgggctaatttattatggttttttttgtaagtcctctaactttatttttcttccaagttctttggactatgtagtccaggatggtctcgaactcctg

SEQ ID NO: 580930 - DNA, 530 bp, Homo sapiens
gctgcgttagaaacctccaccagtcactcaggagctctggaagttagtgggcctttcagagttgtcccaaatgggaaaaggaggctaggaccttgatcygtcatcagtggatgtacacagcccctggggaggagtataactagtgcccgttggccaaaaacaattcccatggcatgatgagtggctcagttcggaagagtccttccgaaaggtccttcagaagtttgtagtgatatctgcaagaaggctttctgcttttttttttagaccaagtcttgctctgtagccaaggctgcagtgcagtggcactatcttggctcactgcaatctccgcctcccaggttcaaacaattctcctgcctcagcctcctatatagctggattacgggcatgcaccaccacgcctggctaatttttgtatttttagcaaagatgtggtttcaccatgttggccaggctggtctcgaactcctgaccacaggtgatctgcctgccttggcctcccaaagtgctgggattacaggcatgag

SEQ ID NO: 580931 - DNA, 530 bp, Homo sapiens
gctgcgttagaaacctccaccagtcactcaggagctctggaagttagtgggcctttcagagttgtcccaaatgggaaaaggaggctaggaccttgatctgtcatcagtggatgtacacagcccctggggaggagtataactagtgcccgttggccaaaaacaattcccatggcatgatgagtggctcagttcggaagagtccttccgaaaggtccttcagaagtttgtagtgatatctgcaagaaggctttctgcttttttttttagaccaagtcttgctctgtagccaaggctgcagtgcagtggcactatcttggctcactgcaatctccgcctcccaggttcaarcaattctcctgcctcagcctcctatatagctggattacgggcatgcaccaccacgcctggctaatttttgtatttttagcaaagatgtggtttcaccatgttggccaggctggtctcgaactcctgaccacaggtgatctgcctgccttggcctcccaaagtgctgggattacaggcatgag

SEQ ID NO: 580932 - DNA, 532 bp, Homo sapiens
aactttgtgtcaatcaagactatgagtgccattatttcaacagcatgtgctcacttcatgtctctatgtcacctttggataattcttgaaatatttcaaactttttcaatattatttcatctgttaaggtgatctgtgattagtgatctttgttgttactgttataattgtcttgggatttcacaaactgcatccacataaaatggcaaacttagtaaatgttgtgtgtgttctgattagtccattagctggccattgtcctgcctctctcccactccttgagtcttcctatgccctgagacatagcaatattgaaattaggccaatgaataaccttgcaatgacctctaagtgttcaagtgaaaaagagtcacaagtctttcctttaaaycaaaagctagaaatgattaagcttagtaagaaaagcatgagaaaggccaagagaggatgaaaactaggcctcttttgctaaacacttagccaagttacaaatgcaaaggaaaagattttgaagggaattaaaagtgctaca

SEQ ID NO: 580933 - DNA, 491 bp, Homo sapiens
tggcagtcccaaatccaaaagtgtataataaaaactacaaaatgctgatggaagaaatcagtgaatacctaaataaatggagggacatatcaggttcatgaactggtaaatttaacatagtaaagatgtcaattctcccccaagttaatgtatatacttaatgcaattcctgtcaaaatccaagcaatattttggtcaatattaacaaggtatattagtctgttttcacattgctataaagaacttccctgagactgggtaatttatcaagaaaagaggtttaagtgacgtacaggtccgcatggctggagacacctcaggaaacttacaatcatggcagatggggaagtaggcatcttcttcaaaaagcagcaggagagagtgtgaacatgtgaaggagtaactgtcaaacacttatwaaaccatcagatcttgtgagaactcactcactatcatgagaacagcatgagggaaaccgccctcatgatcca

SEQ ID NO: 580934 - DNA, 485 bp, Homo sapiens
tgctcaggtttggaagaattcagaaaaaaagccaaccggagaaggtggtaagagcagccagccgtgggagacctttgattgggtggacacagtggtgtgctgaggatggtggtgatgagtctgaaatggctctggcagggtctcccgggtgctcgtctggaccccagggcaggtaggtgtccttgcaaaagcatttgtttgcaagattagtgagactccaagctctgcttccccctgatgacatccgtactccagcttcaacagctgctccatcctgaggaagtcatttcaccttttcaaatctcatctagaaatgcatctaacagtgcctaccccacaggtggcttgaaagctgcttcagagccaagcaccgactcacggcaggtgctcaacaaacaccaggctcattatttccttccaccacgtggttttttccaatgccagagtcttacatagtcayatgttctaaactttttacttaagat

SEQ ID NO: 580935 - DNA, 465 bp, Homo sapiens
tcttcaatctgtgatatcttttcttctacttgattgatttggctattgacacttgtgtatgcctcacaaagttctagggctgtgtttttcagctccatcaggtcatttatgttcttctctaaactggttattctattagcaattccactaaccttttatcagggttcttagcttccttgcaatgagttataaaatggtcctttaactcaaaggagtttgttattacctaccttctgaagcctactgctgtcaatttgtcaaactcattctccgatcagttttgtttccttgctggtgaggagytgtgatcccttggagaagaagagacattctagttttcagaattttcagcctttttgtgctggtttttcctcatcctcatggatttgtctacctttgggctttgctgttggtgacctttggatggagtttttgcatggtcatcctttttcttgatgttgatgc

SEQ ID NO: 580936 - DNA, 642 bp, Homo sapiens
aaatattcgtaatttaacaaacttcctgtagagaggactccaggcagcagctcagtcacaggtagctgtgttctctaccacctaaccctgccattgtgaccacagcaatttaattggggtgggcacccaactgcagggaagccagaaacttctgagattgcatgacataagagtcttacctcccaatgacactgacctctgaactaatcagagcatcctcctgggtgggactagatagctacacacagaaaggtagctggctggtggtggaagcagatgtgaatacacaccaaaggaagcctaaacaggttgaaatcagatgctgactgaggagggatgggctatggggagccaaggaagcaatgaggtaaataggcagtcacactggctcaacaaggctgcactccagtcgctacaagacctggctgttcagtgattcctattcttgtttaaaaccatttttttctttctttctggctttcctagaagattggctaagattcctgttttctttattttacagcattgcctacatgaggtgacgtgaatgaatttctgttctttgcaaacaaaagaccctatagaaaaaccaaaataacacaaacattaacttttgaasttaaaatatgtcccacattaatg

SEQ ID NO: 580937 - DNA, 451 bp, Homo sapiens
tgtgtgtgtgtgtatayattctttccaacactgtcttttcacaagctatccagtgcccccaagatgaggattatctatgacagccccacagtccttggatgagagagaacagagcatcctcttctcagttaattaccatttcttgcctgtgcatttgatttcaataaagtctctctaattacttcaaatatcaccgtgcctcccccctccctctctcctgtgcccctctttctctttgagagcgtgagactgatgaactcaaacaccagcaagcctcaggcatatgctgcaacgagcaaagacttctcaaagttaataagccaggagagttaataaaccagacttcccaaagttaataaacctggaaaacacaattatcactacttttactattattaaaatattgccattatgattgttgttgttattctcagccttatctgcagctacc

SEQ ID NO: 580938 - DNA, 451 bp, Homo sapiens
tgtgtgtgtgtgtatacrttctttccaacactgtcttttcacaagctatccagtgcccccaagatgaggattatctatgacagccccacagtccttggatgagagagaacagagcatcctcttctcagttaattaccatttcttgcctgtgcatttgatttcaataaagtctctctaattacttcaaatatcaccgtgcctcccccctccctctctcctgtgcccctctttctctttgagagcgtgagactgatgaactcaaacaccagcaagcctcaggcatatgctgcaacgagcaaagacttctcaaagttaataagccaggagagttaataaaccagacttcccaaagttaataaacctggaaaacacaattatcactacttttactattattaaaatattgccattatgattgttgttgttattctcagccttatctgcagctacc

SEQ ID NO: 580939 - DNA, 593 bp, Homo sapiens
tgtgctttttcacatggaaataaatgctgtggtytagcctttcatgataaacatttgtttggaggcttaatcactaagttatacagttggacctatgttaacggtttacagattttacttccctagaaaatcaataagaggcattagtggattggctccacgcccctaaccctgcaaaaaaaaaaaaaaaaaaaaaaaaaagaaaaagctgatctgatctaagtaacatttacagattaatagaattataatgctcagtaccagggaactgcaacaggttcactttctgatcacattttcagcaatatgttcagttatggaaatttctctttgaggctgatattgacatattggagctttccagtttattcattcatgtattaattcagttgacatatcttgagtgcttgtatcatgccaggcacagagtcaaaatatgaatgacaagaatgatgtggggatggggaggtcccaaaaccatatcaaatgaaggaattgtgtatgtttaggataaagaagtcaagactgaatgaggacataattgttgccttcaaatgattagatcagacctatttttttccagtttcagagaa

SEQ ID NO: 580940 - DNA, 593 bp, Homo sapiens
tgtgctttttcacatggaaataaatgctgtggtttagcctttcatgataaacatttgtytggaggcttaatcactaagttatacagttggacctatgttaacggtttacagattttacttccctagaaaatcaataagaggcattagtggattggctccacgcccctaaccctgcaaaaaaaaaaaaaaaaaaaaaaaaaagaaaaagctgatctgatctaagtaacatttacagattaatagaattataatgctcagtaccagggaactgcaacaggttcactttctgatcacattttcagcaatatgttcagttatggaaatttctctttgaggctgatattgacatattggagctttccagtttattcattcatgtattaattcagttgacatatcttgagtgcttgtatcatgccaggcacagagtcaaaatatgaatgacaagaatgatgtggggatggggaggtcccaaaaccatatcaaatgaaggaattgtgtatgtttaggataaagaagtcaagactgaatgaggacataattgttgccttcaaatgattagatcagacctatttttttccagtttcagagaa

SEQ ID NO: 580941 - DNA, 593 bp, Homo sapiens
tgtgctttttcacatggaaataaatgctgtggtttagcctttcatgataaacatttgtttggaggcttaatcactaagttatacagttggacctatgttaacggtttacagattttacttcmctagaaaatcaataagaggcattagtggattggctccacgcccctaaccctgcaaaaaaaaaaaaaaaaaaaaaaaaaagaaaaagctgatctgatctaagtaacatttacagattaatagaattataatgctcagtaccagggaactgcaacaggttcactttctgatcacattttcagcaatatgttcagttatggaaatttctctttgaggctgatattgacatattggagctttccagtttattcattcatgtattaattcagttgacatatcttgagtgcttgtatcatgccaggcacagagtcaaaatatgaatgacaagaatgatgtggggatggggaggtcccaaaaccatatcaaatgaaggaattgtgtatgtttaggataaagaagtcaagactgaatgaggacataattgttgccttcaaatgattagatcagacctatttttttccagtttcagagaa

SEQ ID NO: 580942 - DNA, 563 bp, Homo sapiens
gtgtgatcttggctcactgcaacctccacctcccgggttcaagtgattctccagccttgcctcatgagtagctgggattacaggagcacaccacaacgcccagctaattttttatttgtaatagagacagggtctcaccatgtgggccaggctgctctccaacttctgacctcagatgatccacctacctcagcctcccgaagtgctgggattacaggcgtgagccaccatccccagctacaaacaatatttgaatgaacaaatctgacaaatgttcttgtttaagttaatagtagaaacagtgtaatgatcattgctcatttacaaaaaggttttatagacaacaaacactatcatttctatttgctcacttctttgagaatattttggacaaatcaggcagttaaataaaactgtaaataaatagaaagattttgtgayactaatttcatgctgagatgtgtaaagtgtgtagtattctctgaaaaaaagtataaacatcatttggtcctttgcaccaaacaaaggacaaatatttcttcaaatggttacttggccacagg

SEQ ID NO: 580943 - DNA, 558 bp, Homo sapiens
tttttcctatagagttgtttgagctccttatatactctagttattaatcctttgtcagatgggtagtttgaaaatatttacttccaacctgtgggttgtctgtttactttgttggttgtttcctttaccttgcaggagctttttaacttgatatgatcccatttgtctatttttgctttggttgtctgtgttttgggggtattactcaaaaaatcttttccagacagwtgacctagagagcttccctaatgttttcttgtagtagtttaatagtttgaggtcttaaatttaagtctttgatccattttgatttgaattttgtatatggtcagagatagggatctagtttcattgttctgcatattgatatccagttcacctagcaccatttactgaagacactgtcttttccctaaggtatgttcttggtacctttgtcagaaatgaattcactgtaggtatgtggatttgttcatgggttctctattctgttccattgatgtatgtgtctgttttatgccagtacaatatcatgttattttggttactatacctctg

SEQ ID NO: 580944 - DNA, 536 bp, Homo sapiens
gtttgtagaatgtccttaagtattgtggtagattattatagttctatgtacgaataagtcatttccatagcagtatctgaatcaagaaaatgattattatgggaaaattacaaataaaaagactgggtcaaaatcttaaattatcaggtacatactttatgccaggtagcatagctaaagaaaagtccatatattttctcatctaattcataaaacaatcatgagaaatatttagtaattttcctcatcttataaacaaaaataagaaatatcatataacgttgccaatgtaaraaagctaagaagtggcagcacctgggttcaaaaccggtgtgctgtgctgttagtcactttgtaaggcatttctcagattcaaaatattttacctgtaatgttttattttcatatttcggttagaacctgtaaaagtagcactaaaaagtactctagatatagtaaatataagccatgaaattaggcccatgtttgattaagatattgatgaatcatattttattcatttttttagacatagt

SEQ ID NO: 580945 - DNA, 536 bp, Homo sapiens
gtttgtagaatgtccttaagtattgtggtagattattatagttctatgtacgaataagtcatttccatagcagtatctgaatcaagaaaatgattattatgggaaaattacaaataaaaagactgggtcaaaatcttaaattatcaggtacatactttatgccaggtagcatagctaaagaaaagtccatatattttctcatctaattcataaaacaatcatgagaaatatttagtaattttcctcatcttataaacaaaaataagaaatatcatataacgttgccaatgtaaaaaagctaagaagtggcagcacctgggttcaaaaccggtgtgctgtgctgttagtcactttgtaargcatttctcagattcaaaatattttacctgtaatgttttattttcatatttcggttagaacctgtaaaagtagcactaaaaagtactctagatatagtaaatataagccatgaaattaggcccatgtttgattaagatattgatgaatcatattttattcatttttttagacatagt

SEQ ID NO: 580946 - DNA, 609 bp, Homo sapiens
tatttgtattgcatctgttaatgagataaatgaggcttatttagctaatttcagtaccatggatcaatattaactattgttaagaaaagatatgtatcagtgttaattctatccttatttttttataaatgtgagtgctgagaaaaattatttacacaaataagtaagtgaacataaaaagtgttttaaaatagcaatgccacttaactttttgaaatccttcagtgttacatgttaaaatttgatagagatttatcatcaaaagtcatttttagtaatcaatcagattacactcagggctcacacatgagaattgcgctataaraagactcaagatgttgagaggtaatgcatttcttctataaaatataaaaacaatatttgtaagagaaagttaattgggaattgggaaacggtaaaggaaaaatctatatatctattatggatttgttatcatatagactaattttaggaaaaaataactgtccactgatgctctgaaaaccgatttccttaaagctattcgtgccaatacataaagtccttgaaatgcctttctgaacccaagcgaatgcccatacttgagtttgaagcccataagaagaacat

SEQ ID NO: 580947 - DNA, 422 bp, Homo sapiens
gaattgtacatcctacaagatctttagacagtcttcctcatgttgtcaaaatgactacataaatttgaaaccccattcatagctatgcatttcctgtataactatttggaaagacttagagaaatttatgacctggagtcctcagtatatttcccttgggtgaaagttacgtggctgtccctaaagaaatctctgaagacaaagatcaayggcatatactgatctactcaagcccgtttttctgaaccaaattccaaattccatggagaaggagttaggattgctcttattggacttcactagagcagggcccacctccaacctgggtaatgtcaggttcccctgaagcacatctgttacaggaaaggggtcctgatccagacccaagagagggttcttggatctcacacaagaaagaattc

SEQ ID NO: 580948 - DNA, 467 bp, Homo sapiens
aagataaaaccaatataatatggtgactgggttgggagactgagaaagaagaaaatgtttagtttattggcttggrtgactgagtggatgaatgcaccacttactgacatgggaattatgtattgaaggaaagaagagcaatgtgggaaagggtacacatttttgtttaagcacattaatttaaaatgtctatggtatatccaagtgtaaatgttttgtgaactgttgagtatcttagagtacaataagctgagatagagattaggagtcagtgattctttatacatgcttattaaatcacaataatagaagtaatcatgcatctatttttgatagagaagcgtgacgaggactgaggtcacactctgtgaagtttaacgtttaagtgatgtgtcaaagactaggaacccatgaaaaatgatttattttatttatttatttgagacagagtctcgttctgtcgccag

SEQ ID NO: 580949 - DNA, 362 bp, Homo sapiens
tctggggccggtgtcatgggtggtaaaggaatttaccaagacagttgtaggtaaagaaagatagattacagggaaagtacattgcaaggtagcaacgggcatcataacagagaaggggctgtctgcaaggaggcagaggctggagggaagttttatagggttgtgctggaaggggctatgtgcaaaacaaggtatttgggaaggggagattatgccagtgaattgtttgtaaatagctgtgtcttagaacaattgttctctcccacttgggagctcttccttgttgwtacttactcatatcaggactccacaactacttctactttgcacttgtacattttactgaaagtatctgcttatga

SEQ ID NO: 580950 - DNA, 584 bp, Homo sapiens
ttgctgttattattgtcttcaagtttgattctaatatgcatgacgcatccacaatgaactgtgcccttgcatttgcttgtttcactcttttccctcagccattgttcatcaaaagattcagcaaaactgccaccttcacagagaatgctctctgattccagaaggctttgctctggtttatttatttattttaattaattaatttatttttttaagacggggtctggctctgttgctggagtgcagtggcgcaatctcagctcactgcaacttctgcgtcctgggttcaagtgattcttgtgcctcagccttcacagtagctgggattacaggcacgtgcctccttacccagctaatttttctatttttattagaaacagggttttgcctgttggtcgggctggtctcgaactcctggcctcaggttatccacctgcctcagcctcccaaagtgctggaattacaggtgtgagcccgaccctgattttcttttaaamctccaacacaatttttttattaaaaggttcattagggaaaataatggtttttgtttttgttttttaatctttatgtactctagagag

SEQ ID NO: 580951 - DNA, 520 bp, Homo sapiens
ctcctgagcaaatgctgatataaatagaaaaatttcccttatacatagattataacaacctcgtgtaatgcatgatgacatcaaagtggatatttccttgtgagagccagcagtaaagacattgggggaatctgaatgygatttggatggtatacacaagagaggaaaatttattgaaatggaaatgtttggttgacaaaataggtcacaatacagtgtatatcatgtggtgtcgttttgataataataacaatgctcctatatgtacatgaagaaaaatatccagaaggatatacacacatggccaggggcaatagctctagcctgtaatctcagcactttgggaggccaaggcaggcagatcacctgaggtcgggagttcgagaccagcctgaccaacattgagaaaccctgtctcttactaaaaatacaaaattagctgggcatggtggtgcatgcctgtaatcccagctactcaggaggctgaggcagcagaatcgcttgaacccaggaggcggag

SEQ ID NO: 580952 - DNA, 601 bp, Homo sapiens
gttaataaaatataaaatccttgactttgcctgcaaagcccttcacatttagaataaaacagctttaaatctmttttcatcaaaactggcttattctcccaaatttgaattggtttatgtccttctaattgttttatttgaaaattcaaatagtagcctaaataacagtggttaattttataagacaacacaatggtatttcaagggtttcatcgaggctttgtgatcccctggttctctcatcactgctttcttggttcttttatggacgcttcctagacatcatgttcaggttctaggcaggaggaggcaaaaggaagagggaaaagtggcagctggagcttatcctttctttagaaaagtactgagaggctgaggcaggcagatcacaaggtcaggagttcgagaccagcctgggcaacatagtgaaaccctgtctctactaaaaactacaacaattagccggggagagtggagtgtgcctgtagtcccagctactcaggaggctgaggcaggagaatcgcttgaaaccaggaggctgaggttggggtgagccaagataatgacagtgagctccagtctgggcaagagagcaagacta

SEQ ID NO: 580953 - DNA, 601 bp, Homo sapiens
gttaataaaatataaaatccttgactttgcctgcaaagcccttcacatttagaataaaacagctttaaatctcttttcatcaaaactggcttattctcccaaatttgaattggtttatgtccttctaattgttttatttgaaaattcaaatagtagcctaaataacagtggttaattttataagacaacacaatggtatttcaagggtttcatcgaggctttgtgatcccctggttctctcatcactgctttcttggttctttyatggacgcttcctagacatcatgttcaggttctaggcaggaggaggcaaaaggaagagggaaaagtggcagctggagcttatcctttctttagaaaagtactgagaggctgaggcaggcagatcacaaggtcaggagttcgagaccagcctgggcaacatagtgaaaccctgtctctactaaaaactacaacaattagccggggagagtggagtgtgcctgtagtcccagctactcaggaggctgaggcaggagaatcgcttgaaaccaggaggctgaggttggggtgagccaagataatgacagtgagctccagtctgggcaagagagcaagacta

SEQ ID NO: 580954 - DNA, 601 bp, Homo sapiens
gttaataaaatataaaatccttgactttgcctgcaaagcccttcacatttagaataaaacagctttaaatctcttttcatcaaaactggcttattctcccaaatttgaattggtttatgtccttctaattgttttatttgaaaattcaaatagtagcctaaataacagtggttaattttataagacaacacaatggtatttcaagggtttcatcgaggctttgtgatcccctggttctctcatcactgctttcttggttcttttatggacgcttcctagacatcatgttcaggttctaggcaggaggaggcaaaaggaagagggaaaagtggcagctggagcttatcctttctttagaaaagtactgagaggctgaggcaggcagatcacaaggtcaggagttcgagaccagcctggscaacatagtgaaaccctgtctctactaaaaactacaacaattagccggggagagtggagtgtgcctgtagtcccagctactcaggaggctgaggcaggagaatcgcttgaaaccaggaggctgaggttggggtgagccaagataatgacagtgagctccagtctgggcaagagagcaagacta

SEQ ID NO: 580955 - DNA, 601 bp, Homo sapiens
gttaataaaatataaaatccttgactttgcctgcaaagcccttcacatttagaataaaacagctttaaatctcttttcatcaaaactggcttattctcccaaatttgaattggtttatgtccttctaattgttttatttgaaaattcaaatagtagcctaaataacagtggttaattttataagacaacacaatggtatttcaagggtttcatcgaggctttgtgatcccctggttctctcatcactgctttcttggttcttttatggacgcttcctagacatcatgttcaggttctaggcaggaggaggcaaaaggaagagggaaaagtggcagctggagcttatcctttctttagaaaagtactgagaggctgaggcaggcagatcacaaggtcaggagttcgagaccagcctgggcaacatagtgaaaccctgtctctactaaaaactacaacaattagccggggagagtggwgtgtgcctgtagtcccagctactcaggaggctgaggcaggagaatcgcttgaaaccaggaggctgaggttggggtgagccaagataatgacagtgagctccagtctgggcaagagagcaagacta

SEQ ID NO: 580956 - DNA, 522 bp, Homo sapiens
ttttgagttgtgtttacttgaatttctttaagcacagaagatcattcccagaaattaaactgaaactgatgaacaaagaaacagtacaggtggtagagaactactgaaacacacaatttcagttttgttctgttctttcaggatatatagaaagctggggtggggagatggataaaaaagcttaaaacaagacaaaggtaaacaggcatagacgttttcctttccsttcctggcttcagccttctgcccatctttcctgtgagttgtcttctgtcatgcacactccaacatttgtgcaacacatatctctacaatgaagaatatgtcatgctagcttttctgtccaatagacgctgaagttatgtattgtctttttccagtgatcaaaacaaaaactgagacttgggaagaaataaactcgaggggacctgaatgagaacttgagttacactctaatacatttccagggcttttgagaagccagaggcatgtcctgtttcctcaaacaccataaaatgctcc

SEQ ID NO: 580957 - DNA, 566 bp, Homo sapiens
tatccctccaaaatgttgatatatgcatgatactatgttagttgattagtttttggaaaatggcaaagacccctagcaaagacccttctactgatgttctaaacccttatttatcatggaatgcatttgaacggaaagagtgttgagaattaatttttcatttgtattctaattaatacttttgacattagaaatcttgataaattatgaagattaaacaggcacacaaaggataattttatcttgttgccatatattaaggtaaagtggattcaaagagcacagctttttaacatattaatattttttgtggtacgtaatacatagccttgaatcatttctaagccattgaaaatctgtactcttttgcatattttttttttctaaaaagsagagagcatagtgtagtgcttaaaagcagagactcgccaggtgtggtggctcacgcctgaaatcccagcactttgggaggccaaggcaggtagaacacgaggtcaggagatcgagaccatcctggctaacatggtgaaaccccatctctactaaaaaatacaaaaaatgagccg

SEQ ID NO: 580958 - DNA, 566 bp, Homo sapiens
tatccctccaaaatgttgatatatgcatgatactatgttagttgattagtttttggaaaatggcaaagacccctagcaaagacccttctactgatgttctaaacccttatttatcatggaatgcatttgaacggaaagagtgttgagaattaatttttcatttgtattctaattaatacttttgacattagaaatcttgataaattatgaagattaaacaggcacacaaaggataattttatcttgttgccatatattaaggtaaagtggattcaaagagcacagctttttaacatattaatattttttgtggtacgtaatacatagccttgaatcatttctaagccattgaaaatctgtactcttttgcatattttttttttctaaaaagcagagagcatagtgtagtgcttaaaagcagagactcgccaggtgtggtggctcacgcctgaaatcccagcactttgggaggccaaggcaggtagaacacgaggtcaggagatcragaccatcctggctaacatggtgaaaccccatctctactaaaaaatacaaaaaatgagccg

SEQ ID NO: 580959 - DNA, 536 bp, Homo sapiens
gttttcttctctcatttacagctctttgattacttagggaggttgcaaattttcatgtttactaatcacttgtaattacactactatgaattttccagtctgcccttcactgtaaagcattcacagaagatgatgtttataaagattggcaaatttcttatctaatttccatcaaaaatcacaattcttttatttaaagtttttaatataccattctgagaaggatgtctaatttggtggatatatgctaagaaagacatataattcttagagcattctgagaattcatgatgatgcaaaaattctgcctggtgataaaggttaatttaccctttttcatttcacaaagtcaaaaggtattaaaacaaggggcagatgaattggtctcatttactttaaagcactgttggcatgttaatccgtttgamaacttatactgaatctggtcaattggtaggacagtataaaatagcttcacgatgttgtctttatgccttgcattctgcctccatctttctctctttttttgcacttaa

SEQ ID NO: 580960 - DNA, 503 bp, Homo sapiens
cctgtaagaaaagttatagatgatcagaataatattgactcaattcatttatacttttttcaatataatctcccctcagaaattctaaacataaaacaaaataaacaacaattcttatcttgtcattgaaatattacgtattaacgatttaggtgactaattgactatgcagcaaatgcaaatgtaatatacattcgtacaaataaaatgataaattctcctttagcmtagttgattataacatgatttcacagtgataaccacaaaggcaggacaagtacttagtactttgctaggtgattctgtttgtctgtgtctgcgtgtgtgtgtgtgtgtgatgtgtgtgtaatgtttacatttttaagtacacagaaactcatacacacccgtgtgtgtgtgtgtgtgtcggtgtgtgtgtgtgtgtatacctaaattaggtatttaaacctacctgaatagcatttcaatgctaaaacttaaacacaccaaaagaagacagaact

SEQ ID NO: 580961 - DNA, 503 bp, Homo sapiens
cctgtaagaaaagttatagatgatcagaataatattgactcaattcatttatacttttttcaatataatctcccctcagaaattctaaacataaaacaaaataaacaacaattcttatcttgtcattgaaatattacgtattaacgatttaggtgactaattgactatgcagcaaatgcaaatgtaatatacattcgtacaaataaaatgataaattctcctttagcctagttgattataacatgatttcacagtgataaccacaaaggcaggacaagtacttagtactttgctaggtgattctgtttgtctgtgtctgcgtgtgtgtgtgtgtgtgatgtgtgtgtaatgtttacatttktaagtacacagaaactcatacacacccgtgtgtgtgtgtgtgtgtcggtgtgtgtgtgtgtgtatacctaaattaggtatttaaacctacctgaatagcatttcaatgctaaaacttaaacacaccaaaagaagacagaact

SEQ ID NO: 580962 - DNA, 573 bp, Homo sapiens
ctaaaaaaaaaaaaaaaaaaattctgtgtgctatttttttctttgcaagtttttrtaagtttggaattatttggaaataaaatacaaaaaaagaacttattttagacgagatcaggcactttcagggtggtacagcagtagaccaaaaaaaaaaaagaacttattttaagaacaatgcctaagcatattgctacaaacattttatttttagtatggcataagtatatgaacaaaaaaagtgaaacgataaagtgaatgaataactgattaagaaagaaagaagcggggaagaaaagaaacaaaaactcaaaaattgatttaagctatagaaattctaagtgccacagaaaattttgagatataaatttctcaaaataaaaaccaggtactatagtcacggcatttaatacaataaaaataatacaaactaaatttgcctttgcttaaaaataagaatcagaatatctactttttctttagaaagtagcttaacatttatttagaataactgttagtggagagaaaaaatggcctatttttgtttatttatataatactcacacaactattcat

SEQ ID NO: 580963 - DNA, 573 bp, Homo sapiens
ctaaaaaaaaaaaaaaaaaaattctgtgtgctatttttttctttgcaagtttttataagtttggaattatttggaaataaaatacaaaaaaagaacttattttagacgagatcaggcacwttcagggtggtacagcagtagaccaaaaaaaaaaaagaacttattttaagaacaatgcctaagcatattgctacaaacattttatttttagtatggcataagtatatgaacaaaaaaagtgaaacgataaagtgaatgaataactgattaagaaagaaagaagcggggaagaaaagaaacaaaaactcaaaaattgatttaagctatagaaattctaagtgccacagaaaattttgagatataaatttctcaaaataaaaaccaggtactatagtcacggcatttaatacaataaaaataatacaaactaaatttgcctttgcttaaaaataagaatcagaatatctactttttctttagaaagtagcttaacatttatttagaataactgttagtggagagaaaaaatggcctatttttgtttatttatataatactcacacaactattcat

SEQ ID NO: 580964 - DNA, 573 bp, Homo sapiens
ctaaaaaaaaaaaaaaaaaaattctgtgtgctatttttttctttgcaagtttttataagtttggaattatttggaaataaaatacaaaaaaagaacttattttagacgagatcaggcactttcagggtggtacagcagtagaccaaaaaaaaaaaagaacttattttaagaacaatgcctaagcatattgctacaaacattttatttttagtayggcataagtatatgaacaaaaaaagtgaaacgataaagtgaatgaataactgattaagaaagaaagaagcggggaagaaaagaaacaaaaactcaaaaattgatttaagctatagaaattctaagtgccacagaaaattttgagatataaatttctcaaaataaaaaccaggtactatagtcacggcatttaatacaataaaaataatacaaactaaatttgcctttgcttaaaaataagaatcagaatatctactttttctttagaaagtagcttaacatttatttagaataactgttagtggagagaaaaaatggcctatttttgtttatttatataatactcacacaactattcat

SEQ ID NO: 580965 - DNA, 405 bp, Homo sapiens
ctaccatgaccagaggacccttcacctcaaaattttaaaatacaaatcagatcacatcattcctatatttaatagtatccagtgacttcccatgacatgtataataaactcttaagctctttatgactgcataaagcctcatatctgggactgtcagatgagttcaactcattcttcctcagggctttgttttgyccttgttttccactctgcctggaatgttctcccacatctccacatggttcactcattctcacatttagacttctcctcttatgtcacctctgcagggaagccacaggatctaaaccccagttactccattaacaactcatcccaccccaaacttaccagattttcttcataatacttatcactacctgaaattttaaatattaatttaat

SEQ ID NO: 580966 - DNA, 487 bp, Homo sapiens
attttttcatttagattgaaaatattcccaattacttctcaaaaagttgtgacaataacatgctattgttgctgaattaagctataaagtatttctgtcagggccaggcaaagtggattatgcctgtaatcctagcamtttgggaggctgaggcaggaggatcacttgaggccaggaattccagaccagactgggaaatacagcaagatcccatctctacaaaaaataaaattagatgactgaggtggcatgtgcctgtagttccggctactccagaggctgaggtgggaggactgctcgagcccagaaattgtttgaggctgcagtgagctatgactgcaccactgtacttcaggttgggcaacagagacttttttttttttttaagtatttttgtctaatgttccccatattgattctctatagtcataagctttctattccttactagagagttaaaatttaagtcaccactaataaaaaacta

SEQ ID NO: 580967 - DNA, 605 bp, Homo sapiens
aaagacacatgcatgcatatgtacaataaagcactatctgcatagtaaagacatggaatcaacctaaatgcccatcagtgggagactagataaagaacatgtcgtacatatacaccatggaatactatgcagccataaaaaggacaggattatgtccttggcaggaacatagacggagctgcaggccattatccttagcaagctaacacaggaacaaaaaaacaaataccacatgttctcacttataactggagctaaatgatgagaacacatggacatatagtggggagcaatagacactagggctgacagagggtggaaggtgggagaagggagagtttcagcaaaaataatgaatgggtaccaggcttaatacctggatgacaaaatagtctgtacaaaaacccccccattacacaagtttacctatataacaaaactgcacatgtacccctgaacttaaaaattgaaaaaataaaattagaaaaataagttaaaaagaaatattgcatgcaaaaataaaaaattcttatackgatatttcttgattttctaaatcttaatatttgttggtttccttttctgaaatattataatttagctaa

SEQ ID NO: 580968 - DNA, 511 bp, Homo sapiens
tttctttttctttaattacatttttaacwttgctgatagaaattatgttcctgtgtttcacatgaaaaagcatatatatactagttaagtatattgagtaaagcattttacaaagtcatacatttacaaatttttgagaggttagccactaaaattaatttcacaagggaaaatcctttgttccacaatatacagtttttcttcttagttttgaattagaagtggcatctgttttagttcttaaaatataacttggctgtttcgcactgtgtctgaacattgttttctgtaggagtgggatagataattatatatagtatcataatattctttgcatccatgtgccaaataggagtaatatttatttaatcctcttagatgccttatgttacccaaacatacagtaaaaacatagaaatttaggcacttgttcttcaagtcacctgcttgggtctcttccaggtataccttcctttctttcctgttctaaagcctttttaaataaacctcc

SEQ ID NO: 580969 - DNA, 511 bp, Homo sapiens
tttctttttctttaattacatttttaactttgctgatagaaattatgttcctgtgtttcacatgaaaaagcatatatatactagttaagtatattgagtaaagcattttacaaagtcatacatttacaaatttttgagaggttagccactaaaattaatttcacaagggaaaatcctttgttccacaatatacagtttttcttcttagttttgaattagaagtggcatctgttttagttcttaaaatataacttggctgtttcgcactgtgtctgaacattgttttctgtaggagtgggatagataattatatatagtatcataatattctttgcatccatgtgccaaataggagtaatatttatttaatcctcttagatgccttatgttacccaaacatacagtaaaaacatagaaatttaggcacttgttcttcaagtcacctscttgggtctcttccaggtataccttcctttctttcctgttctaaagcctttttaaataaacctcc

SEQ ID NO: 580970 - DNA, 635 bp, Homo sapiens
ggcattgtgtttataaccaaaatattctccctcttcaactctgtaaagtctgtttatatagcaccagcccaatggtgtctattattgctgcttaaaaaaaaaatgtttccaatgtgaagttcacagttttttaaagattttaatctttgactcacaatctttcaagctaatttagaaatattccacaaacttttcagaaatgtcctaaacaacattagggagaaatttattaaactttcacagcactcagtactgatttattctttagtattgaatatccctgaaacatctactctaaggagttctacaaaaggcttgtcatttgccttggcaggttttttttattttatttatttatttatttatttatttatttatttatttatttatttwttttttttttttgaggcaaagtcttgctctgctgcccaaactggagtgcagtggcgcgatctcaactcactacaacctccatctcctgggttcaagcaattctcctgcctcaacctcccgagtagctgggattacaggcatgtgccaccacatgcggctaatttttgtattttcagtagtgacggggtttcatcattttggccaggctggtctcaaactcctggcctcaggtgatctacccg

SEQ ID NO: 580971 - DNA, 635 bp, Homo sapiens
ggcattgtgtttataaccaaaatattctccctcttcaactctgtaaagtctgtttatatagcaccagcccaatggtgtctattattgctgcttaaaaaaaaaatgtttccaatgtgaagttcacagttttttaaagattttaatctttgactcacaatctttcaagctaatttagaaatattccacaaacttttcagaaatgtcctaaacaacattagggagaaatttattaaactttcacagcactcagtactgatttattctttagtattgaatatccctgaaacatctactctaaggagttctacaaaaggcttgtcatttgccttggcaggttttttttattttatttatttatttatttatttatttatttatttatttatttattttttttttttttttgaggcaragtcttgctctgctgcccaaactggagtgcagtggcgcgatctcaactcactacaacctccatctcctgggttcaagcaattctcctgcctcaacctcccgagtagctgggattacaggcatgtgccaccacatgcggctaatttttgtattttcagtagtgacggggtttcatcattttggccaggctggtctcaaactcctggcctcaggtgatctacccg

SEQ ID NO: 580972 - DNA, 635 bp, Homo sapiens
ggcattgtgtttataaccaaaatattctccctcttcaactctgtaaagtctgtttatatagcaccagcccaatggtgtctattattgctgcttaaaaaaaaaatgtttccaatgtgaagttcacagttttttaaagattttaatctttgactcacaatctttcaagctaatttagaaatattccacaaacttttcagaaatgtcctaaacaacattagggagaaatttattaaactttcacagcactcagtactgatttattctttagtattgaatatccctgaaacatctactctaaggagttctacaaaaggcttgtcatttgccttggcaggttttttttattttatttatttatttatttatttatttatttatttatttatttattttttttttttttttgaggcaaagtcttgctctgctgcccaractggagtgcagtggcgcgatctcaactcactacaacctccatctcctgggttcaagcaattctcctgcctcaacctcccgagtagctgggattacaggcatgtgccaccacatgcggctaatttttgtattttcagtagtgacggggtttcatcattttggccaggctggtctcaaactcctggcctcaggtgatctacccg

SEQ ID NO: 580973 - DNA, 451 bp, Homo sapiens
atattctgcttaattgtatttttataaaactgcagtctctttaagggagcaatgtcttatactctcaacacccaatatggagccagacacatagtagatgtgtaatagatgtttgttgaatgagtatttttctttctgaatcgatcttgggagattgtatgtttcccagaatttatccattttctctagattttctagtttatgtgcatagaggtgttcctaacagtctctgaggatattttatatttctgtgggattggttgcaatgtcagctttgttgtttctgattgtgctaatttggatcttgtctcttgttttctttgttaatatggatagtggtctatcgatcttgtttatcctttcaaagattctttggtttcattggttctttgtatggrtttttgggtctcaatttcatttagttctgctctgttttagttgtttcatttct

SEQ ID NO: 580974 - DNA, 547 bp, Homo sapiens
gaatgagtcggctagcaagatggagtcttttatataaaataacataatcatgagcatttcatcccattatctgtgacatatcctaatagtcacaaagaagttatgagcaaggattatatgaacgcatgaataccagaagcctgggaccatgaagtaaagaacaccttagagtctggtcaacaggtttatttacctcatgcctgagatattgaagaactggaaactttcctctgtggcccactcatgtaatcgtagccgacagccgttcctcctcctccctcttacgtgtgacctaatcccctaaatgctgctctccacccccttgatacaatctaaattgcaaaaacaatggcgagtaattcaaaagagcaatttatttcttgagagaattttccagaaactatgctataaatcaggtgaccatcttatttaaaacaacaacaacaamaaaaaaaaaccagcccttttcctcaagttggaatactcctttgaaacttctgaagcccactaatttcaaataaagaattattctaataatgagttgctt

SEQ ID NO: 580975 - DNA, 587 bp, Homo sapiens
tctgggtcttaaaaagactttggaaaacccaatctaccctcctctagcagcaaatcaattcccacagtcagccaggaggttctaaccactgccctacctctttcaacaaggaacaagccctagatttttgctgtttctaaaaatatgcagcttttaaatatatccatcattttggtgctctctactgcagagcttaataaaagcaaagccactgaaattcaggagatgtcacagctcaaagtactcccgtgtcaagcagaatgtctgggcatgactgatggcataatttccccacagaacaacagtcttgtcccacgtcaaggaaacatacataaaaacacgcaaagttctcacaaataagatcctctgcgttttagctagaatggcaacagtgatctttgtggatgttttttttcttttttaagaatggacttgaagccaagaatttgagaccagcctgggcaacaaagtgaaaccttccmcaaaaaaaaaaaaaaaaaaaaaaattgccaggcttggtggcacatgcctgacatctcagctactcaggagactaaggtggaggatctcttgagcccaggaggtta

SEQ ID NO: 580976 - DNA, 552 bp, Homo sapiens
tcccgcttccaacgaaatcctcaaaactagccaaatatccacttgcagattccacaaaaagagcatttcaaaactgctctatcaaaagaaaggttcaactttgttagttgagtagatacagcataaacaagtttctgagaatgcttctgtccagtttttatgggaagatatttcctttttcaccttagccctgaaakcgctccaaaagtccagttccagatactacaaaaggagtgtttcaggactgctctatgaaagggagtgttcaacttttgacttgaatgcaaacatcagaaagcagtttctcacaacgctgctgtgtgctttttatatgtattcccgcttccagcgaaatccccaaagctagccaaatatccacttgcagattccagaaaaagagtgtttcaaaactgctccttcaaaacggtggttcaattctcttagttgagtacacacatctcaaataagtttctgagaatgcttctgtctagttgttatgggaagatatttccttttccaacataggcctgaaagcgctccaaatgtccactt

SEQ ID NO: 580977 - DNA, 552 bp, Homo sapiens
tcccgcttccaacgaaatcctcaaaactagccaaatatccacttgcagattccacaaaaagagcatttcaaaactgctctatcaaaagaaaggttcaactttgttagttgagtagatacagcataaacaagtttctgagaatgcttctgtccagtttttatgggaagatatttcctttttcaccttagccctgaaagcgctccaaaagtccagttccagatactacaaaaggrgtgtttcaggactgctctatgaaagggagtgttcaacttttgacttgaatgcaaacatcagaaagcagtttctcacaacgctgctgtgtgctttttatatgtattcccgcttccagcgaaatccccaaagctagccaaatatccacttgcagattccagaaaaagagtgtttcaaaactgctccttcaaaacggtggttcaattctcttagttgagtacacacatctcaaataagtttctgagaatgcttctgtctagttgttatgggaagatatttccttttccaacataggcctgaaagcgctccaaatgtccactt

SEQ ID NO: 580978 - DNA, 442 bp, Homo sapiens
gtttcaaacctgctctgtgaaagggaatgttcaattctgtgacttgaatgcaatcatcacaaagaastttctgagaatgctgctgtctgctttttatatgtaatcccgtttccaacgaaatcctcaaatctagccaaatagccacttgcagattccacaaaaagagtgtttcaaaactgttctgtctaaagaaatgttcaactgtgttagttgaggacacacatcagaaactagtttctgagaatgcttctgtctagttgttatgggaagatatttccttttccaacgtaggcctgaaagcgctccaaatgtccacttccatatactaaaaaaagagagtttcaaacctgctctaccaaagggaatgttctactctgtgacttgaatgcaaacatcccaaagaagtttctgagaatgcttctgtctagatttgatctgaaga

SEQ ID NO: 580979 - DNA, 442 bp, Homo sapiens
gtttcaaacctgctctgtgaaagggaatgttcaattctgtgacttgaatgcaatcatcacaaagaactttctgagaatgctgctgtctgctttttatatgtaatcccgtttccaacgaaatcctcaaatctagccaaatakccacttgcagattccacaaaaagagtgtttcaaaactgttctgtctaaagaaatgttcaactgtgttagttgaggacacacatcagaaactagtttctgagaatgcttctgtctagttgttatgggaagatatttccttttccaacgtaggcctgaaagcgctccaaatgtccacttccatatactaaaaaaagagagtttcaaacctgctctaccaaagggaatgttctactctgtgacttgaatgcaaacatcccaaagaagtttctgagaatgcttctgtctagatttgatctgaaga

SEQ ID NO: 580980 - DNA, 442 bp, Homo sapiens
gtttcaaacctgctctgtgaaagggaatgttcaattctgtgacttgaatgcaatcatcacaaagaactttctgagaatgctgctgtctgctttttatatgtaatcccgtttccaacgaaatcctcaaatctagccaaatagccacttgcagattccacaaaaagagtgtttcaaaactgttctgtctaaagaaatgttcaactgtgttagttgaggacacacatcagaaactagtttctgagaatgcttctgtctagttgttatgggaagatatttccttttccaacgtaggcctgaaagcgctccaaatgtccacttccatatactamaaaaagagagtttcaaacctgctctaccaaagggaatgttctactctgtgacttgaatgcaaacatcccaaagaagtttctgagaatgcttctgtctagatttgatctgaaga

SEQ ID NO: 580981 - DNA, 187 bp, Homo sapiens
agccctgaaagcgctccaaatgtccacttccatatactaaaaaaagagtgtttcaaacctgctctaccaaagggaatgttctactctgtgacttgaatgcaaacatcccaaagaagtttctgagaatgcttctgtctagatttkatctgaagacaatcccgtttccaacgaaatcctcaaggctagg

SEQ ID NO: 580982 - DNA, 187 bp, Homo sapiens
agccctgaaagcgctccaaatgtccacttccatatactaaaaaaagagtgtttcaaacctgctctaccaaagggaatgttctactctgtgacttgaatgcaaacatcccaaagaagtttctgagaatgcttctgtctagatttgayctgaagacaatcccgtttccaacgaaatcctcaaggctagg

SEQ ID NO: 580983 - DNA, 383 bp, Homo sapiens
agtttttatgggaagatatttcctttttcaccttagccctgaaagcgctccaaatgtccacttccatatactaaaaaaagagtgtttcaaacctgctctaccaaagggaatgttctactctgtgacttgaatgcaaacatcccaaagaagtttctgagaatgcttctgtctagatttgatctgaagacaatcccgtttccaacgaaatcctcaaggctaggcaaatatcctcttgcagattccagaaaaagagtgtttcaaaactgctccttcaaaacggtggttcaattctcttagttgagtacacacatctcaaataagtttctgagaatgcttctgcctagttgttacsggaagatatttccctttccaacataggcctg

SEQ ID NO: 580984 - DNA, 462 bp, Homo sapiens
aatgcaaacatcccaaagaagtttctgagaatgcttctgtctagatttcayctgaagacaatcccgtttccaacgaaatcctcaaggctaggcaaatatcctcttgcagattctacaaaaagagtgtttcaaaactgctctatgaaaagaaaggttcaactctgtcagtagagggcacacatcacaaacaagtttctgagaatgcttgtgtctagttgttatgggaagatatttcctttttcaacataggcctgaaagcgctccaaatgtccacttccagatactacaaaaggagtgattccaacctgctctatgatagggaatgttcaactctctgtcctgaatacaaacatcacaaagatgtttctcagaacgctgcagtctgcaatttgtatgaattcccgcttccaacgaaatcctcaaaactagccaaatatccacttgcagattccacaaaaagag

SEQ ID NO: 580985 - DNA, 519 bp, Homo sapiens
ggagcagttttgaaacactctttttctggaatctgcaagtggatatttggctagctttggggatttcgctggaagcgggaatacatataaaaagcwcacagcagcgttgtgagaaactgctttctgatgtttgcattcaagtcaaaagttgaacactccctttcatagagcagtcctgaaacactccttttgtagtatctggaactggacttttggagcgctttcagggctaaggtgaaaaaggaaatatcttcccataaaaactggacagaagcattctcagaaacttgtttatgctctatctactcaactaacaaagttgaacctttcttttgatagagcagttttgaaatgctctttttgtggaatctgcaagtggatatttggctagttttgaggatttcgttggaagcgggaattcatacaaattgcagactgcagcgttctgagaaacatctttgtgatgtttgtattcaggacagagagttgaacattccctatcatagagcaggttggaat

SEQ ID NO: 580986 - DNA, 519 bp, Homo sapiens
ggagcagttttgaaacactctttttctggaatctgcaagtggatatttggctagctttggggatttcgctggaagcgggaatacatataaaaagcacacagcagmgttgtgagaaactgctttctgatgtttgcattcaagtcaaaagttgaacactccctttcatagagcagtcctgaaacactccttttgtagtatctggaactggacttttggagcgctttcagggctaaggtgaaaaaggaaatatcttcccataaaaactggacagaagcattctcagaaacttgtttatgctctatctactcaactaacaaagttgaacctttcttttgatagagcagttttgaaatgctctttttgtggaatctgcaagtggatatttggctagttttgaggatttcgttggaagcgggaattcatacaaattgcagactgcagcgttctgagaaacatctttgtgatgtttgtattcaggacagagagttgaacattccctatcatagagcaggttggaat

SEQ ID NO: 580987 - DNA, 519 bp, Homo sapiens
ggagcagttttgaaacactctttttctggaatctgcaagtggatatttggctagctttggggatttcgctggaagcgggaatacatataaaaagcacacagcagcgttgtgagaaactgctttctgatgtttgcattcaagtcaaaagttgaacactccctttcatagagcagtcctgaaacamtccttttgtagtatctggaactggacttttggagcgctttcagggctaaggtgaaaaaggaaatatcttcccataaaaactggacagaagcattctcagaaacttgtttatgctctatctactcaactaacaaagttgaacctttcttttgatagagcagttttgaaatgctctttttgtggaatctgcaagtggatatttggctagttttgaggatttcgttggaagcgggaattcatacaaattgcagactgcagcgttctgagaaacatctttgtgatgtttgtattcaggacagagagttgaacattccctatcatagagcaggttggaat

SEQ ID NO: 580988 - DNA, 360 bp, Homo sapiens
cgcttccaacgaaatcctcaaaactagccaaatatccacttgcagattccacaaaaagagcatttcaaaactgctctatcaaaagaaaggttcaactttgttagttgagtagatacagcatamacaagtttctgagaatgcttctgtccagtttttatgggaagatatttcctttttcaccttagccctgaaagcgctccaaaagtccagttccagatactacaaaaggagtgtttcaggactgctctatgaaagggagtgttcaacttttgacttgaatgcaaacatcagaaagcagtttctcacaacgctgctgtgtgctttttatatgtattcccgcttccagcgaaatcctcaaat

SEQ ID NO: 580989 - DNA, 546 bp, Homo sapiens
caagagcttctgggaaggtaagcrgcatcggagctagatcacgtttcacaattagtggttgttcttttccgtgtttattttgcactttaaaaaagagagaacgcatgcaaatgaacttgcttgtgtgtatttgatggctctaagggctataaattacaaacaaaacacatcccagacattaggagttcataagtatatttaatgaaattggtggttttaggaagtcaactttagttttgctttgtttgcatgtccactaatttttttattttgatattagtcttttttaaaaaattttacagtagtcattgaaagttatgtttctttgtttacttcattttttcctctaattattcaagactggcacaaaagtataaatattatttatttcaggtagaatttttttcgtgtagttttttaatatatacttgaaggaaatgtttcaccttatttttggtctttgtttattcatttagaccctgcaagttgattctcattaattgtcagattccactacactttcttcctcataggtagtaattacca

SEQ ID NO: 580990 - DNA, 623 bp, Homo sapiens
tctcactacgttgcccaggctggaatgcagcagctattcacaggcacgatcccactactgatcagcacaggagttacttatgacctgctccacttccgacctgggctggttcacccttccttagcaaatctggtggtgccccgctcccaggaggtcaccatattgatgccgaacttagtgtgaacacctgatcggcatagcacactacggcccagaatgcctggcctcaaatgatcctcctgccttaggctccctagtagctgagactacaggtgtttgccaccacgcctgctagatacatttttatatctcttcttagtcattgcttcctttctactgtattcccatcttattgttagacacaactcatctttaagtcggtaaaaggaaaaagccctcaagctcatcacatttcctttagcgattttcttgacgcctctcctggttctgaaggtcacatgatatatggctaaatgagtttcacaatccatacgccacttggaagactgacagagagacttaggtcaattaagaaacraagattatgagaaagttttcctaaactcctattacttagaaatcatctgtttctacacacaattacagatttagacaaccaaact

SEQ ID NO: 580991 - DNA, 591 bp, Homo sapiens
gagaaggtgggaagaagatattttaaaaagaagtggggaggggcaatgctgtataacagatccacatcctcatccttcacagccagaagtcaagcgattaaaaactgaaacagaaaaaccaaacagtaacaaggtaaagcctgttatttagaagtaaggagacaaatcccaaaagaaacagctgaagttgaaaaggggaggcgggaacagagctgtggtatccagtctagggatggctttttcattaaaaaaaaaaaaaagtcttattcacaatagcaaagacttggaaccaacccaaatgtccatcaatgatagactggattaagaaaatgtggcacatgtgcaccttggaatactatgcaaccataaaaaaggatgagttcatgtcctttgcagggacatggatgaagctggaaaccatcattctaagcaaactatcacaaggacagaaaaccaaacaccacatgttctcactcataggtgggagttgaacaatgagaacacatgggcacagggcrgggaacatcacacatcggagcctgtcagggggtgggggactgtgggagggagggatagcatttggagaaatac

SEQ ID NO: 580992 - DNA, 591 bp, Homo sapiens
gagaaggtgggaagaagatattttaaaaagaagtggggaggggcaatgctgtataacagatccacatcctcatccttcacagccagaagtcaagcgattaaaaactgaaacagaaaaaccaaacagtaacaaggtaaagcctgttatttagaagtaaggagacaaatcccaaaagaaacagctgaagttgaaaaggggaggcgggaacagagctgtggtatccagtctagggatggctttttcattaaaaaaaaaaaaaagtcttattcacaatagcaaagacttggaaccaacccaaatgtccatcaatgatagactggattaagaaaatgtggcacatgtgcaccttggaatactatgcaaccataaaaaaggatgagttcatgtcctttgcagggacatggatgaagctggaaaccatcattctaagcaaactatcacaaggacagaaaaccaaacaccacatgttctcactcataggtgggagttgaacaatgagaacacatgggcacagggcagggaacatcacacatcggagcctgtcasggggtgggggactgtgggagggagggatagcatttggagaaatac

SEQ ID NO: 580993 - DNA, 378 bp, Homo sapiens
ggaaacaattttaagtccattaaatttaccacccttatattttaattttctttataaattaccaatgaactatgtaattcctttgatccattttatcataagtaaaactatcatgattattagtaaaagaataaatagtgagtaaygacaatattgagcttttctctctaaatggaaaactattaatacaaagaatgtagcttattacaaagagccaaaaaatccaaaaacgcatataatttccaggcaaaagtgttagaatgaacccatgtgaaacctttttctttctttctttttttttttttttacctgagaatcaatctaatgtttaaaacaatacaccgaagggtaaacttcagttgctcatttaataaatat

SEQ ID NO: 580994 - DNA, 361 bp, Homo sapiens
acgtttccagtttgttggcatatagttgttcataatagtctctcatgactccatgtatttctttgctatctccttttatgtttccctctttatttacttgagttttctcttttttcttgtttaatrtagtttgcagttttgctttattagtctacctcattcagttctgccctgcctttatcatttctttccttctactacatttgagttttgggtctgttcttgcttttttggtttcttcaggtgtattgttaggttgtttatttgaagtctttctcttttttggatgtagctgttaattgctataaattgccctcttagtgcttcttttgtcactttctatagggattgatttttttcc

SEQ ID NO: 580995 - DNA, 361 bp, Homo sapiens
acgtttccagtttgttggcatatagttgttcataatagtctctcatgactccatgtatttctttgctatctccttttatgtttccctctttatttacttgagttttctcttttttcttgtttaatgtagtttkcagttttgctttattagtctacctcattcagttctgccctgcctttatcatttctttccttctactacatttgagttttgggtctgttcttgcttttttggtttcttcaggtgtattgttaggttgtttatttgaagtctttctcttttttggatgtagctgttaattgctataaattgccctcttagtgcttcttttgtcactttctatagggattgatttttttcc

SEQ ID NO: 580996 - DNA, 437 bp, Homo sapiens
agaattcttcctgcctctgcctcccaagtagctgagaccacaggaatgtgacaccacacctggcttctttagattttttgtggacctgtataattgaacatatttatggtatacacagtgatattttgatatgtgtaaacaatgcataatggtcaaatcaggctaattaatatattccatcacctcaaacatttaccatttctttgtgttgtgaactttcaaaatcctcccctctagctttttaaatattagctagccaagccaggtgkagtggcacacacctgtaatcccagctgtttgggaggctgaggcaggagaatgacttgaaccccggaggcggagattgcagtgagctgagattgcaccactgcacgccaagcctgggtgacagagcaagactctgtctcaaaaaaaaaaaaaaaattagttaaccatat

SEQ ID NO: 580997 - DNA, 612 bp, Homo sapiens
aattaagagatatatctagattctaccactgaatttttaaaaacaagtttactgagagagaattctcataccatacagtttacccattgaacgtgtacaattcatggtctcttaatatattcacagagttgcataaccatcaccatcatcaattgtaggacattttcatgaccctgaaaagaatcagcaatctattttgtttccctagattagcccattctggacaccacgtatcaattggatcacacaatgtgtggtggtcttttgtgactggcttcttctacttagcataacatttttaaggttcattgtgttgtaacatgtatcartatttaatttcatcttattgctgagtaattttccactgtatggacataccactaatttatttagccattcatccgttgatggacctttgggttgtttccatgttttggctattattaatcatgctgctgtgaacttttatttacaagtttttgtgtttgtatatgtattcctttctcttgggtatatacatatgagttgaatttctgggtcatatggtaacactatgctcgaccttttgaggagctgccagtctgctttccaaagtggttgcaccattttacg

SEQ ID NO: 580998 - DNA, 612 bp, Homo sapiens
aattaagagatatatctagattctaccactgaatttttaaaaacaagtttactgagagagaattctcataccatacagtttacccattgaacgtgtacaattcatggtctcttaatatattcacagagttgcataaccatcaccatcatcaattgtaggacattttcatgaccctgaaaagaatcagcaatctattttgtttccctagattagcccattctggacaccacgtatcaattggatcacacaatgtgtggtggtcttttgtgactggcttcttctacttagcataacatttttaaggttcattgtgttgtaacatgtatcaatatttaatttcatcttattgctgagtaattttccactgtatggacataccactaatttatttagccattcatcmgttgatggacctttgggttgtttccatgttttggctattattaatcatgctgctgtgaacttttatttacaagtttttgtgtttgtatatgtattcctttctcttgggtatatacatatgagttgaatttctgggtcatatggtaacactatgctcgaccttttgaggagctgccagtctgctttccaaagtggttgcaccattttacg

SEQ ID NO: 580999 - DNA, 537 bp, Homo sapiens
tctcatgagacttattcactatcatgagaacagtactgggaaagatttgcccccatgattcaattacctccaactgggtacttcccacawcatgtgggaattcaagatgagatttgagtggggacacagccaaatcatgttaccatccaaatagctttcaaaaagggtcccaatctacatggaggtttttaagtgtaagtcattatcttaaaaacctgtaagcacattctttgtcttaagaggacaatggtaacaaaaatgtataaactgaaatcacattttacctattatgtatatatagatggaattgtttagcaaacatgtataaataaaaaataatttttctttttctgtgtagctctttaaaaattgaattttaaaaggaaaaatgtgttaaggtctgtgaagggtgaattgtgttccccttaaatttatacattgaaaccctaaccatcagaacctcagaatgtgactatattttgacacaggatcatcaaagaggtaattaagttaaaatgaggtcattagggtaagccc

SEQ ID NO: 581000 - DNA, 564 bp, Homo sapiens
tttgtattttcaataaagacaaggtttcaccatgttagccaggatggttttgatctcctgacctcgtgatctgcccgcctyggcctcccaaagtgctgggattacaggcgtgagccactgcacccggccaattggtaatttttaaattatcatttcaatcttgctgctagttgttggtctgttcagggtatctaattcttcctgattcaagctagaagggttgtatttttccagaatttatccatttcttctaggcttttttatttatatgcataacggtgttcatagtagtctggaatgatcttttgtggtgtcagttataacatctcctgtttcatttcttagtgaggttatttggattttctctctttttttcttggttaatcttgctaacggtctatcaattttatttatcttttcaaaggaccagccttttatttcagttttttattgagctttttgtttcagtttcatttagttcttctctgatgttggttaatcctacattctgctgtgtttgggtttgatttgttcttgttttactagttctttgaggtgtggcct

SEQ ID NO: 581001 - DNA, 564 bp, Homo sapiens
tttgtattttcaataaagacaaggtttcaccatgttagccaggatggttttgatctcctgacctcgtgatctgcccgcctcggcctcccaaagtgctgggattacaggcgtgagccactgcacccggccaattggtaatttttaaattatcatttcaatcttgctgctagttgttggtctgttcagggtatctaattcttcctgattcaagctagaagggttgtatttttccagaatttatccatttcttctaggcttttttatttatatgcataacggtgttcatagtagtctggaatgatcttttgtggtgtcagttataacatctcctgtttcatttcttagtgaggttatttggattttctctctttttttcttggttaatcttgctaacggtctatcaattttatttatcttttcaaaggaccagccttttatttcagttttttattgagctttttgtttcagtttcatttagttcttctctgatgttggttaatcctacmttctgctgtgtttgggtttgatttgttcttgttttactagttctttgaggtgtggcct

SEQ ID NO: 581002 - DNA, 434 bp, Homo sapiens
tatgacctgagttcatttatttatttttttaatagaggcagtaatataaacacaataccaaaggaaagaacaaatccctgaagttgaaacacatccataacctattttttctacacttaaaaaaaattttaaatgtacagaaaagttgaaagaatagcaaataaccactcatataccatccccttgatccagcaattaaccttttttatatttatgtactctctctcatatacatatacatttttctataccatttaaaagttgcaaacataatgaaacttcatccctaagcacttcaacaccatcaacaatcttactactgtatcaatgttaactttcttagctgatatacaaccacctgcaaatttcccaattattccccaatttyttttatagctgctgttttcaatcaggatccaatcaaggatcatgcg

SEQ ID NO: 581003 - DNA, 539 bp, Homo sapiens
aattcgtggcaaacgagatatctccacatacaatctagacagaagcattctcagaaaattttgtgttgtgtgcattcaagtcacagagttgaacgtctttttggatagatcagttttgaaaccatccttttctagaatcagcttgaggatatttgtaggtctttgaggaattcgttgtaaacgggatatctgcacatacaaggtagacagraacatggtcagagacttttttgtgatgtgtgaactcaactcacagagttcaacctttcttttgatagagcagttttgcagcactgcttttgtagaatctgcctgaggacatttggagctctttgaggaattcgttgtaaacgggatgtccgcacatacaaactagacacaactattctcagaaacttttttgggatgtgtggattcaactcacagagttcacccttccttttgatagagcagtcttgaaatactgcttttgtagaatctgcttgaggatatttggagctcttgaggaattcgttgtaaacggggtatctgcacacaca

SEQ ID NO: 581004 - DNA, 539 bp, Homo sapiens
aattcgtggcaaacgagatatctccacatacaatctagacagaagcattctcagaaaattttgtgttgtgtgcattcaagtcacagagttgaacgtctttttggatagatcagttttgaaaccatccttttctagaatcagcttgaggatatttgtaggtctttgaggaattcgttgtaaacgggatatctgcacatacaaggtagacagaaacatggtcagagacttttttgtgatgygtgaactcaactcacagagttcaacctttcttttgatagagcagttttgcagcactgcttttgtagaatctgcctgaggacatttggagctctttgaggaattcgttgtaaacgggatgtccgcacatacaaactagacacaactattctcagaaacttttttgggatgtgtggattcaactcacagagttcacccttccttttgatagagcagtcttgaaatactgcttttgtagaatctgcttgaggatatttggagctcttgaggaattcgttgtaaacggggtatctgcacacaca

SEQ ID NO: 581005 - DNA, 539 bp, Homo sapiens
aattcgtggcaaacgagatatctccacatacaatctagacagaagcattctcagaaaattttgtgttgtgtgcattcaagtcacagagttgaacgtctttttggatagatcagttttgaaaccatccttttctagaatcagcttgaggatatttgtaggtctttgaggaattcgttgtaaacgggatatctgcacatacaaggtagacagaaacatggtcagagacttttttgtgatgtgtgaactcaactcacagagttcaacctttcttttgatagagcagttttgcagcactgcttttgyagaatctgcctgaggacatttggagctctttgaggaattcgttgtaaacgggatgtccgcacatacaaactagacacaactattctcagaaacttttttgggatgtgtggattcaactcacagagttcacccttccttttgatagagcagtcttgaaatactgcttttgtagaatctgcttgaggatatttggagctcttgaggaattcgttgtaaacggggtatctgcacacaca

SEQ ID NO: 581006 - DNA, 539 bp, Homo sapiens
aattcgtggcaaacgagatatctccacatacaatctagacagaagcattctcagaaaattttgtgttgtgtgcattcaagtcacagagttgaacgtctttttggatagatcagttttgaaaccatccttttctagaatcagcttgaggatatttgtaggtctttgaggaattcgttgtaaacgggatatctgcacatacaaggtagacagaaacatggtcagagacttttttgtgatgtgtgaactcaactcacagagttcaacctttcttttgatagagcagttttgcagcactgcttttgtagaatctgcctgaggacatttggagctctttgaggaattcgytgtaaacgggatgtccgcacatacaaactagacacaactattctcagaaacttttttgggatgtgtggattcaactcacagagttcacccttccttttgatagagcagtcttgaaatactgcttttgtagaatctgcttgaggatatttggagctcttgaggaattcgttgtaaacggggtatctgcacacaca

SEQ ID NO: 581007 - DNA, 612 bp, Homo sapiens
acagttcattctgcttcctcttctgtcaactggcttatcttgaagaagatatcattctcaattgtcttatttgaattgtcaatcctatttcatccactctcaaagatatctgtaaagtctttctcccatgtctttaacatctcaagcccattttatttatcatcgtgactctatgctcctgttagattctacaacaagagtgttttcaaccttctgaataaaaagaaaggtataactctgtgagatgaatcaacacatcacaaagcatgttcacagatagcttcattctggtttttattgtgggatactggattttcattctaggcctcatagggctcccaaatgtcccttcacggattctacaaatagagtgtttccaacctgctgaatcaaaagaaagttttaactcagtgagatgagtgcatacatcacaaagcattttcacagatagcttctttctagttttatcacaggatattcagtttttcactgtaggccccartgggttcccaaatgtcccttcacaggttctacaagaagaacattttcaacctactgaatcaaaagaaatgtttgactctatgaagtgaatccacacatcacaaagtgttt

SEQ ID NO: 581008 - DNA, 623 bp, Homo sapiens
tttcacaggtagctactttctagtttttattgcaggatattcgtttttttactgtaggactcaataggctcccagatgtcccttcgcagattctacaaaaagagtgtttccaacctgctgaatcaaatgaaaggtttaactctgtttgatttatccacacattgcaaagcattttcacagatggcttctttctagtttttattgcaaaatattccatttttcactgtaggcctctatgggctcccaaatatccctttgcacattctacaaaaagattccaacctgttgaatcaacagaaaggtttaactatgtgagatgaatccactcattgcaaagcattttcacaggtagmttctttctagtttttatcaccggatatttggtttttcactataggaatcaataagctcccaaatgtcccttcacggtttccacaaaaagagtgtttccaacctgctgtaccaaaggaaaggtttaaatctgtgagatgaattcatacattgcaaaacgttttcacagttagtttctttctagtttttattgcagatatttgatttttcactacaggtttcaatgggtccccaaatttcccttcatagattctacaaaaagagtgtttcca

SEQ ID NO: 581009 - DNA, 620 bp, Homo sapiens
ccctccttgagaggacccaagcctccatccagagggttgaggccctcatttgataagccccctaaggagtataggggagcaaggggagagaatgctaagactgagaaggaagaagagcaagatagatgttatggatgtgttacagatgtggaagaacaggtcacttcaagagggaatgtcctgaactaaagaaagagagagaaactttcacactcatgacttttgaagagcaataggggagtcaggggctccacattttttattttgtgtcccaccaggagcccttaataaatttggaagtgggacctaaatgcggatttatcaccattttagttgattcagggattaacgctcctctgcttgtttgcccgaacctggtcttccctgcttttcagaagaacttttagtctctggggtaaaataaaaaggatttaagacaaaaattttagaaagcagagaagtcagataaaaagatcgatttactcctattcaatttttrttacttcctgatgtggaaactaatctattaggaagtgacttaatgttgaggcaaggcataggccttcaagtgggctctaaaggatttctcacttcactacatttactcactgcagtggatt

SEQ ID NO: 581010 - DNA, 595 bp, Homo sapiens
tggaggctccctggacttgggaggaaagagagttggacaagytttgctctatgagctgtgactttcctggtttcaacggacagaaacctaacttgaactacagagggggatggattgccatgagaccaatgccctggaaggccagagaattggccaggccttgggagtgattgaaaccaggggctagaaagtcatcatcaagacaaggccattgcataggctgttccctgtgtctggaaagctctttcctccaacttagtttatcttttgctcattgttcatgtgattccagtcacctcctcagtgaagcctccccctcctaccactcaactccctgactggatcacacccagattcctggctgttccactcaagtgtttggggcaaattagaaaaaggtgatccctttggctagacagtgccagtatgtgaaaaacagagtgcccctttttctgagcaaacacagcttctcgccagggctcttggcttgatgagcagagtatgacatttcagcccacttggccccttggctcatgctgttttgtgcagtgcacaaattgcacaactgtatacagcaactgagccagattccata

SEQ ID NO: 581011 - DNA, 595 bp, Homo sapiens
tggaggctccctggacttgggaggaaagagagttggacaagttttgctctatgagctgtgactttcctggtttcaacggacagaaacctaacttgaactacagagggggatggattgccatgagaccaatgccctggaaggccagagaattggccaggccttgggagtgattgaaaccaggggctagaaagtcatcatcaagacaaggccattgcataggctgttccctgtgtctggaaagctctttcctccaacttagtttatcttttgctcattgttcatgtgattccagtcacctcctcagtgaagcctccccctcctaccactcaactccctgactggatcacacccagattcctggctgttccactcaagtgtttggggcaaattakaaaaaggtgatccctttggctagacagtgccagtatgtgaaaaacagagtgcccctttttctgagcaaacacagcttctcgccagggctcttggcttgatgagcagagtatgacatttcagcccacttggccccttggctcatgctgttttgtgcagtgcacaaattgcacaactgtatacagcaactgagccagattccata

SEQ ID NO: 581012 - DNA, 560 bp, Homo sapiens
attagctgggtggcaagttaccgaagctcttgaagcttcagttaacttacctgtagattggggatactattagttattagtactccactgtgttgttgtgaagttaagtagattagtttaccagtacagtactattagagtagtgcccgtcacataggaagcattaagaaagaagttgttatcacttgggacagcaaattcagttggtcatatttggagaargaaaactatcctgccctctatggataaattctcctttcggagggggtttattttcatttccaaatactagaaacccacctagcctgacattttattactaaaggagttctgccaactctctcactgtaatctaaggccaaattaattcctctctgtcctgtgttctttcttattctctttaaatcttaccagggacacatttatctgtctgtgcaggcccaacttattttcagtctcaagaactatgctattcttcctcctactcccaatcccaacacatgcaggaaaagcatgctacagtgggcttagcagaatttaggggaaagcgtaacatttga

SEQ ID NO: 581013 - DNA, 579 bp, Homo sapiens
gagttgaatgcagacatcacaaaaaagtttctgagaatgcttccgtccagtttgtatgtgcagataccccgtttacaacgaattcctcaagagctccaaatatcctcaagcagattctacaaaagcagtatttcaagactgctctatcaaaaggaagggtgaactctgtgagttgaatccacacatcccaaaaaagtttctgagaatagttgtgtctagtttgtatgtgcggacatcccgtttacagcgaattcctcaaagakctccaaatgtcctcaggcagattctgcaaaagcagtgctgcaaaactgctctatcaaaagaaaggttgaactctgtgagttgagttcacacatcacaaaaaagtctctgaccatgtttctgtctaccttgtatgtgcagatatcccgtttacaacgaattcctcaaagacctacaaatatcctcaagctgattctagaaaaggatggtttcaaaactgatctatccaaaaagacgttcaactctgtgacttgaatgcacacaacacaaaattttctgagaatgcttctgtctagattgtatgtggagatatctcgt

SEQ ID NO: 581014 - DNA, 478 bp, Homo sapiens
tgtgtctagtttgtatgtgcggacatcccgtttacagcgaattcctcaaagatctccaaatgtcctcaggcagattctgcaaaagcagtgctgcaraactgctctatcaaaagaaaggttgaactctgtgagttgagttcacacatcacaaaaaagtctctgaccatgtttctgtctaccttgtatgtgcagatatcccgtttacaacgaattcctcaaagacctacaaatatcctcaagctgattctagaaaaggatggtttcaaaactgatctatccaaaaagacgttcaactctgtgacttgaatgcacacaacacaaaattttctgagaatgcttctgtctagattgtatgtggagatatctcgtttgccacgaattcctccaagagctccaaatatcctcaagcagattctacccaagcagggtttcaggaatgctctatcaaaaggaaggttgaattctgtgagttgaatcc

SEQ ID NO: 581015 - DNA, 640 bp, Homo sapiens
tagtttgtatgtgcggacatcccgtttacagcgaattcctcaaagatctccaaatgtcctcaggcagattctgcaaaagcagtgctgcaaaactgctctatcaaaagaaaggttgaactctgtgagttgagttcacacatcacaaaaawgtctctgaccatgtttctgtctaccttgtatgtgcagatatcccgtttacaacgaattcctcaaagacctacaaatatcctcaagctgattctagaaaaggatggtttcaaaactgatctatccaaaaagacgttcaactctgtgacttgaatgcacacaacacaaaattttctgagaatgcttctgtctagattgtatgtggagatatctcgtttgccacgaattcctccaagagctccaaatatcctcaagcagattctacccaagcagggtttcaggaatgctctatcaaaaggaaggttgaattctgtgagttgaatccacacatcacgaaaaagtttctgggaatgcttctgtctaatttgtatgtgcagatatcccgattgcaacgaattcctcaaagagctccaaatatcctgaagcagattcttcaaaagcagtatttcaagactgctctatcaaaaggaaggttgaactgtgtgagttgaat

SEQ ID NO: 581016 - DNA, 478 bp, Homo sapiens
tgtgtctagtttgtatgtgcggacatcccgtttacagcgaattcctcaaagatctccaaatgtcctcaggcagattctgcaaaagcagtgctgcaaaactgctctatcaaaagaaaggttgaactctgtgagttgagttcacacatcacaaaaaagtctctgaccatgttyctgtctaccttgtatgtgcagatatcccgtttacaacgaattcctcaaagacctacaaatatcctcaagctgattctagaaaaggatggtttcaaaactgatctatccaaaaagacgttcaactctgtgacttgaatgcacacaacacaaaattttctgagaatgcttctgtctagattgtatgtggagatatctcgtttgccacgaattcctccaagagctccaaatatcctcaagcagattctacccaagcagggtttcaggaatgctctatcaaaaggaaggttgaattctgtgagttgaatcc

SEQ ID NO: 581017 - DNA, 640 bp, Homo sapiens
tagtttgtatgtgcggacatcccgtttacagcgaattcctcaaagatctccaaatgtcctcaggcagattctgcaaaagcagtgctgcaaaactgctctatcaaaagaaaggttgaactctgtgagttgagttcacacatcacaaaaaagtctctgaccatgtttctgtctaccttgtatgtgcagatatcccgtttacaaygaattcctcaaagacctacaaatatcctcaagctgattctagaaaaggatggtttcaaaactgatctatccaaaaagacgttcaactctgtgacttgaatgcacacaacacaaaattttctgagaatgcttctgtctagattgtatgtggagatatctcgtttgccacgaattcctccaagagctccaaatatcctcaagcagattctacccaagcagggtttcaggaatgctctatcaaaaggaaggttgaattctgtgagttgaatccacacatcacgaaaaagtttctgggaatgcttctgtctaatttgtatgtgcagatatcccgattgcaacgaattcctcaaagagctccaaatatcctgaagcagattcttcaaaagcagtatttcaagactgctctatcaaaaggaaggttgaactgtgtgagttgaat

SEQ ID NO: 581018 - DNA, 519 bp, Homo sapiens
gaatccacacatcacgaaaaagtttctgggaatgcttctgtctaatttgtatgtgcagatatcccgattgcaacgaattcctcaaagagctccaaatatcctgaagcagattcttcaaaagcagtatttcaagactgctctatcaaaaggaaggttgaactgtgtgagttgaatccacacatcccaaaaaaagtttctgagaatgcttctgtcaattttgtgcagatatcccgttggcaacgaattcctgaaagagctccaaatatcctcaagcagattctgcaaaagcaggatttcaagacagctctatcaaaaggaaagttgaactctgtgagttgagttcacacatccctaaatgtttctgagaatgcttstatctagtttatatgtgaagatatttcactttccaccatgagcctctaagcgctccaaatgaacacttgcagagtatgcagaaagaacgtttccaatcttctctatcaaaggaaagattcaactctgtgagttgaatggacatat

SEQ ID NO: 581019 - DNA, 519 bp, Homo sapiens
gaatccacacatcacgaaaaagtttctgggaatgcttctgtctaatttgtatgtgcagatatcccgattgcaacgaattcctcaaagagctccaaatatcctgaagcagattcttcaaaagcagtatttcaagactgctctatcaaaaggaaggttgaactgtgtgagttgaatccacacatcccaaaaaaagtttctgagaatgcttctgtcaattttgtgcagatatcccgttggcaacgaattcctgaaagagctccaaatatcctcaagcagattctgcaaaagcaggatttcaagacagctctatcaaaaggaaagttgaactctgtgagttgagttcacacatccctaaatgtttctgagaatgcttgtrtctagtttatatgtgaagatatttcactttccaccatgagcctctaagcgctccaaatgaacacttgcagagtatgcagaaagaacgtttccaatcttctctatcaaaggaaagattcaactctgtgagttgaatggacatat

SEQ ID NO: 581020 - DNA, 467 bp, Homo sapiens
ttgctaaaagacttgaatatgcaaaggcaaaaaattcttgattaattaacattgctcctttttaggagcaatcagtgcttttccttaagggaaagcatctaatggacactaattataarttttttcagtactttatatggaatgtaagcaacagaggccgtctataaggatcgtcacaagcttgacaacatgctaaggcttgctgacatagaaacaatctacaaatatatggcataaaaatgttaagagcaattaatcctaacatgagtcatatcttattatttttggctactcattaattcatttttaaaacatttataaggaaaaaactacatcattgtgataatggactctgaatagcattgcaaataaaatacttattcctttacaaaacttggggcaacttatactaagaaataccgacttcttcatttaacatcctataatttgcatttgctaaatgtgac

SEQ ID NO: 581021 - DNA, 467 bp, Homo sapiens
ttgctaaaagacttgaatatgcaaaggcaaaaaattcttgattaattaacattgctcctttttaggagcaatcagtgcttttccttaagggaaagcatctaatggacactaattataaattttttcagtactttatatggaatgtaagcaacagaggccgtctataaggatcrtcacaagcttgacaacatgctaaggcttgctgacatagaaacaatctacaaatatatggcataaaaatgttaagagcaattaatcctaacatgagtcatatcttattatttttggctactcattaattcatttttaaaacatttataaggaaaaaactacatcattgtgataatggactctgaatagcattgcaaataaaatacttattcctttacaaaacttggggcaacttatactaagaaataccgacttcttcatttaacatcctataatttgcatttgctaaatgtgac

SEQ ID NO: 581022 - DNA, 467 bp, Homo sapiens
ttgctaaaagacttgaatatgcaaaggcaaaaaattcttgattaattaacattgctcctttttaggagcaatcagtgcttttccttaagggaaagcatctaatggacactaattataaattttttcagtactttatatggaatgtaagcaacagaggccgtctataaggatcgtcacaagcttgacaacatgctaaggcttgctgacatagaaacaatctacaaatatatggcataaaaatgttaagagcaattaatcctaacatgagtcatatcttattatttttggctactcattaattcatttttaaaacatttataaggaaaaaactacatcattgtgataatggactctgaatagcattgcaaataaaatacttattcctttacaaaacttggggmaacttatactaagaaataccgacttcttcatttaacatcctataatttgcatttgctaaatgtgac

SEQ ID NO: 581023 - DNA, 598 bp, Homo sapiens
aaccttcacatgtccctgctagcctaaaataaaggttataaaaagaaaatttgttgtttagtgtagccaccttcatcaattatcttagctagatcctctggataacttccttcaacttttcatcagcactagaagcttaccttgtatttttatattatggatgtgacatctaatgtggttaggctttatgtccccawgcaaatcttattttgaattgtaacctccataattcccataatcaccacatgtcaagggagagataaggtggaggtaattgaatcatgtgggcaatgtcccgcacactagtctcttgatagtgaatgagttctcacaagatctgatggttttatatggcacttctcttttctgctgccctgtgaagaaggtgccttgcttcttctttgttttctgccatgtctgtaagtttcctgaggactccccagccatgctgaactgtgagtcaattaaacttcttttctttataaattacccaaactcaaacagttctttatagcagtatgaaaacaaattaatacaatgtctttctttataccctgtgaactaactttatttacttccaacttttcctctgcagctt

SEQ ID NO: 581024 - DNA, 529 bp, Homo sapiens
aggtagagaaaatgaaaagattcaattcaggaagctcaaaggagatatatccaacacatagaaaagcaatagaagaaaagaactgcaaatggtgtagagagattcctgaaagaagctttgctcattgtcactttatactttaggaaaggctatcttgcctgactcttaacaggctaccttacctctaaatcccatgttgccatattaaagagcacctagtattactcctggtcctagagcaaaatcttgcactctgtcacctagctaaggttgctttatcatcgactrtgctttgtggtagagcttttgtatttttactcagtattgaattttcagcacctagaatcttgttttaacatgtcactgattgcagagaataaataactaaataaacaaagcatcaagtatttgtagtaggttagcaagagaaagagcaggagaagcagtctaggaaaaaataatcctaacttggggtacctgtttcctaagggtaacctgctagtgtcatgaaggcacctggcaaacagaa

SEQ ID NO: 581025 - DNA, 495 bp, Homo sapiens
ttccttatctttagccactaagttaattgcagagatgataatagctaatacttgctgagtttgatagcgaaaagttcaaagttgctttttaaaaaatttcttttttttttttgtttaaaatgtttatttggaacttttctagtacaaatatattacgtccttattacagaaaatttggaaaacacaaaaaaggaaaagtcaggcaaaacaaagcccargacctcactgggaggtgtacccagcagctcattgggaatgggccatgatgacgatggcggttttgtctagtagaaaagggagaaatgtggggaaaagaaagagagatcagattgttgctgtgtctgtgtagaaataagtagacataggagactccattttgttctgtactaagaaaaattcttctgccttgggatgctgttaatctgtaaccttacccccaccccgtgctctctgaaacatgtgctgtgtccactcagggttaaatggattaagggc

SEQ ID NO: 581026 - DNA, 495 bp, Homo sapiens
ttccttatctttagccactaagttaattgcagagatgataatagctaatacttgctgagtttgatagcgaaaagttcaaagttgctttttaaaaaatttcttttttttttttgtttaaaatgtttatttggaacttttctagtacaaatatattacgtccttattacagaaaatttggaaaacacaaaaaaggaaaagtcaggcaaaacaaagcccaagacctcactgggaggtgtacccagcagctcattgggaaygggccatgatgacgatggcggttttgtctagtagaaaagggagaaatgtggggaaaagaaagagagatcagattgttgctgtgtctgtgtagaaataagtagacataggagactccattttgttctgtactaagaaaaattcttctgccttgggatgctgttaatctgtaaccttacccccaccccgtgctctctgaaacatgtgctgtgtccactcagggttaaatggattaagggc

SEQ ID NO: 581027 - DNA, 393 bp, Homo sapiens
tatgaattacttagtctaggatatgtctttactagcagcttgaatacagactaataaagggcaatagaaaaaaaataataaaggtgagatatttcaaaatactgtatcttcaaatatttgctgtactttattttaatttcttgatttattaagagtatctcttatataatcaggaaaaaaatctacatctcatttaatgttttattgacagaggcagagagtgaccaaaaataratatcagttgattaactgaatagctcatgactatataatggaatatatattcatggttttataacttaagtgactaaagaccccattttattccacatttggaagatccacacaacttctttttttcacccattccttttaaattttatagactgcttc

SEQ ID NO: 581028 - DNA, 575 bp, Homo sapiens
cagatgtaagttcttccttatcagtaattactttaaatgtaaatggattaaatgctccactgaaaaacagagattggcagaatgcatttaaaaagtaatccaacgatatgctctctgcaagaaactcattttagattcagagacataaatggattgaaagtgaaaagatgtaaaagatacacaaatggtaactgaaagacagcaggggtagttatactaatataagaygaaatagactttaaatcaaaataatttacaagagacaaataaggactttatacattaataggttgttgaatttagcaagaagacaagaagttgtagcaattatcaatatttatgcaattaatagcagaccataacatatatatgaaacaaaaactggcagaattgaaaggcggaatagacagttggaataatagttggaaacttcaatatccttctctcaatagcagacaggataaccagacaggagatacataaggaaatagaagacttcaaacacataataaataaactaatctaacagacatattgagaacactctatgcaaaaacagcaaacaaccactgtgg

SEQ ID NO: 581029 - DNA, 575 bp, Homo sapiens
cagatgtaagttcttccttatcagtaattactttaaatgtaaatggattaaatgctccactgaaaaacagagattggcagaatgcatttaaaaagtaatccaacgatatgctctctgcaagaaactcattttagattcagagacataaatggattgaaagtgaaaagatgtaaaagatacacaaatggtaactgaaagacagcaggggtagttatactaatataagatgaaatagactttaaatcaaaataatttacargagacaaataaggactttatacattaataggttgttgaatttagcaagaagacaagaagttgtagcaattatcaatatttatgcaattaatagcagaccataacatatatatgaaacaaaaactggcagaattgaaaggcggaatagacagttggaataatagttggaaacttcaatatccttctctcaatagcagacaggataaccagacaggagatacataaggaaatagaagacttcaaacacataataaataaactaatctaacagacatattgagaacactctatgcaaaaacagcaaacaaccactgtgg

SEQ ID NO: 581030 - DNA, 546 bp, Homo sapiens
tttctcatcctaataagcctgggagtgccatgggagactggggcttatttcatctctacagctcgaccataaaagacggtcacactcaaggggaccattttagaagcccaccctcagggacgcattctctttctcagggatgttccttgctgagaaaaagaattcagcgatatttctcccatttgcttttgaaaaaagagaaatatggctctgttccacccggstcactggcggtcagagtttaaggttatctctcttgttccctgaacattgctgttatcctgttcttttttcaaggtgcccagatttcatattgttcaaacacacatgctctacaatttgtgcagttaacgcaatcatcacagtgtcctgaggcgacatacatcctcctcagcttatgacatgacaggataaagagattaaagtaaagacaggcataggaaatcacaagggtattgattggggaagtgataagtgtccatgaaatcttcacaatttatgtttagagactgcagtaaagacaggcataagaaattataaaagtat

SEQ ID NO: 581031 - DNA, 546 bp, Homo sapiens
tttctcatcctaataagcctgggagtgccatgggagactggggcttatttcatctctacagctcgaccataaaagacggtcacactcaaggggaccattttagaagcccaccctcagggacgcattctctttctcagggatgttccttgctgagaaaaagaattcagcgatatttctcccatttgcttttgaaaaaagagaaatatggctctgttccacccgggtcacyggcggtcagagtttaaggttatctctcttgttccctgaacattgctgttatcctgttcttttttcaaggtgcccagatttcatattgttcaaacacacatgctctacaatttgtgcagttaacgcaatcatcacagtgtcctgaggcgacatacatcctcctcagcttatgacatgacaggataaagagattaaagtaaagacaggcataggaaatcacaagggtattgattggggaagtgataagtgtccatgaaatcttcacaatttatgtttagagactgcagtaaagacaggcataagaaattataaaagtat

SEQ ID NO: 581032 - DNA, 597 bp, Homo sapiens
cagtgttggaggtggggcctggtgggaggtgttttggtcgtgggggcagatccctcaggaatggctgggtgccattctctcaagagtgagtgatttcccactcttagttcctgcaagaactgattgtgtgtgcgtgtgtgtgtgtgtttcaagatgtaatctcrctctgttgcccagactggagtgcagtggcacgatttcagctcactgcaacctctgcctcccggattcaagagattctcctgcctcagcctcccaggtagctgggattacaggcacccgccactacatccagctaatttttgtgtttttatttttttctatttatttatttatttatttatttatttatttatttatttatttatttattttgggacacagtctcgctctgtcagccaggctggagtgcaatggcaagatctcggctcattgcaacctccacctcctgggttcaagtaattctcccaccttagcctcccaagtagctggagttacaggcaagagccaccatgcctggctaatgtttgtatttttagtacagagagggtttcgacatgttggccaggctggtctcgaactcctgacctcaagtga

SEQ ID NO: 581033 - DNA, 597 bp, Homo sapiens
cagtgttggaggtggggcctggtgggaggtgttttggtcgtgggggcagatccctcaggaatggctgggtgccattctctcaagagtgagtgatttcccactcttagttcctgcaagaactgattgtgtgtgcgtgtgtgtgtgtgtttcaagatgtaatctcactctgttgcccagactggagtgcagtggcacgatttcagctcactgcaacctctgcctcccggattcaagagattctcctgcctcagcctcccargtagctgggattacaggcacccgccactacatccagctaatttttgtgtttttatttttttctatttatttatttatttatttatttatttatttatttatttatttatttattttgggacacagtctcgctctgtcagccaggctggagtgcaatggcaagatctcggctcattgcaacctccacctcctgggttcaagtaattctcccaccttagcctcccaagtagctggagttacaggcaagagccaccatgcctggctaatgtttgtatttttagtacagagagggtttcgacatgttggccaggctggtctcgaactcctgacctcaagtga

SEQ ID NO: 581034 - DNA, 539 bp, Homo sapiens
ggacacctcccctggagaggaacacgatggtagagtggaaggggcacagctttgccattagaatgcctgagttcaaatcccagctcaatcaccaactggttgggtatccttaagctcttccaaggagtgggggataatccaatccatccccacaggatcctggtggggattaaatgagatgctgtatgtaaaacatcaacacagggccaggtgccatggctcacacctgtaacaccagcacattgggaggtggaggcaggagaatcgcttgaagccaggagtttgagactaacctgggcaacayagccagacccctatctatacaataaaatgtctttttaattagctgggtgtgatagcccatgcctgtaatcccagctacttgggaagctgagacaggaagattgcttaagcccaggagttcaaagctgtagtgagctatgatcatgccactgaactccagccatggtgacagaactagaccccaactctaaaaaaataaaaaacattaaaaaaaaatcagcacagtgcctggcata

SEQ ID NO: 581035 - DNA, 562 bp, Homo sapiens
aggaaagagatttaattgactcagggaggmctcgggaaacttacaatcatggcagaagggaaagcaaacatgtccttcttcacatggcggcagaaaggggaagaatgagcaaaagaagaaaaagccccttataaaaccatcagattttgtgagaactcattcactatcataagaacagcatgaagataactgcccccatgattaaattacctcccactgggtcccttccatgacacatggggattgtgggaactacaattcaagatgagatttgggtggggacacagccaaaccatgtcaacctgtgtcacccttgagggacttgggggtcaaagggaactggtgcagacatgaagctcaagcttcctgttgtgccatgaaaaataaagtcctttatctctcaatccagagtctcatgtcttctgcccacatccataaaactcactagcctccatgtaggataatatcttagaccagcacagttcttgacactctagaagtgaatttgttggatcaaaaagcatgaacaattgctaaaactcttaatatgtcttgtcaatta

SEQ ID NO: 581036 - DNA, 421 bp, Homo sapiens
tatatatttcttggcatctactgtaagtgggtagtgaacgaataaacaaaatgtgatgaattttagaggactaagaggggcctaagtcacaccaagattcatgctggataatttgtcatcgacccagactgtggttctgcactcgccagtaaccagtttttktttttttttttttttgctttttgccaaccatacattttgctttcatggtatcgaagtggtttaagcttatggcttccagcctgcagtggctatgaggggtcagtctctcatcaggaggggttggcagactctgttctcagataggcagcaaggatggaggtggggcaggagcaatttcactacctgcctggcgtctgggtcttgcttagagaaataattccaggctctgctgctttcgactctgtctctcatggttcca

SEQ ID NO: 581037 - DNA, 408 bp, Homo sapiens
tatatatttcttggcatctactgtaagtgggtagtgaacgaataaacaaaatgtgatgaattttagaggactaagaggggcctaagtcacaccaagattcatgctggataatttgtcatcgacccagactgtggttctgcactcgccagtaaccagtttttttttttttttttttttgctttttgccaaccatacattttgctttcatggtatsgaagtggtttaagcttatggcttccagcctgcagtggctatgaggggtcagtctctcatcaggaggggttggcagactctgttctcagataggcagcaaggatggaggtggggcaggagcaatttcactacctgcctggcgtctgggtcttgcttagagaaataattccaggctctgctgctttcgactctgtc

SEQ ID NO: 581038 - DNA, 421 bp, Homo sapiens
tatatatttcttggcatctactgtaagtgggtagtgaacgaataaacaaaatgtgatgaattttagaggactaagaggggcctaagtcacaccaagattcatgctggataatttgtcatcgacccagactgtggttctgcactcgccagtaaccagtttttttttttttttttttttgctttttgccaaccatacattttgctttcatggtatcgaagtggtttaagcttatggcttccagcctgcagtggctatgaggggtcagtctctcatcaggaggggttggcagactctgttctcarataggcagcaaggatggaggtggggcaggagcaatttcactacctgcctggcgtctgggtcttgcttagagaaataattccaggctctgctgctttcgactctgtctctcatggttcca

SEQ ID NO: 581039 - DNA, 412 bp, Homo sapiens
ctctcccttgctcttctgccatgattgtgaggccttcctagacacgtggaactgcgagtccattaaacctctttttttttttcataaattacccagtctcgggtgtgtctttatcagcagcatgaaaacagactaatacagagcattaggagctatccttctaactccactgggagaaaactactggaaacttacccctggtctctcttggagagacctatgcatcttgtaccttggttgattttaatctgtatccttttagtgcaataaacaatgttcatggggacaatggctttcctgattctgtgggtccttctggcaaatcaatgggcctgagggyggtcttggagatccctgacaaaagtcactgtagccagggaccatcttctgttgagcttatttcagaggaaga

SEQ ID NO: 581040 - DNA, 488 bp, Homo sapiens
tggcatgcgcctgtaatcccagttactcgggaagctgagacaggagaatcgcttgaacccggaaggcaggaggttgcagtgagctgagattgcaccattgcactccagcctgggcaaaaagagcgaaactccgtctcaaaaaaaaaaaaaaaaagaaagaaaaacaaatattagccgatcatcgtggcacgtgcctgtaatcccagctactcaggaagctgaggtaggagaatcgcttgacctcatgaggtggaggttgcagtcagccaagatcgtgccactgcactccaacctgggtgacagagcaaggctctgtctcaacaaaaaaaaaaaaaaaaaagaaaaagagaaaagaaacatgcttatggctgaaragctgagcccaagtctatgtgattctgaataacatgcttttaatttaattaattaattaattaatttacttatttatttatttgagacagggtctcactctgtctcccaggctg

SEQ ID NO: 581041 - DNA, 609 bp, Homo sapiens
ggtaacgggcgttgggggcaccctggttccatttgttgactctgctacccagaagtgaaagaatgtcgcatctttctcatctctgtatggtcccctgcagtaaagagttgactcaggaggtctggggagttcaaatcctgcacattcctaagaaaggtctggcccttcactggctcctggaagataaccactaagtctttgcarcattgtgcctgataagggtgtctttatttgcctttgttctagttcttgttctaagtgctggtgatagaactgtgaaccaaaggtcattgccttcaaggagtttatattcaagtggagaaaatggaaaaccctcccctcacaaacaaacagactctgaaacctgataaataaatattagcattcagtgaagtgttaatgagtttctgtgagcacatacaatccttagcagagtttatctcatcctgcctgagctagcccctgcctccctccccagcccacatattttggcacacccttttcattcctcccaacattccaattccttcaacacatggaactccttctcaccccagggcctttgcacatgttactatctctgtataaatgcattcctctcacttgaca

SEQ ID NO: 581042 - DNA, 609 bp, Homo sapiens
ggtaacgggcgttgggggcaccctggttccatttgttgactctgctacccagaagtgaaagaatgtcgcatctttctcatctctgtatggtcccctgcagtaaagagttgactcaggaggtctggggagttcaaatcctgcacattcctaagaaaggtctggcccttcactggctcctggaagataaccactaagtctttgcagcattgtgcctgataagggtgtctttatttrcctttgttctagttcttgttctaagtgctggtgatagaactgtgaaccaaaggtcattgccttcaaggagtttatattcaagtggagaaaatggaaaaccctcccctcacaaacaaacagactctgaaacctgataaataaatattagcattcagtgaagtgttaatgagtttctgtgagcacatacaatccttagcagagtttatctcatcctgcctgagctagcccctgcctccctccccagcccacatattttggcacacccttttcattcctcccaacattccaattccttcaacacatggaactccttctcaccccagggcctttgcacatgttactatctctgtataaatgcattcctctcacttgaca

SEQ ID NO: 581043 - DNA, 609 bp, Homo sapiens
ggtaacgggcgttgggggcaccctggttccatttgttgactctgctacccagaagtgaaagaatgtcgcatctttctcatctctgtatggtcccctgcagtaaagagttgactcaggaggtctggggagttcaaatcctgcacattcctaagaaaggtctggcccttcactggctcctggaagataaccactaagtctttgcagcattgtgcctgataagggtgtctttatttgcctttgttctagttcttgttctaagtgctggtgatagaactgtgaaccaaaggtcattgccttcaaggagtttatattcaagtggagaaaatggaaaaccctcccctcacraacaaacagactctgaaacctgataaataaatattagcattcagtgaagtgttaatgagtttctgtgagcacatacaatccttagcagagtttatctcatcctgcctgagctagcccctgcctccctccccagcccacatattttggcacacccttttcattcctcccaacattccaattccttcaacacatggaactccttctcaccccagggcctttgcacatgttactatctctgtataaatgcattcctctcacttgaca

SEQ ID NO: 581044 - DNA, 450 bp, Homo sapiens
tctcagggatagtttgttaagagtytgaaaaccactgctctgggcaaactgccctccggagtcacacacaaaaaatcaatctcgttactaaagataaattttatttcaataaaaattgtaatgagcttgatcacctacccttttcacctgacttggctacaaatgactgccaactgtttaaaaaaaaaaatccaaccgaccctcagagctaatatgctattacttttaaagattacagacaggccaggcgtggtggctcacgcctgtaatcccagcactctgggaggccaagttcctatttcttagtgttagaaagaaagagagagaaatccctcagaacaatcagcagcctggagcatagtttgagactcccactaacagagccaagagtctcaaactaggccaacaggcacccttggggaactctgctgaggctgaggcaggagaatt

SEQ ID NO: 581045 - DNA, 457 bp, Homo sapiens
tatatagaaaagtgattttattcttgagcctgagatattcacagtgaaaatgacaacacattatttctgagacacctgctgggggcatccaccactttcccccaacccattctctctattcacctccaaccaattttatccaaaagccagctcagctgactgtacaaccacaagggatttggagttagatggatatggcatttatcagctgaatgatcttgggcataatactcaaaccttctgtgcctctgttttctcatctttaaacggggatagcacagggttggtgtgaggaataaatgagttattattgtcatagtaatatactaayatatagttaaatataattctatctgtcagatgtagacaggggtggagaatgccttggaagtcatttcttcctacagaataagtgatatggttttgctgtgtccccacccaaatctcatcttgaatt

SEQ ID NO: 581046 - DNA, 587 bp, Homo sapiens
tctttttgctggggttgcaaacctggtagggtggaaaccgggagctgctggtggtcatctcatcaccctgggggagagcctgcctgagaaggaaatcacaggagagccgagctgagagaggagaaggaaagccgatcacactgyctaacagcctgtatcccctccaacctgatgacagatctcacctagagtgaatttctcagtgaagccagtttgacttgagtttctgtcaacttgcaactcaaaaaggccatgtgttgccatgaggtatttctctgttccctttcctaatctagagattaggtaactttaattctgctaatgctgagttttgtctcatcaaatggaaacatcacagaagtctctgatcttgccccatcaacccttcccattacctctagggctcagccaatgctgctggtatcttttgcttcattttttcttttcttttcttttgtttctttctttcttttttttttttctgaggcagggacttgctctgtcacccaggctgaagtgcagtggtgtgatcacggcttactgcagcctcaacctcctgggctcaagtgatcctcccacctcagcct

SEQ ID NO: 581047 - DNA, 515 bp, Homo sapiens
tcccagtctctccctcctaaggacattgtcaccctcccagmcaggtgtgtggtagaaggaaacgactctctcctgatgctatgaattccaaagaattcccattaaccatatttctaagccagtttgctttctttcaatgtgcactttctgcaaaatgccatctgcacttgtttcctggggaaaccatctctctgaggtgggtaagttctcattgtgaagatggggacttgcctaatgtttggcattccctttttggggcacgtacagtgatttctgaactgacttgaaaggccattaacttggtttttactgccttttctggcttgcaaatttaatgcctggctcccaacatgtgtgaatggacaaacagcatcagcatcatctgggaacttgctagaaataaaaattctcaggctttaccctagacttacagaaccagcaactctgagggtaggttccagaagtctgtgagtttacaaatcttccaggtgattctgatccgtgctaaagttgga

SEQ ID NO: 581048 - DNA, 515 bp, Homo sapiens
tcccagtctctccctcctaaggacattgtcaccctcccagacaggtgtgtggtagaaggaaacgactctctcctgatgctatgaattccaaagaawtcccattaaccatatttctaagccagtttgctttctttcaatgtgcactttctgcaaaatgccatctgcacttgtttcctggggaaaccatctctctgaggtgggtaagttctcattgtgaagatggggacttgcctaatgtttggcattccctttttggggcacgtacagtgatttctgaactgacttgaaaggccattaacttggtttttactgccttttctggcttgcaaatttaatgcctggctcccaacatgtgtgaatggacaaacagcatcagcatcatctgggaacttgctagaaataaaaattctcaggctttaccctagacttacagaaccagcaactctgagggtaggttccagaagtctgtgagtttacaaatcttccaggtgattctgatccgtgctaaagttgga

SEQ ID NO: 581049 - DNA, 515 bp, Homo sapiens
tcccagtctctccctcctaaggacattgtcaccctcccagacaggtgtgtggtagaaggaaacgactctctcctgatgctatgaattccaaagaattcccattaaccatatttctaagccagtttgctttctttcaatgtgcactttctgcaaaatgccatctgcacttgtttcctggggaaaccatctctctgaggtgggtaagttctcattgtgaagatggggacttgcctaatgtttggcattccctttttggggcacgtacagtgatttctgaactgacttgaaaggccattaacttggtttttactgccttttctggcttgcaaatttaatgcctggctcccaacatgtgtgaatggacaaacagcatcagcatcatctgggaacttgctagaaataaaaattctcaggctttaccctagacttacagaaccrgcaactctgagggtaggttccagaagtctgtgagtttacaaatcttccaggtgattctgatccgtgctaaagttgga

SEQ ID NO: 581050 - DNA, 546 bp, Homo sapiens
tcaagggatgaaccagggcagatcaggttaaagsggaaaagctgttgccagcacagagaatagaatatacaaagacccagaaacaacagagaagatggatacattcaaggaactgagagtgatctcaaaaaaaagatttgtcatgatcagaagagacagtcccaaaccagcactcacttgggggctctgggactggactccctaaattggaatctcagccccatcatgtgagctcaaagtgcttcacctcactgtgcctcagtttccatgtctgtaaaacagggtagaagtagaacttatctcagaagagttataagaattaaactagagaagaagtgagcattgtttatatgtgcttgttgctatggatccaaaactgccagtaataacaataataataataataataatagcttatgctttcgttgagcccttgctttgcacctggccagtgacaggcacattatcagtaacacaaatgcaagtatctcatctaacccttgcatcaacgctcagagatgggttttatcaacatccccattttac

SEQ ID NO: 581051 - DNA, 557 bp, Homo sapiens
ctaagtgttggggttctttcaatatctcatggagcaaagtggcaatttagttcttagwcctttgttggtagtcaaatatccttcctgtatgtttaacacaagcactctttcttctccccaccatctctccacccccccctgaaaataaaataagaaaagcattcacatcatatctacatacattctggggatagagctgctcttgcagtgtttctgttttcctggtctctctggcatttgaagcagaaagactcagctcatattcatttttactactttccccagtcagaatggaagctgagatagatagcaaggtcttcttacacctttacctcatagaagttgatgatgttagtctggttgggagtcaacagagtgatggagcctgtcctgtccttgcacttgatctccacattcatagtgtagccctcggccttgacatttaatgtcacagggtggactttcttttccacattgcagatcaaattaaagttcacatctccttcctgctttggtgtgaagaaaatatcaattgggaacctggttggggaacaaaa

SEQ ID NO: 581052 - DNA, 557 bp, Homo sapiens
ctaagtgttggggttctttcaatatctcatggagcaaagtggcaatttagttcttagacctttgttggtagtcaaatatccttcctgtatgtttaacacaagcactctttcttctccccaccatctctccacccccccctgaaaataaaataagaaaagcattcacatcatatctacatacattctggggatagagctgctcttgsagtgtttctgttttcctggtctctctggcatttgaagcagaaagactcagctcatattcatttttactactttccccagtcagaatggaagctgagatagatagcaaggtcttcttacacctttacctcatagaagttgatgatgttagtctggttgggagtcaacagagtgatggagcctgtcctgtccttgcacttgatctccacattcatagtgtagccctcggccttgacatttaatgtcacagggtggactttcttttccacattgcagatcaaattaaagttcacatctccttcctgctttggtgtgaagaaaatatcaattgggaacctggttggggaacaaaa

SEQ ID NO: 581053 - DNA, 557 bp, Homo sapiens
ctaagtgttggggttctttcaatatctcatggagcaaagtggcaatttagttcttagacctttgttggtagtcaaatatccttcctgtatgtttaacacaagcactctttcttctccccaccatctctccacccccccctgaaaataaaataagaaaagcattcacatcatatctacatacattctggggatagagctgctcttgcagtgtttctgttttcctggtctctctggcatttgaagcagaaagactcagctcatattcatttttactactttccccagtcagaatggaagctgagatagatagcaaggtcttcttacacctttacctcatagaagttgatgatgttagtctggttgggagtcaacagagtgatggagcctgtcctgtccttgcacttgatctccacattcatagtgtagccctcggccttgacatttaatgtcacagggtggactttcttttccacattgcagatcaaattaaagttcacatctccttsctgctttggtgtgaagaaaatatcaattgggaacctggttggggaacaaaa

SEQ ID NO: 581054 - DNA, 557 bp, Homo sapiens
ctaagtgttggggttctttcaatatctcatggagcaaagtggcaatttagttcttagacctttgttggtagtcaaatatccttcctgtatgtttaacacaagcactctttcttctccccaccatctctccacccccccctgaaaataaaataagaaaagcattcacatcatatctacatacattctggggatagagctgctcttgcagtgtttctgttttcctggtctctctggcatttgaagcagaaagactcagctcatattcatttttactactttccccagtcagaatggaagctgagatagatagcaaggtcttcttacacctttacctcatagaagttgatgatgttagtctggttgggagtcaacagagtgatggagcctgtcctgtccttgcacttgatctccacattcatagtgtagccctcggccttgacatttaatgtcacagggtggactttcttttccacattgcagatcaaattaaagttcacatctccttcctgctttggwgtgaagaaaatatcaattgggaacctggttggggaacaaaa

SEQ ID NO: 581055 - DNA, 459 bp, Homo sapiens
ctggcgaggctgcagagaaaagggaacacttatacactattggtgggwatgtaaactcgttctgccactgtggaaagcagtttggagatttctctaagaacttaaaacagaactatcattcaacacagcaatctctttacaaaaaacaaagcaatctcataaaaaacaaaacaaaacaaaacaaaaaagccaaaaaacccaaagtcattctaccaaaaagacaacatgcactctcatgttcattgcagcactattcacaatagcaaagacataaaaacaatctaggtgcctatcaactgtagactggataaagaaagtgtggtacatatacactgtagaatactacacagccccaaaaagaatgaggtaattctttgctccaacatggatgcagctggaggccattatcctaagcaaattaatgcaggaacagaaagtgaaatacctcatgttcttttt

SEQ ID NO: 581056 - DNA, 550 bp, Homo sapiens
aacaaagcaatctcataaaaaacaaaacaaaacaaaacaaaaaagccaaaaaacccaaagtcattctaccaaaaagacaacatgcactctcatgttcattgcagcactattcacaatagcaaagacataaaaacaatctaggtgcctatcaactgtagactggataaagaaagtgtggtacatatacactgtagaatactacacagccccaaaaagaatgaggtaattctttgctccaacatggatgcagctggaggccattatcctaagcaaattaatgcaggaacagaaagtgaaatacctcatgttcttttttataagttgcagctaaacatcaggtacacatggacgtatagatggcaacaaaagaagctggggattactagggggaggggaggaagggaggcaagarttgaaaaactaacgattgggtactaagctcagtacctgggtgatgggaccatgtgtaccccaaacctatacagtaaatccagtagcaaacctgcatgcatatcccttgaaactaaaataaaagttgaaaaaaccccac

SEQ ID NO: 581057 - DNA, 504 bp, Homo sapiens
gattccagagggtgaggaggtgttgcttgggggaagggaaagggtgtggcaacaaaagggtcacatgaggaatcctgcggcaagggatctgttctgtgtcttgactcgtcaatgtcaataccaggttgtgacattttactgaagctttgcaagatgtcacccttgggagaaatttggtaaacagtacagagttatctttgtcttatttcttcttctttctttctttttttttttttttttgagacaaagtcttgctctggagttcagtgaggtaatcttggctcactgcaacctctgcctccygggttcaagcgattctcctgcctcagcctcccaagtagctgggattacaggaatgtgccaccacgcctggctaacgtttgtagttttagtagagacggggtttcaccatgttggccaggctagtctcgaactcctgacctcaggtgatccacccgccttgacctcccaaagtgctgggattacaggtgtaagccaccacgc

SEQ ID NO: 581058 - DNA, 352 bp, Homo sapiens
gtggattcacatatacagtgaatatagcaaggaaaagaatacaaagagaaaatattgagataaagggcttagaattctcaatgctccatattcatcaggaaaacagatatcagggagtaagtaggatggagatggaattgttatgatstaatcttagagttgaaagcaattatataaatggggcactgtaagcactggcaggcttggggtcctgggcatgtcaggaggatgcaacaaaatgaaccttcatttttggttacctgacagtgggtgggatccacccttcatgggacatacaagcaggctgtagctgaaaccttcacatagcgggagttgtcctggaaggaaaaat

SEQ ID NO: 581059 - DNA, 560 bp, Homo sapiens
ttcaatgcaatttccatcaaaataccaccatcattcttcacagaattaggaaaaaattataaaattcatatggaaccaaaaaagagcccacatagccaaagcaagactaagcaaaaagaacaaatctggaggcatcacactacctgatttcaaactatactrtaaggccatagtcaccaaaacagcatgttactgatataaaaataggcatatagaccaatggaacagaatagagaacccagaaagaaacccaaatacttacagccaactggtcttcgacaaagcaaacaaaaacataaagtggggaaaggacatccttttcaacaaatagtgctgggataattggctagccacatgtaggagaatgaaactggatcctcatctctcaccttatacaaaaatcaactcaagatggattaaggacttaaatctaagacctgaaactataaaaattctagaagataacattggaaaaacccttctagacattggcttaggcaaggattttatcaccaagaacccaaaagcaaatgcaattaaaacaaagataattagctgga

SEQ ID NO: 581060 - DNA, 560 bp, Homo sapiens
ttcaatgcaatttccatcaaaataccaccatcattcttcacagaattaggaaaaaattataaaattcatatggaaccaaaaaagagcccacatagccaaagcaagactaagcaaaaagaacaaatctggaggcatcacactacctgatttcaaactatactgtaaggccatagtcaccaaaacagcatgttactgatataaaaataggcatatagaccaatggaacagaatagagaacccagaaagaaacccaaatacttacagccaactggtcttcgacaaagcaaacaaaaacataaagtggggaaaggacatccttttcaacaaatagtgctgggataattggctagccacatgtaggagaatgaaactggatcctcatctctcaccttatacaaaaatcaactcaagatggattaaggacttaaatctaagacctgaaactataaaaattctagaagataacattggaaaaacccttmtagacattggcttaggcaaggattttatcaccaagaacccaaaagcaaatgcaattaaaacaaagataattagctgga

SEQ ID NO: 581061 - DNA, 558 bp, Homo sapiens
taccacttcactctggcctgggcaacagagtgagactctgcctcaaaaaaaaaaaaaaaaaaaaaaaaaaaaaaaaaaaaggcttaggtcagtgctcagttaagtgttggttgctttcatagacttttttctttatacaaatggtagcacacagtgtactttgttttgcactgggtattttttcttaatatatcaaagattgtgccaaattagtatgtagagaactttctcatttttaaaaaagaatttcatagtattgccttgtgcagatgtaatttagtttattcagacggtctcctattggtggrattaagttgtttccaatatttcttgcttttacaaacaaagctgcagtgtacaaggatggttacatgctttatgcaagtgcagaggtgtatctggaggataatttctagaagggggacaatgcattttaaattttgatctacttgcaaagttgtatgttatagaggttatgccaattcatactcctacccacactgtaggaaaatcccactcaacactattttaaaagattgcatcacatcatggacatac

SEQ ID NO: 581062 - DNA, 558 bp, Homo sapiens
taccacttcactctggcctgggcaacagagtgagactctgcctcaaaaaaaaaaaaaaaaaaaaaaaaaaaaaaaaaaaaggcttaggtcagtgctcagttaagtgttggttgctttcatagacttttttctttatacaaatggtagcacacagtgtactttgttttgcactgggtattttttcttaatatatcaaagattgtgccaaattagtatgtagagaactttctcatttttaaaaaagaatttcatagtattgccttgtgcagatgtaatttagtttattcagacggtctcctattggtggaattaagttgtttccaatatttcttgcttttacaaacaaagctgcagtgtacaaggatggttacatgctttatgcaagtgcagaggtgtatctggaggataatttctagaagggggacaatgcattttaaattttgatctacttgcaaagttgtatgttatagaggttatgccaattcatactcctacccacacygtaggaaaatcccactcaacactattttaaaagattgcatcacatcatggacatac

SEQ ID NO: 581063 - DNA, 558 bp, Homo sapiens
taccacttcactctggcctgggcaacagagtgagactctgcctcaaaaaaaaaaaaaaaaaaaaaaaaaaaaaaaaaaaaggcttaggtcagtgctcagttaagtgttggttgctttcatagacttttttctttatacaaatggtagcacacagtgtactttgttttgcactgggtattttttcttaatatatcaaagattgtgccaaattagtatgtagagaactttctcatttttaaaaaagaatttcatagtattgccttgtgcagatgtaatttagtttattcagacggtctcctattggtggaattaagttgtttccaatatttcttgcttttacaaacaaagctgcagtgtacaaggatggttacatgctttatgcaagtgcagaggtgtatctggaggataatttctagaagggggacaatgcattttaaattttgatctacttgcaaagttgtatgttatagaggttatgccaattcatactcctacccacactrtaggaaaatcccactcaacactattttaaaagattgcatcacatcatggacatac

SEQ ID NO: 581064 - DNA, 529 bp, Homo sapiens
gttttccaaacttttagatttctcttcttcctcaggaacactgattattcttaggtttggtcatttaacataatcccagacttcttggaggctttgttcatrttttcttattctttcttctttgtctttgttggattgggttaattagaagatcttgtctttgagctctgaatttctttcttctacttgttcaattctattgttgagactttccagagcattttgcatttctctaagtgtgttcaatatttcctgaagttttgattgttttttatttatgctgtgtatttcattgaatatttctccctttacttcttctatcattttttggattttctggaactgggcttcacctttctctggttactctctgattggcttaataactaacctcctgaattctttttcaggtaaatcagggatttcttcttggtttgaatccattgctagtgagctactgtgattttggggggctactaaagggccttgttttgtcatattatcagagttggttttctggttccttctt

SEQ ID NO: 581065 - DNA, 529 bp, Homo sapiens
gttttccaaacttttagatttctcttcttcctcaggaacactgattattcttaggtttggtcatttaacataatcccagacttcttggaggctttgttcatgttttcttattctttcttctttgtctttgttggattgggttaattagaagatcttgtctttgagctctgaatttctttcttctacttgttcaattctattgttgagactttccagagcattttgcatttctctaagtgtgttcaatatttcctgaagttttgattgttttttatttatgctgtgtatttcattgaatatttctcccttyacttcttctatcattttttggattttctggaactgggcttcacctttctctggttactctctgattggcttaataactaacctcctgaattctttttcaggtaaatcagggatttcttcttggtttgaatccattgctagtgagctactgtgattttggggggctactaaagggccttgttttgtcatattatcagagttggttttctggttccttctt

SEQ ID NO: 581066 - DNA, 529 bp, Homo sapiens
gttttccaaacttttagatttctcttcttcctcaggaacactgattattcttaggtttggtcatttaacataatcccagacttcttggaggctttgttcatgttttcttattctttcttctttgtctttgttggattgggttaattagaagatcttgtctttgagctctgaatttctttcttctacttgttcaattctattgttgagactttccagagcattttgcatttctctaagtgtgttcaatatttcctgaagttttgattgttttttatttatgctgtgtatttcattgaatatttctccctttacttcttctatcattttttggattttctggaactgggcttcacctttctctggttactctctgattggcttaataactaacctcctgaattctttttcaggtaaatcagggatttcttcttggtttgaatccattgctagtgagctactgtgattttggggggctactaaagggycttgttttgtcatattatcagagttggttttctggttccttctt

SEQ ID NO: 581067 - DNA, 608 bp, Homo sapiens
ctttttaagagtgctagttttgcttattttcttactgtggatgtgctgcagggtaacttgacaagttccctaaaccctccaatggggactgcaaaggttgttaggtgagaatcaatcattatccgtttcctcttaggaggtaggacaagtcagagccagggaaggtgcagttcagggatgctcacatgaggttttcaggtaggatccccaacgagtcaagggaaaataacccagygagcagaacacctcatgccaggctccatttttggtctggtggagggtgaccttctctccctgcctgctgaagtcctgccaaggttaggagaataaactgctcatgtgttacctttgtagtgtttgtggtggccaaaaagtctgattctatttccatttcttttttttcatccagagatatatcttcggatggtgggatcacaaatacaaaatgctccaggtcgtctgtcatggtcaaaggtggccgcttcaccgggtaggagacgattgagaataaggcgggaggcgggatgggtggtccggaggcacccagacccaagatgtctaggatctaaaggaaaggcccattgtgaatttcctgtgcaaaaccctat

SEQ ID NO: 581068 - DNA, 571 bp, Homo sapiens
aagagaaaatgtattatatttgtctctctttttactctttctgttctttcttcttttctgatacgccaagatttcttcttttattattaactttctgtttagagagstacctttagctctgttgttagggtatgcctgctgatagaaatttcttagttttccttcatctgagaatgccttgacttcccctctcatccttgaaggatttgctcactggatatagaattctgagctgacagttctttcatcccttgaaatatatgccactttcttctggcctccatggtctaatgagaaatccaatgtcatttgaattattttttttcctctgtagggaagatttcatctctctctcactgctttcaggaatttttctgtgtcttagtttacagaagtttgactataatgtgtcttggcataaatttctttggtttattgattttgggatttgctgagtttcttgaatctgttgatctttatcttctttccaacttggaaatttttcaggcattattcaagtacctttttcagcctcatgctctttctactctccttccagggctcaaatgac

SEQ ID NO: 581069 - DNA, 571 bp, Homo sapiens
aagagaaaatgtattatatttgtctctctttttactctttctgttctttcttcttttctgatacgccaagatttcttcttttattattaactttctgtttagagagctacctttagctctgttgttagggtatgcctgctgatagaaatttcttagttttccttcatctgagaatgccttgacttcccctctcatccttgaaggatttgctcactggatatagaattctgagctgacagttctttcatcccttgaaatatatgccactttcttctggcctccatggtctaatgagaaatccaatgtcatttgaattattttttttcctctgtagggragatttcatctctctctcactgctttcaggaatttttctgtgtcttagtttacagaagtttgactataatgtgtcttggcataaatttctttggtttattgattttgggatttgctgagtttcttgaatctgttgatctttatcttctttccaacttggaaatttttcaggcattattcaagtacctttttcagcctcatgctctttctactctccttccagggctcaaatgac

SEQ ID NO: 581070 - DNA, 596 bp, Homo sapiens
atgccttgacttcccctctcatccttgaaggatttgctcactggatatagaattctgagctgacagttctttcatcccttgaaatatatgccactttcttctggcctccatggtctaatgagaaatccaatgtcatttgaattattttttttcctctgtagggaagatttcatctctctctcactgctttcaggaatttttctgtgtcttagtttacagaagtttgactataatgtgtcttggcataaatttctttggtttattgattttgggatttgctgagtttcttgaatctgttgatctttatcttctttccaacttggaaatttttcaggcattattcaagtacctttttcagcctcatgctctttctactctccttccagggctcaaatgacactcatattttgttttgttacagttttacagttctttgaggctcttttcttttttttaagtctattttctctgttatccagagtaagtaatttctattattttatcttcaagttygctgattttcttctccatccatttcattctgcccacatattgagtttttattttggtaactatatttttacgttctaaaattt

SEQ ID NO: 581071 - DNA, 531 bp, Homo sapiens
tgatatctattcattttcttttgtcattcaagctgaagttttcctggttgttactatgatgaaggatttttagttaaaacctgggcgtttttggtattatgttatgagactctggaccttatttaaattttgttttaactggccttttctgaaatgacttgggcaaggagaagggggcactgccttcttactgccagatgcaggtaatagtctaggttccctccttggccttctttgacaaacagtaggaggagctcttcaytactgctgggcaggagtggtatttctggctctccgcaaggcctccattgataccttcctggctgggaggggcaggagtgccttgttactactctccacacggactccactgactctgcatggaaaaatagaggggtagccgtactacccaggaccactgggtaatgacaaaagttctgactcccactagacctcagctgacaccaccccagcagaggggaggaggggcatttctttaccaccagatggacgtggaagtccaggctccct

SEQ ID NO: 581072 - DNA, 600 bp, Homo sapiens
ctacctcttctgtagagaaagagttcaggatgacagtggaacattttgtcctcatttttttttctccctcaaatttgcattacatgttattcaagggaatcagaaatttctgtgaaagactcatatctcctgcccttttctctgagacataggaaaagcacaatagcagaaactgaagaatagatttcttaataattctatgaccttaatgagaacacaagggactgtggaaaaagcatcagagttgagccggggttccagtaacacttctaatactcacgactgtgtggcagttagcaagctccacaaccgagcttcagatttcattatctgtaactgtgagaaggcttgaccctcccagggtggttttgagaatgaaggttttatactgtctatgtcaaatggctggcatgcagaagtcaccaacaaagtggtaatctgtaggcaaataygtttattaaccacccactgtataagctgccttatactttgtggacctggcatgacagcaggggaatttaaaggaagaacacagcacagcataacctatgctccaaagacatctataagcttgagaaatggccagaataaaacaattca

SEQ ID NO: 581073 - DNA, 600 bp, Homo sapiens
ctacctcttctgtagagaaagagttcaggatgacagtggaacattttgtcctcatttttttttctccctcaaatttgcattacatgttattcaagggaatcagaaatttctgtgaaagactcatatctcctgcccttttctctgagacataggaaaagcacaatagcagaaactgaagaatagatttcttaataattctatgaccttaatgagaacacaagggactgtggaaaaagcatcagagttgagccggggttccagtaacacttctaatactcacgactgtgtggcagttagcaagctccacaaccgagcttcagatttcattatctgtaactgtgagaaggcttgaccctcccagggtggttttgagaatgaaggttttatactgtctatgtcaaatggctggcatgcagaagtcaccaacaaagtggtaatctgtaggcaaatacgtttattaaccacccactgtataagctgccttatactttgtggacctggcatgacagcaggggaatttaaaggaagaacacagcacrgcataacctatgctccaaagacatctataagcttgagaaatggccagaataaaacaattca

SEQ ID NO: 581074 - DNA, 607 bp, Homo sapiens
tgaccacaaaaaaatgagtaaatgagttgatggatgtattratcagcttgatttaatcatttcacattgtatacatatatcaaaacctcacattgtaccccataaatgtgtacaatgatttgtcaatttaaaataatatcaataaaaataataatatgaccatcaaatttgaatttaaaataaagatataatataaataatataaattaaactataaaagaatattaggttggtgcaaaagtaatttgcaattacctgtaatagcaaaaaccgcaattacttttgcacccacagaatataaactacaataggagagcatgagagggtgttcagggactgtctctataaggaggtgatatttgagctgagacctgaaggatgagtggaagccagccacatccccagtaagtgtttacagatcaaatgagtaaatctaacttaagaaaaaaaagtggtcctggcagtgtagtaattatcccaactcactggcatgaatacaaagagagaatataaagtgaaaaggagatgccttctcaaaggtcacgtcctggcgacactctgagcagccagtcttactgtgagctctctagctctgcgattctaactc

SEQ ID NO: 581075 - DNA, 535 bp, Homo sapiens
cagtaatacaagtagcttagctcagagagcagtgatttttgattagggcaggatggtggawggagggggtcctctggcaaccttaggaccataagctcaggaagctgcttctgtacagactagaaggcctctgccaacaaaggtgatggtgcagcagcccacacaatgatcattactgtcccatagtaaacatctacctgcctgctggatggactatgagcagaagagatatgaacaccattcctttaaacagtttattgcaattctgcaatttttgaaacattaatcccagttgatgggaaaatgttattctttgagcattcagtatttctaaatgggctgttttgagttattgtcccttaattaaatgaagttctcagaaaatgtactgttattgttatcatatatttttaccaataaggaaagaaaatggaccaagatgatactttctgaactcccttttaaattggcaagtgtaatggaatcgtagcataacactttcctaaggaattcccacaagcatatgcattgagct

SEQ ID NO: 581076 - DNA, 597 bp, Homo sapiens
gaaaaaaaaaaaaaaaaaaaaaagaattacctggagcttcagtatccagtctgcatagttaacaatattgttcactcatttgttcattcattcaacacctatcaatggggcacctcatctattctaggaactggggatatagaaaagaaaaaaattaacagaaatccctggctctgtatagaaagaaagtagacccaatctataaatatatagactgttagacaagttgctaaggagtaaaataaagcagagaaacacaaaataatattttgatatgtaaagattcatttttcagggaagttgccctgagaaagtcaactaaaaatgtaaggaaatggttaaagaaatcctgccaacacctggagaaagagcagttcagtagacagtgtgacatgtgccaaggtcctgaggcaggaacgtgtctggtgtgttaaaggaacaccagggagaacagttagaccaaggggagaaggaggagataagtctgagagtaggagagacagggagagactgtgttgaacattatagactccacttctacaaacgctttgactgtgtgtgtracatgggttgagaagaagaggctgatagacgttt

SEQ ID NO: 581077 - DNA, 550 bp, Homo sapiens
gaaaatgtatagcacaaaatattcacattaaaaatgaagaaaggtctcaaatcagtaacttaagttcctacctcaagaacctagaaagagatcaaaatgcactcaaagcaagaaggaaggaaataatgaagtgcagaaatcaattaaattgaaaatagaaaaacaacagggaagtccattgagacaaagagctggttcttttaaaaaaccaaaagttagtaaacttctaacasgactgacaaaaaaagagacaaatgcaaatcaccaataatagaaataaaatagggaatatcactacaaagtctgcagccactaagaagatattaaaggaatgtcataaagaggtttaaattcataaacttaacaacttacaagaaattaatcaccttctgataaaactaccaaacctcactcaatctgaatagctctgtatccattaaagtaattggatttataattataagccttctgacaaagacagtttcaggctctgatagtttcattaaataattctatcaacatttagaggtaagttgatatgaattatata

SEQ ID NO: 581078 - DNA, 509 bp, Homo sapiens
cttttcctcagtttatttcccagctgttctctctctctctttctctctctctctctctctctgattgtccatttctgaatcatttaagcttatatggtctctttatacggatatctgctttctctctctcaccccttctccttccctattgtgggaagtcagggaccccgaatggagggactggctggagccgcagcagaggaacataaattgtgaagattccatggacatttaccacttcccaaataatactcttataatttcttacgcctgtcttactttaatttcttaatcctgttatctgcataagctgaagatgtaygtcacctcaggaccactataattgtgttaactgtacaaattgattgtaaaacgtgtgtttgaacaatatgaaatcagtgcaccttgaaaaagaacagaataacagcgatttttagagaacaagggaaggcaaccataaggtctgactgcctgtggggtcaggcaaaaagagccatatttttcttctt

SEQ ID NO: 581079 - DNA, 555 bp, Homo sapiens
tgctcactgcagtcaccaaggcaccagccaattcacagcaaaaccccacaaaagagtttattcatgtttaaataaggcattaacgtggacttgagtttcaatagttctatgcttttcctctggagtatttctctcaatgtggccatctaatcaggtttaggttttaaatttattgaacagctgtcatttgcttgctggttctgtggcaacttgaagctttattaaattttaatttagccatataagtaaacttatttaaggtaacaaaataacagttgtagttaagcagagctttgctgaagtggtcattgtaaagcacaaagaaggagttagagaaaacgcttttataattgtgatttactgtcagggcttggacatgtaaatcaacagggtcacccagaatcaggagaagcaaagggcacaagaatgcagagaccacaggccaaaatgtaatctcttatgttcatcccccaacccccaacacacatacacacartcttcactgaaacagagggcaggctgatttcaaaaccaggcgttctcattcccagagcc

SEQ ID NO: 581080 - DNA, 645 bp, Homo sapiens
tgattattttaccacctttaaggaggtgtaaaacagcagcataaaatccttcacatcattgtcctcaattttgtgattcagggcttatcacccaacgaagcagaacaattccagggcagaagtctctgatggatgtgccacacgacagctggtttttgtgtgtgtgtgtgagatgggtcataaatattaatggtattgacagagtctaaaaaatttgtcatttcacatccctgccattgaagcacccggaattccacaactttgttgctctgactgacaaccacccctgtttctttcctgaattctcttagttgggtctatttttccctttcaccttcagaaattatacatcagcaaaggttttcccaaatagttgcaggtcaactgaaccaaacatcttaaggttttttccctttttcttttctacttagctgatgtcaacctgcattctgggatcaattcttttgggcatatatatatatatatatatatatwacttttttttttttgagagagggagttgggctctgtcaacccaggctggagtgcaatggcgtgatctcaactcactgcaacctctgcctcccgggttcaagtgatcctcccgcctcagcctcccgagtagctgggattaccgttgcatca

SEQ ID NO: 581081 - DNA, 603 bp, Homo sapiens
gttatatattctttaaatatagcaaataggactgtaaaaaatgcagccaatgtggaaatcagtttgatagtttcttaaaaatttaaacataaaattgttatgtgatccacgactccagttctaggtatayatgcaaaataactgaaaacaagttcagaaacaaacactcatgcatgaatagtcatagcagcactatttgtaatagctactgtagaaacaacctaaatgtctatcaaccagtgaatggaaaaatacaatatggtatatcatgcaacataatactatttacctacaaaaagaactgaatactgtacatgcaacaatgtggttcaaccttggaaatgctatgctatggaaaagaagacacagaaggtcacatagttttgatcttatttatatgaaatattctgaataggtaaatccatagagacagtaaactgatttgtggctgctagcagctccaagaagagaggaatggggagttaccgctgaatgggtagagttttcttttgggggtgatgacaatgttttcatactagataaaggtgggttgtgaaacaatcagaatgagctaaatgccaccaaaaagttaatattatgtta

SEQ ID NO: 581082 - DNA, 504 bp, Homo sapiens
aatgatttcttagctatgacaacaaacaatcaacaaaacaaaacactagataaactgcatatcatcaaattaaaaattctgtgcttaaaaaakacatcattgaagctaaagagagatcatgtgggatttttctttctgtgcctggcttatttcacttagcataatgtcctctaggttcatcaatgttgttacaaatattataatttcctttaaaaaatactaaatagtatctcattgtgtatatattgtactgtctttatccattcattcactgatgcacacttaggttgattccaaatctcactaatatgtgaaatctaaaaagttgaacccgtagaagttgagagtagcatggtagttactgggggctgggatggggagttggggagatgttggtcaacgggtaaaaaaatttggttaaacagaagtcatatgttcaagagatctattgtacaacatggcaactatagttaataacaatgtattgtattcgtgaaatcagag

SEQ ID NO: 581083 - DNA, 639 bp, Homo sapiens
caccctttgccagatgtggtggcatgtgcttgcgattccagctccttgggaggctgaagagggaggatcgcttgagcctaggagtttgagttcagcctgggcaatgtggcaagaccccatctctgaacagaataaataaataaataaatctctcctctttgatacggcccctttctgccaagttgtggcctctgtcaaagaagaatgctgatcagcactgtctgggacaacactcagcagttttaacccagaactcaatggccctggtagcttgaattaagcatttgactcacttattcaacaactattaactgaggcgagcattttcccaggtgctggaaacgtagatgtgtaaaactgaccgagacctcaggctcattgatttccccttctggtgaggaatattgatgattaatcctaaattttatacgatgataggcctataaagaacatagaacagggtaatgggatggaaagacarccacaggcgtgggagtggggggggctgggggttctatttagattcctctgacagttgaattgaacctgaatgaagaggaagagccagacacggggagatgtagagaaagtgtgtttctgacaagaagaagaatgaagtacaaagaagcggggatgcag

SEQ ID NO: 581084 - DNA, 631 bp, Homo sapiens
cattcattattaccaaaggagccaagaattgtggtgtttagagaaagactgtatctgcaggctgatgctactatggaccaaacaaatgacttgcctctgcaggtcctctccagagascctggtgtggagccccacaaggtagagacctcaatctcttgccctcgagattccaccctaagagaggcaaatccaagctcttggagagttggattccattatgcactgtacttaattgtctccattctacagaaacatactgaataccctctccccaacctgacagatacgtcactttggaaaacaggagttatgtgctgcatggtcactgttgtagctacctgaatatgggaatttcttgacagaaaactgaagcttgatctccaggagaacatactgagtttgcaaatcaccaaacatggaggctgcttcatcaccattctaggtccaggttctgttcaactcctggcctgtataaattgaggggacttaataaatcagatgtattgtagttttccaaggtgtactgcccatattaatgatgcatgttgccaggactcctcgaggaatggactcatcctcaaagatgtgctttccttagcgttgactttgtgatatgccaggtcattgagga

SEQ ID NO: 581085 - DNA, 537 bp, Homo sapiens
aagcttcccaggcacagaggacaaatctgtttcactcactactgcttccccagagcatagaacctggcctggcactcagtagggctcatggaawatatctattgatcagttcatgataaagaggaggaagcaaagttctttggcccttcaaagaagaatgtttgctggatccgggtggcagcccacagacgccaggagtgccctgcacatatatggggctgggaggacagcacgggtctccatcaccctctcttgggaccacctgtgtccgtgcacctcttttcatattcctgttgcctgtacattgcagccagagccctgaagctgtgcttcctccctgggctgggccgtggtaggtggggaatgggttgtatgagagtttttgctccacatctctcatctctctctattgccatctatacctggtaactgaaaaatggcatgcctttcctgggttagaagaagtaattaaaagtaatttttcattgctggttactgaacaggaagcctctaagtccattaatgaaacagagaggg

SEQ ID NO: 581086 - DNA, 610 bp, Homo sapiens
agttctaaatattttctgcctattatatatcatggattatatcacctccttttggctagtcaatgtaaaaccattaggtactatgtccataatatctaaaccaaaatggtgggaaaatataaattaataagtcttgaagtccagttttctgggtgttatgcatctgcctggattttctgccattttatgactgagatatccaaattatcaatcttgataaataacctgagccaaaaaaatgtgtataaaagcccttcccttcccacaggaatggaaagtttaaactccccctgagagaagcaccagcaagcctcttgagagggcacctggcttgaattccatggccactcagagggaagctcagaggctaaatgaaaaccacatgacctggaaaaaatgaaaatggccaaccaccatctccagggtcaagagttgctgtattagaggccagagaacaggaattaagaagcagctggcacaacaaagaactggygcttaagcacacaggtgggttgcctttgagagaaagcaagaaggaaactggaagaaacttccagaagacgatacctagcaaaccctagaaaacactatgcataccaagaaaaggaaa

SEQ ID NO: 581087 - DNA, 624 bp, Homo sapiens
  misc_feature 531, 532, 544, 574: n = A,T,C or G
atacctagcaaaccctagaaaacactatgcataccaagaaaaggaaaaatcgatttggtagctcttttgtattgcacactggcgaagttaaattcccagaatataagtatccttaaaatctaaccggaaagtgtgaaaaatagaaagcatcaatgcaaggagaaaaattgatttttttgtcttatttttacacttagacagtaagcatttttaattgaaattttcttaagataattatagctctacatgcaattttaagaaataattctgagacatccctcccatatgttttcccaatggtaacaycatataaaacttttagtaaatatctcatccaagataatgatactgatgcaacttgcaaatcttattcaggtttccccaatttttcttgaactcatttaagttctatacagtgttattgcctttgtaggtttaggtatccaacagcacagtggagataagaaacagtcccagcattacaggcatccttcatactccatcttataaccacacaaacattcccatttnnccctgtcatggnccatgggaaccactaatctacatatctaanattttgccatttcaataatggtatataagtaaaatatgctatggtagtaa

SEQ ID NO: 581088 - DNA, 569 bp, Homo sapiens
gctttttatatttcaacaggggaagttaaaaaggaaccacttttagcttactttaaggaaaaagaatgcagagccactgaattctttggttaagctttcagacagataatgttggtccgaatcctggttctatcttctatgtatttgatcttgggaaaaattacttaaatttccccaagcccagtttcctcatttgtaaaatgggaatgacaatgctgaggcgcggagctaccctttctagagatctgttctaatgacagtccatgaagcagaactgacactcatccaagaaatctttgaaagtgttttggagaacatctaggcttttagaggttcccaggccaattggtttttgtctttgctttaatttcttcttgtatttgacccatgtgcaaattttatggggcagtatatggtcctcaccatacactggttttacaggcagtattgaatggagtcatagakaagaaagatttggaggaagacaatgaagttaagttaaatttttccctctctattttattcttctctctttcatgtcttctgataataaactgttgtcaggtgga

SEQ ID NO: 581089 - DNA, 638 bp, Homo sapiens
tgactttgcacatgtattatttatagtactctaaaggatatgtaaacaacttttaccatggacactaccccagactgtgctgctgtattcgaacagtcacatgtgcagtcgtgttcactgtcatcctggggtgcacatggactggggctgtgcacccagaatttaactcctgaaaattcaactgtatgctttgagcccaaattcatgcacatatgtgagatgaatatatggatatatgtatataaattcatatataattaaatatattaattcatatatgatatatatcatgtatggtaaatatatgtaatatatagtatatataactaaataaaatattaattcacatatacataattcacagatacatataytagaaactatgactattatagtgggcagacaagtgaatggtggtaatgatgggtttaattacctcatcttttcaagaagaaagtaaggaatccattgagaacccgagaaaagccctacacttgggaagtgttagctgagccatggatgctaatacaacagcaacctctgtcattgtatattccctttccttcctctatttttttctttctgacccatctcactgcctgacattatatttcatatctatatgtgtgtttagtttg

SEQ ID NO: 581090 - DNA, 439 bp, Homo sapiens
  misc_feature 379: n = A,T,C or G
ctgacattaagtaaatacttatttaatgaatgaatgatttattcttagtttatagaaaaggtctctgaggcagagaaagcttaaattatctcaaaatgtattggactctgggcttggtctctaaatcctctaaatgaaagaaagaacaatgtgagagctggaaaatrtgggtaccctcaggttcacagatgtggaatatgagtcccagacattggagactgacttattcacacctgcggaggggatgggttgagataaggactcaggtttctgccacttccagttccatctccctagacttgaggactgattgtcaaactcatccctaactaatccatgcctagtgtttaatggcagaaagcacatcaaggttacctgngaccagagttagagagagctatgtactgaaaacaggcatggcatcttttgggggtgacag

SEQ ID NO: 581091 - DNA, 513 bp, Homo sapiens
cctgaaaccattacaaatcaggattcttttgatcacaagagaaaaaaatccatttattgtcctaatcaaaaaatagtaattcataagctcttgtaagtgaacatgccagagatagctttaagtatggatgaatctaaggagtcaaagatcgactgggaatttgttctcttcatctttcacccgtgcttccttagtgagggttttcctctcaggcaggttatcccttcacaggaagatggcagctggaagctcggttgttctgacaatagccttgggactgataatcactgggccctcataggccaagtgatgtgaaccaatcatggtggctagagagatggtatatgccagttgactagaaccatcaccagctaaacctcatggtccaagakccaggaagagatggtttcccaaaggaaaatcagagtgttatgaccagaagaattcataatcagcaggccagtgcaatggacatcattccatgtgttatgattgggaaaggaaaagcaagct

SEQ ID NO: 581092 - DNA, 476 bp, Homo sapiens
atagtcactgagtcatgcagccatttgaccaataacagcaatcaattcaaacctgagtcttgctcactcagtgccgttgttctaattctattcttctctggaagacaggggccttkctaggtattcaatacttactgtgttattgaattcttggaactctgtgatgcctgtgtataatcatccccatttcattgtctgtgcatgatctgtcaacactttatacccatcacctcctctatcttccctctgtgtgctctccatgctaccctggtcacacagagctccttgctgtttctttaagacaccaaataggcatccatttcaaggtcttgctaattgtggtttcccattcctggaatggatgtctccaaaataatagttttattcatttttgcacttcctttgggccttgctgaaatagcatcttatgcttccatgaaagacttctatgggcactctacgtaaaacagcatcac

SEQ ID NO: 581093 - DNA, 476 bp, Homo sapiens
atagtcactgagtcatgcagccatttgaccaataacagcaatcaattcaaacctgagtcttgctcactcagtgccgttgttctaattctattcttctctggaagacaggggcctttctaggtattcaatacttactgtgttattgaattcttggaactctgtgatgcctgtgtataatcatccccatttcattgtctgtgcatgatctgtcaacactttatacccatcrcctcctctatcttccctctgtgtgctctccatgctaccctggtcacacagagctccttgctgtttctttaagacaccaaataggcatccatttcaaggtcttgctaattgtggtttcccattcctggaatggatgtctccaaaataatagttttattcatttttgcacttcctttgggccttgctgaaatagcatcttatgcttccatgaaagacttctatgggcactctacgtaaaacagcatcac

SEQ ID NO: 581094 - DNA, 476 bp, Homo sapiens
atagtcactgagtcatgcagccatttgaccaataacagcaatcaattcaaacctgagtcttgctcactcagtgccgttgttctaattctattcttctctggaagacaggggcctttctaggtattcaatacttactgtgttattgaattcttggaactctgtgatgcctgtgtataatcatccccatttcattgtctgtgcatgatctgtcaacactttatacccatcacctcctctatcttccctctgtgtgctctccatgytaccctggtcacacagagctccttgctgtttctttaagacaccaaataggcatccatttcaaggtcttgctaattgtggtttcccattcctggaatggatgtctccaaaataatagttttattcatttttgcacttcctttgggccttgctgaaatagcatcttatgcttccatgaaagacttctatgggcactctacgtaaaacagcatcac

SEQ ID NO: 581095 - DNA, 592 bp, Homo sapiens
gttgggattctatgggctgatgagccctgtccacaagggccaccactgggaaaaggtagaatgaggcttgggattttagggtgcagtgatactcaccagatgccagtgctggtctcttacccctaaacttttccagtccaggaagcggtttgggatgtggcatcaggtctgtatcaytgagcaggctctcctggcctccttatcggtcaccacctctgcacctggtgtcctgaaactgagcctggctccaggcaaaccacccactcatgagctcccagcatctccctgtggtgggggaactttatgtactgcgacttgggtcattacatgaattgtgagcagggttcatttactttaaacacaggtgtttacaaaacaaatatctccaactgaacagacacacacacacacacacacacacacacacacacaaacacttcatgctgacagtaggttccacttccaagctaggaatcgttgctcaaagacttttaggcgtcagaactaaaagtcagatgggacaattggcctgagttttaactaaggaaaaacctcaaggatagatattgtatcttatctccaaataaggcca

SEQ ID NO: 581096 - DNA, 592 bp, Homo sapiens
gttgggattctatgggctgatgagccctgtccacaagggccaccactgggaaaaggtagaatgaggcttgggattttagggtgcagtgatactcaccagatgccagtgctggtctcttacccctaaacttttccagtccaggaagcggtttgggatgtggcatcaggtctgtatcactgagcaggctctcctggcctccttatcggtcaccacctctgcacctggtgtcctgaaactgagcctggctccaggcaaaccacccactcatgagctcccagcatctccctgtggtgggggaactttatgtactgcgacttgggtcattacatgaattgtgagcagggttcatttactttaaacacaggtgtttacaaaacaaatatctccaactgaacagacacacacacacacacacacacacacacacacacaaacacttcatgctgacagtaggttccacttccaagctaggaatygttgctcaaagacttttaggcgtcagaactaaaagtcagatgggacaattggcctgagttttaactaaggaaaaacctcaaggatagatattgtatcttatctccaaataaggcca

SEQ ID NO: 581097 - DNA, 599 bp, Homo sapiens
ctgctctaatattgcagccatcaaccagaagtggctatttaaattgaaatataaatttattacaatgacataaccaaatggtcccagctgagctcaagctgggtgtggatacatgggtgctatgattcctcaaatatcaattggtacaagttactttgcatggggaagaaaatttgtgttgaataagggtttctgaaccacgagagaactgaaagkgagtgcacacagaaccatcttccccactagaggacccctatttactttgatacctttagtgaaaagacaaataaaaagagaatttaagggttgagttttgaattgatgaagagatgcaggaacttagaaacttaggtgtccagttttctgtgaagcctccaccccaccaccatttcccatccacagcattccaggctaaaaagcctcttccctagtcacaggaattctccacgaatccatcgattaaatcacttcctacaagggatgcttggtcctgtaagatcaaattttcaatttctctttgggctgcgctgtgatttgtaaccagaactagggaactgcttccaacacctgccaggttctcagcattccgtagacctcag

SEQ ID NO: 581098 - DNA, 599 bp, Homo sapiens
ctgctctaatattgcagccatcaaccagaagtggctatttaaattgaaatataaatttattacaatgacataaccaaatggtcccagctgagctcaagctgggtgtggatacatgggtgctatgattcctcaaatatcaattggtacaagttactttgcatggggaagaaaatttgtgttgaataagggtttctgaaccacgagagaactgaaagtgagtgcacacagaaccatcttccccactagaggacccctatttactttgatacctttagtgaaaagacaaataaaaagagaatttaagggttgagttttgaattgatgaagagatgcaggaacttagaaacttaggtgtccagttttctgtgaagcctccaccccaccaccatktcccatccacagcattccaggctaaaaagcctcttccctagtcacaggaattctccacgaatccatcgattaaatcacttcctacaagggatgcttggtcctgtaagatcaaattttcaatttctctttgggctgcgctgtgatttgtaaccagaactagggaactgcttccaacacctgccaggttctcagcattccgtagacctcag

SEQ ID NO: 581099 - DNA, 599 bp, Homo sapiens
ctgctctaatattgcagccatcaaccagaagtggctatttaaattgaaatataaatttattacaatgacataaccaaatggtcccagctgagctcaagctgggtgtggatacatgggtgctatgattcctcaaatatcaattggtacaagttactttgcatggggaagaaaatttgtgttgaataagggtttctgaaccacgagagaactgaaagtgagtgcacacagaaccatcttccccactagaggacccctatttactttgatacctttagtgaaaagacaaataaaaagagaatttaagggttgagttttgaattgatgaagagatgcaggaacttagaaacttaggtgtccagttttctgtgaagcctccaccccaccaccatttcccatccacagcattccaggctaaaaagcctcttccctagtcacaggaattctccacgaatccatcgattaaatcacttcctacaagggatgcttggtcctgtaagatcaaattttcaatttctctttgggctgcrctgtgatttgtaaccagaactagggaactgcttccaacacctgccaggttctcagcattccgtagacctcag

SEQ ID NO: 581100 - DNA, 415 bp, Homo sapiens
gaattcagtatgaaaaccatgggctgaccaatcttaaactaaaccttgtatgctaatatcttcaaagccctctgatttaggtcattatcccatcttctctacttatgtagtcttcatctttcttaataacagctcycaggccagtccagcccacctctttggtaagcagccccaaagcacccttgacttcacttcacttcccaaataagcatcataattataatataataataataataattattattattatttttgagacagagtcttgctctgtcacccagcctggagtgcaatggcatgatctcggctcgcgggttcaagcagttctcctgcctcagcctcctgagtagctgagattacaggtgcctgccaccacgcctggctaatgtttgtatttttagtaaagatgggg

SEQ ID NO: 581101 - DNA, 561 bp, Homo sapiens
tcctcaatcatgaaaatgtgtcagttcaatgggaagtaaaatgggcttttaaataaagagggctagataaactcgtgcatcacaaacaaaatacatgcctgcttccaaatggagaagtaactgaaaatgtccaggcaattggactagctttcttttcatgtctccaccatttgtctttggaacctgagtcatttctatgtcagcttgcccaggtggcctggagaacataagggttgccagccaggacactaactctttaaaggtctgtttatgtctgcataactaacagtgcttatgtgtactcaggaggaaatgccaagctaacaaggaagaccacgagtccacaaaattttaatttctagttttaggagaaattaacttccacattcatgtttttgtattatgaatttgcatgacaactttaaagtctgccatggtatttatggtaatttcattacaaaccacattttcatcttttaatttctttcctatttataattatacagctataattaaaaggtattacaatgacacgmtatcctcactaaaagcctggcctgc

SEQ ID NO: 581102 - DNA, 545 bp, Homo sapiens
tttttaatttctaatttttgtgggcacgtagtaggtgcatatatttatggrgtacatgagacactttgatacaggcatgcaatgcataataatcatatcagggtaaatggggtattcctccccaaatgtttatcctttgtgttacagacaatccaattatacttttaaatttatttctaaatgtacaattaaattactattgactatagtcaccctgttgtgctatcaaatactaggtcttattcattctttctaactactttttgtacccactaactatctcttcttccctatcaactactcttcccagcctctggaaaccatccttctactgtctatctctatcagttcaattgttttaattttcagctcccacaattaagtgagaacattcaaagtttgtctttccatgcctggcttatttcacttaatataatgacctccatttccatccacaaataagctcccacaaataagtgagaacattcaaagtttgtctttccgtgcctggcttatttcacttaacgtaatgacctccatttcca

SEQ ID NO: 581103 - DNA, 545 bp, Homo sapiens
tttttaatttctaatttttgtgggcacgtagtaggtgcatatatttatggggtacatgagacactttgatacaggcatgcaatgcataataatcatatcrgggtaaatggggtattcctccccaaatgtttatcctttgtgttacagacaatccaattatacttttaaatttatttctaaatgtacaattaaattactattgactatagtcaccctgttgtgctatcaaatactaggtcttattcattctttctaactactttttgtacccactaactatctcttcttccctatcaactactcttcccagcctctggaaaccatccttctactgtctatctctatcagttcaattgttttaattttcagctcccacaattaagtgagaacattcaaagtttgtctttccatgcctggcttatttcacttaatataatgacctccatttccatccacaaataagctcccacaaataagtgagaacattcaaagtttgtctttccgtgcctggcttatttcacttaacgtaatgacctccatttcca

SEQ ID NO: 581104 - DNA, 545 bp, Homo sapiens
tttttaatttctaatttttgtgggcacgtagtaggtgcatatatttatggggtacatgagacactttgatacaggcatgcaatgcataataatcatatcagggtaaatggggtattcctccccaaatgtttatcctttgtgttacagacaatccaattatacttttaaatttatttctaaatgtacaattaaattactattgactatagtcaccctgttgtgctatcaaatactaggtcttattcattctttctaactactttttgtacccactaactatctctwcttccctatcaactactcttcccagcctctggaaaccatccttctactgtctatctctatcagttcaattgttttaattttcagctcccacaattaagtgagaacattcaaagtttgtctttccatgcctggcttatttcacttaatataatgacctccatttccatccacaaataagctcccacaaataagtgagaacattcaaagtttgtctttccgtgcctggcttatttcacttaacgtaatgacctccatttcca

SEQ ID NO: 581105 - DNA, 545 bp, Homo sapiens
tttttaatttctaatttttgtgggcacgtagtaggtgcatatatttatggggtacatgagacactttgatacaggcatgcaatgcataataatcatatcagggtaaatggggtattcctccccaaatgtttatcctttgtgttacagacaatccaattatacttttaaatttatttctaaatgtacaattaaattactattgactatagtcaccctgttgtgctatcaaatactaggtcttattcattctttctaactactttttgtacccactaactatctcttcttccctatcaactactcttcccagcctctggaaaccatccttctactgtctatctcyatcagttcaattgttttaattttcagctcccacaattaagtgagaacattcaaagtttgtctttccatgcctggcttatttcacttaatataatgacctccatttccatccacaaataagctcccacaaataagtgagaacattcaaagtttgtctttccgtgcctggcttatttcacttaacgtaatgacctccatttcca

SEQ ID NO: 581106 - DNA, 556 bp, Homo sapiens
gtcttctctacctggcctcgtccgagctcaggtgccctccctcttctgaatgctgatctctttcttatgtgtcgttcacatggtccttaagcacaggatgcctttgaacgcccttctcctgaactttcccttacaccttatattgttataatgttccatgagatggaatttgttgatgcaatgaggcggtgaattcagatttcccatatttgtgtgttctcagcagtgtgtgttacatagtaggccctcatgaaatgttggtggcctggttgatttggagttagccaacacataaacaygaactgaaatgctttcaggtccaagtgggctttaggttcctgcctgcacatgctggccccctttcaaaggggtgaagagagagccgcagcgatgatgggagagaggggatcactgaggactagggattaacagggtaacacagagctggtgttaaaaacctggcagtgcaggtttttgttctcctgtgtagtgggaaaaaggtgcacaggcagtgaagagggagaggggcactcccaggcagagcaaggttaggata

SEQ ID NO: 581107 - DNA, 465 bp, Homo sapiens
ctctcctgcatcacttccttattttttttctttttttgagacagagtcttgttctgtcgcccaggctggggtgcagtggcgcaatcttggctcactgcaacctctgcctcctgggttcaagcgattctcctacctcagcctcccaagtagctgggactacaggcgcacaccaccatgcccggctaatttttgtayatttagtagagatggggtttcgccatgttgatcaggctggtctcgaactcctgagcttaagtgatctgcctgccttggcctcccgaagtgccgggattacaggcatgaaccaccacgccaggcctggcttctctcttgcaaaccacatcaggaactggccactgctctccctcccggtgctgtaagcaggcagctgtccagtcctgttcaaggcacttcctggcctccgagggcttcccaggctccatcccaacccctcagcttgacatc

SEQ ID NO: 581108 - DNA, 525 bp, Homo sapiens
gctgaaacattaattcaaccacttttctcttagagcaattacagttattccactgtctttccacagttacagtgaattctctaataatcatcactgcacatataaatttgtcctccttttaactatgctggacaaatgtctgggaggaaatgcccatcaatcaagtggataaaggaaatgtagtatatatgttctatggaatactactcagttgtaaaaaggaataaaataatggcattcacagcaacctgtggtggaattggagactattattctaagtgaagtaactcaagaatggaaaaccaaacattgtatgttctcactcatatgtgggacctaaactgtgaggacacaaaggcataagaatgatacattggactttgagaacttgggggaaagggtggaggtggcaagggataaaagactacacrttgggtacagtgtacactgctcaggtgatgggtgcaccaaaatctcagatagcaccactaaagaacttattcatgtagccaaatgccacctgtt

SEQ ID NO: 581109 - DNA, 376 bp, Homo sapiens
ccgccttggcctcccaaagtgttgggattacaggcgggagccactgcgcccggccaacatctccttttaatacattcaggtgcatcaaggatcttattggttccatctatcgaagaggtgcctcctcctgctcctacctggacagattgctgtcctgctgcatggttgcaggaaagctgtcagattcaaaacaaagtcacttgtgtcaaactctggaaaaatggagctgggaaaggccatgaagagagggctctcacacaccgttggcctaaaaattggaaacatcacaagcaacttttccaaatcgcagtttactacrtgagttacacaaggactgatagcaggacaaggacagctagctgcttatacaagaatt

SEQ ID NO: 581110 - DNA, 602 bp, Homo sapiens
agggctccttatgtgcactagggcccgaggagatagcctcttgggaccccctctcagctttgctagtccctggtgggaggaccactggctgaacaggaagtccatttcccagtgtcattgccctacctaggggttagacaagctgaaaaagaagagttcttggagcaatacgagaaaacaacaaaccaaatatttgttagactttctgaagtactgctttattccagaagttcaaaattaacatattcaagatactcaagacaaaagaaaggtaaccaggaacttcatatgtagccacactaatctcccatacgaaggctgcagacaaactgtcccaagcactcaagaactcggggaacactgttcccaagaactcttactgagaaacgagcttcagacaactgaaagaactagasaatcataaccatggggctggtgatgaccattaaataggcgtctactagtcaaaaaaaaaaaaaatacaattggctctttgtatccatgggttctacatctgtggattcaaccaactatgggtcaaaaatagtcagaaaaaatatttttgtctgtactgaataagtacagacttttttcttgtcatt

SEQ ID NO: 581111 - DNA, 602 bp, Homo sapiens
agggctccttatgtgcactagggcccgaggagatagcctcttgggaccccctctcagctttgctagtccctggtgggaggaccactggctgaacaggaagtccatttcccagtgtcattgccctacctaggggttagacaagctgaaaaagaagagttcttggagcaatacgagaaaacaacaaaccaaatatttgttagactttctgaagtactgctttattccagaagttcaaaattaacatattcaagatactcaagacaaaagaaaggtaaccaggaacttcatatgtagccacactaatctcccatacgaaggctgcagacaaactgtcccaagcactcaagaactcggggaacactgttcccaagaactcttactgagaaacgagcttcagacaactgaaagaactagacaatcataaccatggggctggtgatgaccattaaataggygtctactagtcaaaaaaaaaaaaaatacaattggctctttgtatccatgggttctacatctgtggattcaaccaactatgggtcaaaaatagtcagaaaaaatatttttgtctgtactgaataagtacagacttttttcttgtcatt

SEQ ID NO: 581112 - DNA, 520 bp, Homo sapiens
atatgaatacctcatcattcccattagaatatctaataccacgaagattgataacagagagtagagatgaggaggtggaatagttggaattttcatcaattgctgatgataatataaaatactcaaccacctttggaaaagtgtttggcatttttttttatatagttaaacatgtacctactcgatgacccagcaattctactctttgttatttacccaggagaaatgaaaacatattatacaaaacaaatgtgtataagaatagaagttttatttataatacgccaatcacttgaaagaaccaaaaggactttcaacaggkaatggattaactcattcacacaatggaatattattcagcaacaaaaagagtaaaccagtgatttacacaacagcatggatgagtctctaaaaagtttgtacacacgaaaaaaagaaaaaaataaggaaaaaggcaaaccccaaaatgaagtaatatataattccatttacataaacatcaaaaccacagaaaactaat

SEQ ID NO: 581113 - DNA, 529 bp, Homo sapiens
atgtgttgttttgtctttttaaaatgacagacactttaactggggtgagataataaaaccattgtggttttgaattgcattttcttgattagtgatggtaagcagtttttcctaaactcattggccatttgtacatcttcttttgcaaaatgtctatccaggtcttttgcccatttttaaattagattattattattttttcctgttgagttgtytgagttccttatgtattctggttgttaatcccttgctggatgaataattttcaagtatcttttctcattctgtgtgttgtctcttcactttgtaattgtttcctttgctgtgcagaagctttttcgcttgatgtaatctcatttgtctcttttgcttttgttgcctgtgcttttgaggtcttacccaaaaaaaatctcttcccagactaatgtcctgtagtgtttccccaatgttttcttatggtgattttatagttccaggtcttaaatttaagtctttaattcattttgagttgatttttgtatatggtaaa

SEQ ID NO: 581114 - DNA, 583 bp, Homo sapiens
tggatgtagaacttatggatatggagggctgactgtactcatacaactttgagtaacaaactctttgggggaaaagagggaagtgtattgagcaagagaaggaaagaaacattatatactatttttattctgttacatgtgtctgtagattgtttgattgtaatcaagaccttagaagaaatgattctgtgactggtttagaattctggggtggaaacatcccggaaccatgttatttaataaattctgtcttctggaaagggttacaamctgggaaagagtttttattccaaaagtcagcctgttacttggtgaagctgaagtttaagagttctagggaaaaataaaatcaaataattctaaaaaaaaatataccagctctttataccacacatttaattaatattatagaattccttatgggaaagaatatctaatcattttctttttaaatgagagggcaactcagtctagttatatgtccctatgatcattgaaatatgacagaatatatgattttattttcagctaaatgcttctgcacaaatggatttttaaaatcaacaactgtattacatttaat

SEQ ID NO: 581115 - DNA, 618 bp, Homo sapiens
tacttcagcactccactgaaagcactaaacaaatcatcaaggcagaaagtcaacaaagaaataatgaacttaaattgcactctagaacaaatggatctaacagatatttagagaacactccatccaagaattgcagaatatgcattcttctcatcagcacacaaaacattccccaagctcatagtgtagtttagatatttacccagcatcactgacccgcttattcaatttgccattgcctcttggtatgcttcttcttatttatatwtttttttttacttaggttgaaattgaagatacatatgctactcttcgccaacatcctagcctagtgcactgcaacctcaagaaagagatttgatttacaataccatattattaactatagtcaccccactgtgcaacagaacaccagaacttattctaattgtaatttggaatatctctgcatagctagaagacagaaatttgaatgttcccaccacacacacaaaaataaatgtttgaggtgattaatatgctaattactctgatttgatcattacacaatgtatacatgtatcaacacatcacattgtaccctataaatatgtataattttcaattaaaatttttaaa

SEQ ID NO: 581116 - DNA, 598 bp, Homo sapiens
ttgaacttcaacactgtcaaaaaaaatcttgttttgacttgtagagtggtcatatttgctatgtaagacagagatggagagaaaataagaaacagcagaatgacatcttgagaagtccttttttgaccaagaccacagggcaaaaacgtttagagtataactgtaaaattgttttaacattgattcttagcaggaaaaaaaattaaaatgtaattgcgctcacatgttttctttttttgtgttgaatttgttttgttcttatgaaaatgartctgattcaagagaggcctgcagctgaaatccctacctggggactctcagtcacactgatgagcacaggttgtagctccagcctccaaataaatcaggtacaagcaaatcactccactactgtcaatgctctggatatttccttatttgctgtactttccgagcacttgaaatcatcccttaactttagtctcaaaggcctgaaatataaagatgtctgtattagattccaattgctgccttagcaaactgctacaaactcagtgacataaacctatacaaatttaaaatcttgcaattctgaaggtcagaagttaaaaatgaattt

SEQ ID NO: 581117 - DNA, 590 bp, Homo sapiens
acaaggtattattaaagataactcagattttacttgaacaattgctcatactaattaatgaaaaataattttttttttggccaaggaaagcattctacagtacttatgaaattctgaaaaaccctaccacctttctttgcttcttcaaatccgttcattagttcctataacctacgtaataataaaggcttggaagtacaaatatgaatcacatctctaggtaatcagggctaaaaaagatcctccaacactacagaaaaattatgtttcagttcattattatattgctttttgcttaacttaaraaattatatattgtttttgttaaaaaaaaaaaaagaatatttgtcctggcatttaaaaaagtgatacttaatatggatatagttattaattgatatccattaaaagatacctagacaggggttagcaaacctttttttataaaggactggatagcaagtgttttggctttatgggcatttactttctgttgcagatactcaattctgccactgtagtgtgaaggcatccacagacaaaatggaaacaaatgactggctgtgttcctataaaactttatttgtaaa

SEQ ID NO: 581118 - DNA, 489 bp, Homo sapiens
atggaatattagggtaaccataaggaagaatgaagaaggatctctaagtgttaatatggagtcagtttcggtatgtagtaataaataaaaagcaggtagcagaacactgtatgtagtatgccaccctctctgcaagaaagcagggggaataaatttagatagatgcttttgcttatttttgcaaacagaaggataaaccagaagctaataaaagtggttagctgtagaggatgtgcagaagaaattggatagagtaaagagaagtttaagtaaaacttgtgatttcacatttttatatagtttgatttttaaaaaagtcaggttctcttttatttcaagtggaacatatttatttcttaaaggattgaatttttagtaattttttaatggtaaaatacaaaaacataaaatttaccattttggccatttttaagttyatagttcaggggcattaagtacattcacattgctgtgcaaccaccaccacca

SEQ ID NO: 581119 - DNA, 447 bp, Homo sapiens
gcaatttcacacaaaagccaagtgttttgggaatcataaagatcagtttctgtaaacctgtatagctcttaacacagcagtcaattccaagcaagggagtagaggctgggaaaatagaaaatagtcagaaaagactgcttttttaatagataaagggaaactatccacacaaggaaatgctactatcaaattggtgccaaataggaatatacaataaagaaattatttgaataatctgactaatagtatctctaagagctcttcctgacacactgtgaagagttaccattgaacaggaatcgtctataggaatgttacagrtgtcacaggagaggattgatagaattgaatctaaggaaatacacaaaaacatctagactgttactcaagccaaaactttggggatatgattaattttcaatccagatttaaggtaaattatctgac

SEQ ID NO: 581120 - DNA, 447 bp, Homo sapiens
gcaatttcacacaaaagccaagtgttttgggaatcataaagatcagtttctgtaaacctgtatagctcttaacacagcagtcaattccaagcaagggagtagaggctgggaaaatagaaaatagtcagaaaagactgcttttttaatagataaagggaaactatccacacaaggaaatgctactatcaaattggtgccaaataggaatatacaataaagaaattatttgaataatctgactaatagtatctctaagagctcttcctgacacactgtgaagagttaccattgaacaggaatcgtctataggaatgttacaggtgtcacaggagaggattgatagaattgaatctaaggaaatacacaaaaacatctagactgttactcaagccaaaactttggggayatgattaattttcaatccagatttaaggtaaattatctgac

SEQ ID NO: 581121 - DNA, 592 bp, Homo sapiens
gttacaaatggtataattttcagaatgttgtattaacatttaaaaataagactgttagagtgctctttaaatgcatccacagaattctaagtaccaccaggatttgctacctgaaatttgtatttttaaaaaaagtggaaagtgtgtgtatgagagctcttttttcaatagcatgagattttatatcattcctttttctcattaatattttcatcttccccccaaatttttcatgatgtaaagtatttttatacttgaaaaaccttttattgattacctgtaatacttctctgcaataggaacacacatgtctataagtttatattatataaatgtatttatattctaaaaaaattatggtcatgaggttttcttctacatttgcaactattgcaataattcacatttcttattacaattcacaattcatcaaaacatttcaaattttgatattaaaatttaataaaatattttattaaaatgaattttttgatgtggtgtaagagctgggtagttttttcctcctaccttgctcatgtatgamaacatcaattcttgccattattaaatcagaaaatatctaagtttattt

SEQ ID NO: 581122 - DNA, 504 bp, Homo sapiens
tttcttatttttgttcctctgactgggttacttaaaatgacctgtattcaagttcacagattctttattctgcttaatttcattcatgatcacaacactctataaaacctttaatttattcattttgttcttcagtttcagaatgcctgcttggttcttttttatagtttctctttattcagctgctgattttgtttgtgtattattttcctgatttagtttaattgtcaaagtttttctgtagttcactgagcttccttaagataattattgtgaatttttgtcaggtggtttgtagatctccatttctgttgtgtgtgtgtgtgtgtgtgtgtgtgtgtgtgtgtgtgtgtgtctgtgttttcctttggtagtgttatgtttctctgattagttttgactcctgtgactttgtcatggtgtctccacactcaargtaatggacacctcttgaagtcttcactgactggttttggtaggaaaagtccttcaccaatcagcctg

SEQ ID NO: 581123 - DNA, 504 bp, Homo sapiens
tttcttatttttgttcctctgactgggttacttaaaatgacctgtattcaagttcacagattctttattctgcttaatttcattcatgatcacaacactctataaaacctttaatttattcattttgttcttcagtttcagaatgcctgcttggttcttttttatagtttctctttattcagctgctgattttgtttgtgtattattttcctgatttagtttaattgtcaaagtttttctgtagttcactgagcttccttaagataattattgtgaatttttgtcaggtggtttgtagatctccatttctgttgtgtgtgtgtgtgtgtgtgtgtgtgtgtgtgtgtgtgtgtgtctgtgttttcctttggtagtgttatgtttctctgattagttttgactcctgtgactttgtcatggtgtctccacactcaaggtaatggacacctcttgaagtcttcactgactggttttggtargaaaagtccttcaccaatcagcctg

SEQ ID NO: 581124 - DNA, 597 bp, Homo sapiens
acaggcatgagcgaccacgcccagctaatttttttgtatttttagtagagacagggtttcgccatgttggccaggctggtctcgaaatcctggcctcaagtgatcggtctgcctcggcctcccaaagtgctgggattacaggcataagccaccatgcctggccttgaaatatatttttaattcatcttaaatttgtttttcccttcagagggaagatctaattatatattttccacatgaaagccaaaaaagccctaaatatgaaaaattactggaagaaagatatagaggatgtagagaattttcttaaaacaaaacagcaaaggcagttaaaatgaatgactccatggacatggccagatctcaaaaggaaaaaataagcagcataaaaagcaagacgtgatacattaatactatttatgtcaactaaaatacacataaaaatgcacatgcttatctataaacagtacatagcatttaaacatcaaaacttagactggaaggatatgcactaaactggaatggaatggagctggggtttcccagggttaaaggggacttctgttataattttkttgttgttgttgtttaaacaaa

SEQ ID NO: 581125 - DNA, 199 bp, Homo sapiens
ccaccacacctggcctgaaattgaagtaattttaactgagataccacacaagtaaaatatacttcatgttaccgatgtccaaatgttcgytgattttgttgttgttgttgttgttgtttttgagatggggtctcaccctgttgcagaggctggagtgcagtggtaaccctgacctccccaggctcaggtgatcctccca

SEQ ID NO: 581126 - DNA, 369 bp, Homo sapiens
gattccttgttcccacagaaatagataagctgtagcttttagaagttcttgataagaaattcaaattatattttctatggaacataaggtaaccctgactacatgtgaaactagtttgtgtaagctttaacagacagatgaccactttagcgcaaactgtgatgaaaggaagattgcaaatagcacatcaaagtttcaaatccctgtgtctgaagcagggttccgtgttatcttccaattctgatctactcatgtctgcaaagttcacatatgagttttttgtgtttgcatttcttaaagaaatactactcaaaaatgagaaccaaataattaatgagagtgaaactttwaccctcctggcacccagac

SEQ ID NO: 581127 - DNA, 608 bp, Homo sapiens
aataatgaaataaaaaacataaatagaaaaaaatgaattttgttgaatctttcagcagaatccagaaagatgttcattttttttttctcattttaacctggtaacctggtagcttgcagtggtcgatttctgatgttgaaccaccttcttgcattcctgaaatatgtcccaacatcatgatatattaaagtttgtatcccttgcttgaactactttgtattttacagagtaaaatacattttccctatgagggaaaaatggtttcctgggccaggtccagggaccccttgctgtgtgcagcctagggacttggtgcccagtgtcccagccactccagctgtagctgaaaggggccaatgtaaggctggggctgtggcttcagaggakgcaagccccaagcctttgcagcttccacatggtgttggtcctgcaggtgcacacatatcaagaattgaggtttgggaacctttgtctagatttcagaggatgtatggaaacacctggatgtccaggcagaggtctgtttcaggggcggagccctcatagagaacctctgctagggcagtgcagaagggaaatgtgggattggagacccaacaccacatccc

SEQ ID NO: 581128 - DNA, 553 bp, Homo sapiens
gggtttttgccatgttgcccaagctggtcttaaactcttgagctcaagtgaaccacctgtctcggcctcccaaaatgctgtgattgcagacatgagccactgcacctggtctgaattcattttcttggagcatactggaaaacttcttcattgtgcagttaattcttctgttttaaaaatgtgcacagaaaggcataattaataaatttttatataaaaatatttttgacatatgtaccaaatatattccaaaaactaattacatctgattaaatttaactacccatttaatacaaaaaccctatttttagtaccttatgtagtttagaggatgaaataaatgattttaaacaccatagattatttattattrtacattttaatattgaggtggtttcttttattaaaaataagacatgtagttagtagactatttacagtattaaaactaagaccaacgttattctagtaaagacatactttaaagagttaaactggccgggagtggtggctcacgcctgtaatcccagcactttgggaggccgagtcgggc

SEQ ID NO: 581129 - DNA, 553 bp, Homo sapiens
gggtttttgccatgttgcccaagctggtcttaaactcttgagctcaagtgaaccacctgtctcggcctcccaaaatgctgtgattgcagacatgagccactgcacctggtctgaattcattttcttggagcatactggaaaacttcttcattgtgcagttaattcttctgttttaaaaatgtgcacagaaaggcataattaataaatttttatataaaaatatttttgacatatgtaccaaatatattccaaaaactaattacatctgattaaatttaactacccatttaatacaaaaaccctatttttagtaccttatgtagtttagaggatgaaataaatgattttaaacaccatagattatttattattatacattttaatattgaggtggtttcttttattaaaaataagacatgtagttagtagactatttacagtattaaaactaagaccaaygttattctagtaaagacatactttaaagagttaaactggccgggagtggtggctcacgcctgtaatcccagcactttgggaggccgagtcgggc

SEQ ID NO: 581130 - DNA, 467 bp, Homo sapiens
ctagttgacaaggtgtggactcgtgatggttattactgagtgtgaacttgattggattgaaggatgcaaagtagtgatcctggatgtgcctgtgayggtgctgccaaaggagattaacatttgagtcagtgggctgagaaaggtagacccatctttaatctgggtgagcacaatcagatcaactgctagagcagctagaatataaagcagggagagaaatgtgaaagactagactggcctagcctgccagcctacatctttctcccatgctggatgctttctgctctcgaacatcggactccaggttcttcagttttgggacttggattggctctcattgctcctcagcttgcagacgacctattatgggaccttgtgatcatgtgagttaaaacttaataaactcccctttctatctatttatctatctgtctgtctatctatctatctatctatctatctatcta

SEQ ID NO: 581131 - DNA, 467 bp, Homo sapiens
ctagttgacaaggtgtggactcgtgatggttattactgagtgtgaacttgattggattgaaggatgcaaagtagtgatcctggatgtgcctgtgacggtgctgccaaaggagattaacatttgagtcagtgggctgagaaaggtagacccatctttaatctgggtgagcacaatcagatcaactgctagagcagctagaatataaagcagggagagaaatgtgaaagactagactggcctagcctgccagcctacatctttctcccatgctggatgctttctgctctcgaacatcggactccaggttcttcagttttgggacttggattggctctcattgctcctcagcttgcagacgacctattatgggaccttgtgatcatgtgagttaaaacttaataaactcccctttctatctatttatctatctgtctrtctatctatctatctatctatctatctatcta

SEQ ID NO: 581132 - DNA, 429 bp, Homo sapiens
gctgttcaatttccatgtagttgtgtggttttgagtgagtttcttgatctttcattctaatttgattgcactgtggtctgagagactctttgttatgatttcagttttttgcatttgctgaggagcaatttacttccaattattgaatcaatttgagagtaaatgctacatggtgccaagaagaatgtatattttgtttcttttgggtagagagttctgtagatatctatcmgttccacttgatccagagaagagttcaagcctaaatatttttttaaaattttttccaatgatctgtctaatactgacagtggggagttaaagtctgggagactaagtctctttgtaggtctctaagaacttgtttcatggatcagggtgttcctgtattgggtgcatatatatttaggatagttaactcttcttgtt

SEQ ID NO: 581133 - DNA, 518 bp, Homo sapiens
agagatatttaccgaagggattctttattaaatgttcttgrtaaatatgtggaattatttctagatcaaatattagctggttcctaatgagattgtttctgatttggggaaaagcgattccaaaggctgaattccttgagggcagagacctcccatgtcattgtggtgttatgcacgtcattcagcacaacatccagcatgctaaactgggatgcaggaaaaattctctgattggaggttcaagctgatgtggaaagtaaggccatttatttgcttattggaatgcaatattattggatatctataacgatctgattgtaaatatgtgtgtgtgttttctttctctgtgcatttattttgtcccacattttgtgtaaggtctctaatgtgtaagccatgggtgtttgcatcagtgctgtccctgctagagacaccacttcattcagaacctgtttgtctgtgcacagcttggctggggtcctgcacagattctgtattcaggccggtgcgggcaaacc

SEQ ID NO: 581134 - DNA, 506 bp, Homo sapiens
gggtttcaccatgttagccaggatggtctcgatctcctgacctcgtgatccgcccgcctcggcctcccaaagtgctgggattacaggcgagagacaccgcacccgtccctgaagttttacctcatgctagaaaagcagccttccacggtgggygcctctagggtagagcacgagttctgcctgggtcaccattcagcacttgcaggtgcctgtttccttctctcttacactgactgagactttatctcaaagactttacaggagattgcgtcaaatatggaagccaagaaataaggaaagacctcaggagtacaacctgtaaagggcaataagcatttagagctgtactgtgtagaaaccatggaaaagcatatatgacaagagagtcaatttattcctgaagaaggtgattaaggcatgtgtgggaaaaacaaaatgatgacatttagataaactgttaccgggaagtcgtactgcaccagatggcatattctttaagactgctc

SEQ ID NO: 581135 - DNA, 506 bp, Homo sapiens
gggtttcaccatgttagccaggatggtctcgatctcctgacctcgtgatccgcccgcctcggcctcccaaagtgctgggattacaggcgagagacaccgcacccgtccctgaagttttacctcatgctagaaaagcagccttccacggtgggtgcctctagggtagagcaygagttctgcctgggtcaccattcagcacttgcaggtgcctgtttccttctctcttacactgactgagactttatctcaaagactttacaggagattgcgtcaaatatggaagccaagaaataaggaaagacctcaggagtacaacctgtaaagggcaataagcatttagagctgtactgtgtagaaaccatggaaaagcatatatgacaagagagtcaatttattcctgaagaaggtgattaaggcatgtgtgggaaaaacaaaatgatgacatttagataaactgttaccgggaagtcgtactgcaccagatggcatattctttaagactgctc

SEQ ID NO: 581136 - DNA, 506 bp, Homo sapiens
gggtttcaccatgttagccaggatggtctcgatctcctgacctcgtgatccgcccgcctcggcctcccaaagtgctgggattacaggcgagagacaccgcacccgtccctgaagttttacctcatgctagaaaagcagccttccacggtgggtgcctctagggtagagcacgagttctgcctgggtcaccattcagcacttgcaggtgcctgtttccttctctcttacactgactgagactttatctcaaagactttacaggagattgcgtcaaatatggaagccaagaaataaggaaagacctcaggagtacaacctrtaaagggcaataagcatttagagctgtactgtgtagaaaccatggaaaagcatatatgacaagagagtcaatttattcctgaagaaggtgattaaggcatgtgtgggaaaaacaaaatgatgacatttagataaactgttaccgggaagtcgtactgcaccagatggcatattctttaagactgctc

SEQ ID NO: 581137 - DNA, 596 bp, Homo sapiens
tgctcagtcattgattgaaggcgctgaaaatgcaaatggtgctgggcccatggttcccagtgagctgatttttaagttactgaaccaactaggatacaagttaaaattatatatttaaatgctccagatagatttgaaatatagagcagtcattttcatgcaagattttagaggtcgccatccctttttcccatgcatgctctgttttcttacagtctttcatcatgttttcccctgccctggtgcctcaagcatcctcttcctttatctctgttgtgtggcttgtcctttaggttatttcttttgcttgttttttgtttgttttaagacagagtcttgctctgtcacccaggctggagtgcaatggcacgatctcagctcactgcaacctccgcctcccgggttcaagcagttctcctgcctcagcctcctgggtagtggggattacaggtgtgtgccaccacatctgctatttttgtatttttagtagagacggggtttcaccatastggccaggctggtctcgaactcctgacctcaggtgatccgcccacttggcctctcaaactgctgggattacaggcatgagtcaccgc

SEQ ID NO: 581138 - DNA, 623 bp, Homo sapiens
aattaaacacatttacaatcaggtccttagaaagagaaagaaggtactttgtttgttttagacttaaagtaaaacaataaagtgaaaccacatagtccacttccctcttctctcagctgtggtctacagataggagactcacaatttttcccagaatggatgtaacaggtgtgatataaatgacctcttttagactctgacttaaaatgtctacactatctttgttgaatggtatgttaaaagaacatatttactatgtgaaggctagacttgtcaatataatgctcactttttgtttccaaggggtaattaacaatgaaaatatttggttaaaaaattaaatccccaaatgtataacttaccttacttttttttaaaacttgaactgcctagacaacagctataagtactttaaatatcctgcaaaattttatagtctcgatacagtatatttggaagttgaatttcttttctaagttgttgaaagagtttaagtattattggaatcccatttcaggaagaataataaaatttacctctaaagctatctggaccataaagattgttttctttgtatttgttcaactgctagcaatttgctrtatcttccaatgaagtcctgt

SEQ ID NO: 581139 - DNA, 575 bp, Homo sapiens
ggttacgtagtgtttacagtgactttgaggccataacaattggtgagaatcaactctctgaatttccccattttttaaaatccctctctctgtctctctctctctgtctttatatatatatatatatatatatatatatatatatatatatatgctctttgatgttgattttgctgtttaaaatggtctagttgtcctgcagtaatagcattatgaatggcttagagtttagtaacatgaacagtaccctcaattttctaaaacaaacaaaaaatatagctaattagtaagcataagtaatgataaaaggccagaaattaaggatgatattagctaggctctgtaaaaactttacttcactttttgcatcattcaraaagaggtttgtgggttgggcgcagtggctcaagcctgtaatcccagcactttgggaggctgaggtggggagatcacctgaagtcgggagttaaagaccagcctgaccaatatggagaaaccccgtctctactaaaaatacaaaattagctgggcatggtggtgcatgcctgtagtcccagctactcaggaggctgagg

SEQ ID NO: 581140 - DNA, 596 bp, Homo sapiens
aatagttgtttttaaaaggtaaagaaaattaagaaaccattacctaaaataaataagaaaaaagtatacaccttaaaaaccaatcagaaacaaaaaagagacattacaacttatttcacagagataggaagacttatcagggtctattatgaataactgtatacaagcaaatgagaaaatctagtagaagtgaatacatttctaagcacataccatccactgaatttcaaccaagaagaaatatgaaaccataacagatcaattataagtaacaagattgaatcagtaatgcaaatattcctatcaaggaaaawcccaggaaccaacagctcagctcctgaattttacccaacatcaaaagaagaactcatatcaattcttttcgaattcttccagagaactgaaaaaaagggaattattccaaacttctacaaacccaacaatgctctaacactaaaaccagacaaagacacaaaagcacatatgcacatacacaatccataacacaactatcagtcaatttctctattaaatataaatgcaaaaatattcaacaaaatataacaagtcaaattaaaaagcttttttttggacgg

SEQ ID NO: 581141 - DNA, 596 bp, Homo sapiens
aatagttgtttttaaaaggtaaagaaaattaagaaaccattacctaaaataaataagaaaaaagtatacaccttaaaaaccaatcagaaacaaaaaagagacattacaacttatttcacagagataggaagacttatcagggtctattatgaataactgtatacaagcaaatgagaaaatctagtagaagtgaatacatttctaagcacataccatccactgaatttcaaccaagaagaaatatgaaaccataacagatcaattataagtaacaagattgaatcagtaatgcaaatattcctatcaaggaaaatcccaggaaccaacagctcagctcctgaattttacccaacatcaaaagaagaactcatatcaattcttttcgaattcttccagaraactgaaaaaaagggaattattccaaacttctacaaacccaacaatgctctaacactaaaaccagacaaagacacaaaagcacatatgcacatacacaatccataacacaactatcagtcaatttctctattaaatataaatgcaaaaatattcaacaaaatataacaagtcaaattaaaaagcttttttttggacgg

SEQ ID NO: 581142 - DNA, 596 bp, Homo sapiens
aatagttgtttttaaaaggtaaagaaaattaagaaaccattacctaaaataaataagaaaaaagtatacaccttaaaaaccaatcagaaacaaaaaagagacattacaacttatttcacagagataggaagacttatcagggtctattatgaataactgtatacaagcaaatgagaaaatctagtagaagtgaatacatttctaagcacataccatccactgaatttcaaccaagaagaaatatgaaaccataacagatcaattataagtaacaagattgaatcagtaatgcaaatattcctatcaaggaaaatcccaggaaccaacagctcagctcctgaattttacccaacatcaaaagaagaactcatatcaattcttttcgaattcttccagagaactgaaaaraagggaattattccaaacttctacaaacccaacaatgctctaacactaaaaccagacaaagacacaaaagcacatatgcacatacacaatccataacacaactatcagtcaatttctctattaaatataaatgcaaaaatattcaacaaaatataacaagtcaaattaaaaagcttttttttggacgg

SEQ ID NO: 581143 - DNA, 583 bp, Homo sapiens
atgcagccaagttctttgctaaaatataggaaggaggacctttgcttcagttcccgaaaagttccttatttgcatttgaaatctggtcagcctgcatttcattgtccataattctatcagcattttggtcacaactatttaaccagtgcctaagacgttccgaacttttcctcatctttctgtctcttctaagccctccaaactcttcgatttcttcccatgaccwagttccagagttagttctacattttcaggtatctttacagcaatatcccacttctggtaccaattttcggtctcagactgttcttgtgttgctgtaaaggaatacctgagactaggtaacttacaaagaaaagagatttaattggcccaaagttctgcacagtgtataggaagtgtggtgctggcatctgcttctgatgagggcctcaagaaatttacagtaatggtggaagatgaagaaagagcaggcacaataaagggcaagatgaggagcaagacagagagtgagaaggtgccactcacttttaaacaaccagatcttatgatctcatttatcaccaaggggatggtgctaagc

SEQ ID NO: 581144 - DNA, 583 bp, Homo sapiens
atgcagccaagttctttgctaaaatataggaaggaggacctttgcttcagttcccgaaaagttccttatttgcatttgaaatctggtcagcctgcatttcattgtccataattctatcagcattttggtcacaactatttaaccagtgcctaagacgttccgaacttttcctcatctttctgtctcttctaagccctccaaactcttcgatttcttcccatgacctagttccagagttagttctacattttcaggtatctttacagcaatatcccacttctggtaccaattttcggtctcagactgttcttgtgttgctgtaaaggaatacctgagactaggtaacttacaaagaaaagagatttaattggcccaaagttctgcacagtgtayaggaagtgtggtgctggcatctgcttctgatgagggcctcaagaaatttacagtaatggtggaagatgaagaaagagcaggcacaataaagggcaagatgaggagcaagacagagagtgagaaggtgccactcacttttaaacaaccagatcttatgatctcatttatcaccaaggggatggtgctaagc

SEQ ID NO: 581145 - DNA, 347 bp, Homo sapiens
gacctagagctattggtgtttcaagaccatggacagttccaagtgcctttcctcatgattctttaattatcatatgagagttttgaatacagcaaactcctgtagaaaattttttttgaggggtgagagtgggtgaggagaattgtatgtgtcttagactrtcaacaatgtgacattagcaattcaatttcttttctttgtctcagtagggcccttaagactctgacaacccagggaatcctaggtttcattcactcccttgtccttagttcccttttttattgacactctctattggtcattacttcctcatcctctccttccccacttgctcgctgcttgatgtt

SEQ ID NO: 581146 - DNA, 347 bp, Homo sapiens
gacctagagctattggtgtttcaagaccatggacagttccaagtgcctttcctcatgattctttaattatcatatgagagttttgaatacagcaaactcctgtagaaaattttttttgaggggtgagagtgggtgaggagaattgtatgtgtcttagactatcaacartgtgacattagcaattcaatttcttttctttgtctcagtagggcccttaagactctgacaacccagggaatcctaggtttcattcactcccttgtccttagttcccttttttattgacactctctattggtcattacttcctcatcctctccttccccacttgctcgctgcttgatgtt

SEQ ID NO: 581147 - DNA, 514 bp, Homo sapiens
tttttgaaaaaaatacaacttattgaaattcatttaaaaagaaatatttctacaatgtgtaaaaaaaattgattggtaggtaaaatctttctcacacacacaaaattactaggtccacatagctttactgccagtcctgtcattcaagagacagataattccaggcttacacaaaatcttcctgaaaataaaaaagaaaaacaaaatcccccaaatcatgttatgaggccaacctaaccttgtcatcaaattcaaagagtagtacaaraaagaaaattacaaggccagtctcactcatgaatacaggtgggaaaattctgcgtaaaatatcagcacaccaaaaccagtaataatatgaaagataatttttcatgaccaattgggatttgtcctaggaaaacaggaaactaattatttgtaattcactatgttaaattatttgtaattcactgtattaaatggttattttttaaagatattttaaaaagcattcaataaaatgaaaattcatttg

SEQ ID NO: 581148 - DNA, 563 bp, Homo sapiens
agccccccacacaagctctgtgctggggccaggcagtggacttcgagtaccctctgttcaagcacacgtgcaggcatgcacacgctcatgtgtgagatgcagaaaggctctggagtggcccaggtcacatggccaggctgcagctgcccactcctgccccatggtctaccagctcctgctcgtgattcccagacctgaccttgcagggcagcttccggcttagcccctgctaaccygaacacctctcattattccttccacctattggtttcctaggcttttatctgcctccctcactagggcatggacaatgcctgtcttgttcattgttgtatcccagtgcctagctcagtgcaaacatagtagcaggtgctcaacaaaaaacaaaaattttatttttggaaacagagtctcactcttgtcacccaggctggggtacaatagtgtgatctcagctcactgcaacctctgcctcccaagcaattctcctgcctcagcctcccgagtagctgggattacaggcgcttatcaccatgcccggctaaattttgtatttgtagtag

SEQ ID NO: 581149 - DNA, 261 bp, Homo sapiens
ataacataaaaagaaacctacaggcaaatatccctgatgaacatagatgtaaaaatcctcaacaaaatgttagctagctgaatccagcagcrtatcaaaaagatcaagtgggtttctgccggggatgcagagatgatttaacatacacaagtcaataaatgtgatacatcacataaacaaaattgaaaacaaaaatcatatgatcatctcaacagattcagaaaaagcatttgacaaaatacaacctccctttttgatgaa

SEQ ID NO: 581150 - DNA, 458 bp, Homo sapiens
taaaactttcttttcattaagcaatttggaaaaaytgtttttgtagcatctgcaaataaatatttgggagcacattgtggcctatggtgaaaaagaaaatatcttcagataaaaatagaaagaaactttctgagaaattactttgtgatgtgtgcattcatctcacagacttaaaactttcttttgattcagaagtttggaaacactgtttttttccattctgcaaatggaaatttgggagctcattgaggccaatggcgaaaaagaaaatatttcaggatgaaaactagaagaaagctatattagaaaactttttatgatgtgttcattcatctcaaagaggtaaaccttccttttcattaagcagtttggaaaaactctttttttagcatctgtgaagggttatttcagagtgcattgaggcctatgttcaaatagaaaatatctgtagataaaaa

SEQ ID NO: 581151 - DNA, 458 bp, Homo sapiens
taaaactttcttttcattaagcaatttggaaaaattgtttttgtagcatctgcaaataaatatttgggagcacattgtggcctatggtgaaaaagaaaatatcttcagataaaaatagaaagaaactttctgagaaattacttygtgatgtgtgcattcatctcacagacttaaaactttcttttgattcagaagtttggaaacactgtttttttccattctgcaaatggaaatttgggagctcattgaggccaatggcgaaaaagaaaatatttcaggatgaaaactagaagaaagctatattagaaaactttttatgatgtgttcattcatctcaaagaggtaaaccttccttttcattaagcagtttggaaaaactctttttttagcatctgtgaagggttatttcagagtgcattgaggcctatgttcaaatagaaaatatctgtagataaaaa

SEQ ID NO: 581152 - DNA, 458 bp, Homo sapiens
taaaactttcttttcattaagcaatttggaaaaattgtttttgtagcatctgcaaataaatatttgggagcacattgtggcctatggtgaaaaagaaaatatcttcagataaaaatagaaagaaactttctgagaaattactttgtgatgtgtgcattcatctcacagacttaaaactttcttttgattcagaagtttggaaacactgtttttttccattctgcaaatggaaatttgggagctcattgaggycaatggcgaaaaagaaaatatttcaggatgaaaactagaagaaagctatattagaaaactttttatgatgtgttcattcatctcaaagaggtaaaccttccttttcattaagcagtttggaaaaactctttttttagcatctgtgaagggttatttcagagtgcattgaggcctatgttcaaatagaaaatatctgtagataaaaa

SEQ ID NO: 581153 - DNA, 519 bp, Homo sapiens
cagttcttttcattcaggagtttggaaaccctgtttttgtagaaactgcaaaagtgtatttgggagaacatagcagcctatagtgaaaaagcaagtatcttcagataacaactaaaaagaagctacctgagacacccctttgtgatgtgtgcattcatctcaccgagttaaacctttcttttcattaagtagtttggaaacactatttttgtccattctgtgaatggacrtttaggaactcagtaagaccaatggagtaaaagcaaatatcccaggataaaaaccagaaggaaggtctctgagatactgctttgtgatatgtgctttcacctcgcagatttaaacctttattttcattcagcagattggaaacactgtttttgaagaatctgcaaagggatatttgggagcacattgcagcctatggtgaaaaagaaagtatactcaaataaaaactagaaagaagcatgctgagaaactgctctgtgttgtgtccattcatctcacacagttaaatgt

SEQ ID NO: 581154 - DNA, 519 bp, Homo sapiens
cagttcttttcattcaggagtttggaaaccctgtttttgtagaaactgcaaaagtgtatttgggagaacatagcagcctatagtgaaaaagcaagtatcttcagataacaactaaaaagaagctacctgagacacccctttgtgatgtgtgcattcatctcaccgagttaaacctttcttttcattaagtagtttggaaacactatttttgtccattctgtgaatggacgtttaggaactcagtaagaccaatggagtaaaagcaaatatcccaggataaaaaccagaaggaaggtctctgagatactgctttktgatatgtgctttcacctcgcagatttaaacctttattttcattcagcagattggaaacactgtttttgaagaatctgcaaagggatatttgggagcacattgcagcctatggtgaaaaagaaagtatactcaaataaaaactagaaagaagcatgctgagaaactgctctgtgttgtgtccattcatctcacacagttaaatgt

SEQ ID NO: 581155 - DNA, 372 bp, Homo sapiens
gtcttcaggtaataactagaatgtatctttctgagaaagtgctttkagatgtatgcattcatgtcaccgagttaaaattgtcttatgattcagcaccttggaacactgtttcagtccattctgcgaatggatatttgggggcactgtgaggccaatggtgataaggtgaatgtctcaggattaaaactgagaggaagctatatgagaaaccgctttctgatgtgtatattcatcttgcagagttaaaactttcttttcttttcgttcagcagtttggaaacactgttgttgcccattctgtgattggacatttgggagctcattgagagcaatggagaaaaagggaatatcccaggataaaaactagaagga

SEQ ID NO: 581156 - DNA, 552 bp, Homo sapiens
aaaaactagaaggaagatatctgagacactgttttgtgatatgtgcattcatcttgcagagttaaaactttcttttcattcagcagtttggaaacactgttttttttgaatttgtgaagggatacttgagagcgcattgagacctatggtaacaaacaaaataactttagataaaatgtagaaagaagctttctgagaaagtgctttgtgatgtgtacattcatctcacagagttaaaactttcttttgattcaagagtttggaaacactgtttttttttattgttattytgcaaatagtccttttggaattcattgatgccagtggtgaaaaagggaatatcccaggataaaaactggaaggaatcaatctgaaaaaattgctttgtgatgtgtggattcatctcacagagttaaaactttgttttcattcggtagtttgaaactctgtttttgtagaatctgcaaagggatatttgggagcgtattgaggtccatggtgaaaaagaaaataacttcagataaaaactagaaagaagctttctgtgaaact

SEQ ID NO: 581157 - DNA, 552 bp, Homo sapiens
aaaaactagaaggaagatatctgagacactgttttgtgatatgtgcattcatcttgcagagttaaaactttcttttcattcagcagtttggaaacactgttttttttgaatttgtgaagggatacttgagagcgcattgagacctatggtaacaaacaaaataactttagataaaatgtagaaagaagctttctgagaaagtgctttgtgatgtgtacattcatctcacagagttaaaactttcttttgattcaagagtttggaaacactgtttttttttattgttattctgcaaatagtccttttggaattcattgatgccagtggtgaaaaagggaatatcccaggataaaaactggaaggaatcaatctgaaaaaattgctttgtgatgtgtggattcatctcacagagttaaaactttgttttcattyggtagtttgaaactctgtttttgtagaatctgcaaagggatatttgggagcgtattgaggtccatggtgaaaaagaaaataacttcagataaaaactagaaagaagctttctgtgaaact

SEQ ID NO: 581158 - DNA, 567 bp, Homo sapiens
gataaaaactggaaggaatcaatctgaaaaaattgctttgtgatgtgtggattcatctcacagagttaaaactttgttttcattcggtagtttgaaactctgtttttgtagaatctgcaaagggatatttgggagcgtattgaggtccatggtgaaaaagaaaataacttcagataaaaactagaaagaagctttctgtgaaactgctttgtgatgtgtgcattcatctcacagagttgaacctttcatttgattcagcagtttggaaacgttgtttttttccattctgcaaatggacatttgggagctgattgaggcaaatggtgaaaagggaatattgcagtgtaaaaaatagaaggaagctatctgagaaacggctttgtgatgtgtgcatccatctcacagagttaaacctttctttttcattgagtagtttggaaacactgttgtcctggaatctkccaagggatattggggggcattgagacctatggtgaaaaagaaaatatcttcagataaaacatggaaagaagctttccgagaaactgctttgtgatatgtgaattc

SEQ ID NO: 581159 - DNA, 352 bp, Homo sapiens
ggcatccacatttacagaccgtatgtcagcaggcattttcctcaagataaatgccttcttatgagaagcatttggaattgtctaacaaaaacaattgaaaattcagtacaaaactcttatgcctttccaggaatgtcttctagatatcagggccattgtctcaatcactatttaccatatttttttaacaccaacaagtgaagaaaagacttgtgcwcaaaggacacagcctggtctgaccctcatagtgttttgttatttttctgtagatgagcggggacccagccacactggcaaagagtaagtattctgggatcatctctttttttaggttcaaaatgttagtgttgca

SEQ ID NO: 581160 - DNA, 571 bp, Homo sapiens
cgttaccagcattgaggctctaagaattcacagagtgctgtccagtgggttctatgagagagacagtaggctacagccttggcctgggcctgaaaaggaacacgatttggaagagcagaaggaaggcatgagggcaacaaagccacagggggaagccaaggtgcaacatcagcagagacagttctgcatcatcacctgggcatggccgggatgttcatattacaactgacggagaatgggtcaagctccaacttcatagctggttttagcactgttggcctgtcttcctaagagcctgaagagagaagctactttcttgtttcttgtcttctctatttcctgtatgttgatggcaatggcaccaccagaaattaatgagaggcagagaacacaagtgagttcttgaaacatccaattttgcccagagaggacatgatcagcagggatggatttcagggtcaagccagatacaaagtatttcccaggcctggtctctggctgggacagagatcagctcttatttttcacctgcttctgggagtcacytgacagctggtccttgtgtagttgc

SEQ ID NO: 581161 - DNA, 477 bp, Homo sapiens
gagcacatttttggcctccactcctcacccagtcccatccaatcccaaatccttgggctttgaatgaaacctaaattggttttcgttggagaggcccgagtccagctgtagctcaaggccctctgtggctggcaggaatcctaggggatatatgtggaggggctgctgtgttgctgtaggcagtggctctcaccgtctgtgtagcctggtccctggaatccactgggcccagggcagagcctctgggcagctggcacggggtcatttatcttgtcacaccctcctctctggcccagcagccttgtcstgctccccatactcctgtcaggcccagcttgttctctgtgtcaggtctgccaggtgccctccctcttagtcttcccacagctcaggcaaaccctgggagggccccctcatttctgtgctgaaaactgctggcctcacctgcagattaaggcaactgggacaaggggcttt

SEQ ID NO: 581162 - DNA, 464 bp, Homo sapiens
cagcctgacgacagagcgaagtttcctcttaaaaaaatatttttttwcctgactttaacctctgttttttagagggcacaaattgttcttgtgttgtttctattttacatttttcctgaagttattttccaattgttttcattccttctgaagttttgtttactcagttttgagtttttgtaattttaatagacttctttcatgctttcattttcttaatgacttttacctcatttttaaaacaaatccatagtacggtaagttacatcaagatggactgtatttatgttttgtagtggtttatattctgtatgtattttacatatataagtgttaatggcctggtgcagtggctactgcctgtaatctcagcagtttggaagaccaaggcaggaggattgctcgatcccagaagtttaagactagcctgggctacatagtgggaactcatccctacaaaaaaa

SEQ ID NO: 581163 - DNA, 506 bp, Homo sapiens
ttacatgtgtcttattacctattattacataaatattattcacctattaraatcagtcattgtcctctgatccatttcttcagtggtcaggaccatctgtggtttccccaccatccagcattttctcctaatactgttatagttttataaactatgatgtgagttttgcatgtgggttacttttttctcacttagaccaagttttccagtatttactaaaagaattcttacttttttgctttattctgtacatctctgttttgtacatattaaatatatttttaattttaaattgtaaaatatatgtaacataaactttaccatctaatcattttaagtgtacagttcagtaatgttaagtacatttatcagggttgttcgatgttttggcttctttggaccacattggaagaattgtcctggaccacacataaaatgcgctaacactaatgatagcccatgtgcttaaaaaaaaaagaaagagagagagaaagaaaaaagctcta

SEQ ID NO: 581164 - DNA, 506 bp, Homo sapiens
ttacatgtgtcttattacctattattacataaatattattcacctattagaatcagtcattgtcctctgatccatttcttcagtggtcaggaccatctgtggtttccccaccatcsagcattttctcctaatactgttatagttttataaactatgatgtgagttttgcatgtgggttacttttttctcacttagaccaagttttccagtatttactaaaagaattcttacttttttgctttattctgtacatctctgttttgtacatattaaatatatttttaattttaaattgtaaaatatatgtaacataaactttaccatctaatcattttaagtgtacagttcagtaatgttaagtacatttatcagggttgttcgatgttttggcttctttggaccacattggaagaattgtcctggaccacacataaaatgcgctaacactaatgatagcccatgtgcttaaaaaaaaaagaaagagagagagaaagaaaaaagctcta

SEQ ID NO: 581165 - DNA, 506 bp, Homo sapiens
ttacatgtgtcttattacctattattacataaatattattcacctattagaatcagtcattgtcctctgatccatttcttcagtggtcaggaccatctgtggtttccccaccatccagcattttctcctaatactgttatagttttataaactatgatgtgagttttgcatgtgggttacttttttctcacttagaccaagttttccagtatttactaaaagaattcttacttttttgctttattctgtacatctctgttttgtacatattaaatatatttttaattttaaattgtaaaatatatgtaacataaactttaccatctaatcattttaagtgtacagttcagtaatgttaagtacatttatcagggttgttygatgttttggcttctttggaccacattggaagaattgtcctggaccacacataaaatgcgctaacactaatgatagcccatgtgcttaaaaaaaaaagaaagagagagagaaagaaaaaagctcta

SEQ ID NO: 581166 - DNA, 506 bp, Homo sapiens
ttacatgtgtcttattacctattattacataaatattattcacctattagaatcagtcattgtcctctgatccatttcttcagtggtcaggaccatctgtggtttccccaccatccagcattttctcctaatactgttatagttttataaactatgatgtgagttttgcatgtgggttacttttttctcacttagaccaagttttccagtatttactaaaagaattcttacttttttgctttattctgtacatctctgttttgtacatattaaatatatttttaattttaaattgtaaaatatatgtaacataaactttaccatctaatcattttaagtgtacagttcagtaatgttaagtacatttatcagggttgttcgatgttttggcttctttggaccamattggaagaattgtcctggaccacacataaaatgcgctaacactaatgatagcccatgtgcttaaaaaaaaaagaaagagagagagaaagaaaaaagctcta

SEQ ID NO: 581167 - DNA, 593 bp, Homo sapiens
tttgtcttgattcagcagcatggaaacatttcttttggagaatcagcaaagggacatttgagarcttattgaggcctaggtggtaaattgaatatcccccaataaaaactagaagcaatctgtgaaactgcattgggatgtctggagtcatctcacagagttaaatctttgttttgattcagcaggtttgaaacactctttttgcagtatctgagaagggacattttgaagcccttagaggcctatggtgcaaaacagaatagtccatgaataaaactagaagaagctatttgagcaactgcttcataatgagtggattcatctcacaaagttaaacttttttttgattcagcagattggaaacactcttttcagaaaatctgtgagcccacaagggcctgaggggaaaaatcaaatatccccagatacaaagcggaaagaaactatctgtgaaactgctttttgatgtgttgattcctctcacagaattaaacctttctttttatttagcatggtggaaacactctttttggggactctgggaatgcacatttgggagcccattgaagcccatgggaagaaaatgagtatcc

SEQ ID NO: 581168 - DNA, 523 bp, Homo sapiens
tttctgaaaacttgctttgttctgtgtgcattcatctgactgagttaaacttttcttttgattcagcagttttgaagcaacgtttttgtccattctgtgaaaggacatttgggagcttattgagaccaatggtgtaaaagtgaatatcccaggattaaaaaatgcaaggaagctatcagagaaaccactttgtcatatgtgcattcatctcccagagttaaacccttcttttgattctggagtttggaaacactgtttttgtccattctgtaaatggacatttgggagtgcattgaggcctatggtgataaagaaaataccttccgattaaaactagaaagattctttctgagaaattgcatgttatgtgtgcattcaaatcacataggtaaacctttctttattctgtagtttggaaaccttccttttgtagaatctgtggagggacattttggagtgcattgaggcrtgtgctgaaaaagaacatatcttcagataaaaactagaatgaagttttctgaga

SEQ ID NO: 581169 - DNA, 500 bp, Homo sapiens
agcagtttggaaacactgtttttgtccattctgtgattggacattttggagctcattgaggccaatggggaaawgcaaatgtagcatgataaaacctagaaggaaattatcttaaaaaaactgcttagtgatgtgtgtattcatcttgcagagttactcctttctttcatcgatcagtttggaaacaccatttttgtagaatctatgagggaatatttggagcacaatgaggcctatggtgaaaaataaaatatcttcagttaaaaactagaaagaagctttctgagaaactgctttgtggtgtttgcattcatctcacagatgaaaactttcttttaattcaggagtttggaaacaatgtttttttccatcctgaaaatggacatttgggagctgtttgaggtcaatcaggaaaaagtgaatatcccaggataaaaactggaaagaagctatctgagaaactgctttgtgatgtgtgcattcatctcacacagttaaac

SEQ ID NO: 581170 - DNA, 547 bp, Homo sapiens
ggaaaagcaaatgtagcatgataaaacctagaaggaaattatcttaaaaaaactgcttagtgatgtgtgtattcatcttgcagagttactcctttctttcatcgatcagtttggaaacaccatttttgtagaatctatgagggaatatttggagcacaatgaggcctatggtgaaaaataaaatatcttcagttaaaaactagaaagaagctttctgagaaaytgctttgtggtgtttgcattcatctcacagatgaaaactttcttttaattcaggagtttggaaacaatgtttttttccatcctgaaaatggacatttgggagctgtttgaggtcaatcaggaaaaagtgaatatcccaggataaaaactggaaagaagctatctgagaaactgctttgtgatgtgtgcattcatctcacacagttaaacctttattttgattcagcagcttggaaacactgtttttgtccattctgcaaatggatatttgagatctaatttaggccaatgaggaaaagcgaatatcccaggataaaaaacagaa

SEQ ID NO: 581171 - DNA, 547 bp, Homo sapiens
ggaaaagcaaatgtagcatgataaaacctagaaggaaattatcttaaaaaaactgcttagtgatgtgtgtattcatcttgcagagttactcctttctttcatcgatcagtttggaaacaccatttttgtagaatctatgagggaatatttggagcacaatgaggcctatggtgaaaaataaaatatcttcagttaaaaactagaaagaagctttctgagaaactgctttgtggtgtttgcattcatctcacagatgaaaactttcttttaattcaggagtttggaaacaatgtttttttccatcctgaaaatggacatttgggagctgtttgargtcaatcaggaaaaagtgaatatcccaggataaaaactggaaagaagctatctgagaaactgctttgtgatgtgtgcattcatctcacacagttaaacctttattttgattcagcagcttggaaacactgtttttgtccattctgcaaatggatatttgagatctaatttaggccaatgaggaaaagcgaatatcccaggataaaaaacagaa

SEQ ID NO: 581172 - DNA, 547 bp, Homo sapiens
ggaaaagcaaatgtagcatgataaaacctagaaggaaattatcttaaaaaaactgcttagtgatgtgtgtattcatcttgcagagttactcctttctttcatcgatcagtttggaaacaccatttttgtagaatctatgagggaatatttggagcacaatgaggcctatggtgaaaaataaaatatcttcagttaaaaactagaaagaagctttctgagaaactgctttgtggtgtttgcattcatctcacagatgaaaactttcttttaattcaggagtttggaaacaatgtttttttccatcctgaaaatggacatttgggagctgtttgaggtcaatcaggaaaaagtgaatatcccaggataaaaactggaaagaagctatctgagaaactgctttgtgatrtgtgcattcatctcacacagttaaacctttattttgattcagcagcttggaaacactgtttttgtccattctgcaaatggatatttgagatctaatttaggccaatgaggaaaagcgaatatcccaggataaaaaacagaa

SEQ ID NO: 581173 - DNA, 547 bp, Homo sapiens
ggaaaagcaaatgtagcatgataaaacctagaaggaaattatcttaaaaaaactgcttagtgatgtgtgtattcatcttgcagagttactcctttctttcatcgatcagtttggaaacaccatttttgtagaatctatgagggaatatttggagcacaatgaggcctatggtgaaaaataaaatatcttcagttaaaaactagaaagaagctttctgagaaactgctttgtggtgtttgcattcatctcacagatgaaaactttcttttaattcaggagtttggaaacaatgtttttttccatcctgaaaatggacatttgggagctgtttgaggtcaatcaggaaaaagtgaatatcccaggataaaaactggaaagaagctatctgagaaactgctttgtgatgtgtgcattcatctcacacagtkaaacctttattttgattcagcagcttggaaacactgtttttgtccattctgcaaatggatatttgagatctaatttaggccaatgaggaaaagcgaatatcccaggataaaaaacagaa

SEQ ID NO: 581174 - DNA, 329 bp, Homo sapiens
cacttgcaaacacattgaggcctacaataaaaaagaaaatattcgargataaatcttgaaagaagctgcatgtgaaactgctttgtgatgtgtagattcgtctcacagagttaaagacttgtttcaattcagcaattttgaaacactgtttctgtagaatccacaagcagacatttgggagcccattgatgcctatggtgaaaaagtgaatatctccagataaaaaccagaaagcagcttgctgtgaacctactttttgatgtctggattcatctaagagagttaaaaatttattttgtattagcagtttggaaacactgtttttgtag

SEQ ID NO: 581175 - DNA, 329 bp, Homo sapiens
cacttgcaaacacattgaggcctacaataaaaaagaaaatattcgaagataaatcttgaaagaagctgcatgtgaaactgctttgtgatgtgtagattcgtctcacagagttaaagacttgtttcaattcagcarttttgaaacactgtttctgtagaatccacaagcagacatttgggagcccattgatgcctatggtgaaaaagtgaatatctccagataaaaaccagaaagcagcttgctgtgaacctactttttgatgtctggattcatctaagagagttaaaaatttattttgtattagcagtttggaaacactgtttttgtag

SEQ ID NO: 581176 - DNA, 329 bp, Homo sapiens
cacttgcaaacacattgaggcctacaataaaaaagaaaatattcgaagataaatcttgaaagaagctgcatgtgaaactgctttgtgatgtgtagattcgtctcacagagttaaagacttgtttcaattcagcaattttgaaacactgtttctgtagaatccacaagcrgacatttgggagcccattgatgcctatggtgaaaaagtgaatatctccagataaaaaccagaaagcagcttgctgtgaacctactttttgatgtctggattcatctaagagagttaaaaatttattttgtattagcagtttggaaacactgtttttgtag

SEQ ID NO: 581177 - DNA, 329 bp, Homo sapiens
cacttgcaaacacattgaggcctacaataaaaaagaaaatattcgaagataaatcttgaaagaagctgcatgtgaaactgctttgtgatgtgtagattcgtctcacagagttaaagacttgtttcaattcagcaattttgaaacactgtttctgtagaatccacaagcagacatttgggagcccattgatgcctatggtgaaaaagtgaatatctccagataaaaacyagaaagcagcttgctgtgaacctactttttgatgtctggattcatctaagagagttaaaaatttattttgtattagcagtttggaaacactgtttttgtag

SEQ ID NO: 581178 - DNA, 371 bp, Homo sapiens
tttcattaatcaggttggaaaaactgtttttgtagcctctgcaaaggtttatttgggagcacattgaggtctatgttcaaaaagaaaatatctgcagataaaaactagaaagaagcattctgagaaactkctttgtgatgtgtgcattcacctgacagatttaaacttttcctttgattcagcagtttggaaacactttatttgtccaatctgggaatgcacatttgggagctcattgaggccaatggtgaaagagtgaatatcccaagataaaaactagaaggaagctatctaaggaactgttttgtgatgtgtgcattcatcttgcagtgttaaacctttcttttgattcagcagtttagaaacatgat

SEQ ID NO: 581179 - DNA, 371 bp, Homo sapiens
tttcattaatcaggttggaaaaactgtttttgtagcctctgcaaaggtttatttgggagcacattgaggtctatgttcaaaaagaaaatatctgcagataaaaactagaaagaagcattctgagaaactgctttgtgatgtgtgcattcacctgacagatttaaacttttcytttgattcagcagtttggaaacactttatttgtccaatctgggaatgcacatttgggagctcattgaggccaatggtgaaagagtgaatatcccaagataaaaactagaaggaagctatctaaggaactgttttgtgatgtgtgcattcatcttgcagtgttaaacctttcttttgattcagcagtttagaaacatgat

SEQ ID NO: 581180 - DNA, 371 bp, Homo sapiens
tttcattaatcaggttggaaaaactgtttttgtagcctctgcaaaggtttatttgggagcacattgaggtctatgttcaaaaagaaaatatctgcagataaaaactagaaagaagcattctgagaaactgctttgtgatgtgtgcattcacctgacagatttaaacttttcctttgattcagcagtttggaaacactttatttgtccaatctgggaatgcamatttgggagctcattgaggccaatggtgaaagagtgaatatcccaagataaaaactagaaggaagctatctaaggaactgttttgtgatgtgtgcattcatcttgcagtgttaaacctttcttttgattcagcagtttagaaacatgat

SEQ ID NO: 581181 - DNA, 371 bp, Homo sapiens
tttcattaatcaggttggaaaaactgtttttgtagcctctgcaaaggtttatttgggagcacattgaggtctatgttcaaaaagaaaatatctgcagataaaaactagaaagaagcattctgagaaactgctttgtgatgtgtgcattcacctgacagatttaaacttttcctttgattcagcagtttggaaacactttatttgtccaatctgggaatgcacatttgggagctcattgaggccaatggtgaaagagtgaatatcccaagataaaaactagaaggaagctatctaaggaactgttttgtgatgtgtgcmttcatcttgcagtgttaaacctttcttttgattcagcagtttagaaacatgat

SEQ ID NO: 581182 - DNA, 546 bp, Homo sapiens
caagcaattctcctgcctcatcctcccaagtatctgggactacaggcgtgcaccaccaagcccagctaatttttttgtatttttagtaaagatgggttttcaccatgttggccaggctggtcttcaactcctgaccacaaatgatcccccygccttggcctcccaaagcgctggggttacagacgtgagccactatgctcagcttaagaaaagtctatttttaaaagaacactgacttgagagaatgaaggaatgaaatagttggcttggtggattcaacagactcgggacaaggtaaaatgggtaagggaatatggcactgttgttgcagtgtgaacggccgtgaacagcacatacaatggctgacgtggtgtgggcatccccagctgtgacaccagggccaagtggagagctagtttgaccagaattgaagtttgaccaaagagtaggagatgcacaagcctggaggaagatgagagtcgttgcctggagacagctgtagtgactggcctggaattgaggatggaagtggagggaggggtggat

SEQ ID NO: 581183 - DNA, 591 bp, Homo sapiens
atgttagctgtgtgacttagggataagattttagccaagcaaatattttttattcaaacagttaatcaacaaatattgaaaataaatctaattctgccagagatttaatggtctaggagaggtagaggccatagcagaccacaattaggagcatacagcctgtgggaaaagattaggataaagaatgtgggctgatttgtgaaagattaggtttttaccacatagttacattgtgtcacaagtgatatattggactataaaagtggaagctttgtgtattagtctgttcttacgctgctaataaagacatacctgagactgggtgatttataaaggcaggaggtttaattgactcacaattccacatgactaggaaggcctcacaatcatggtggaaattgaaggggaagtaagacttgtcttacatggcagtaggcaagagagagcttctgcaggggaactcccatttataaaaccatcagactttgtgagacttattctctaccacaagaaccgtatggggraaaccaccctgatgattcgattatctccacctgtccctgcccttgacatgtggggattattacaatt

SEQ ID NO: 581184 - DNA, 557 bp, Homo sapiens
gcttaactttattgccatattgcactrgtgtatgttggtttccttatctttttacctactagattctaaatccctagaaggcaggacttatctatgtcttttacggaacatactaggaaaatgacagaccctagctactctataaatattaatacaggaataaataattcaaagcagctgggtgtggtggcgcatgcctgtaatcccagcatctagggaggctgaggcaggagaatcgcttgaacctgggaggtagaggttgcagtgagccgagatcgtgccattgcactccagcctgggcaacaagagtgaaactccacctcagaagaaaaaaaaatgtatacataaatgataatacataaaagtaaaaaaattaattttcctccaaggataaaaccatgttgatattcacagttattccatctaattctgatttgaagacatagtgctgtaattctaatgaaagatgataattaacataaccctttaatgaatgaatgcagcactttttgattttaaatgttttaattactgtattttactatagttatattaca

SEQ ID NO: 581185 - DNA, 557 bp, Homo sapiens
gcttaactttattgccatattgcactggtgtatgttggtttccttatctttttacctactagattctaaatccctagaaggcaggacttatctatgtcttttacggaacatactaggaaaatgacagacmctagctactctataaatattaatacaggaataaataattcaaagcagctgggtgtggtggcgcatgcctgtaatcccagcatctagggaggctgaggcaggagaatcgcttgaacctgggaggtagaggttgcagtgagccgagatcgtgccattgcactccagcctgggcaacaagagtgaaactccacctcagaagaaaaaaaaatgtatacataaatgataatacataaaagtaaaaaaattaattttcctccaaggataaaaccatgttgatattcacagttattccatctaattctgatttgaagacatagtgctgtaattctaatgaaagatgataattaacataaccctttaatgaatgaatgcagcactttttgattttaaatgttttaattactgtattttactatagttatattaca

SEQ ID NO: 581186 - DNA, 548 bp, Homo sapiens
gaatgttctcccaaatttcagatttcagataygcatctgtaaaataatcttatggagacacattttagttgctactgaatacttggttgttttcacaagttcacagcattactactgtcctccaaaaaacggtttcccatttccacagctaatctcatcattgactctgccatctaggtttattctatgccactctggaagaatctggaaaaataaaatacattttaagtattaatcatgcacatgtattgtattttattttatatatgtttgggtgaatatctttctccactaatggtttgcatttcaattcttgtgtcatgttttttgaaacacagaagtcatcattaatataaaccaactaatttttttaattgttaatttttgtcctggttaagaaatccttatgagaatattttatcatgttccccttaccttcaggacttgaatctatttggaaatgactgtgtgtgttttgaggtaggaatcaatatttagttattttttgaaattcaattaatccagcattgttctgaccaccttgtgta

SEQ ID NO: 581187 - DNA, 536 bp, Homo sapiens
aaatttcagatttcagatacgcatctgtaaaataatcttatggagacacattttagttgctactgaatacttggttgttttcacaagttcacagcattactactgtcctccaaaaaacggtttcccatttccacagctaatctcatcattgactctgccatctaggtttattctatgccactctggaagaatctggaaaaataaaatacattttaagtattaatcatgcacatgtattgtattttattttatatatgtttgggtgaatatctttctccactaatggtttgcatttcaattcttgtgtcatgttttttgaaacacagaagtcatcattaatataaaccaactaatttttttaattgttaatttttgtcctggttaagaaatccttatgagaatattttatcatgttccccttaccttcaggacttgaatctatttggaaatgactgtgtgtgttttgaggtaggartcaatatttagttattttttgaaattcaattaatccagcattgttctgaccaccttgtgta

SEQ ID NO: 581188 - DNA, 596 bp, Homo sapiens
attatttcactcagtagcagtcagaaataaacaaaaaaaaaaamaatatattttatgccatgatcatgaataatgatttttcaaaaattaataaagaaccaatacatatacttttagtgtttttaccatttttaatagtaacacaataactgagttttaataacattaggaggcaattcaagacataaaacagaacctatttgtcctgtttgataaggcacaaggaagagggcttcctggagtaaacgggttctcacagcagatgaacatatttctgatttatctctggtcagaggtgaacacaccgaaagataggcctgacaggaggcgagaaggagcaattagggatcgtgtatataaggcagctttgattaacatcaacgaagctcacagttctagcttcacaatccaggaataatcctatgaggctggtaggtcttgggatatattgcagtgtaagtggggaggtggtaaagggactgcactgaatgtcattcttgacacatccaagactaaagagtccctcctctccatatatattgccattctgattcttccctttccaatacttattacagacaccaaaagcccaattc

SEQ ID NO: 581189 - DNA, 596 bp, Homo sapiens
attatttcactcagtagcagtcagaaataaacaaaaaaaaaaaaaatatattttatgccatgatcatgaataatgatttttcaaaaattaataaagaaccaatacatatacttttagtgtttttaccatttttaatagtaacacaataactgagttttaataacattaggaggcaattcaagacataaaacagaacctatttgtcctgtttgataaggcacaaggaagagggcttcctggagtaaacgggttctcacagcagatgaacatatttctgatttatctctggtcagaggtgaacacaccgaaagataggcctgacaggaggcgagaaggagcaattagggatcgtgtatataaggcagctttgattaacatcaacgaagctcacagttctagcttcacaatccaggaataatcctatgaggctggtaggtcttgggatatattgcagtgtaagtggggaggtggtaaagggactgcactgaatgtcattcttgacacatccaagactaaagagtccctcytctccatatatattgccattctgattcttccctttccaatacttattacagacaccaaaagcccaattc

SEQ ID NO: 581190 - DNA, 443 bp, Homo sapiens
acacaccgaaagataggcctgacaggaggcgagaaggagcaattagggatcgtgtatataaggcagctttgattaacatcaacgaagctcacagttctagcttcacaatccaggaataatcctatgaggctggtaggtcttgggatatattgcagtgtaagtggggaggtggtaaagggactgcactgaatgtcattcttgacacatccaagactaaagagtccctcctctccatatatattgccattctgattcttccctttccaatwcttattacagacaccaaaagcccaattccaagtgtcccccacatggacatcccagtaatatttgctggaggtgaaagtctgagcaccccatgcaagaaaacttgtaggtgttgcagtgatatggggtggattttgacggtcacatccaatacacatgcttctcaaatctccaca

SEQ ID NO: 581191 - DNA, 524 bp, Homo sapiens
catcccagtaatatttgctggaggtgaaagtctgagcaccccatgcaagaaaacttgtaggtgttgcagtgatatggggtggattttgacggtcacatccaatacacatgcttctcaaatctccacatcaaaagatacgactgttggctcatcattattcagagtaatatccactgcaaaaataaataaataaataaaagagaaacaaaacatacatagacatgtgtcaataagcaaaaattgttctatcaagaagttaatttaccaggaaaagtaaagtcacaaggacaattttgcttgtaacttctaataaagcatagagatgattaattttaactacaagacaaacaaaacactaaccacaggtattaaaaatgttttgaaaacttatatattgagagccaaatgtaagaccaacttctttcaatccaatttttgaagcaaaatttacacattatatgccctaaatactrtgttgttatcaagatcattatttagaaatgtttcttattcttaaaaactag

SEQ ID NO: 581192 - DNA, 481 bp, Homo sapiens
acaggaatttcatgtgtcctttatagaaatagatcttcagaggcatcacttacccggtgttcctcagcagcccactcaacgggacggtgtctgtgataccggtgctcctgagagctggagcacagcagacagagcagactcttgtccacttcacagaacatcttctttgtctccctgtgagtgccacacatttgctcctcagagctcaggaatagccagagactgacttttctggcaagggaagccatcttcttcaaatgaatgttagttttgaggtttctctgccatgttgtcttcatgcattcaaagcacygagtaaaaattgggatgtcttgccacttgaagtagaaacagggcctgcaaaagctgtgcccacagtctacggtgaccgggtctatgaagtatttcatgcagatggggcaggtgagttccatctggaattcttgcaagattccagaattcatgtttctgaggaagaaag

SEQ ID NO: 581193 - DNA, 481 bp, Homo sapiens
acaggaatttcatgtgtcctttatagaaatagatcttcagaggcatcacttacccggtgttcctcagcagcccactcaacgggacggtgtctgtgataccggtgctcctgagagctggagcacagcagacagagcagactcttgtccacttcacagaacatcttctttgtctccctgtgagtgccacacatttgctcctcagagctcaggaatagccagagactgacttttctggcaagggaagccatcttcttcaaatgaatgttagttttgaggtttctctgccatgttgtcttcatgcattcaaagcactgagtaaaaattgggatgtcttgccasttgaagtagaaacagggcctgcaaaagctgtgcccacagtctacggtgaccgggtctatgaagtatttcatgcagatggggcaggtgagttccatctggaattcttgcaagattccagaattcatgtttctgaggaagaaag

SEQ ID NO: 581194 - DNA, 179 bp, Homo sapiens
ggtgacccttctaaggctgagtcagtatgaatttgaatcctggtgggcaastatattgaaatgtgagctaaatttcaggcagaaggtgagagagcgcaaccttagggaaagcatgaaattaaatatcagcactaattaatattgaataagtcataaaacataatgggaaaagtggtgag

SEQ ID NO: 581195 - DNA, 179 bp, Homo sapiens
ggtgacccttctaaggctgagtcagtatgaatttgaatcctggtgggcaagtatattgaaatgtgagctaaatttcaggcagaaggtgagagagcgcaaccttagggaaagcatgaaattaaatatcagcrctaattaatattgaataagtcataaaacataatgggaaaagtggtgag

SEQ ID NO: 581196 - DNA, 179 bp, Homo sapiens
ggtgacccttctaaggctgagtcagtatgaatttgaatcctggtgggcaagtatattgaaatgtgagctaaatttcaggcagaaggtgagagagcgcaaccttagggaaagcatgaaattaaatatcagcactaattaatattgartaagtcataaaacataatgggaaaagtggtgag

SEQ ID NO: 581197 - DNA, 179 bp, Homo sapiens
ggtgacccttctaaggctgagtcagtatgaatttgaatcctggtgggcaagtatattgaaatgtgagctaaatttcaggcagaaggtgagagagcgcaaccttagggaaagcatgaaattaaatatcagcactaattaatattgaataagtcataamacataatgggaaaagtggtgag

SEQ ID NO: 581198 - DNA, 563 bp, Homo sapiens
caagctctacctgatatagctggcctagacatatgcagatttattaattgtagaagaaagaattatacctttcaagtaaaatggccaccaaaaataattagttgctgtttttgagacaagttctcactctgtcactcaggctggagtgcaatggcacaaacagaactcactgcagatttatactcctggactcaagcaatcctcccaactcagcctcctgagaagctgggacaacaggtgcacaccaccactcaaggctaattttctgttyattttttggtagagataagctacccaattgcccaggctgatctcaaactcctggcctccagtgatttttctgccttggcctgccaaagcactgagattataagtatggccactgtaaccagctttagatcaattttatttaatacagatagcttcccaactaaaaatatttcattagaattctcttaattcagcaaagcaatgttattactgacccagtcttcacttattttcagcttacatgcaggaacaaaattacctttattttttaatttgttttattttatattttc

SEQ ID NO: 581199 - DNA, 252 bp, Homo sapiens
ggaggaccacagagagactggtaaaagattttacagaaatctgctttaaattgtcacttatgacatgtacttacggatttttatccagtcatcaacagcagttcttgagtaactgaaaatcttcacattctttccaaaatgatagcactagtttttaagaataagaaacatttctaaataatgatcttgataacagcatactatttagggcatwtaatgtgcaagttttgcttggaaaattggattgaaaga

SEQ ID NO: 581200 - DNA, 508 bp, Homo sapiens
aaaaagattgtttcaaaacttctcaatcaagagaaagtttcaaccttgtgatatgaatccacacatcacaaagaagtttctcagaaagattctgtctagtttttatgtgaagatgtttcctttacaactttgggcctcagagcgctacaaatatccacttgcagttgctacaaaaacagtgtttccaaactgctcgatgaaaataaaagttcaactctgagagttgaatgcacacatcacaaagaagtttctacgaatgcttctgtctagtttttatgtgaaaatatttccttttccaccataggcctcaaagcctttcaaacatccacttgcagattctacaaagagtgtttcaaaactgtttaatccaaagtaatgttcaactctctgagatgaagacacacattacaaagtagtttctctgaamgcttctattttttatgtaaagatatttccttttcagctatagacctcaaagcccaacaaatatccatttgcagttactaca

SEQ ID NO: 581201 - DNA, 576 bp, Homo sapiens
taaaccttcctattgagagagcagttttgcaacacttttcgtagaatctgcaagtggatatttggagaactttgaggcctgtggttgaaacgggaatatcttcatataaaaactagacagaagcattctcagaaactactttgtgatgattgtgttcaactcacagagttgaacataccttttcatagagcagttttgaaacactctttttgtagaatctgcaagtggatatttggactgctttgaggcctacggttgaaatgggaatatcttcacataaaaactaaacagaatccttctcagaaactactttgtgttgagtgcattcaacttagagacttgaaccttccgtttgatagtgtagttttgaaacattctttttgtagtatctgcaaatggatatttggagcaatttcaggcrtatggttgaaaccggaatatcttcatgtaaaaactagacagaagcattatcagaaacttctttttgatgattgcattcaatgcacagagttgaacataccttttcatagagcacttatgaaaaactctttttgtagaatctgcaagtggatattt

SEQ ID NO: 581202 - DNA, 522 bp, Homo sapiens
ctctactaaaaatacaaaaattagctgggtgtggtggcacatgcctgtaatcccaaccacttgggaggctgaggcaggagaatcgcttgaacccaggaggcagaggttgcagtgagctgagatcccacagccgcacaccagcctgggtgacagagcgagactttgtctcaaaaaaaaaaaaaattaaactcatggagatagagaatgaaatgatgattaccagaggctgggaagggtggtaggggtggggggaagtgaggacatttcttggtacaaaaatatagttagaaagaataaataagacgcagtatttgatagcacaacagggtcactatacacaataataatttaattgtaccttttaaaataactgagtatcattggatttcttgtaacacaaaggacaaatgcttgaagggatagatatcccatttamcttgatgtgattattacacattgtatgcctatatcaaaatatctatcgtaccccataaatatgtatacctactaggtacccataga

SEQ ID NO: 581203 - DNA, 501 bp, Homo sapiens
ccagctaatttttgtatttttagtagagacggggtttcactgtgttagccaggatggtcttgatctcctgacctcgtgatccacctgcctcggcctcccaaagagctgggattacaggtgtgagccacygcacccggcccctctctgtattatttttatagtgaaggtctaatggtcctctggacattggtggataaatcgacagtgaacttttttctttcttctaggctaagagtctttgtagtgacagacactggattccgaggaaatagagatgacatgaataagtaagtaagggttttctctttctctccctctcttttttttttttttttgacacaacttctgatctcaagcaatcttctcactttagcctccaagtagctgggactacaggtgcacaccactgagcccagctttctctctctttttattcacatcttcaacttggacacctgatgagcaacaggcactcagggcaatagcaaaagccattaccag

SEQ ID NO: 581204 - DNA, 573 bp, Homo sapiens
tcaggcatcacaaacagggaaacctataaatgagaaatttggctgcagtcagtcccaggggactctctggcactggtgctgtggggactcacagtttaatcagttaaatctgcatcaggaagtcagctccccttctgctgcacccgctggtgtcacagaggtcctgagcatcaagccaacacctcctgctgagtagcaaaacgcttgtgccacctgccatcctggggaaaacagccatgctgctggagagtgtaatcaatggagagagagcccggtcacttctgccatcttgctctcctcccacctgggaatagaagtgacaactattgagccatcagaatgaaaatctttactagccctgcagtgatccaggtacatagagtgacctgcaacactacagttttaggaaggatattgattgtcttatctaacaggaaaatgtgaacccagtttatattttaggttaactctgtctcaggctttctcactttggttctttcacacatattcaacaaacatccattgtctgtaatgttccaggcactgttytaggtcatatgaaaaatcagaatt

SEQ ID NO: 581205 - DNA, 517 bp, Homo sapiens
  misc_feature 461, 466, 487, 488, 489, 490, 491, 492, 493, 494, 495, 496,497, 498, 499, 500, 501, 502, 503, 504, 505, 506, 507, 508,509, 510, 511, 512, 513, 514, 515, 516, 517: n = A,T,C or G
caaaggaacagttttgcataacaatctttattatacatggccaaatagcttctcattgttatggataggctacwaatcaccctgtaaaaactgaactctatgcccacgtaagtggtatgtaatattggaaagctgtaggagctgagaatctcaaaattatatataaacataatttgcatcacattcttgggttactccattttctttttaaaatctatcatagcatttttatattttataccgtataattaggcttacaagttattggaattcatacaaagttatactttagtaccacaataggtataagtagcttaatataaataattagcttgaccgctatccttttgcccaagtgaagaactatcctactcctttctttcaggaggaaaatcttgttccctgctcctttactggtatcctcataagaagagaaaactccagattaatgaacaaaacanacatnctttttgcccacaaactttannnnnnnnnnnnnnnnnnnnnnnnnnnnnnn

SEQ ID NO: 581206 - DNA, 579 bp, Homo sapiens
tggagacacagtcaaaccatatcaggctctttcctgaatccatgtgaattgtagaataatatttttattctaattctgttaaaaaatgacattgataatttgaaaggaatagcgttaaatttggagattcctttggacagtatggacattttaatgaccttgattcttccaaacaatgagcatgaaatgattttctgcttacttgtgtcatgtatgatttccttcagaagtgttttgtaattgtcttcgaagataactttcacctccttggttagatgtacttttaggtattttattatttttgtgtctgttgyaaatgtaattacagtcttaaattggttctcagcttgaatgttattggtgtatggaaatgctactaatttttgtgcattgattttgtatccttaaactttgctgaagttgtttgtcctcaggtctaaaagcattttgtcagaatcttgagtgctctatgtctagtatcataccatctgaaaagagacacataatttgacttcttcttttcttatttggatgtcttttggttcattgtcccgtctgatttctgtggtgaggacttcc

SEQ ID NO: 581207 - DNA, 478 bp, Homo sapiens
aatgggagaatttggccaacacaaagaggctacaagtgccattcaagtccaaaatccagcggggcagttaaatattaaagctccaaaatgatctcctttgacttcatgtctcacattcaggtcatgttgatgcaacaggcrggttcccatggtcttaggcagctctgcccccgtggctttgcagggtacagccactatcccagctgctttcatgggctggtgctgagtgtccgcagcttttccaggtgcatggtgcaagttgtcagtggaattaccattctgggttctggaagatggtggtctgcttctcacagctttcctaggtggtgcctcagtaggaactctgtgtgggggctccaatcccacatttcccttttgaactgccctagcagaagttctccttgagggctctgcccctgcttcaaacttctgcctagacatccaggcatttccatacatcctctgaaatctaggctga

SEQ ID NO: 581208 - DNA, 475 bp, Homo sapiens
tgcggtctcagctcactgcaacctccacctcctgggttcaagcaattctcttgcctccacctcccaagtagctgggattacaggcacccaccaccatacccagttaatttttgtatttttagtagagacggggtttcaccatgttggccgggctggtcttgaactactgacctcaagtgatccacccacctcagcctcccaaagtgccgggattacaggtgtgagccaacgtgcctcatgctttttttttttctttttttttttttaaaaggatccacttcacctgaagggtttggtatygagtataaacgggaccattactggctccatgtattcccaagtaactgctttatttaaaaaagtctgattctttccttctgaaaattattatgcaaatacagtcaatttcttattagccatctatctgtaatacacctagctcttcaaattttaacaatgtggtcatcaacaatac

SEQ ID NO: 581209 - DNA, 475 bp, Homo sapiens
tgcggtctcagctcactgcaacctccacctcctgggttcaagcaattctcttgcctccacctcccaagtagctgggattacaggcacccaccaccatacccagttaatttttgtatttttagtagagacggggtttcaccatgttggccgggctggtcttgaactactgacctcaagtgatccacccacctcagcctcccaaagtgccgggattacaggtgtgagccaacgtgcctcatgctttttttttttctttttttttttttaaaaggatccacttcacctgaagggtttggtatcgagtataaacgggaccattacyggctccatgtattcccaagtaactgctttatttaaaaaagtctgattctttccttctgaaaattattatgcaaatacagtcaatttcttattagccatctatctgtaatacacctagctcttcaaattttaacaatgtggtcatcaacaatac

SEQ ID NO: 581210 - DNA, 594 bp, Homo sapiens
cttttttctctaaacttctcttcttgcttcatttcattcatttgatcttcatttgatcttctgaatcaatcttctgaacacccattctgaatttatgtcttagtcattccactgatcactcccttcttaccacttgaacctccaactaattgacctataaactactcacccaatctttaccccactaaacacatactacagagttattctatctcatagaataacatttattaatagaactaaagacctctatttgggttacacagagctactggactgcatcagagaggaagttctaactcagtctggttagcctgccaaacatacatagggccacaggactcaggtgaaaaccagaattacagattgtagatgtttcaaaagtttacatttgaattaattattctgacagcagaacaagactgctttttggccttttttcttttttctcgtcagaagggtttagtaattcagtgttgttaagacacaggttgagagaaatgtatctaatttattaagaatcagaattggagtggaatacgtaaaaggtggcaaaacataaaaagcccrtgatttcagggatgccctagtgac

SEQ ID NO: 581211 - DNA, 602 bp, Homo sapiens
ttttaaaatagttaaataaaatatgtattgcttttgactttctcaaagaagtgtagaagttttgagtcaaaagggactttgaattggagagatgactacttacccaaggtaataaatgtaaattttaaataggaataattatggaatataagccaagagagttaaaattcttaactaatccaaataagtgtaacttacaatataactgttagataaaattgtaagcaaaaactttattgaatgcccactgtgaactcagaacacattcttatgaatatgttgccttactcaaggaagatccatttctagataatattgctaaaatgagttatataaagtcacatttttggtaaagcacayaattaaaatagcttcttgacaattaatctttcttttgtaatatcagtaattactctttattcttcttgaatttggttttctgaaaaaagaataaacctctgctagacattttacattggaggattcataaacgagtagagagaaatcttcaagatttctataatttcacctataaagcaaaatacttggttaaattataattaagcaccacgtactttttttaaaaaagatgaaaaatagaa

SEQ ID NO: 581212 - DNA, 447 bp, Homo sapiens
ttacctcttcctggaattttctatttccttttcttaatttgttgaaagccttcctatccctcaagacgcggctcaaatgccacctcttccctgaatccccagttcgaacgaatccctcctttgtgacttcccatgaattctgctcagacctctatttacaagcattctattcactcaaatgccaatcctgggaagatctttggtaatcagtacagtaatacccttcttctgaacagaaattctgcaggatattaataggtattttgactaaaaggaattctgtgatcaaaaaaaacctgggcaacacagggttaaaaaatgttaagctttctttagtacaagatttctcctagtctttartatgcatgtgtgtgttgtaaatctataagaagaggctttgataaggagcattttccacattttttgtttattttaaattggcagata

SEQ ID NO: 581213 - DNA, 513 bp, Homo sapiens
caccatattccaatctctggcttgtcagccaataaraatgacactttttcctttagctctatcctccacacatggaatagaccaggagagtccttattgacaagctggttaaatgtggatctcacctagtgtaactcccctccttcaagtttctgccttgttttgttttgtttttgttttgagacagagtttcactcttgttgtccaggctggagtgcaatggcgccatctcgacttacagcaacctccacctcctggattcaagtgattctcctgcctcagcttcccaggtagctgggattacaggcgtgcaccatcacacctggctaatttttgtatttttggtagagacagggtttctccatgttggtcaggctggtctcaaactccgaacctcaggttatctgcctgcctcggcctcccaaagtcctgagattaaacgtgtgagccaccgtgcctggccaagtttctgccttttcattcactcttccattccttcaaagagttttgttt

SEQ ID NO: 581214 - DNA, 524 bp, Homo sapiens
ccagaaaacaggcacaaagaagaaatgtcactactaaagacctactcctgtggattgggggacagagggatggtcagttctcagataaagtagacttaaacacttttaatattatctgttgcagtgaggcagattcagataagctgtccaaaaaagagaagcagacagtgtgctagagaacttggcactgaagtacaaatcaactgtctcaaacaggaaaattttatcttttattcaggaccagacctttttatagggacaaatccctagaggaacaggtgggagtgcttaggttgtaggggaagagtcaagaagtcggggattgcaaaatrcacacccttggccagcaatgactttacataatttgttactgggtctgcccacacagtacatgtagggagaaaaaagccattccatatgtactttcactgtttaaagaaaagggtaatatatcacaatcataatgcagtaaagtgacaagggcaccttcccagatggcatgaagtctgccagtagattgaaaa

SEQ ID NO: 581215 - DNA, 546 bp, Homo sapiens
tttccatatgtctgatggccatttgtatgtcttctttcgagaaatgtctactcaggtcctttgtccacttgtgaatcaagttatttgtgttcttgctattgagttgaggtccttatatattttggatattacccctcattagatgtatactttgcaaatattttctccccattctgtagattgttccttcactctgttgtttcctttcctgtgcagaagctttttcgtttgataaaatgtcatgtgtctagttttgcttttgctgcctatgctttgaattcatatctaaaaaataattgcccagaccaatgtcatgaaggtttcctcctatgtttttttcyagtagttttacattttcaggccttatgtttaagtttttaatccattttgagtagatttttgtctgacgtaagacgggggtctaattttattcttctgcatgtgaatatccagttttctgagcacaacttagcaaagtcttctctccccattgtgtgttcttggcatctttgtcaaaaatcaattgaccatgaatgcatgatttat

SEQ ID NO: 581216 - DNA, 477 bp, Homo sapiens
tattgttgttaataatccagaactaaaacacttctgaatttcaccatatcaggtttgcaaaatccttttgacagagctaaatccaagggcacaaatgaaatcaccacagccacatctctatttccccatccctagaacagactcacttcctgtagcacacataatgccatcagcccctcacccttacatcacttagcttgaatgacaacatttttatagacmtatgccaaagaggacagtcactggcccaacttgggtcatgtgcccctccctgtgtccaagaaataggacatcctatttcctttggtcacttggccactagtaagaatgggccctggctgaaccaaatggaatgtgctccctgggggacagaaagattctcttgctatgaatttgtgttcttaaaagtaggagacagggaggccgaggcaggaggatcacttgagcccaggagatcaaaaccagcctgggcaacaa

SEQ ID NO: 581217 - DNA, 614 bp, Homo sapiens
gttaaaaaatagcccagcataggggtaaaatactgctgcagtgtgatatttagaccaatggatagacttctatcgtatgccgtcttmcaatttaagttgtttatattattttctactcatgttttctttctataatcattcccaaaatgtagaattccttgttgtgaaggcaatgtgtgcaataatacatgctttacagtcaatatagacatgagttcaaacctcagctctgcaactcacaagctgagagcctgggatgtgttgttaaatcttaattttctgttttgcaaaacgagagtcaaacctcccagcagagttgtgataactgaattcaacgtagcatgaaaagtgtgtgccatatgtttcatatagtagatatgatgttagtttccccctctgtctccacctttttacttctctttccagcattggcatttatttatgtcttccaatgcaaacatataagatgtctttatagaattatggtgagttctcaggaggctgaggagggaggattgcttgaggccaggagtttgagaccagcctgggcaacatagtgagacctcatctcaaaaaaattaaataataaataattttaaaagaattacagtgag

SEQ ID NO: 581218 - DNA, 614 bp, Homo sapiens
gttaaaaaatagcccagcataggggtaaaatactgctgcagtgtgatatttagaccaatggatagacttctatcgtatgccgtcttacaatttaagttgtttatattattttctactcatgttttctttctataatcattcccaaaatgtagaattccttgttgtgaaggcaatgtgtgcaataatacatgcyttacagtcaatatagacatgagttcaaacctcagctctgcaactcacaagctgagagcctgggatgtgttgttaaatcttaattttctgttttgcaaaacgagagtcaaacctcccagcagagttgtgataactgaattcaacgtagcatgaaaagtgtgtgccatatgtttcatatagtagatatgatgttagtttccccctctgtctccacctttttacttctctttccagcattggcatttatttatgtcttccaatgcaaacatataagatgtctttatagaattatggtgagttctcaggaggctgaggagggaggattgcttgaggccaggagtttgagaccagcctgggcaacatagtgagacctcatctcaaaaaaattaaataataaataattttaaaagaattacagtgag

SEQ ID NO: 581219 - DNA, 564 bp, Homo sapiens
gtgcagtggtgcgatcactactcactgttgcctcaacctcctgggctctagtgatactcccacctcagccttgagagcagctgagaccacaagtgcgggccaccacatctggctaatttttaaaattattatttgtagagaagagatctcgctgtgttgcccaggctggtcttgaactcccgggctcaagcgatcctcctgctatggcatcccaaagtgttggaattataggcataagccctatgcccagactataggaaaattttaaattgtccgcaatcctatccatccaaagatkatggagctaaattattaatgagtagccactatcttctaaacataataacccaagaccatcataatcataatagctaataatcaaatattaacttaggacctgtatccttttctctacatcatttaccatgtgataaatattttcccttctacctttactattgggaaacaaagttccctagagcttacatacctgtactctgactattaaattaattattaaattaaattaaattttctcaaggaaaaaaatactattgtaatagt

SEQ ID NO: 581220 - DNA, 529 bp, Homo sapiens
ggttgaggccatagtgagatatgatgggtgtcattgcactccagcctggacaacacagcgaagataacttaartgtgtgtgtgtgtgtgtgtgtgtgtgtgtgtgcgcgcgcgcgcgtgtgagctatgatgagctatgatggtgtcgctgcactccagcctggacaacagagcaaagataacgtgtgtgtgtgtgtgtgtgtgtgtgtgtgtgtgtgtggtgtatccattttaataagcctatgggaatgtctgcccttatttcctgagataacattagtaaatcattaaaaccttaatccttctcccatttgtattatgtttctgtgactttaatcaaattgacatttcttagaaagaaggcaacattttataattgtgggaaaatgactgaagcaatatgttggtcatgaagcaatatgttgatattgccataattccatgtccatctgtgggactaggtcactgtgacaaactatataataccctgaggacatgggccatgttgcctgtatggctaatggtgccta

SEQ ID NO: 581221 - DNA, 239 bp, Homo sapiens
gagagagaaagcaagcaactttgaaaacatatttcagtttatcatccatgaaaatttatcttgagtgaccaacattcaaattcaggaaatgcaaaaaaaaaaaaaaaccctgtgaaacactaacaagaagatcatccccaagacacatagttgtcagaatctccaatgtcaaaatgaaagaaaaaartgttaaaggcagttagggaggagaggcaggttacctacaaagggaagtataa

SEQ ID NO: 581222 - DNA, 604 bp, Homo sapiens
gaacctaactgaaataggggtttactaaaggacacaaaagacactccatcaggacrcccactgcaaggtaggtggttgttttctgtgttgctttgttttgttttttccatttataattcgtttttaactttgaagatgggatacgtttctagttatttatttattttgacttgtatttcattttatttaaatttttcctagctttagtgaggtataattgacacataaaaattctatatattcaaaatgtactatgtaatgttttaatatacatacatattgtgaataattaccaaaaacaaactaacgagcacatctataagtacacatagttacaactgtggggtgtgtgtgtgagtgcctgtgtgtgtgtgtgtgtgtgtgtggtaacacttaagatctactcccttaccaaatttcaagtaaacaacacgatattattaactatattcacaataaacccacgtgcactgatggtaggaatgtaaattgatacagcccttatgaggtggttgtttttactccttttttgtgtttgtgtatgaaattcttattcaatgaaagaaaagagtgtatgattcatttgaaagaaagcatgactcca

SEQ ID NO: 581223 - DNA, 604 bp, Homo sapiens
gaacctaactgaaataggggtttactaaaggacacaaaagacactccatcaggacacccactgcaaggtaggtggttgttttctgtgttgctttgttttgttttttccatttataattcgtttttaactttgaagatgggatacgtttctagttatttatttattttgacttgtatttcattttatttaaatttttcctagctttagtgaggtataattgayacataaaaattctatatattcaaaatgtactatgtaatgttttaatatacatacatattgtgaataattaccaaaaacaaactaacgagcacatctataagtacacatagttacaactgtggggtgtgtgtgtgagtgcctgtgtgtgtgtgtgtgtgtgtgtggtaacacttaagatctactcccttaccaaatttcaagtaaacaacacgatattattaactatattcacaataaacccacgtgcactgatggtaggaatgtaaattgatacagcccttatgaggtggttgtttttactccttttttgtgtttgtgtatgaaattcttattcaatgaaagaaaagagtgtatgattcatttgaaagaaagcatgactcca

SEQ ID NO: 581224 - DNA, 604 bp, Homo sapiens
gaacctaactgaaataggggtttactaaaggacacaaaagacactccatcaggacacccactgcaaggtaggtggttgttttctgtgttgctttgttttgttttttccatttataattcgtttttaactttgaagatgggatacgtttctagttatttatttattttgacttgtatttcattttatttaaatttttcctagctttagtgaggtataattgacacataaaaattctatatattcaaaatgtactatgtaatgttttaatatasatacatattgtgaataattaccaaaaacaaactaacgagcacatctataagtacacatagttacaactgtggggtgtgtgtgtgagtgcctgtgtgtgtgtgtgtgtgtgtgtggtaacacttaagatctactcccttaccaaatttcaagtaaacaacacgatattattaactatattcacaataaacccacgtgcactgatggtaggaatgtaaattgatacagcccttatgaggtggttgtttttactccttttttgtgtttgtgtatgaaattcttattcaatgaaagaaaagagtgtatgattcatttgaaagaaagcatgactcca

SEQ ID NO: 581225 - DNA, 579 bp, Homo sapiens
caggtggatcacctgaggtcaggaattcaagaccaacctggccaacatagtgaaaccatgtctctactaaaaatacaaaaattagcctggtgtggtggcaggcacctgtaatcttagctactcaggaggctgaggcakgagaatcacttgaacccggtagcagaggttgcagtgaaccaagatcacaccattttactccagcctgggcaacaagagcaaaattccatctcaaagaaaaaaaaagaaagtattagtgtactttctagaatattattcagaataatacattttaataacgtgaaaaatatctagagcagtgattgccgcaattaaaagatgatatataatttgccacaaattttcagttttaaaaatattacctgattagtatattacgaaaaactaatgaaagatgtttgcatgtatttagatgcatctcttctgttttaacatttttttcttgtgaaaaaacattgttaagaaatagcaaaacatgcaaaatgcttatacaatagacaaaatattttcacacaaatttttataatatttaaaatatttcaattattaaatagttctgag

SEQ ID NO: 581226 - DNA, 579 bp, Homo sapiens
caggtggatcacctgaggtcaggaattcaagaccaacctggccaacatagtgaaaccatgtctctactaaaaatacaaaaattagcctggtgtggtggcaggcacctgtaatcttagctactcaggaggctgaggcaggagaatcacttgaacccggtagcagaggttgcagtgaaccaagatcacaccattttactccagcctgggcaacaagagcaaaattccatctcaaagaaaaaaaaagaaagtattagtgtactttctagaatattattcagaataatacattttaataacgtgaaaaatatctagagcagtgattgcckcaattaaaagatgatatataatttgccacaaattttcagttttaaaaatattacctgattagtatattacgaaaaactaatgaaagatgtttgcatgtatttagatgcatctcttctgttttaacatttttttcttgtgaaaaaacattgttaagaaatagcaaaacatgcaaaatgcttatacaatagacaaaatattttcacacaaatttttataatatttaaaatatttcaattattaaatagttctgag

SEQ ID NO: 581227 - DNA, 579 bp, Homo sapiens
caggtggatcacctgaggtcaggaattcaagaccaacctggccaacatagtgaaaccatgtctctactaaaaatacaaaaattagcctggtgtggtggcaggcacctgtaatcttagctactcaggaggctgaggcaggagaatcacttgaacccggtagcagaggttgcagtgaaccaagatcacaccattttactccagcctgggcaacaagagcaaaattccatctcaaagaaaaaaaaagaaagtattagtgtactttctagaatattattcagaataatacattttaataacgtgaaaaatatctagagcagtgattgccgcaattaaaagatgatatataatttgccacaaattttcagttttaaaaatattacctgattagtatattacgaaaaactaatgaaagatgtttgcatgtatttagatgcatctcttctgttttaacatttttttcttgtgaaaaaacmttgttaagaaatagcaaaacatgcaaaatgcttatacaatagacaaaatattttcacacaaatttttataatatttaaaatatttcaattattaaatagttctgag

SEQ ID NO: 581228 - DNA, 590 bp, Homo sapiens
agataaccagttctttgtcacagcagataaaaagctcacagccaagaataccagagcactatttttgtcaggtgcatatcaacatttatgttgtcaccctgggccagcaaaacatttaacagatgtgctgtatctatgttttctaagtatttgatacctatttttatatttcctcaatgatggccccccccaagaaaagccacaaattggcaaagaacgtgaagtaaaaacatattctcttaaagccaaatacataatgtccggattttgtgtttatgtgtatgtgtttaatctagtttaaggtgactcaattttcaaaatcaattcacactaaactttgctatcttccttcataccaagcactaaaacattaaaatgttttaaaatatatttaaaacatgaaatgttttaaatgttttaatgttttaaaatatatttaaatgaaagtttgcataaacttttcctgaaacaatgattcaaaacaccaacaaccatcatgcgaaaaaatattgtcaagttatatttgatggaggtttactggttatgggacatagtatrtatttctgttacagcactattgcaatgtttca

SEQ ID NO: 581229 - DNA, 534 bp, Homo sapiens
atatgctctcatgttttgattaattatgtgtgatatattctttatgtggtrtaatatagaaatgaattttcctagctgacaacataactatttagttaaagaatttgggctaagaccttagagtgtaaagctatccatttacacaagaatagtttccttaagaggaaaaatacgaggttttccctctttcccttagtatgtttactatggaataaatattgcatgagatgaattccaagaacataagcaaatgttttgctgtctttaatactaacatggaaagatatagcaactattctagaaagttctgcgtaaaaaatatttaaaacatgtgccaactaaaagagatattgaatggctcaaaagtaataagacaaagacattaagattatattcccttcatatcagacattttccctattaatattagaaaattgtaaagcgatattaagtcgttcaaatctttcatgagttctatgatcagtaaaacacaaatatttatgtcatgagtttataaaattgcctactattctt

SEQ ID NO: 581230 - DNA, 534 bp, Homo sapiens
atatgctctcatgttttgattaattatgtgtgatatattctttatgtggtataatatagaaatgaattttcctagctgacaacataactatttagttaaagaatttgggctaagaccttagagtgtaaagctatccatttacacaagaatagtttccttaagaggaaaaatacraggttttccctctttcccttagtatgtttactatggaataaatattgcatgagatgaattccaagaacataagcaaatgttttgctgtctttaatactaacatggaaagatatagcaactattctagaaagttctgcgtaaaaaatatttaaaacatgtgccaactaaaagagatattgaatggctcaaaagtaataagacaaagacattaagattatattcccttcatatcagacattttccctattaatattagaaaattgtaaagcgatattaagtcgttcaaatctttcatgagttctatgatcagtaaaacacaaatatttatgtcatgagtttataaaattgcctactattctt

SEQ ID NO: 581231 - DNA, 586 bp, Homo sapiens
ttgtacctgggtgatgaaataatctgtacatcaacatcccaggatgtgagtataccaatgtaacaaacctgcacatgcacccctgaacctaaaataaaagttaaaaaaaaaaaaacactttattttagattgaaaaaaacaaagaaaagaaaaagaaataatcaagacaaaaatcttgaccaacagaccagaagttcttctttggggaaataaaactaataatttattacaaaatgtttatcaagctagttgaaatttcaagtttaaaaaatcttaatgtttgatatattcttagattcattaaatgaagtatgcaaatgtataygtgtaaaaccatagaaataaaatgaatttaatgaactggccaggtgtggtggctcatgcctgtaatcccagcactttgggaggctgagacgggaggatcacaggaggtcaggagctcgacaccaacctgaccaacatggtgaaaccccatctctactaaaaatacaaaaattagctgggtgtggttgtgggcacctgtaatcccagctacttgggaggctgaggcaggagaatcatttgaacctgggaggcaggggttgca

SEQ ID NO: 581232 - DNA, 586 bp, Homo sapiens
ttgtacctgggtgatgaaataatctgtacatcaacatcccaggatgtgagtataccaatgtaacaaacctgcacatgcacccctgaacctaaaataaaagttaaaaaaaaaaaaacactttattttagattgaaaaaaacaaagaaaagaaaaagaaataatcaagacaaaaatcttgaccaacagaccagaagttcttctttggggaaataaaactaataatttattacaaaatgtttatcaagctagttgaaatttcaagtttaaaaaatcttaatgtttgatatattcttagattcattaaatgaagtatgcaaatgtatatgtgtaaaaccatagaaataaaatgaatttaatgaactggccagktgtggtggctcatgcctgtaatcccagcactttgggaggctgagacgggaggatcacaggaggtcaggagctcgacaccaacctgaccaacatggtgaaaccccatctctactaaaaatacaaaaattagctgggtgtggttgtgggcacctgtaatcccagctacttgggaggctgaggcaggagaatcatttgaacctgggaggcaggggttgca

SEQ ID NO: 581233 - DNA, 442 bp, Homo sapiens
ttgacccatttttgaccctaaaagaggaataaattttgagcaatttgacttgtgccacaaaatgagctgcctggagtggtagtaagttcacagtcctgaggtattggaggtgacatagacttcagtgatgtcatagctgggatcactgaatttggattgaaagtgtggtatatctattatcccaagaacctgaakcaaagagaacactgaaaaatggtgaggattggtccccactggctctctgtagccatggcatgtagcaaaatgccattggccagtaatgctgtgaaaatctttcaccttctctgtctccttcattatgtgctgttgtaggtaagaagaccggaagtttcagcttcgggcaagacttacatgataaaaaataagaagccttttaagcaaaaccacaggaaacataattctgttcagtagatttacctgt

SEQ ID NO: 581234 - DNA, 592 bp, Homo sapiens
tatatcaggtatgaaattaaaaactcaatgayacagttaaataattgaatagacacagctggaggtggaatttgtaaactggaagatagatctgaaaaaattacacataatacagcatagaaaaatggaaagtatgaaacaggttaagaggcataaaggatggaataaaaaatatttaatatacatctaagcagagttttgaaaattataagtaaaaagggagagaggcaatattcaaagagacagtacctgagagttttccatgattattaaaaaacatgaatcctcagattcaggaattccaatgatctcaaacaggataaacagaaagaaatccatacatacttcatagatacatcatatctatagatacatcatagtcaaagtgaagaataccaaagacaagaagatcttaaaagaaccaaaaaaataagtatttttttgttcacaactttttttttttttttttttagaaagggtctcactctattgtccaaactggagtgcagtagtatgatctcagctcactgcaacctctgtatcctgggctccattgatcctccagcctcaaccccccaagtagctgggacta

SEQ ID NO: 581235 - DNA, 604 bp, Homo sapiens
attgggttgtttgttttcttattattgaattttgagagttctttatatactctggctacaagacctgtatcagatatgtgatatgcaaacattttcccaatctattacttacctttttgttgcattaacagtttttttttwaattttatttttattttctttttttctttttttttgagatggagtcttactctgtcacccaggctggagtgcagtggcacgatttcggctcaccgcaacctctgcctcctgggttcaagccattcttctgcctcagcctacccagtagctggtattacaggtacacaccaccacgcccagctaatttttgtatttttagtagagatggggtttcaccatgttggccaggtgggtctcgaactcctgacctcatggtctgcccaccttggcctcccaaagtgctgggattacaggcatgagcctctgcacccggcctattttaattttttttttgagacggtgtctcactctgttgcccaggctggagtgcaatggcatgatctcagctcactgcaacctccacctcctgggttcaagcgattctctggtctcagcctcctgagtagctgggattacaggcgcc

SEQ ID NO: 581236 - DNA, 604 bp, Homo sapiens
attgggttgtttgttttcttattattgaattttgagagttctttatatactctggctacaagacctgtatcagatatgtgatatgcaaacattttcccaatctattacttacctttttgttgcattaacagttttttttttaattttatttttattttctttttttctttttttttgagatggagtcttactctgtcacccaggctggagtgcagtggcacgatttcggctcaccgcaacctctgcctcctgggttcaagccattcttctgcctcagcctacccagtagctggtattacaggyacacaccaccacgcccagctaatttttgtatttttagtagagatggggtttcaccatgttggccaggtgggtctcgaactcctgacctcatggtctgcccaccttggcctcccaaagtgctgggattacaggcatgagcctctgcacccggcctattttaattttttttttgagacggtgtctcactctgttgcccaggctggagtgcaatggcatgatctcagctcactgcaacctccacctcctgggttcaagcgattctctggtctcagcctcctgagtagctgggattacaggcgcc

SEQ ID NO: 581237 - DNA, 475 bp, Homo sapiens
tgcttcctgccctcgacattggagtccaagttcttcagctttgggacttggagtggcttccttgctccttggcttgcagatggcctattgtgggatctcaccttctgattgtgtgagtcaatactccttaataaactcccctttatatatacatctatcctattagttctgtccctctagagaaccctgrctaaaacaattgtctttttaaattcagtttgacatcttcctagtttttgagaatactttttagtttttttattaaaacctgaacatttcatattatgttatgagactatgggacttttttaaaccttctgttttaacagactttttctgacactgctctggttgggggagagaggaacaccatgtcattattgctaggtgcaggtagtagtctagtttctccactcagaatccatgatacctgaagatgagagctcctcattatttacaggcaggggtgggactt

SEQ ID NO: 581238 - DNA, 486 bp, Homo sapiens
agtgatcctcctgcctcagcctcccaagtagttggaactacaggcatgtgccatcatatctggctcatttttttatttttttgtagagatggggtcttgctatgtttcccaggctggtcttgaactcctgacctcaagtgatcctcccgcctcggcctcccaaagtgctgggattataggcatggtcccaccatgcctggcctaccataattcttaagggccctaggattttcagaaaggtaaatgaayattggcttcaatttaaagtcaccagctgcattagtccctaatgagagagtcagcctgcctttcctttgaagctttgaagccagacgttgacttctctatctatgaaagtcctaaatgacatcttcttccattagaaggctgtttcatctatgttgaaaatctgttgtttagtgtaaccactttcaccaattgtcttagcttgatcttctgaataacttgctgcaatttcttgatcag

SEQ ID NO: 581239 - DNA, 495 bp, Homo sapiens
aagttgtttagaaaattagctgggcgtggtgatgcatgcctgtggtcccagctacatgggaggctgaggcagaaggatcacttgagcccaaggaggttgaggctacagtgagctgtaatcatgccactgcactccagccttggggacagagtgagaccctgcctcaatcaatcaatcaatcaataacaaaaacttaaatagctattaacctcagtcttctttccttcatataaattctattctaagaccaaatagaaaaataaatgtaactaactttgcagagctattgacattgagagacctaacaacagactgcaatggggattgtaaaataacttttcagccttgcacttgctcatatatgttttgagaaaaatgtaagttaggtataacttattgtttwaactattataaggcagtgtttacataaattaatcatctctttcttggaaaacattgagacaaatttattttcagttttacttaaacatgaaa

SEQ ID NO: 581240 - DNA, 585 bp, Homo sapiens
aagtaatatctaacttagttttttccaaatatacagctgattgcctcaacatctctaatttctcctgttttaaaaaatgctaagcatatagttatatttacatatctttacatatgtgtactatatagttttatatatgtattaaacatatgtcaaataaatatccatgcttacctgtatatatagcatatgtttatataacatacagatgtgtatttatattttgtttcattgatatattgtactttttatgccactaatacattattttaattattatattctagagtatagtttaatataataaaaagtctctatttattatccytttctgatatttttatacatttaattttccacatgcagaattgcaagtttttaatggatcatattaaaaaatagatcttattaagattcattaagaaatctaattgagatttttgtttgcattgaatttacaggtcaattttggaagaatttatgtctttgtaatattgagtcttctcaatgagaaaatcaaaaggtaaaaaacaacagatgttggcaaggctgcgaagaaaagtgaatgcttatacactgttggta

SEQ ID NO: 581241 - DNA, 585 bp, Homo sapiens
aagtaatatctaacttagttttttccaaatatacagctgattgcctcaacatctctaatttctcctgttttaaaaaatgctaagcatatagttatatttacatatctttacatatgtgtactatatagttttatatatgtattaaacatatgtcaaataaatatccatgcttacctgtatatatagcatatgtttatataacatacagatgtgtatttatattttgtttcattgatatattgtactttttatgccactaatacattattttaattattatattctagagtatagtttaatataataaaaagtctctatttattatccttttctgatatttttatacatttaattttccacatgcagaattgcaagtttttaatggatcayattaaaaaatagatcttattaagattcattaagaaatctaattgagatttttgtttgcattgaatttacaggtcaattttggaagaatttatgtctttgtaatattgagtcttctcaatgagaaaatcaaaaggtaaaaaacaacagatgttggcaaggctgcgaagaaaagtgaatgcttatacactgttggta

SEQ ID NO: 581242 - DNA, 594 bp, Homo sapiens
gcaaaatctgataataattttattcttgtatcctgtaatcatgaaaaatttacttactgataacattatatagatttcctttttttttggattttgtctacacacatatatatcatctctaagaaatgacaaatttatttttttcttacccatccttattgcttttactttttttcttacaacaatctatactacaatgtttacaagttaataatgctaatccctttcctgtttctgttttcrtaaggttttcagtattatgcatttaattataatgatgtattagtctgttctcactctgctaataaagacatacccaagacggggtaatttgtaaagaaaagaggtttaattggctcacacttgcgcagtgcgggggaggccacagaaaacttacaatcatggcagaagggaaaacaaacacgttattcttcacatggtggcaggaaggagaagtgatgagcaaaaggggaaaagccccttataaaactatcagatcttgtgaggactcactcactatcacaagaacagcatgagggtaactgcccccatgattaaattatttcccatcaggtgcctcccacccccaacaca

SEQ ID NO: 581243 - DNA, 504 bp, Homo sapiens
tttccattgctaaatttgtttcaatgtatgttttctgaaggatccaattgcacacgttttgggtactagtaatatgcaaagtatacactttgagggaaaggtgctattacaagagaataagatattcatttttaataaaatagaaaataatcaagcatcaaccatcagaatatatgagatatgtatctttagatacccaggaacacagtttgaaaatgtataaggcatatacatttaaaaaggtagattagccaaatcccgtatcaaaataggagacttttctttcaacttttattttaggttcagggcgtatatatgcaggtttgttatatgggtaaatagcatgtggctggagtttggtgtacagatgattttgtcatccaggtagtgagcatatacccaataggtagttttttgagcctcgccctcctcccatctacctgctttaagaagtcccyggtatctattgttcccatctttgtgtccatgtgtactcaatgttca

SEQ ID NO: 581244 - DNA, 562 bp, Homo sapiens
aataaaattcagtccctatgcacatacgaacagcagttcacattaaatattttacaccagagttatgttaactgtcttgctctgttgcaatacatcttgaaaggaccttgatcatcttgacattccatgtaattcacagtcayccactgtaatgctccacaatatcattctaattatacctaaagaacaggaattaacaagtacactagatgccctaacaagaaatacgcatgccaggaaataaaagatagaccccacaaaggttcagcctgcccatgctgaaatgtgtaagacttcagtaattagagatattaattagaagtgctaagaatttctcttcaaggcaaagggcaacattactgaatgttgccttttctatcactgagaatgaggcagaattatggtactcctctttagtatttggagacaacatgtactatatcagaaagctaccataattaattttaaatgtcaatttgactggaccacagggtgccctgatatttggttaaacattatttctgtgtatatatttatattcagggctatcaagtagttatta

SEQ ID NO: 581245 - DNA, 569 bp, Homo sapiens
gcctgtccttcacttcaaccttgtcccaaattataatgattttgtttacttggcttctgataactaagggttgacagaaattgagaggtaccagctcctaatggggagacatgagaccctactgcaggctcagagagttgaggaaaatctggaaatgcatggttatggggcacatcagcccaattatttgcatcccgtgtgtcacaaacccattctggcccagctagggacctgatcttgagatagctgatctacataatttgatagagtaactttctttgaaactctgctactctaataacttacaagtcctcagctttttcttccttctggctacagaatttgagtctttttctatactaaacaagaaggcctctgacttttatgtaaggagttgtttgttaatcactctcattcttttatgttttaaagcataaattatgattaggaacatcaactcaattccaaattcctcatagttactaattctctcttattctaaaaaacaaacaaacaaacaaaaaaacaaaaaaaaamccacaagattttatattttgtacctactagtt

SEQ ID NO: 581246 - DNA, 623 bp, Homo sapiens
gtgtgtatacactcacacacacacacacacacacacacacacgtacacatataaatgtatgcatacacacatcataccagacttctggatcagatataacttttatgatcaaaattgtcaagggtctgaatatatatctacatatagacatttggtgtttataggcacacacacacacacacacaaatacacatatatgcaaatacatgacttctagataaaaaatatttacttagaaagcatcttgtatttattttgctttgagccttaactaaaaagaaaaataattagattattttaaatataaataatatcttcattctaacatatattattctaatatgttaattctctcttaagattcttattcattttgcaaaatattgtattacaatactagtaaaatggtaattacaagaggttggggtgggggatataggtagctgttcaataggtataatgttaccattatataagataagcaagttccagggatctgctataaaacataatgcctatagtttaacaataaggtattgtgtacttcaaaatttattaagagggtagatcttatgttaactgttcttaccccmaaaaaacaaaaacaaacaaatgaacaaagg

SEQ ID NO: 581247 - DNA, 365 bp, Homo sapiens
gtatttaatttcttaagatatttgccatattttctttatcgtttttctttttttcttagctgaatttttaatataaatatcagacatcatgtcattaaatacttatgcagtccttcagtatatatatctaaaaatatgaattttctacaaagctacaataatatcatacttaataaaattaataataatgtggtttcctctcttatttatgttcaaatatcttccactttattaaaaatgccttttaggctatttttttttcctctttaagatcaaaacaaagactgcatattgcagttgtttgttagatccyatacctccttttaactgggagagctctttctctccgctattttgctattgaa

SEQ ID NO: 581248 - DNA, 489 bp, Homo sapiens
ttttataatgacaattcagagaaattatctggtagaatttcatagttatttctatttctctttataataatgttaktaattattgaatctatcaactccaaattgtacacaaagattagttgtttaattgcttaattataagaaataagctaaaagcaactgttagtgtaatttcataaatgaaacatatatttgatgaccaaatacaacataatatgattgacagcaatgttaaaaagtgcttgtttttcaaacatcaactttttcttttttttttttttccaacaaagaatctgatttatttttaaagtggccaaagtataggaacattatttaatttttagaaatcttgattgtaaaaaaatttttaaaaatgtgatttgatagcttatttaatttttgtgagtattttttttattatactttaagttttagggtacatgtgcacattgtgcaggttagttacatatgtatacatgtgccatgctg

SEQ ID NO: 581249 - DNA, 489 bp, Homo sapiens
ttttataatgacaattcagagaaattatctggtagaatttcatagttatttctatttctctttataataatgttattaattattgaatctatcaactccaaattgtacacaaagattagttgtttaattgcttaattataagaaataagctaaaagcaactgttagtgtaatttcataaatgaaacatatatttgatgaccaaatacaacataatatgattgacagcaatgttaaaaagtgcttgtttttcaaacatcaactttttcttttttttttttttccaacaaagaatctgatttatttttaaagtggccaaagtataggaacattatttaatttttaraaatcttgattgtaaaaaaatttttaaaaatgtgatttgatagcttatttaatttttgtgagtattttttttattatactttaagttttagggtacatgtgcacattgtgcaggttagttacatatgtatacatgtgccatgctg

SEQ ID NO: 581250 - DNA, 567 bp, Homo sapiens
tttcaaactacctatctaacaaaagattaataatcagaatatgtaagtagctcaaacaactctataggaaaaaatgtaatcatccaattaaaaaatgggcaaaagggctgggtgtggtggctcatgcctctaatcccagcactttgkgaggccaaggcaggtggatctcttgaggtcaggagtttgagaccagcctggccaacatagcaaaaccctgtctctactaaaaatacaaaatagcagggcgtggtggcatgcacctgtaatcccagctactcgagaggctgaggcaggagaatcacttaaacccaggaggtggaggttgcagtaagccaagattgagccactgcactccagcctgggcaacagagcaagactctgtctccaaaaaaaaaaaaaagaaaaaatgaaaaaaaatgggcaaaagatttgaatagacatttttcaaaagaagacacacaaatggcaaacaggtctatgaaaatgtgctcaacatcactgatcatcagagaaatgcaaatcaaaactacaatgagatatcatttcaccctcgttattaaaatggct

SEQ ID NO: 581251 - DNA, 517 bp, Homo sapiens
tcattttttgctgctataacagaataccacagatgaagacatttataaagaatgaaaatgtatttctcacagttctgaatgctgggaagtttaagaccaaggcactagcatctgatgagggccttcttgctgcatcctcatatggcagaaggaggaaggcaaaaggggacaatgctatttcctcacatggcaaaagagcaaacccactcctgcaagccctttttctaaaaaataaaaaataatctgttgtcaacaaaggtgatatatacagcaggaaaataaataacaaggagagagggagtgaatgaatcctcccggagggctgcttccaccctctttagagatggagcgggaagaggtaatggaggcttactggtctaggaacctgaacaagttgggaaggaggaatgtccsctgaggtagtaggactcagttcaaaccccattttgtaaggcactgtgccaggggatggtggtgcagaattagcccattcatgaagagtttgccctcatgatct

SEQ ID NO: 581252 - DNA, 520 bp, Homo sapiens
tttttttgtttgtttgttttttgatttttgttttccccctaccctcgcctcactctctctctttcctctctctctctctcttwactctctctctctctctttctctctctctttctctttctgtgtgtgtgtgcatgtgcaaggatgggtggagccagcttgcttctaaactgacattttggaaactaatgttttgagtgttatctggaatttcttccttctatcctttttcttttaagctttctgcattcttaggttttaagttcatctcctgaaaataatacatagttgtattgattttatatctatcttgacaatttgttttaattggtgagcctttgatttggaatattattggactcatctctgaaatcttattatgtgctttatttttttctctctttattttttgtactttattcttttccctctttttcctctgtcttatattttcatctctttttacttcattgaagggtaggataggatttttcttggttttctaatctttttttttttt

SEQ ID NO: 581253 - DNA, 520 bp, Homo sapiens
tttttttgtttgtttgttttttgatttttgttttccccctaccctcgcctcactctctctctttcctctctctctctctcttamctctctctctctctctttctctctctctttctctttctgtgtgtgtgtgcatgtgcaaggatgggtggagccagcttgcttctaaactgacattttggaaactaatgttttgagtgttatctggaatttcttccttctatcctttttcttttaagctttctgcattcttaggttttaagttcatctcctgaaaataatacatagttgtattgattttatatctatcttgacaatttgttttaattggtgagcctttgatttggaatattattggactcatctctgaaatcttattatgtgctttatttttttctctctttattttttgtactttattcttttccctctttttcctctgtcttatattttcatctctttttacttcattgaagggtaggataggatttttcttggttttctaatctttttttttttt

SEQ ID NO: 581254 - DNA, 474 bp, Homo sapiens
ttgaaggaaaggacaagaattctctatgggaaataataggagaatttgtgaaaaaatatttatcttaattccaatttgacttctaagaaaccagaggtaaaccagaaggtacttaatttgctcaatatctcacattctgcaagtaacaaaacctaataattgaagttaaaattaaagcaataatgatgataatggtgttagtagtagcaggaatatctgtaatttatgaagttcttgcaatgagacaagaatgtgccaccacttcccatgtactatctatttaaytattacattctctagacaataggaggagacaatggttcaagtaaattaaggcattagatatgtaaacagggatttacttttattattggagctgatgactgctggcaaagacttctataccagccaatcacattgcacttttcttcaaaaatagttctcaaattaatatcaggaaaaattcattgttgg

SEQ ID NO: 581255 - DNA, 474 bp, Homo sapiens
ttgaaggaaaggacaagaattctctatgggaaataataggagaatttgtgaaaaaatatttatcttaattccaatttgacttctaagaaaccagaggtaaaccagaaggtacttaatttgctcaatatctcacattctgcaagtaacaaaacctaataattgaagttaaaattaaagcaataatgatgataatggtgttagtagtagcaggaatatctgtaatttatgaagttcttgcaatgagacaagaatgtgccaccacttcccatgtactatctatttaactattacattctctagacaataggaggagacaatggttcaagtaaattaaggcattagatatgtaaacagggatttacttttattattggagctgatgactgctgrcaaagacttctataccagccaatcacattgcacttttcttcaaaaatagttctcaaattaatatcaggaaaaattcattgttgg

SEQ ID NO: 581256 - DNA, 525 bp, Homo sapiens
tcaagaagcacaagatgctttattgaatgcctccacttcaccgcagccttcagtttctcccctaactagaagactatttccaaggtataaagagttatcccatttatcgttgtacgtgatctttacagaaagtgtgtaaatatcataaagggcatttcatgtccgtcttacagtggaagaaaaaactgaagcctatggacttgccccaaaacacacagctggtaaatggttatgggtgtttctgcctattagtccmatgcgtctaccaaacgttgggttaacttttgactgctagaaaactggtgattagagaacatgaccaatacatggaatttccgctgaaagccccacaaatattttgtctttaataattgatatctttgaatcctgtttacctaatccagaatcaatggtaaatgggatataatctctagtttcccaactgttcacctgatctccacttttctcccctgcaaaacattattttactgtactactagagatgttttttctaaagcacaaaaa

SEQ ID NO: 581257 - DNA, 525 bp, Homo sapiens
tcaagaagcacaagatgctttattgaatgcctccacttcaccgcagccttcagtttctcccctaactagaagactatttccaaggtataaagagttatcccatttatcgttgtacgtgatctttacagaaagtgtgtaaatatcataaagggcatttcatgtccgtcttacagtggaagaaaaaactgaagcctatggacttgccccaaaacacacagctggtaaatggttatgggtgtttctgcctattagtcccatgcgtmtaccaaacgttgggttaacttttgactgctagaaaactggtgattagagaacatgaccaatacatggaatttccgctgaaagccccacaaatattttgtctttaataattgatatctttgaatcctgtttacctaatccagaatcaatggtaaatgggatataatctctagtttcccaactgttcacctgatctccacttttctcccctgcaaaacattattttactgtactactagagatgttttttctaaagcacaaaaa

SEQ ID NO: 581258 - DNA, 525 bp, Homo sapiens
tcaagaagcacaagatgctttattgaatgcctccacttcaccgcagccttcagtttctcccctaactagaagactatttccaaggtataaagagttatcccatttatcgttgtacgtgatctttacagaaagtgtgtaaatatcataaagggcatttcatgtccgtcttacagtggaagaaaaaactgaagcctatggacttgccccaaaacacacagctggtaaatggttatgggtgtttctgcctattagtcccatgcgtctaccaaacgttgggttaacttttgactgctagaaaactggtgattagagaacatgaccaatacatggaatttccgctgaaagccccacaaatattttgtctttaataattgatatctttgaatcctgtttacctaatccagaatcaatggtaaatgggatataatctctagtttcccaactrttcacctgatctccacttttctcccctgcaaaacattattttactgtactactagagatgttttttctaaagcacaaaaa

SEQ ID NO: 581259 - DNA, 412 bp, Homo sapiens
acttgaggtcaggaggttgagaccagcctggccaacatggtgaaacccggtctccaataaaaaataaatagataaataaataaataaataaataaatawaatatacagaactgtaaagacagagaaaaatgaggggaggaggtatgctacatgcataacaggaaggttggtatcagaaatctcgaatggcctactgcatgccatgtagccatgatgttttgtattttcttattttgattttactttcatcttaaacaaaaagcactttccatgataggtcttatttgaatcactattactctgcttaattctaatacaataatacacaaaatatgtaggctagatttccttgcttgagaaaaatgctgtagtgaaggatttcactcctaagtctgtttatgattcatctact

SEQ ID NO: 581260 - DNA, 344 bp, Homo sapiens
tggaatgaagtttctttgtactccctttgagaaaaggtcttgttaagtaaatgagaagcatcatcaaggattcagatttgtttacagatacagtaagcartcatatatgtcaaagtgtccatattcataaaacaaatgttaaatgccagggacaggcacagggggtagaccatttgaaaatcttcattacctaaattgtattccaggacttgaaaatatttgtccagcaccatgccaggctaggagcaacaacccacacgctgtttaaactatggcaaagtagtcataggagcataatctctagagtcagacctcccggatgctaatcacaattctaccctcac

SEQ ID NO: 581261 - DNA, 344 bp, Homo sapiens
tggaatgaagtttctttgtactccctttgagaaaaggtcttgttaagtaaatgagaagcatcatcaaggattcagatttgtttacagatacagtaagcagtcatatatgtcaaagtgtccatattcataaaacaaatgttaaatgccagggacaggcacagggggtagaccatttgaaaatcttcattacctaaattgtattccaggacttgaaaatatttgtccagcaccatgccaggctaggagcaacaacccacacgctgtttaaamtatggcaaagtagtcataggagcataatctctagagtcagacctcccggatgctaatcacaattctaccctcac

SEQ ID NO: 581262 - DNA, 615 bp, Homo sapiens
tagtaaatctctttatacctattggttattattatagagagaaccctacctagtgcaagacttttcttctctttcttattctgcacaacttgtgaaaaatgctaactgatgaggggctcacttagaacctcagtgatggttgcaatgacactcatatgttttattttcctagacacacaaaatgaactatctaaagtaaagtttgtaaatttaaatataggtgctactatttcaaacacataccctgacagtttacattaactgtttccccagagtaataaagagcatgaataagtaggaatattttgtagctacttgaagttgctggactttgaatacttatgtaactactagatccttgactaaaaacctacttttcttccatgtgacagtatccatgttactattctgagaaagatttagtaggcaaatggtattgaaaagtcaatgtaatttacttagaaatgattaatgaaccaaacagacatctgtttacaccagcttactattttttttcaattatactttaagttttagagwacatgtgcacaacatgcaggttagttacatatgtatatatgtgccatgttggtgtgctgcacccattaactcgtc

SEQ ID NO: 581263 - DNA, 531 bp, Homo sapiens
aattggaacaacaacaacaaaaaagagaaacacaaatggcaaacaggtatatgaaaacatgctcgacatcattgataatcaaagaaatgcaaatcaaaacttaagtgacatrtcatctcaccccagttaaaatgtcctttatcgaaaagacaggtactaataaatgctggtgagaatgtagagaaaagggaactcttgtacactgttggtgggaatgaaaattagtacaaccaccacagagaacagaatggaggttcctcaaaaaactaaaaattgagctaccagacaatccagcaatctcactgctcaccatatacccaaaagaaaggaaatcagtatattgaagagatatctgcactcccatgtttattccagcactgttcatgatagcaaaggtttggaagcaatctgagtatccatcagcagataaatgagtgaagaaaatgtggcatatatgcacaatggagtgctactgagccataaaaaagaatgaaatcctgtcatttgcaaaaacatgaatgtaattggaga

SEQ ID NO: 581264 - DNA, 450 bp, Homo sapiens
ttaatactttaacactttacaatactttatatattattttatataattgtcctcatagagtatatgtaagtttgtgtcatgtattatatgcctagtgttacatcctaaacatgtccccagtggtaaccactgtttgtttttatggcagcactgtattaaatttaagtaataatttactgaataatgtctgtattgttggatatttagaatttttctgctttgtgatcataataaacaatgtaattggtacagggctttaaaatgtgataattatttagaccatcactgaagtcccaaaatactagctaccatattccaaagttaagtcaagaaaccatgaagggccgggcgcaggggctcatgcctgtaatcgcagcatttsggaggccgaggtgggtggatcacatgaggtcaggagttcgagaccagcctggccaacatggtgaaacc

SEQ ID NO: 581265 - DNA, 596 bp, Homo sapiens
atctgcacaatttccctacaataaattgtcaagcttcatctggtcatccctataaactcaatatactctaagcaggttgttaagtacattcaaggatttcacaatgaacagctgagatccagttatcattaaaatgaagtgctgacactggaataaagccacaagaaagtgtttactgctactgctgctctggaattataatcatttctttgcttggcctttagaggactgaatcatctgatgcatatctatcttgtttagtaataagatttgaaacctaatgttgaaatgtccatatctatgtttattagaactagaaaccaggtccacattaagctcacaaaaccatagcttctttattaattgcctacatttattatctatgctggctgcayacaattttatgaagtgataactattttccagtttaacagagtatgagctgcaaagtggagagtttgggaagaagcttgacatttagtaggaagcaaaagataagagtgaagtgttcctctcccctctccccacggtctccctctccctctctttccacggtctccctctgatgccgagccgaagctggactgtactgctgc

SEQ ID NO: 581266 - DNA, 596 bp, Homo sapiens
atctgcacaatttccctacaataaattgtcaagcttcatctggtcatccctataaactcaatatactctaagcaggttgttaagtacattcaaggatttcacaatgaacagctgagatccagttatcattaaaatgaagtgctgacactggaataaagccacaagaaagtgtttactgctactgctgctctggaattataatcatttctttgcttggcctttagaggactgaatcatctgatgcatatctatcttgtttagtaataagatttgaaacctaatgttgaaatgtccatatctatgtttattagaactagaaaccaggtccacattaagctcacaaaaccatagcttctttattaattgcctacatttattatctatgctggctgcacacaattttatgaagtgataactattttccagtttaacagagtatgagctgcaaagtggagagtttgggaagaagcttgacatttagtaggaagcaaaagataagagtgaagtgttcctctcccctctccccacggtctccctctccctctctttccacggtctccctctgatgccgagccraagctggactgtactgctgc

SEQ ID NO: 581267 - DNA, 545 bp, Homo sapiens
tccattttatgaataaatacataaaaatatagggtaaaaatatatgtatttaataggattcttacaactttctattagcacaatgagtgcagagcatttgtgaataacatagaactagggtctcccctacagcttttgagttaagtctttttctaacaactgctatttattcagagaggatgcgaagtaacaggtctaaacattacattggcaaaggagtacctttaaattgtatgtggcacaagctaaatctgggaaaggaaatgaaacacaaatgaaagggcaacttcttctggaaacctcccttcctttgtggtatttttgtccttcctccattccatgaatcctattaagaaaaaaatttctcttttgcyttctaattcccaaatctttactgcttttctttaacaaggcttccaagaagaatcggaaggtgaaggaagggatggccataaagaagactgttctttagatgagatttttgtcatattgttactgaaacaccaggggtttggtctaggtccccgctgctcccaacacataag

SEQ ID NO: 581268 - DNA, 581 bp, Homo sapiens
atgataatagttaattcttgaccataggaatatatatttataacttttatgtttttacaactctaaaaccatacaactttcagaaacttcagtcctattatttccacgcaagtttttgttagaactaaaataactcaatagcactaaaagtaaccagacaatagttagacatatctttagctatggccatgaaaacatctttgtaygaagctgtatccagatcaatctctctaatgtgatattttggactttatgtataaaggttggagactcagatatggtaatgcctttcttgcacctaaatatttataaaagataaaaatatactagttgcaagaaaaaattttaaatgtcataacacttaggaagcctgaactctcactcaagccatgctttcactcttgtacactgggaggtgggcccaatcactgatggtctctaaaggccttttccaacctgtgttatgcaatagtattcatggaagattccattccacccttatccgggattaggggattctttataaatttccctagaatttgataggaagtagaaaagatatgatccaacatattctaaat

SEQ ID NO: 581269 - DNA, 608 bp, Homo sapiens
attattttcatctgcaaaacagtgtttgaggatagctattaaatatctgtcattgtggtcaaaatatagcatctttattttgttttagatcatagacctaaaagaaagactgttaaaatttaaawgaatatgtaataaatggctaaatttatcttaaaaatcccctattacacttcacagcatgttttcttttctggaagatttcaaagaaacagaaaaaccacagtgttatggtaaataaacatacagaaatgatttaaatttttaatcattttataatatttattttatttgatagaaataatactctgtggacatatcaaaagccataagttgctttatagaagtcctgtcatttcaaattttttaatacatttatttatgttcacagagagtaggtaattttttcgtgaattttttaaatatgcataaattatatagcctataaaggcaggaattgttgtctttatggtttataacataggggcaagaagaaattttccctttaaatctgaaggttctctaaaaatcaaccatcaaaaagcaggttaacaggagaaaagcatacacaatttattttaatatgcatagcacatggaaactctatg

SEQ ID NO: 581270 - DNA, 631 bp, Homo sapiens
ataagcaaaaaccttggcatgtgaattttctctaaggcactatgtatcagttataggaatgctatgagaaagcctatctggctgggtttgcacatatttttccagtggtgtatgcatgcacgtatgtgcacatgcactgtgtatgtgtgtgtgcatcctaatacaccaaatgcatgcaaatgggtgatggataggtagatgatcttaggttttgctgtttggaattttatcactgaaaacccaaactagagtcatagtgagaatcactgaaaaaggacttcaattatggaaaacatgatctgctgtattagccagaaagctcatcaatttatactcttccatctattgagaacaaaacaatactcgttttctgtccragcaaatgagcaggcttgctgaataaaactatggtaagtagcaatactaaagaagtcttctaattctttacagactcagaaaccccaattattgctcaaacgtagagaaagaaaaaaaaacagaagacaagcatagagaaatatgtccacaaaattcattgaaatatttttatctccaaaatacattttgaactaaaaataaataaataaacaaagtgatgagaggcaaagttacctggggaaaatgaaacctg

SEQ ID NO: 581271 - DNA, 468 bp, Homo sapiens
atttttaacaacgatttgtggaagtgcatctggwaagattttatttgttcccatttacatggtgaatcacaattctggccatttcctgtctcttgcctgtataatttcaattaaacaaaacaaacctaagacaactagtccatcttcccaatggcaagataaatgctttaagactgagctataaggaacaagctcagaaaaggttattagaatttactataaccaatctggttctctatcattcagaaatagtcttatggtgtgggtcatgctgtttgcctcaaaacagatttttctagttacacagagctcatattgaaatgaaactggtgggggaaaaaatatagctccctagagttgtcttattacccaacagatttaaaacagagctaatggaataaagggagaatgataagctgtaagagacatacaaagtgtgtgctccattggattctgaccaaaatcaga

SEQ ID NO: 581272 - DNA, 506 bp, Homo sapiens
acaaaattcaaactatatgattcaattwatattatgtgtcaaaactaatctatattcccttgtggagaagaggtgtggtaggtagcagggtgtttgaaagagacttttagggtgcacatacagtcatccctcagtatctgctggggattggttccaggacccctggaataccaaaatccacaactgttcaagtcccttttataaaatgacatagtatttgcaaataacctaggcacttcttccagtatactttatcatccctaaaatacttacagtacctaatactatgtaaaaactatataaatagtcattatactttgctttttatatattatattgaatattttcaattcatggttggttgaatctgtggatgcagaatttgcagatatggagggctgactgtaatgttcaatttactgacctgattgatgatagaggtggtatgttcacttttatcacactaattacttattttttgtgtacttcaataaaatgtctataaa

SEQ ID NO: 581273 - DNA, 547 bp, Homo sapiens
tgccactacgcctggctaattttgtatttttagtagagacagggtttctccatgttggtcttgaactcctgacctcaggtgatccacccacctcagcctcccaaagtggtgggattacaggcatgagccaccgcaccaggcccagtttaacttttactaacattaaaagtaggaatgagaaaaagatatcttgagatctaatatttggatttatgtgagattagttattttctaaacctaagagaaaatccactgtttttaaaagacctcaattaacaawatttcattcattttcctatttatgtttctaaatagtcctaaatactagtgttctttatggagaaaattactcaaatatataacaaatgcttaattacatgtaatgtccatgaggacagagaccatgtctctcaacaaatatttcttgagtaaatcaataaatagaatataaatgtgtgtacatatatacacattcacacatacacatacatatttgtaatacatcatgtattatatgtgttacatgaatgtaacatataattaacac

SEQ ID NO: 581274 - DNA, 547 bp, Homo sapiens
tgccactacgcctggctaattttgtatttttagtagagacagggtttctccatgttggtcttgaactcctgacctcaggtgatccacccacctcagcctcccaaagtggtgggattacaggcatgagccaccgcaccaggcccagtttaacttttactaacattaaaagtaggaatgagaaaaagatatcttgagatctaatatttggatttatgtgagattagttattttctaaacctaagagaaaatccactgtttttaaaagacctcaattaacaatatktcattcattttcctatttatgtttctaaatagtcctaaatactagtgttctttatggagaaaattactcaaatatataacaaatgcttaattacatgtaatgtccatgaggacagagaccatgtctctcaacaaatatttcttgagtaaatcaataaatagaatataaatgtgtgtacatatatacacattcacacatacacatacatatttgtaatacatcatgtattatatgtgttacatgaatgtaacatataattaacac

SEQ ID NO: 581275 - DNA, 547 bp, Homo sapiens
tgccactacgcctggctaattttgtatttttagtagagacagggtttctccatgttggtcttgaactcctgacctcaggtgatccacccacctcagcctcccaaagtggtgggattacaggcatgagccaccgcaccaggcccagtttaacttttactaacattaaaagtaggaatgagaaaaagatatcttgagatctaatatttggatttatgtgagattagttattttctaaacctaagagaaaatccactgtttttaaaagacctcaattaacaatatttcattcattttcctatttatgtttytaaatagtcctaaatactagtgttctttatggagaaaattactcaaatatataacaaatgcttaattacatgtaatgtccatgaggacagagaccatgtctctcaacaaatatttcttgagtaaatcaataaatagaatataaatgtgtgtacatatatacacattcacacatacacatacatatttgtaatacatcatgtattatatgtgttacatgaatgtaacatataattaacac

SEQ ID NO: 581276 - DNA, 547 bp, Homo sapiens
tgccactacgcctggctaattttgtatttttagtagagacagggtttctccatgttggtcttgaactcctgacctcaggtgatccacccacctcagcctcccaaagtggtgggattacaggcatgagccaccgcaccaggcccagtttaacttttactaacattaaaagtaggaatgagaaaaagatatcttgagatctaatatttggatttatgtgagattagttattttctaaacctaagagaaaatccactgtttttaaaagacctcaattaacaatatttcattcattttcctatttatgtttctaaatagtcctaaatactagtgttctttatggagaaaattactcaaatatataacaaatgcttaattacatgtaatgtccatgaggacagagaccatgtctctcaacaaatatttcttgagtaaatcaataaatagaatatawatgtgtgtacatatatacacattcacacatacacatacatatttgtaatacatcatgtattatatgtgttacatgaatgtaacatataattaacac

SEQ ID NO: 581277 - DNA, 272 bp, Homo sapiens
aggctcatttcctcacggcttcccttgggtgggagagaaaattccccaaccccttgagcttcctgggtgaggcgatgccccagcctgcttcagctcaccctccrtgggctgcactcactgtccaaccagtctcaatgtgattaactgggtacctcagttgataatgcagaagtcacccgccttctgcgtcaatctcactgggagctgcagaaaagagctgttcctattcggccatcttgccagcaatctccatctttcgttttaacaatatt

SEQ ID NO: 581278 - DNA, 558 bp, Homo sapiens
tattttgcttgttctcatgcttttaagtttcttatgaagtaagctctttattttgggggagaaaaattatcctggtagttaagctcattgataacactaaaattaattgatcatcaatcttttacataatttattaaggtagacrtgatgtttttgaaaatctcatttgagttttactctttaacatgcattctattgcctatcaggttttatctttatgcaagaaatcatagtacatttagaaattcctttataaaattcttttataatacatataaaaattcctttataaaacacctttataaaggtgtacacattattgtaatattatcaagccaaatgtctcaagttaaatgacactcagattattattaggttcccttggcttcttttcacttgggcttctaagaattactgcatactagtattacgaaaatattttggatcatccttggtttcccaagtagatatgtgagatttgaattcttagagttgaatccaaattatactagatctagaagtcaggtgttcttgagtaatcttttgggccacaactga

SEQ ID NO: 581279 - DNA, 544 bp, Homo sapiens
gggacaggattagaaagggcttcaactgaaaaaggggctatagaggtttttcaraatgggttggggtggggtcactgccagaaaatccatttgctccctctcttgggcctgtccaaattgagcagcacggggctttgaggagctctactcgacaaacctcagaccaactaccctcactgcccttccctcacctcgccatggtgctcagacctgggtcaccgaggttaacccataagccacaccccatctcctttcctcctggtttacacccttctcccttctaagtatgtacagttctctcctcatccctctgatctacctgcatcctcttcctctgttatgctgactacatttggggaagaatgtgagccctgtccctttttgtactcctctgtcttgcccttggcagatccagatgtggatataacatctggcaggcagcaagaccagcgcctgccaagaacagcatctccccagccctcatcctatggtgaggtcactgttctatgtttccacggcaaccacaggctgggaagatggagaa

SEQ ID NO: 581280 - DNA, 500 bp, Homo sapiens
tgctgattcataaatataggataatctcaggagggaactgggaggtgtcaaagtaagaattgcactggaaaaagttaaacaggaagactttgttcaagactatcacaataggggtgagagaacctggaagggagataktgcaggtatcaaacatgagttcacaatcatttctcactggagggttttcaggagctggggtgggagaaatcattggacgcacgtgatttctaactggcttctacccagaggaaaagtaaactttctgtgtcttcatgacaagaagtacttttacagcttggaacaaggagcccactgaagttaggctcctacccttccacagaaactggaagattggagagctatctcctctgatgtttacatttcaaagagacagctcccaggtccttgagaaagacatttattgggtcttaaaactcgtgaggtttctaaggagatttatttcaaaggagacagaggaagaatttacaattacaagtttt

SEQ ID NO: 581281 - DNA, 568 bp, Homo sapiens
gccaaaatataatccaatatcacctttattcttcaggctaggtcttattttgtctgggagctccctcagaggaaatttctctactgtttcagcctctaagaataaaggaggtgacatgatgttagctgaattcatatttccttcacagctaggtttgcagcagagacttgaaaagcaaaaagatgaggtcatctgtaatccctcagaggtttccttctctttgtcagataaagaagggaaaatcaaaatttgttgagttacagcaagactttaagaagcattgaactgctagcattctattgcttaaaggaaactacaaagaaacaaatcttattacttatgatataacagcatttgttgtttgatatgtcacaaatacctaaggcaactgagataggcttaagtgagtaaatagtttgaattttgtgtttatggatatactattattagttactttttttctaagcaattcttcattgcaatcctatacttacctttcccccataacattatgaatatattaaatgctctttaataaacaaattrattagaacttaattactggaag

SEQ ID NO: 581282 - DNA, 501 bp, Homo sapiens
ggaatgaatgcacttcagggaaattcttctaggaagttgagcaaacttccaagttgaacttgagcaaaagttgatcgtattatgttgtacactaaatacagatatttaggaatttctaacagctcatcattcactgacttttggctaagtctgcttttattttaaaataagttattaatggaatgattaatgggtccaactgaaactctctctgagttactctgacctatgtcacaagagcggtgaaccctttcttcccgtagctactctggtggaacacatttccaatgcttargtcttgagtcgagccacacactgactatttggagtaaaaactgaaagtacagcattctctctttcatggtatttttggaatccctgccaaaccttgcttgcctgccagaaagcagagcggatgttgtgaaagtagttcaaagccctccaaaagcctcatgcgccatccaggagaagctgggctgctggatgaggcccagccccagg

SEQ ID NO: 581283 - DNA, 580 bp, Homo sapiens
cagaagtgcttttcatattctgtatctggttgtggtggcaatgtcaccaccctacactgctgtgacaccgaaacaaccaagcctagaatcagctggtgcctcttttcatctgcagggtagatttggcttccatggttgttcactgctctgtgttaggaaggctcagtgacaggtgtacagccttcagtaatgcctcaaaggttctccaagcagaggtaaacatgtgggtcctgctggtgacatattagacttcttactttccccaaataaaaaagtgcctgctgggygcggtggctcacgcctgtaattccagcactttgggaggccgaggcgggcggaacacaaggtcaggagatcaagaccatcctggccaatatggtaaaaccccatctctactaaaaatacaaaattaggaaggcgtggtggtgcacgcctgtaatcccagctagtcgggaggctgaggcaggagaattgcttgaactggggaggcggaagttgcagtgagccaagatcgcagcattgcactccagcctgggcaacagaatgagattgtctcaaaaaaaaaaaaaaaagtgccaca

SEQ ID NO: 581284 - DNA, 622 bp, Homo sapiens
ttccttctcaagggtttacttaggaacatatcttgaaacacaaatttttaaaagctgggacacaaagtgtgtctatgacatatastcctaactatataattttctacttattgggaggatcttgcttatttctgtacctattttgagacagggaaaatccgtgctacacgtttatcaattcgtctatgcttttgatgtcttccagtctcccatgggcaatgaacaagccatgaacaattcagcatactacacttgcactaagccataaatattgcaccttcccacctgtataactgtcagataattaggaatccttacgcaaccctcaacctgccatggtcttgttgtacctgtttttttgaatagaaaatatataacaaattcaatgccgggagcggtggttcatgcctcccagcacttcaggaggccaaggcaggtggatcaccttaggtcagaagttcaagaccagcctgaccaacatggagaaaccccgtcactacttaaaaaaatacaaaattagccgggtgtggtggcggaagcctgtaatcccagctactcgggagtctgaggcaggagaatcacttgtacctgggaggtggaggttgcaatgagccgagatcat

SEQ ID NO: 581285 - DNA, 625 bp, Homo sapiens
tcattatgaatatgctcttcatttgtgtatgctactgaaaagaactgtatactagtcattatagagagattattgataatttccttgaaaaaatacattttaattgaaactmtttctccccctttttttaccctcttcctccctctttagcctcaaatcatttatgacttgatcaaaattttgaaagaaaaacgatgtttttttcagtacttctgatcttatttatttccagataaagagatttctatttttacccaattctcaaaattaatgatttttttcctgtaactgatttgaagtatacaccctacctgatccccactgtaaagctggcatatgtgttgaacaataacatttgctcagacacatggaaatgtggcctgctattttcaggtaagaaaagaggactgtggaaacagaataagttttgtaattaacaaataattgttgctatcattcattataatactgctaaggagaaaaggagatgtttgtataggaagcgtaaaagggtaaaagatcatttttttaaaattttattttagtaaatgtgctttatccatgtgctttgccatctgctttttctctctttttttctctctcatacacacacacacacacacac

SEQ ID NO: 581286 - DNA, 621 bp, Homo sapiens
gtggatcacttgagtccaggagtttaaaaccagcctgaacaacatggcaagaccctatctctacaaaaaatacaaataattagccaagcatggtggcatgtgcctgtagtcccagctactcaggaaggtaaggtgggaggatcacttgagcctgggaggcagaggttgcagtgagccaagcccgtgccactgcacgccagcctgagcaacagagtcaaactctgtcccctgtctcaaacagaaaacaacaacaacaacaacaaaagagcctgaatccctgatttcatcatggaaaggctgaatcaatttcagaaacctgcatcaaagaaaacaataagaawagcaattctctgtttgtttaaattactattagtcagatattttgttgcttacagacaaatatattcctgaaatagggatagaagccagaataatcattttaaagcctaaatcagatcatgttcctcctctgctttaaaacattacagtggtttcccacctcacacagggtactgtcagcctttccaagaccctaaagccctactcagtcaggcccccttatgaactttctgacctcatctcctgctatcttcccagacgtggtccattccagccaaaata

SEQ ID NO: 581287 - DNA, 339 bp, Homo sapiens
gtacatggaatgttctccaggagagattatacactaaaccattaaacaatcctcagtaactctaaaaggatttaaattatacaaagtgtgtcctccaaccaaaatagaatgaaatagaaatcaatgycagaaagaaatttgagtaattcacaaatatttgagaactaaacaacatactccaaataactaatgggccaaaggagaaatcacatgagaacctagagaatactttgaaataaaagaaaacgaagacacaacaggctaaaaatttatggaatgtgggagcttccaagatgggtgaacaggaacagctccagtctacagctcccagcgtgagca

SEQ ID NO: 581288 - DNA, 339 bp, Homo sapiens
gtacatggaatgttctccaggagagattatacactaaaccattaaacaatcctcagtaactctaaaaggatttaaattatacaaagtgtgtcctccaaccaaaatagaatgaaatagaaatcaatgccagaaagaaatttgagtaattcacaaatatttgagaactaaacaacatactccaaataactaatgggccaaaggagaaatcacatgagaacctagagaatactttgaaataaaagaaaacgaagacacaacaggctaaaaayttatggaatgtgggagcttccaagatgggtgaacaggaacagctccagtctacagctcccagcgtgagca

SEQ ID NO: 581289 - DNA, 386 bp, Homo sapiens
gctaaatgatgagttaatgggtgcagcacaccaacatggcacatgtatgcgtatgtaacaaacctgcacgttgtgcacatgtaccctagaacttaaagtataatrataaaaaagaaaacgtatggaatgtagctaaagcagtattacaaggaaatttatagctgcaaatgcttatattaagaaagaagaaagatttctgatcaataacctaacctacttccttaagacaccggaaaaagaagagcaaagtaaatctaaagcaaacagaaaaaagaaaaaattaaaatcttgcatattttttcatataagtatttataaagctgcctcattttaatgactgcataatattttattgaacagatcaactaatcaatgattgatttagc

SEQ ID NO: 581290 - DNA, 539 bp, Homo sapiens
gccaccgcgcccggctgttatctaggttttaagccccgcatgcattaggtatttgtcctaacactctccctagtgttatttctaataatgaaaaagtggaaataatacacatgtttaacaattggagaagggctgcatagattatagcacaytcacttcaaagaaaattatgcaagcattaaactaattatcatgaagaatacagaatcacaagggaagcacatgggaaagggtttacaattagatattaatttatttttttaaaagtagaacataaaattatataaacactacagtaacaagtaagaaaaagtaaataatgaagaaaatccatatgcttgggtcatggaattacaatacaatttttaaaaataactttcctttaccaatagacattgttaaagacaataaataaaaagtataaaataggctgggtgcggtggctcatgcctgtaatcccagcactttgggaggctgaggagggtggatcacctgaggttgggagttcaagaccagcctgaccaacatggagaaaccct

SEQ ID NO: 581291 - DNA, 458 bp, Homo sapiens
cccttgttgtgggaagtcagagaccccgaatggaggaaccagctgaagccatggcagaagaayataaattgtgaagatttcatggacatttattagttcccaaaattaataatttcttatgcctgtctttgctgcaatctctgaacataaattgtgaagatttcatagacatgtatcatttccccaatcaatactcttgtgatttcctatgcctgtctttaatctcttaatcccgtcatcttcataaactgaggatgtatgtagcctcaggaccctgtgatgattgtgttaactgcacaaattgtttaaacaatatgaaatcttgaaaaaagaacagggtaacagcgatgttcagggaacaagggagataaccattaggtctggctgcctgagagccaggcagaacagagccatatttctcttctttcaaaagcaaataggagaaatattgctgaatt

SEQ ID NO: 581292 - DNA, 507 bp, Homo sapiens
ggatgcctagtggtccacaaggcctgattttataatatctgaggttgctgagtgttatgctgaggtcttagggcacatggtaggcaagaattccatgataagyttattgtatggagttttatagctgatagggaccctagtgaaaaggaacataacaaatgaggaaactatggtatacagcttcagtatgagcccaggtgcccaggtcagaaccgttccatttccccccaaagtcctcaaatgctttggttccaagtgaccattgcactgtggagaatcttagtatggaaagtagcttggcctctcagacatgcatgagcacacatctcagaaccttcattttaaaaataactttattttactgtggtaagaacactgaacttgagagctaccctgctaagaaaatgttaagtatataatacagtgttactaaccatgtatatatatatatatatatatatatatatacacacacacacacacacacacacacacacacaatgttgt

SEQ ID NO: 581293 - DNA, 507 bp, Homo sapiens
ggatgcctagtggtccacaaggcctgattttataatatctgaggttgctgagtgttatgctgaggtcttagggcacatggtaggcaagaattccatgataagcttattgtatggagttttatagctgatagggaccctagtgaaaaggaacataacaaatgaggaaactatggtatacagcttcagtatgagcccaggtgcccaggtcagaaccgttccatttccccccaaagtcctcaaatgctttggttccaagtgaccattgcactgtggagaatcttagtatggaaagtagcttggcctctcagacatgcatgagcacacatctcagaaccttcattttaaaaataactttattttactgtggtaagaacactgaacttgagagctaccctgctaagaaaatgttaagtatataatacagtgttactaaccatgtatatatatatatatatatatatatatatayacacacacacacacacacacacacacacacaatgttgt

SEQ ID NO: 581294 - DNA, 571 bp, Homo sapiens
tcaaaaaacaacaacaacaaaatgttggtttctttttgtctgttttaatcctctactagtgacactgaatgcccaattaagtgtaaatttgtatgtacagtctttattcttaattagtacacttgatccccattattcacagagtccatatttgggagttgacctactcactataatttatttgtaaccccaaaatcaatacttgcagcactactaaaaccctatgactttattacttgatttggggctatacccacagatatgcacagagtgacaaaaaatttaagtcacccaatgagcacattcttcactgaggctgaataaagtgacaccctgccttcttgtttcccctcttgtgcagtaaatgagtatttttcmcagtctgttttagggatacgttttttgtattttcatgctttttgttggtgattttgctgcttaaaatggcccctaggtgtgcctgtaatcccagctactttggaggctgacacaggagaatcacttgaatctgggggacagagattgcagtgagccgagttcgcaccactgcactccagcctgggcaacagaa

SEQ ID NO: 581295 - DNA, 621 bp, Homo sapiens
ttttttaaaaaaaaactctggtattttcattgtctctcaaactaaaaagtctttgatcattataatggccaggaccacctggggataagtcctttattgtttgtttgttttgagatggagtcttgctctgtcgcccaggctggagtgcagtggtgcaatcttggctcacagcaayctccacctcccaggttcaaaagattctcctgcctcagcctcctgagtagccgggattacaggcgtgtcccaccatgcaccccgttaatttttgtatttttagtagagatggggattcaccatgttgtctagactggtctcgaattcctgacctcagatgatccacccacctcggcctcccaaagtgctgggattacaggcatgagccactgctcctggcccgagaataagtctttatttagtttgtttaccactagtgtcctgaaaattattttttaacttataaaatggtaatatcagcctctagatttaatttttgcatattttgcctttttctcaagaaaacaaacatatatattggaaatcaaaatttaagaaaaaattaaagagctaatagaaaatcaattatttttccattcattttttcattcataaatgttattttgt

SEQ ID NO: 581296 - DNA, 607 bp, Homo sapiens
gacttattgcacatgtggatagatataagagcaattatcatgtctgtgattattaaccttttctttctgtgttagagtcagtttaacccaaggctttgagatgattaagctgtaatgaatactcaacatagcagggaggaaagtgtagcactttcagaagtggaataatgaaatctagagagggaagaggagggtggtagagagtgcttggagttaggggactgagggtgggttttctattttctgactgctttcctagaatcagaaagaaggagagggaagaagaccaacacaaaataaaaggtggttgatcttcattctttatgttttaaattaaacagtggattgggaaaatttgcatatagtttgcaaagtgagaggaaaggagctaagagagggaaaaagcctgaagagcaacagaaagagcagagttgaagcccggtcttgaggagcagtggagaggggttgtrtgttagtctgttttcacgctgctatgtggaaatacccgagactgggtagtttattaagaaagaggtttaattgactcacagttccacagggctggggaggtttcaggaaacttaacaatcatggtggaaggaaaagc

SEQ ID NO: 581297 - DNA, 629 bp, Homo sapiens
tatccaggcatatctcaatcgtcacatggattaatctttccttatccttagcaactactgtggctaagctgctctggaaacagaattccagagctccattctgaaatgtcgcacagattgctagttgtttacctcaatatctattcttctctttccatagttatataactcccaatatttatctaggcacacagccacccagaatatagacatttcccactctctttgcagctaagattaagttmtagctaatgtgacataagcagaaagattgtgcagcaccttccaggaaacagtttgaaaatgtagtcactgagtgccttctccccttcttcttcatctctttctccattatgcaacctggaaaaaggaggtgatgactgaactctagctgccatcttggaccatgaatatggactttgtcataggatgtcaaaacagagagctggaggaagcattaatattaaggattgtggattctcatgctagccctggaccaccttactttttatctgatagaaaaataaactgctctgtttaattcactgttatttacagtcatatctattcctaacgaatacattaagttactttaaaatttttatttttatttttatgttttttgagac

SEQ ID NO: 581298 - DNA, 388 bp, Homo sapiens
tagaacacagtgtacagaactcaaytttctactaaagagtcaaaggttaaatttttagctaagaaattatgcttcttacatgataaaaatcatacatgccaaaacttaccatactttattaaacaacataatgtaaggtctgattcaacagaaatattggagtggtgatttttttaaatatgtggaagtatatatttgttttcaaaatattggaaataaccatgatggaactataaattcaaacagtttgagctaagcagataaacttgcatgcatgaaaacacattaaacagactcatttgtctgggaatattcattgcaactctcaaggctagaagtgtttttgtggctcatctcagtcattgcttccctcccattgtattcccat

SEQ ID NO: 581299 - DNA, 178 bp, Homo sapiens
acagtgtacagaactcaactttctactaaagagtcaaaggttaaatttttrgctaagaaattatgcttcttacatgataaaaatcatacatgccaaaacttaccatactttattaaacaacataatgtaaggtctgattcaacagaaatattggagtggtgatttttttaaatatgtg

SEQ ID NO: 581300 - DNA, 388 bp, Homo sapiens
tagaacacagtgtacagaactcaactttctactaaagagtcaaaggttaaatttttagctaagaaattatgcttcttacatgataaaaatcatacatgccaaaacttaccatactttattaaacaacataatgtaaggtctgattcaacagaaatattggagtggtgatttttttaaatatgtggaagtatatatttgttttcaaaatattggaaataaccatgatggaactataaattcaaacagtttgagctaagcagataaacttgcatgcatgaaaacacattaaacagactcatttgtctgggaatatycattgcaactctcaaggctagaagtgtttttgtggctcatctcagtcattgcttccctcccattgtattcccat

SEQ ID NO: 581301 - DNA, 416 bp, Homo sapiens
agtgtacagaactcaactttctactaaagagtcaaaggttaaatttttagctaagaaattatgcttcttacatgataaaaatcatacatgccaaaacttaccatactttattaaacaacataatgtaaggtctgattcaacagaaatattggagtggtgatttttttaaatatgtggaagtatatatttgttttcaaaatattggaaataaccatgatggaactataaattcaaacagtttgagctaagcagataaacttgcatgcatgaaaacacattaaacagactcatttgtctgggaatattcattgcaactctcaaggctagaagtgtttttgtggctcatctcagtcattgcttccctcccattgtattcccattctatcattaaataratgtaattcatctctaaatga

SEQ ID NO: 581302 - DNA, 628 bp, Homo sapiens
aactataaattcaaacagtttgagctaagcagataaacttgcatgcatgaaaacacattaaacagactcatttgtctgggaatattcattgcaactctcaaggctagaagtgtttttgtggctcatctcagtcattgcttccctcccattgtattcccattctatcattaaataaatgtaattcatctctaaatgactatagtaaaaagaatctagaatctaaarcttatttctttagcaatttctttatgttgatctggttcagaaggtcacatggtatatggctgaattagtttcccagctcatatgccacttggaagactgagagtgagacttaggttgattaatgaacaaacattatgagaacattctccgaaccattgtttagatagcaggactagtctactttgacacataattacacatttagaaaaccccgctgtaactgtacacatgggattttcttgaatagaaaatttgactaaatcaaataattgataaagagaaaaaagaagcagcaagtgaacctctgtctttttgaagttggactttctctttctccaaagccaggaactctacttgtaacatgcctacctcattctttttactattattatactttaagttc

SEQ ID NO: 581303 - DNA, 628 bp, Homo sapiens
aactataaattcaaacagtttgagctaagcagataaacttgcatgcatgaaaacacattaaacagactcatttgtctgggaatattcattgcaactctcaaggctagaagtgtttttgtggctcatctcagtcattgcttccctcccattgtattcccattctatcattaaataaatgtaattcatctctaaatgactatagtaaaaagaatctagaatctaaagcttatttctttagcaatttctttatgttgatctggttcagaaggtcacatggtatatggctgaattagtttcccagctcatatgccacttggaagactgagagtgagamttaggttgattaatgaacaaacattatgagaacattctccgaaccattgtttagatagcaggactagtctactttgacacataattacacatttagaaaaccccgctgtaactgtacacatgggattttcttgaatagaaaatttgactaaatcaaataattgataaagagaaaaaagaagcagcaagtgaacctctgtctttttgaagttggactttctctttctccaaagccaggaactctacttgtaacatgcctacctcattctttttactattattatactttaagttc

SEQ ID NO: 581304 - DNA, 628 bp, Homo sapiens
aactataaattcaaacagtttgagctaagcagataaacttgcatgcatgaaaacacattaaacagactcatttgtctgggaatattcattgcaactctcaaggctagaagtgtttttgtggctcatctcagtcattgcttccctcccattgtattcccattctatcattaaataaatgtaattcatctctaaatgactatagtaaaaagaatctagaatctaaagcttatttctttagcaatttctttatgttgatctggttcagaaggtcacatggtatatggctgaattagtttcccagctcatatgccacttggaagactgagagtgagacttaggttgattaatgaacaaacattatgagaacattctccgaaccattgtttagatagcaggactagtctactttgacacataattacacatttagaaaaccccgctgtaactgtacacatgggattttcttgaatagaaaatwtgactaaatcaaataattgataaagagaaaaaagaagcagcaagtgaacctctgtctttttgaagttggactttctctttctccaaagccaggaactctacttgtaacatgcctacctcattctttttactattattatactttaagttc

SEQ ID NO: 581305 - DNA, 570 bp, Homo sapiens
tcatatattttatagcaatgaggaatttacttattatatactttagatttttagccctttccctgcccacgagaaatgtttcttttgaatccaattttgtcctcagagatttagaatgttaagkaatgtataggggtttcttttttcttcttctttttttttttgtcaagctattgtatatttttactttacctgtttggttatgtagttactatttgtttgtattctcataccagaaaaaaaattatagtgaattttacatgtacggagtcttcattaatctgtataaactgacaagtttagaatatcaaagtcaacactgtaaaaaataaagtgatattttatctggtctatctccttgcaaataaaagaacaataaattctgtactattatgaaatatatgagcttgaaaatttttcaagtgccttgtatagaatggccttcgaattcaaggtataaactacaacaaaacactttcgagatctagtttgattgcagagtacattcctacacatttatatattctctgcaatttctgattcaagatatttcacaattctaaaggaaaa

SEQ ID NO: 581306 - DNA, 570 bp, Homo sapiens
tcatatattttatagcaatgaggaatttacttattatatactttagatttttagccctttccctgcccacgagaaatgtttcttttgaatccaattttgtcctcagagatttagaatgttaaggaatgtataggggtttcttttttcttcttctttttttttttgtcaagctattgtatatttttactttacctgtttggttatgtagttactatttgtttrtattctcataccagaaaaaaaattatagtgaattttacatgtacggagtcttcattaatctgtataaactgacaagtttagaatatcaaagtcaacactgtaaaaaataaagtgatattttatctggtctatctccttgcaaataaaagaacaataaattctgtactattatgaaatatatgagcttgaaaatttttcaagtgccttgtatagaatggccttcgaattcaaggtataaactacaacaaaacactttcgagatctagtttgattgcagagtacattcctacacatttatatattctctgcaatttctgattcaagatatttcacaattctaaaggaaaa

SEQ ID NO: 581307 - DNA, 215 bp, Homo sapiens
gaactatggaaatgcatccccrggggtaagacaatagagttgtgaattagtggaggcgaatcaccaatactggccaactaaagccctctaacataattcaaaggatggagaaattctgtagctgaagataaaatgtctgaaatatattatggtatagtcaaatgagtgtcatttctaatatacacacttatttttcaagagttgataatatgaag

SEQ ID NO: 581308 - DNA, 374 bp, Homo sapiens
cttatttcattgagcagtggtttgtagttttccttgaagaggtccttcacatcccttttaagttggatttctaggtgttttattctctttgaagcaattgagatccttattgtgagagtcagttcagaatctggggttttgttttgttttgttttgttttgttttgttttgttttgttttgagatggagtctctctctgttaccaggctggagtacagtggcacagtctcrgctcatgcaacctctgcctcccaggtccaagtgattctcctgcctcagcctcccaagtagctgggactacaggcacgtgccaccatgcccagctaactttcgtatttttttttagtagagatggggtttcgccatgttggcca

SEQ ID NO: 581309 - DNA, 374 bp, Homo sapiens
cttatttcattgagcagtggtttgtagttttccttgaagaggtccttcacatcccttttaagttggatttctaggtgttttattctctttgaagcaattgagatccttattgtgagagtcagttcagaatctggggttttgttttgttttgttttgttttgttttgttttgttttgttttgagatggagtctctctctgttaccaggctggagtacagtggcacagtctcagctcatgcaacctctgcctcccaggtccaagtgattctcctgcctcagcctcccaagtakctgggactacaggcacgtgccaccatgcccagctaactttcgtatttttttttagtagagatggggtttcgccatgttggcca

SEQ ID NO: 581310 - DNA, 374 bp, Homo sapiens
cttatttcattgagcagtggtttgtagttttccttgaagaggtccttcacatcccttttaagttggatttctaggtgttttattctctttgaagcaattgagatccttattgtgagagtcagttcagaatctggggttttgttttgttttgttttgttttgttttgttttgttttgttttgagatggagtctctctctgttaccaggctggagtacagtggcacagtctcagctcatgcaacctctgcctcccaggtccaagtgattctcctgcctcagcctcccaagtagctgggactacaggcacgtgccaccatgcccrgctaactttcgtatttttttttagtagagatggggtttcgccatgttggcca

SEQ ID NO: 581311 - DNA, 553 bp, Homo sapiens
ttttggggagccaagacagttggaccacttgagcccaggagttcaagaccaacctgaaaaacatagcaaataattttaaaacctacctgggcatggtgatgcatgcctgtggtcccagctactcaggaggctgaggtgggaggattgcttgaaccctggtagtcataactacagtaagccatcattataccactgcactccagcctgggtgacagagtgagacactgtctcaaaaaatgagcaaaaacaaaaaagaagatatataaatgtcaaataggtatatgaaaagatgctcaatatcactgatcatcagagaaattcaaatcaaaactacaataagatatcatcttacccccattaaaatggcttttatgcaaaagacaggcaataacaaatgcttgcaagaatgtagggaaaagagarccctcttactctgttggtgggaatgtaaattagtacattcactatggagaacaatatggaggtccctcaaaaaattaaaaatagaactatcatatgatacagcaatcccactgctgggtatatacccaag

SEQ ID NO: 581312 - DNA, 460 bp, Homo sapiens
aaacattggagttataaatagaaagaggaaaagtcacataamctaatagacaattacttctcatatgccagcggtcaacacattcataagcccatgggtggttgatccagggaccacacagggtccctgacagactctgaaagttaaggctttggtttactggtaacagagacaggttaaagtacatgtcttcagtcttgagtagagtgtaatcagtctcattttttttttaatgagacaaacatcaggtaaagaccttgacaagaaggaagagaaatcccgagattctataatcataataatcgaattgtaattgctagtttaagtagtccttcaaaaatacatctcattcctgacaggataaaacaagttttaaaaaatatattatattcagattcactagggaacacttggagccaggaaataattcaggattcagcccaaattataggcaaataat

SEQ ID NO: 581313 - DNA, 545 bp, Homo sapiens
aatcatagtaggaccaattttgtatgcaaaataagttttagtcttatcataccgggcctgattatttccataaagggcagcaagaatatttattggccatataggcttcttaaaattggccttgttggaaatttttaataaggaatcttttaagagccttgaagctagccaagtcaaagatttgcatcagactgtgtctgtaataattttttaacctactttttaraattatactttaagttctggggtacatgtgcagaacgtgcaggtttgttacataggtatatatattctgcagtggtttgctgcacccatcaacccatcacctatattaggcatttctcctaatgctatccctctccctgcccccaccccccaacaggccccagtgtgtgatgttcccctccctgtgtccatgtgttctcattgttcaactcccacttatgagtgagaacatgtggtgtttggttttctgttcttgtgttagtttgctgagaatgatggtttccagcttcttccatgtccctgcaaaggacatgaactca

SEQ ID NO: 581314 - DNA, 336 bp, Homo sapiens
ttcaactctcaggacaccaaatggtgtcctacaattcaattcaatcctgagtctatctatctggagatagcatagatcccaaaagttcagggytcaggcccacaagactgcccccacaccattagagaggagttgtgggcctcccatactcctgaccaactgtctataaattaggacctccatggattccttcctcaggttctataatttgctaagatggcgcacagaacccaagaaagcactttgttacagttactgtctgatacaaatcaggaactctcaaatagaagagacacatagggccaggtatggtgaaaaggggcacaaagctgccat

SEQ ID NO: 581315 - DNA, 336 bp, Homo sapiens
ttcaactctcaggacaccaaatggtgtcctacaattcaattcaatcctgagtctatctatctggagatagcatagatcccaaaagttcagggctcaggcccacaagactgcccccacaccattagagaggagttgtgggcctcccatactcctgaccaactgtctataaattaggacytccatggattccttcctcaggttctataatttgctaagatggcgcacagaacccaagaaagcactttgttacagttactgtctgatacaaatcaggaactctcaaatagaagagacacatagggccaggtatggtgaaaaggggcacaaagctgccat

SEQ ID NO: 581316 - DNA, 336 bp, Homo sapiens
ttcaactctcaggacaccaaatggtgtcctacaattcaattcaatcctgagtctatctatctggagatagcatagatcccaaaagttcagggctcaggcccacaagactgcccccacaccattagagaggagttgtgggcctcccatactcctgaccaactgtctataaattaggacctccatggattccttccycaggttctataatttgctaagatggcgcacagaacccaagaaagcactttgttacagttactgtctgatacaaatcaggaactctcaaatagaagagacacatagggccaggtatggtgaaaaggggcacaaagctgccat

SEQ ID NO: 581317 - DNA, 542 bp, Homo sapiens
tcaggcccacaagactgcccccacaccattagagaggagttgtgggcctcccatactcctgaccaactgtctataaattaggacctccatggattccttcctcaggttctataatttgctaagatggcgcacagaacccaagaaagcactttgttacagttactgtctgatacaaatcaggaactctcaaatagaagagacacatagggccaggtatggtgaaaaggggcacaaagctgccatatgacctmtaagtatatcattctatcaccctcccagcacctcagaggtgatggaggagagggctgacagtttcaaccatctagttatgccttcatgtttctgatgtccagcacacaccctgaagctatacgggtctccagccaccactcatgtcatgtcaatagcataaactcaggtatggctaagagagacttatgactagtaaaggatggtcctctcatctctatcaggaaatttcaagttttaggagctctgtactgtgaactggggaggaagaccaaataggacatacactagac

SEQ ID NO: 581318 - DNA, 542 bp, Homo sapiens
tcaggcccacaagactgcccccacaccattagagaggagttgtgggcctcccatactcctgaccaactgtctataaattaggacctccatggattccttcctcaggttctataatttgctaagatggcgcacagaacccaagaaagcactttgttacagttactgtctgatacaaatcaggaactctcaaatagaagagacacatagggccaggtatggtgaaaaggggcacaaagctgccatatgacctctaagtatatcaytctatcaccctcccagcacctcagaggtgatggaggagagggctgacagtttcaaccatctagttatgccttcatgtttctgatgtccagcacacaccctgaagctatacgggtctccagccaccactcatgtcatgtcaatagcataaactcaggtatggctaagagagacttatgactagtaaaggatggtcctctcatctctatcaggaaatttcaagttttaggagctctgtactgtgaactggggaggaagaccaaataggacatacactagac

SEQ ID NO: 581319 - DNA, 500 bp, Homo sapiens
ggggaagttctcctggataatatccttgagagtgttttccaacttggttccattctctctgtcactttcakgtacacgaatcaaacatagattcagtgttttaacatattcctctatttcttggaggctttgttcatttctttcactcttttttctcgaatcttttcttcttgctttatttcattgagttgatcttcaatctctgatattctttctcctgcttgattgattcagctattgatacttgtgtatgcttcatgaagttcttgtgctgggtttttcagctccatcaggtcatttatattcttctctaaactggttattctagttaacaattcgtcctaccttttttttcaggctcttagcttccttgcattgggttagaacacgctcctttagcttggaggagtttgttattacccgccttctgaagcctacttctgtcaatccatcaaactcattgtctgtccagttttgttctcttgctggtgaggagttgt

SEQ ID NO: 581320 - DNA, 522 bp, Homo sapiens
aacatagattcagtgttttaacatattcctctatttcttggaggctttgttcatttctttcactcttttttctcgaatcttttcttcttgctttatttcattgagttgatcttcaatctctgatattctttctcctgcttgattgattcagctattgatacttgtgtatgcttcatgaagttcttgtgctgggtttttcagctccatcagktcatttatattcttctctaaactggttattctagttaacaattcgtcctaccttttttttcaggctcttagcttccttgcattgggttagaacacgctcctttagcttggaggagtttgttattacccgccttctgaagcctacttctgtcaatccatcaaactcattgtctgtccagttttgttctcttgctggtgaggagttgtgatcttctggaggagaagaggcattctggtttttggagttttcagcctttttgcactggtttctccccatctttgtggatttatctacctttggactttgatgtt

SEQ ID NO: 581321 - DNA, 522 bp, Homo sapiens
aacatagattcagtgttttaacatattcctctatttcttggaggctttgttcatttctttcactcttttttctcgaatcttttcttcttgctttatttcattgagttgatcttcaatctctgatattctttctcctgcttgattgattcagctattgatacttgtgtatgcttcatgaagttcttgtgctgggtttttcagctccatcaggtcatttatattcttctctaaactggttattctagttaacaattcrtcctaccttttttttcaggctcttagcttccttgcattgggttagaacacgctcctttagcttggaggagtttgttattacccgccttctgaagcctacttctgtcaatccatcaaactcattgtctgtccagttttgttctcttgctggtgaggagttgtgatcttctggaggagaagaggcattctggtttttggagttttcagcctttttgcactggtttctccccatctttgtggatttatctacctttggactttgatgtt

SEQ ID NO: 581322 - DNA, 522 bp, Homo sapiens
aacatagattcagtgttttaacatattcctctatttcttggaggctttgttcatttctttcactcttttttctcgaatcttttcttcttgctttatttcattgagttgatcttcaatctctgatattctttctcctgcttgattgattcagctattgatacttgtgtatgcttcatgaagttcttgtgctgggtttttcagctccatcaggtcatttatattcttctctaaactggttattctagttaacaattcgtcctaccttttttttcaggctcttagcttccttgcattgggttagaacacgctcctttagcttggaggagtttgttattacccgccttctgaagcctacttctgtcaatccatcaaactcattgtctgtccagttttgttcycttgctggtgaggagttgtgatcttctggaggagaagaggcattctggtttttggagttttcagcctttttgcactggtttctccccatctttgtggatttatctacctttggactttgatgtt

SEQ ID NO: 581323 - DNA, 522 bp, Homo sapiens
aacatagattcagtgttttaacatattcctctatttcttggaggctttgttcatttctttcactcttttttctcgaatcttttcttcttgctttatttcattgagttgatcttcaatctctgatattctttctcctgcttgattgattcagctattgatacttgtgtatgcttcatgaagttcttgtgctgggtttttcagctccatcaggtcatttatattcttctctaaactggttattctagttaacaattcgtcctaccttttttttcaggctcttagcttccttgcattgggttagaacacgctcctttagcttggaggagtttgttattacccgccttctgaagcctacttctgtcaatccatcaaactcattgtctgtccagttttgttctcttgctggtgrggagttgtgatcttctggaggagaagaggcattctggtttttggagttttcagcctttttgcactggtttctccccatctttgtggatttatctacctttggactttgatgtt

SEQ ID NO: 581324 - DNA, 372 bp, Homo sapiens
tgtctgtagtctcagctacttgggaggttgaggcaggagaatcgcttgaaccttggggcagaggttgcaatggacctagatcacgccactgcactccagcctgggtgacaaagcaagattctgtctcggagaaaaaaaaaagatttagtgttacttatcttttggcaatgcttcccatacaatgttatcaactaagatttagcaaagatgtcaaaaaattgaaaacayttgaccaaaacagaatgacagtttattgttttttattttattatttttttgagacagggtctcaccctgttgcccaggctggagtgcagtggtgaaatcatggctcactgcagcctcaacttcccaggctcaggtgatcctcca

SEQ ID NO: 581325 - DNA, 608 bp, Homo sapiens
atctatcttttttattccttcaatttaaaataatccttaaaaatctctaagygaatttactttctctgaaacaaaaaccggtatacattttgcatacagaattgtttctcttgtatctagtagtcttaatcacacatatctagcaagatattaacacttagtaacccttattttaataaaaaacctaggaagcaagaaatctggaattgtcatatagcagtatcttacatatgagaataatttcataatttagaattatgtgttcctaaaacatattttttaagatggattttcgctcttgttgcccaggctggagtgcaatggtgtgatctcagctcactgcaatctccgccccccaggttcaagtaattctcctgcctcagcctcccgagtagctgggattacaggaacccaccaccacacctggctaattttttgtattttttagtagagatggggtttcaccatgttgatcaggctggtcttgagctcctgacctcgggtgagccaccggccttggcctcccaaagtgcagggattacaggcgtgagccacagtgcctgggctaaaacataagttttaaattggaaataacccagatatttaat

SEQ ID NO: 581326 - DNA, 608 bp, Homo sapiens
atctatcttttttattccttcaatttaaaataatccttaaaaatctctaagtgaatttactttctctgaaacaaaaaccggtatacattttgcatacagaattgtttctcttgtatctagtagtcttaatcacacatatctagcaagatattaacacttagtaacccttattttaataaaaaacctaggaagcaagaaatctggaattgtcatatagcagtatcttacatatgagaataatttcataatttagaattatgtgttcctaaaacatattttttaagatggattttcgctcttgttgcccaggctggagtgcaatggtgtgatctcagctcactgcaatctccgccccccaggttcaagtaattctcctgcctcagcctcccgagtagctgggattacaggaacccaccaycacacctggctaattttttgtattttttagtagagatggggtttcaccatgttgatcaggctggtcttgagctcctgacctcgggtgagccaccggccttggcctcccaaagtgcagggattacaggcgtgagccacagtgcctgggctaaaacataagttttaaattggaaataacccagatatttaat

SEQ ID NO: 581327 - DNA, 608 bp, Homo sapiens
atctatcttttttattccttcaatttaaaataatccttaaaaatctctaagtgaatttactttctctgaaacaaaaaccggtatacattttgcatacagaattgtttctcttgtatctagtagtcttaatcacacatatctagcaagatattaacacttagtaacccttattttaataaaaaacctaggaagcaagaaatctggaattgtcatatagcagtatcttacatatgagaataatttcataatttagaattatgtgttcctaaaacatattttttaagatggattttcgctcttgttgcccaggctggagtgcaatggtgtgatctcagctcactgcaatctccgccccccaggttcaagtaattctcctgcctcagcctcccgagtagctgggattacaggaacccaccaccacacctggctaattttttgtattttttagtagagatggggtttcaccatgttgatcaggctggtcttgagctcctgacctcgggtgagccaccsgccttggcctcccaaagtgcagggattacaggcgtgagccacagtgcctgggctaaaacataagttttaaattggaaataacccagatatttaat

SEQ ID NO: 581328 - DNA, 546 bp, Homo sapiens
taagaccatcccatttctatgttatgccacaatgcttctctatagcacacaacttggctctgaaattttgaaagtcaaaatactaatctactatgtgtctctgataaattgcctgaacgttacctgattttgaagtgctgcactcctaagactttttcttggaatgagttaaacgttttattccaagaatcctctactgagmtagaaagcagagctgtgcatctctgtttcagtaaaaggaggtcaatatagggaactgtggtttctgagaatgcaagatctgcactaataaaaggattagccacagtgctacccaagagaaccagctaccaggaggaaagagggtctgtaaactgcaagatgatgacttcacttgatttccactgaggaaagctggtggctcagacttaaacttctccttcctagatggtaaacatctatggaaggttctatgaattataatgagttagtaaaacataatgcactgaatattagactatgtcagcagatcctgtaaccaaaactttctgaaaatataactatagt

SEQ ID NO: 581329 - DNA, 516 bp, Homo sapiens
attttagtggatatcctatagatctgaaaccttataaagaatcccaaagaagctggctggataaagcctgctatggatgtctttatactcaaagactgatgaggcaattcgaatatgtgtccccaccaaatctcatgttgaattatgcttcctaatgttggaggtggatcctggtataaggtgattgaatcatgaaggcaaatttctcatgagtggttcagcaccatccccttggtactgtcctcacaatcatgagtgacttctcgtgagatctggccactgaaaactctatatcactccctactctcygtgatttcctcttgccatgtgagacaattcactctttcattaccttgcacaatgattgaaagatttctgaggccccccagaagaagaagcactaagcttcctgtccactctgcagaaccatgagccaattaaacctctttttcaagataaatcttaccaaaaatggcaaatgaggactggagcattgctataaatatacctgaaaat

SEQ ID NO: 581330 - DNA, 403 bp, Homo sapiens
aacctgggctgtggggcttgatcagtggagacctggtcagctggggcttagtgctggcctggtcagcatgggctggggcactggtgaccaggtcaaggggtgctattcagtggaggactgggcacatggaacctagtcagcagaccctggtgggcgtgtcctcatcagtgaggcccttgtcagtggggccctggtcagggcagccttgtcagygggacctaatctgtagtgtcctagtcagagaggacttggtcagtggtgacttttgtagcaccggtctacagggtgacctggtcagcggggatctcagcatttggtgccagttcagtggggtctactcactagggtcccagtcaggggcatctggtgaccttaggcctggttattaggggcctgatcagtg

SEQ ID NO: 581331 - DNA, 403 bp, Homo sapiens
aacctgggctgtggggcttgatcagtggagacctggtcagctggggcttagtgctggcctggtcagcatgggctggggcactggtgaccaggtcaaggggtgctattcagtggaggactgggcacatggaacctagtcagcagaccctggtgggcgtgtcctcatcagtgaggcccttgtcagtggggccctggtcagggcagccttgtcagtgggacctaatctgtagtgtcctrgtcagagaggacttggtcagtggtgacttttgtagcaccggtctacagggtgacctggtcagcggggatctcagcatttggtgccagttcagtggggtctactcactagggtcccagtcaggggcatctggtgaccttaggcctggttattaggggcctgatcagtg

SEQ ID NO: 581332 - DNA, 337 bp, Homo sapiens
accaaagatccaggaagctcagagamcaccaggcagaataaatgccaacaacctacacttggacatataattttcaaactatatgaaataaaagataaaggaaaactctgaaagaaaccagaggtggggcagaaaacaccttacctacagagacacaaagataagaactgcattcaacattgcagaaactgtgaaagcaagaagacagtgaaatgaaaaattcaaaatgttgacagaaaaaaacccaccaacctaagtttctgtacccactgaaaccacccttcaaaagtgaaggagaattaaggccttcctcagaaaaatacaaattcaagaaact

SEQ ID NO: 581333 - DNA, 571 bp, Homo sapiens
aggtggaagttgcagtaagccgagatggtgccactgcactccagcctggatgacacagtgtgactccatctcaaaaaaaagaaaaaagaaaaacaaaaaagggacaaagtatactggtccaaaaaagaagaaagcaagaaaaaaaggacaaagtatactggttagtatcataacagtgagatagyccccctttgagattagaaaataacagtatactcaaagtaacattaatgagaaccaacataaaatagacaacattcactatctacaaaagtaatctgcaccaattagcaatgtatgagcatgtggttgagaatattttctataatatgtgtactagaacgaagagacctcaagaaaatggtcagagctggaaatgtagattagggaatctaggtcaaagttttgagattttaggagtcctgagagaatttaaaaagagaaatagccaccaggcatggtggccacacctgtaatcccagcactttgggaggccaaggcatgaagatcatgaggtcaggagttaaagaccagtctggccaacaagtttcttatataggtaaacgtgttc

SEQ ID NO: 581334 - DNA, 571 bp, Homo sapiens
aggtggaagttgcagtaagccgagatggtgccactgcactccagcctggatgacacagtgtgactccatctcaaaaaaaagaaaaaagaaaaacaaaaaagggacaaagtatactggtccaaaaaagaagaaagcaagaaaaaaaggacaaagtatactggttagtatcataacagtgagatagcmcccctttgagattagaaaataacagtatactcaaagtaacattaatgagaaccaacataaaatagacaacattcactatctacaaaagtaatctgcaccaattagcaatgtatgagcatgtggttgagaatattttctataatatgtgtactagaacgaagagacctcaagaaaatggtcagagctggaaatgtagattagggaatctaggtcaaagttttgagattttaggagtcctgagagaatttaaaaagagaaatagccaccaggcatggtggccacacctgtaatcccagcactttgggaggccaaggcatgaagatcatgaggtcaggagttaaagaccagtctggccaacaagtttcttatataggtaaacgtgttc

SEQ ID NO: 581335 - DNA, 290 bp, Homo sapiens
taacctccagttcagaaacagcataaatatttatccacagctgagcagacacatacagctagctaccagatgaaatgggctatatcttcaaatactattgttttctgttttttaattgtggcaaaacacactcaacaatttgcatcttaaccactgttaagtatacaattcrgtgtcattaaatgtattcacaatgttgtgcaagcatcaccaccacccatctccataattctttttgtcttgtaaaattgaaaccctgtacccattaaaagtgactccccattccccac

SEQ ID NO: 581336 - DNA, 353 bp, Homo sapiens
agtctgtcgacaggaaacctaaacagtttaggttaaggaaatgtctgagaaagtcatatwaattagcaggttcacaggaaactgacatttattgtataaattccatggtcaaatgtattagggctccatgcacacaactgtgcgccatctatgttaccacacagtgcttacttctttcagtctttattcatttctctcctaatggtctgtatggtattattacatagttctaaaaaccttccatgaggcagaaatttcatttaatgatatagctttgaaaataatgaaaaacagtagaaactttctattttttatgaagcagaattgttgaattttcagtttcatttatttaa

SEQ ID NO: 581337 - DNA, 353 bp, Homo sapiens
agtctgtcgacaggaaacctaaacagtttaggttaaggaaatgtctgagaaagtcatattaattakcaggttcacaggaaactgacatttattgtataaattccatggtcaaatgtattagggctccatgcacacaactgtgcgccatctatgttaccacacagtgcttacttctttcagtctttattcatttctctcctaatggtctgtatggtattattacatagttctaaaaaccttccatgaggcagaaatttcatttaatgatatagctttgaaaataatgaaaaacagtagaaactttctattttttatgaagcagaattgttgaattttcagtttcatttatttaa

SEQ ID NO: 581338 - DNA, 353 bp, Homo sapiens
agtctgtcgacaggaaacctaaacagtttaggttaaggaaatgtctgagaaagtcatattaattagcaggttcacaggaaactgacatttattgtataaattccatggtcaaatgtattagggctccaygcacacaactgtgcgccatctatgttaccacacagtgcttacttctttcagtctttattcatttctctcctaatggtctgtatggtattattacatagttctaaaaaccttccatgaggcagaaatttcatttaatgatatagctttgaaaataatgaaaaacagtagaaactttctattttttatgaagcagaattgttgaattttcagtttcatttatttaa

SEQ ID NO: 581339 - DNA, 355 bp, Homo sapiens
tggcatgaatccgggaggcagagcttgcagtgaggcgagatcccgccactgcactccagcctgggcgacagggccagactccgtctcaaaaaaaaaaaaaaaaaaaaagcaaaaatagtaggcttaactccaaccttatcaataattatttcaaacgtaatttaaatactccaaataaaacacagattgtccaactatataataaaagtacctataagagatgcatgccaaatattatggtatagatawgttgagagttaaataatttccaagtataccaagaaaacaacaagcacaagaaatcttatgtggctatattaatataagaaaaagtagacctccaaacaagcaatat

SEQ ID NO: 581340 - DNA, 355 bp, Homo sapiens
tggcatgaatccgggaggcagagcttgcagtgaggcgagatcccgccactgcactccagcctgggcgacagggccagactccgtctcaaaaaaaaaaaaaaaaaaaaagcaaaaatagtaggcttaactccaaccttatcaataattatttcaaacgtaatttaaatactccaaataaaacacagattgtccaactatataataaaagtacctataagagatgcatgccaaatattatggtatagatatgttgagagttaaataatttccaagtataccaagraaacaacaagcacaagaaatcttatgtggctatattaatataagaaaaagtagacctccaaacaagcaatat

SEQ ID NO: 581341 - DNA, 443 bp, Homo sapiens
aatttggctataattgataatttaatttatcaaattaaattgttttttttccctttagactttcttcagtcacatctgaataaatcacttagaagtaagctagatgtaatataatgaaatgcttaaaagggctgtktatcttcatattacacttacagtgactttctgctgtacccattatattctacctgcagctagttgaggtaaagagagggcatttaactgtcaaggggacctgttaggagactgtagaaatctggaaagtctcttgggtctttgagggattttgggatgcagagagtggggctgggatctctggctaggttggagccagcctgcatttgtatctttatcttggaagcaaacttagaatgcagagatagatgtggcctggatgctgctaactctagccaaccactaaatcttaaggtgggagagatgca

SEQ ID NO: 581342 - DNA, 443 bp, Homo sapiens
aatttggctataattgataatttaatttatcaaattaaattgttttttttccctttagactttcttcagtcacatctgaataaatcacttagaagtaagctagatgtaatataatgaaatgcttaaaagggctgtgtatcttcatatkacacttacagtgactttctgctgtacccattatattctacctgcagctagttgaggtaaagagagggcatttaactgtcaaggggacctgttaggagactgtagaaatctggaaagtctcttgggtctttgagggattttgggatgcagagagtggggctgggatctctggctaggttggagccagcctgcatttgtatctttatcttggaagcaaacttagaatgcagagatagatgtggcctggatgctgctaactctagccaaccactaaatcttaaggtgggagagatgca

SEQ ID NO: 581343 - DNA, 443 bp, Homo sapiens
aatttggctataattgataatttaatttatcaaattaaattgttttttttccctttagactttcttcagtcacatctgaataaatcacttagaagtaagctagatgtaatataatgaaatgcttaaaagggctgtgtatcttcatattacacttacagtgactttctgctgtacccattatattctacctgcagctagttgaggtaaagagagggcatttaactgtcaagggracctgttaggagactgtagaaatctggaaagtctcttgggtctttgagggattttgggatgcagagagtggggctgggatctctggctaggttggagccagcctgcatttgtatctttatcttggaagcaaacttagaatgcagagatagatgtggcctggatgctgctaactctagccaaccactaaatcttaaggtgggagagatgca

SEQ ID NO: 581344 - DNA, 443 bp, Homo sapiens
aatttggctataattgataatttaatttatcaaattaaattgttttttttccctttagactttcttcagtcacatctgaataaatcacttagaagtaagctagatgtaatataatgaaatgcttaaaagggctgtgtatcttcatattacacttacagtgactttctgctgtacccattatattctacctgcagctagttgaggtaaagagagggcatttaactgtcaaggggacctgtkaggagactgtagaaatctggaaagtctcttgggtctttgagggattttgggatgcagagagtggggctgggatctctggctaggttggagccagcctgcatttgtatctttatcttggaagcaaacttagaatgcagagatagatgtggcctggatgctgctaactctagccaaccactaaatcttaaggtgggagagatgca

SEQ ID NO: 581345 - DNA, 649 bp, Homo sapiens
atcatgcccggctaattttttatattcagtagagatgaggttttaccatgttagtcagactggtctcgaactcctgacctcaggtgatccacccacctcagcctctcaaagtgctgggattacagacttgagccactgcccccagccatcttttttatttatttattttaattgttgttctggaaatcctgggatgcatagacagtgaatatcttttttgttttttgagacagaatctcactctgtctcccaggctgcagtgcagtggtgctatcttggttractgcaacctctgctttctaggctcaagcgattctcctgcctcagcctcccgggtagctgaaattacaggtgccagctaccatgcccagctaatttttgtatttttattagagatgaggttttgccatgttggccaggctggtcttgaactcctgacctcaggtgatccacccacctttgcctcccaaagtgctgagattacaggcatgagccactgagcccagctgaatattttttttaaatcaataaccttatttcttagagtagttttaggttcacagcaaaattgagaggaaggtacagagatttctcatatatcccatgcctcccacacacgcatagcctcccccattattagtattttcca

SEQ ID NO: 581346 - DNA, 398 bp, Homo sapiens
tttaaaaaaccaaaccaaaccaaaacaacaacaacaacaamaaacaggatctaaagcatacacacaagtgtgcacaatttttttatgaaggtagagtcttactatgtttcccaagctggtctcaaacttctgggctcctcaagtgatcctcctgcctcatcctcccaagtagtttggattagaggcatgcatcactgtgcattcttatgattttaatattctgtacatttattattgatttaaaatgcattttacctttttctttaatagatgttggaatttctgatgaatctgcagtcaggtaagatttcatagatttaaaaaattatgttaactaagaaaatatagatggaagaaactaatatctgttgagtgttgtattctgggctagacatcct

SEQ ID NO: 581347 - DNA, 567 bp, Homo sapiens
ttaatatatagatcactgacttttccccagattatgttttcctttttttgagggggaagctggatataaactggcagttaaaaaaattgtaaagaaatcaacttgctcattttcattgtgtatttttgctctcaagcattttgcatgaactgtgtgtggattcattgcctacattggatgatgaagacttgagtgttgctactaaggtaaagtggtctcttgtaaaattaatcttctcactctgggtgtagttttgcatagtatttacttttcaaatttagcagtggtttacctatcattgttttatggtggtaatggaaagytggtcagagaaaaacatacacatggctagttgattcaaaaaatgtgtttaactttggtaactaataaagattggtaagtactgtgacagggtgggagctgaaaaataaatgaactggaaaataagtagtcacaggaaaatcacattaggaaatgctttctccaatagaggaaatatgaactttggttaaagtttatttggataaatactaatactttgacttttaaatcatacgagtgtgactt

SEQ ID NO: 581348 - DNA, 503 bp, Homo sapiens
taatttttagtggcagaaatgttcagcacatagcatatagcttttgttcttggaaacttatcattttggtgtcatatagtttttaggagagattgtttctctacttatattattggttctgtagtgagactaaaaaagtattaaaagttgtagaaaaatagctgagtttggtggtgtacacctgtagtccctgctacttgggagtttgagacagtaagattgcttgaacacaggagtttgagaacagcctgggtaacattgtatctgatttaaaaatataaattgtggaaatgtagaaatttaaatttatgttctcaagatttgtattgcaaagggatttttatgtgatttatgagttgtccatgaagagtttatataaaacacttcatctaattgaataacatgtattttcctgmaaataaccagttctagaagcagagactcttaataccaatatggtaagtctttatcatcataattttgtcattgtagtttatttaaaa

SEQ ID NO: 581349 - DNA, 503 bp, Homo sapiens
taatttttagtggcagaaatgttcagcacatagcatatagcttttgttcttggaaacttatcattttggtgtcatatagtttttaggagagattgtttctctacttatattattggttctgtagtgagactaaaaaagtattaaaagttgtagaaaaatagctgagtttggtggtgtacacctgtagtccctgctacttgggagtttgagacagtaagattgcttgaacacaggagtttgagaacagcctgggtaacattgtatctgatttaaaaatataaattgtggaaatgtagaaatttaaatttatgttctcaagatttgtattgcaaagggatttttatgtgatttatgagttgtccatgaagagtttatataaaacacttcatctaattgaataacatgtattttcctgcaaataaccagttctagaagcagagactcttaataccaatatggtaagtctttatcatsataattttgtcattgtagtttatttaaaa

SEQ ID NO: 581350 - DNA, 456 bp, Homo sapiens
cacaggagtttgagaacagcctgggtaacattgtatctgatttaaaaatataaattgtggaaatgtagaaatttaaatttatgttctcaagatttgtattgcaaagggatttttatgtgatttatgagttgtccatgaagagtttatataaaacacttcatctaattgaataacatgtattttcctgcaaataaccagttctagaagcagagactcttaataccaatatggtaagtctttatcatcataattttgtcattgtagtttatttaaaatatttacttggccaggcgtggtggctcacacctgtaatcccagcacttttggaggccgaggtgggtagmtcacctgaggtcaggagttcaagatcagcctggccaacatggtgaaaccctgtctcttaaaaaaaaaaaaaaaaagcacaaaaattatccaagcatgatagtgcatgcctgt

SEQ ID NO: 581351 - DNA, 611 bp, Homo sapiens
gatttatgagttgtccatgaagagtttatataaaacacttcatctaattgaataacatgtattttcctgcaaataaccagttctagaagcagagactcttaataccaatatggtaagtctttatcatcataattttgtcattgtagtttatttaaaatatttacttggccaggcgtggtggctcacacctgtaatcccagcacttttggaggccgaggtgggtagctcmcctgaggtcaggagttcaagatcagcctggccaacatggtgaaaccctgtctcttaaaaaaaaaaaaaaaaagcacaaaaattatccaagcatgatagtgcatgcctgtaatcccagttgctcaggaggctaaggcaggagaatcgcttgaacccaggaggcaaagattgcagtgagccaagatcgcaccattgcactgtaggctgggtgacagagcaagactacatcttaaaaaataaaataaaataaaataaccactcaaagtccttatatcatattctgaaagtttgaatgtcagaaggttttctatttagttttttaaatgatcattggaactcctgcataccataagctactggaggtcagtaaacatatttgtgtg

SEQ ID NO: 581352 - DNA, 456 bp, Homo sapiens
cacaggagtttgagaacagcctgggtaacattgtatctgatttaaaaatataaattgtggaaatgtagaaatttaaatttatgttctcaagatttgtattgcaaagggatttttatgtgatttatgagttgtccatgaagagtttatataaaacacttcatctaattgaataacatgtattttcctgcaaataaccagttctagaagcagagactcttaataccaatatggtaagtctttatcatcataattttgtcattgtagtttatttaaaatatttacttggccaggcgtggtggctcacacctgtaatcccagcacttttggaggccgaggtgggtagctcacctgaggtcaggagttcaagatcagcctggccaacatggtgaraccctgtctcttaaaaaaaaaaaaaaaaagcacaaaaattatccaagcatgatagtgcatgcctgt

SEQ ID NO: 581353 - DNA, 611 bp, Homo sapiens
gatttatgagttgtccatgaagagtttatataaaacacttcatctaattgaataacatgtattttcctgcaaataaccagttctagaagcagagactcttaataccaatatggtaagtctttatcatcataattttgtcattgtagtttatttaaaatatttacttggccaggcgtggtggctcacacctgtaatcccagcacttttggaggccgaggtgggtagctcacctgaggtcaggagttcaagatcagcctggccaacatggtgaaaccctgtctcttaaaaaaaaaaaaaaaaagcacaaaaattatccargcatgatagtgcatgcctgtaatcccagttgctcaggaggctaaggcaggagaatcgcttgaacccaggaggcaaagattgcagtgagccaagatcgcaccattgcactgtaggctgggtgacagagcaagactacatcttaaaaaataaaataaaataaaataaccactcaaagtccttatatcatattctgaaagtttgaatgtcagaaggttttctatttagttttttaaatgatcattggaactcctgcataccataagctactggaggtcagtaaacatatttgtgtg

SEQ ID NO: 581354 - DNA, 499 bp, Homo sapiens
tttacttggccaggcgtggtggctcacacctgtaatcccagcacttttggaggccgaggtgggtagctcacctgaggtcaggagttcaagatcagcctggccaacatggtgaaaccctgtctcttaaaaaaaaaaaaaaaaagcacaaaaattatccaagcatgatagtgcatgcctgtaatcccagttgctcaggaggcyaaggcaggagaatcgcttgaacccaggaggcaaagattgcagtgagccaagatcgcaccattgcactgtaggctgggtgacagagcaagactacatcttaaaaaataaaataaaataaaataaccactcaaagtccttatatcatattctgaaagtttgaatgtcagaaggttttctatttagttttttaaatgatcattggaactcctgcataccataagctactggaggtcagtaaacatatttgtgtgtatcctggagtacctagaatacagtcttccatgtaagaagcatttta

SEQ ID NO: 581355 - DNA, 611 bp, Homo sapiens
gatttatgagttgtccatgaagagtttatataaaacacttcatctaattgaataacatgtattttcctgcaaataaccagttctagaagcagagactcttaataccaatatggtaagtctttatcatcataattttgtcattgtagtttatttaaaatatttacttggccaggcgtggtggctcacacctgtaatcccagcacttttggaggccgaggtgggtagctcacctgaggtcaggagttcaagatcagcctggccaacatggtgaaaccctgtctcttaaaaaaaaaaaaaaaaagcacaaaaattatccaagcatgatagtgcatgcctgtaatcccagttgctcaggaggctaaggcaggagaatcgcttgaacccaggaggcaaagattgcagtgagccaaratcgcaccattgcactgtaggctgggtgacagagcaagactacatcttaaaaaataaaataaaataaaataaccactcaaagtccttatatcatattctgaaagtttgaatgtcagaaggttttctatttagttttttaaatgatcattggaactcctgcataccataagctactggaggtcagtaaacatatttgtgtg

SEQ ID NO: 581356 - DNA, 611 bp, Homo sapiens
gatttatgagttgtccatgaagagtttatataaaacacttcatctaattgaataacatgtattttcctgcaaataaccagttctagaagcagagactcttaataccaatatggtaagtctttatcatcataattttgtcattgtagtttatttaaaatatttacttggccaggcgtggtggctcacacctgtaatcccagcacttttggaggccgaggtgggtagctcacctgaggtcaggagttcaagatcagcctggccaacatggtgaaaccctgtctcttaaaaaaaaaaaaaaaaagcacaaaaattatccaagcatgatagtgcatgcctgtaatcccagttgctcaggaggctaaggcaggagaatcgcttgaacccaggaggcaaagattgcagtgagccaagatcgcaccattgcactgtaggctggrtgacagagcaagactacatcttaaaaaataaaataaaataaaataaccactcaaagtccttatatcatattctgaaagtttgaatgtcagaaggttttctatttagttttttaaatgatcattggaactcctgcataccataagctactggaggtcagtaaacatatttgtgtg

SEQ ID NO: 581357 - DNA, 370 bp, Homo sapiens
tccagttttctctctctgttataataatgttctttcaggtaatggtagatgaccatatttagytaattgaatgtcttatagtaagaaacactatcacagaagtacttacaaaaaactaattgcagcataaatattaattagtattatcagagttatgaaagaccgaaggctctgttatagatctatttccccatgtactttattgtacttcatgtttttcgttttctttcttggcttaagctcatatttcattgactaattaggcttgttttttgtttgtatctctcttttaaattgaaatttttggggaggcagggtcttgctctgttgtccatgctgtagtgtagtggcatgatcttggctcactgct

SEQ ID NO: 581358 - DNA, 370 bp, Homo sapiens
tccagttttctctctctgttataataatgttctttcaggtaatggtagatgaccatatttagctaattgaatgtcttatagtaagaaacactatcacagaagtacttacaaaaaactaattgcagcataaatattaattagtattatcagagttatgaaagaccgaaggctctgttatagatctatttccccatgtactttattgtacttcatgtttttcgttttctttcttggcttaagctcatatttcattgactaattaggcttgttttttgtttgtatctctcttttaaattgaaatttttggggaggcagggtcttgctctgttgtccatgctgyagtgtagtggcatgatcttggctcactgct

SEQ ID NO: 581359 - DNA, 604 bp, Homo sapiens
tttttgtgtagagatgtgttctcattatgttggccaggctggtctccaactcctgaactcaagcaatccacccaccttggccttgcaaagggctgagattacaggtgtgarccaccatgcctgggcaacattgagattgatttaaagaaattgattagggctgggtgtggtggtgcacactgcttatctcaacattttgggaggcagaagtggaagatttgcttgagcccaggagcttgagaccagcctgggaggtataatgaggccttgtctctacaaagataacaataaaaacattagcatgacatgatggtatgcacctgtagttccagctattcaggaagttgaggtgggaagattgcttgaggtcaggagtttgagaccacagtgagccataatcaggcccctgcattctagccctgggttgacagagtgagacccagtttcataaaaagagattgataagaaactcttgatgcaactcattataattttaaatggaaactaattcttgatattaccttagcagtgtgtccccaagaaagtgtcagagcctttacgtggaccttctcatgaaaaaggaaacagaatagtcaatggaaaa

SEQ ID NO: 581360 - DNA, 604 bp, Homo sapiens
tttttgtgtagagatgtgttctcattatgttggccaggctggtctccaactcctgaactcaagcaatccacccaccttggccttgcaaagggctgagattacaggtgtgagccaccatgcctgggcaacattgagattgatttaaagaaattgattagggctgggtgtggtggtgcacamtgcttatctcaacattttgggaggcagaagtggaagatttgcttgagcccaggagcttgagaccagcctgggaggtataatgaggccttgtctctacaaagataacaataaaaacattagcatgacatgatggtatgcacctgtagttccagctattcaggaagttgaggtgggaagattgcttgaggtcaggagtttgagaccacagtgagccataatcaggcccctgcattctagccctgggttgacagagtgagacccagtttcataaaaagagattgataagaaactcttgatgcaactcattataattttaaatggaaactaattcttgatattaccttagcagtgtgtccccaagaaagtgtcagagcctttacgtggaccttctcatgaaaaaggaaacagaatagtcaatggaaaa

SEQ ID NO: 581361 - DNA, 604 bp, Homo sapiens
tttttgtgtagagatgtgttctcattatgttggccaggctggtctccaactcctgaactcaagcaatccacccaccttggccttgcaaagggctgagattacaggtgtgagccaccatgcctgggcaacattgagattgatttaaagaaattgattagggctgggtgtggtggtgcacactgcttatctcaacattttgggaggcagaagtggaagatttgcttgagcccaggagcttgagaccagcctgggaggtataatgaggccttgtctctacaaagataacaataaaaacattagcatgacatgatggtatgcacctgtagttccagctattcaggaagttgaggtgggaagattgcttgaggtcaggagtttgagaccacagtgagccataatcaggcccctgcattctagccctgggttgacagagtgagacccagtttcataaaaagagattgataagaaactcttgatgcaactcattataattttaaatggaaactaattcttgatattaccttagcagtgtgtccccmagaaagtgtcagagcctttacgtggaccttctcatgaaaaaggaaacagaatagtcaatggaaaa

SEQ ID NO: 581362 - DNA, 604 bp, Homo sapiens
tttttgtgtagagatgtgttctcattatgttggccaggctggtctccaactcctgaactcaagcaatccacccaccttggccttgcaaagggctgagattacaggtgtgagccaccatgcctgggcaacattgagattgatttaaagaaattgattagggctgggtgtggtggtgcacactgcttatctcaacattttgggaggcagaagtggaagatttgcttgagcccaggagcttgagaccagcctgggaggtataatgaggccttgtctctacaaagataacaataaaaacattagcatgacatgatggtatgcacctgtagttccagctattcaggaagttgaggtgggaagattgcttgaggtcaggagtttgagaccacagtgagccataatcaggcccctgcattctagccctgggttgacagagtgagacccagtttcataaaaagagattgataagaaactcttgatgcaactcattataattttaaatggaaactaattcttgatattaccttagcagtgtgtccccaagaaagtgtcagagcctttacgtggaccttctcatgaaaamggaaacagaatagtcaatggaaaa

SEQ ID NO: 581363 - DNA, 465 bp, Homo sapiens
aaaactttaaagtcaaaccaaaacctatgggatacaggccaggcgcagtggctcatgcctgtaatcccagcactttgggaggccgagtygggtggatcacaaggtcaggagatggagaccatcctggctaacacggtgaaaccccgtctctactaaaaatacaaaaaccaaaaattagctgggcatggtggtgggcacctgtagtcccagctactcggctgaggcaggagaatggcatgaacccagaaggcagagcttgtagtaagccaagattgcaccactgcactccagcctgggcaacagagagagagtctgtctccaaaaataaacaaaaacaaaaaaacaaaaaacaaacctatgggatacagtaaaaacagtactaaggagtaagtttatagcaaaaagcacctacatcaaagaaagtagaaaaacttcaaataaacaacctaataatgcatcttaaat

SEQ ID NO: 581364 - DNA, 575 bp, Homo sapiens
ttaacaattctctatagtggtccaatattttcctcatcttgctgtcttctaagctttcccaactcttctgacctctgtcttttacccacttctgaacctggttctacattgtcagctatctttatcacagcctggcaatgtggtaaaacagaaaagtccattttcagggggaaagttcatgaaggattcagatatttgcatgaaaagaagctgagtgctggttgccaagacaaaggggaaagggccttgaaggcatttcatggctccacttcatagtactaattttctgcatgatcataaagaaaagaggtttaattggctcacggtccagcaggctgtaaargaagcacagtggcttctgcttctgggaggatcagatcaggaagccttccaatcataccagaaggccaaggggcaatgagatgtttcaaatggcaggggtagaagaaagactgagagaggaaagaggtgccaccccctgttatataaccagatctcatgagaacacactatcatgaagacagcatcaagaagatgttgcctaaccattggtgaaggatttgcctcccaccccc

SEQ ID NO: 581365 - DNA, 575 bp, Homo sapiens
ttaacaattctctatagtggtccaatattttcctcatcttgctgtcttctaagctttcccaactcttctgacctctgtcttttacccacttctgaacctggttctacattgtcagctatctttatcacagcctggcaatgtggtaaaacagaaaagtccattttcagggggaaagttcatgaaggattcagatatttgcatgaaaagaagctgagtgctggttgccaagacaaaggggaaagggccttgaaggcatttcatggctccacttcatagtactaattttctgcatgatcataaagaaaagaggtttaattggctcacggtccagcaggctgtaaaggaagcacagtggcttctgcttctgggaggatcagatcaggaagccttccaatcataccagaaggccaaggggcaatgagatgtttcaaatggcaggggtagaagaaagactgagagaggaaagaggtgccaccccctgttatataaccagatctcatragaacacactatcatgaagacagcatcaagaagatgttgcctaaccattggtgaaggatttgcctcccaccccc

SEQ ID NO: 581366 - DNA, 575 bp, Homo sapiens
ttaacaattctctatagtggtccaatattttcctcatcttgctgtcttctaagctttcccaactcttctgacctctgtcttttacccacttctgaacctggttctacattgtcagctatctttatcacagcctggcaatgtggtaaaacagaaaagtccattttcagggggaaagttcatgaaggattcagatatttgcatgaaaagaagctgagtgctggttgccaagacaaaggggaaagggccttgaaggcatttcatggctccacttcatagtactaattttctgcatgatcataaagaaaagaggtttaattggctcacggtccagcaggctgtaaaggaagcacagtggcttctgcttctgggaggatcagatcaggaagccttccaatcataccagaaggccaaggggcaatgagatgtttcaaatggcaggggtagaagaaagactgagagaggaaagaggtgccaccccctgttatataaccagatctcatgagaacacactatcatgaagacagcatcaagaagatgttgcctaaccatyggtgaaggatttgcctcccaccccc

SEQ ID NO: 581367 - DNA, 343 bp, Homo sapiens
cttccaatccttgtttgctacccactactgagcctgcttctactttttcagawatctgtatagcaggttggctatgtagcaagaacaaaaatcccatttaaggggaaacattcaagaagatttcagaaatttgcatataaagaagccctgtgctaatagccaaaacaaagggaaaaaggccttgaaggcatttcacagctcctctctgcagttctacttttctgtattattgtaaataaaagaggtgtaattgactcatggttctgcaagctgtgaaggaagtatagtgtcttctgtttctgtgaggaatcaggaagcctcctcattatatcagaaagccaag

SEQ ID NO: 581368 - DNA, 520 bp, Homo sapiens
tctttttctaacttggcaaagattatgtttttttcatgaagaagtactgacatatttaaacactcaggatctgagaatttgaaatacatgaaacttagcaagtggtctttaagtagttttcatttctaaattatagtacatascattgaatgctacagaagaaaagacaatgagggattactcataaacattgcctttatgatatccttccaaagaaaaccaagtgtccctgtgcttggactcataaagcagaaatgcttaccttgcttttatgtcactaacaaacaattttgcctagtcattgaattctaatgcatttaagccatcttgagagtagagcccctagggaaaactacaaatggaaaattcattgatttttgattttgctttcctatggattaaatttaacactttcttgtaaatctctccctttgcagatcatatgtgataaatagttatccaactttctagatatccacccagagctgcttccatatgaagaggtggaaacggattctgt

SEQ ID NO: 581369 - DNA, 520 bp, Homo sapiens
tctttttctaacttggcaaagattatgtttttttcatgaagaagtactgacatatttaaacactcaggatctgagaatttgaaatacatgaaacttagcaagtggtctttaagtagttttcatttctaaattatagtacatagcattgaatgctacagaagaaaagacaatgagggattactcataaacattgcctttatgatatccttccaaagaaaaccaagtgtccctgtgcttggactcataaagcagaaatgcttaccttgcttttatgtcactaacaaacaattttgcctagtcattkaattctaatgcatttaagccatcttgagagtagagcccctagggaaaactacaaatggaaaattcattgatttttgattttgctttcctatggattaaatttaacactttcttgtaaatctctccctttgcagatcatatgtgataaatagttatccaactttctagatatccacccagagctgcttccatatgaagaggtggaaacggattctgt

SEQ ID NO: 581370 - DNA, 520 bp, Homo sapiens
tctttttctaacttggcaaagattatgtttttttcatgaagaagtactgacatatttaaacactcaggatctgagaatttgaaatacatgaaacttagcaagtggtctttaagtagttttcatttctaaattatagtacatagcattgaatgctacagaagaaaagacaatgagggattactcataaacattgcctttatgatatccttccaaagaaaaccaagtgtccctgtgcttggactcataaagcagaaatgcttaccttgcttttatgtcactaacaaacaattttgcctagtcattgaattctaaygcatttaagccatcttgagagtagagcccctagggaaaactacaaatggaaaattcattgatttttgattttgctttcctatggattaaatttaacactttcttgtaaatctctccctttgcagatcatatgtgataaatagttatccaactttctagatatccacccagagctgcttccatatgaagaggtggaaacggattctgt

SEQ ID NO: 581371 - DNA, 272 bp, Homo sapiens
tctcacctctttcctctctctgtcttgcttctactcctgccatatgaaayatttcattgccgcttggccttctggtataattgggaggctttctgagtcctcctacaagcagaaaccactatgctttctttacagcctgaagaactgtgagtcaattagacctcttttctttatgtagatacagaaaattaatgctgtgaagtgaagttatgaaatgacttctaggcgtttcccccattctcttggctattagcgctgagctttattcaatg

SEQ ID NO: 581372 - DNA, 272 bp, Homo sapiens
tctcacctctttcctctctctgtcttgcttctactcctgccatatgaaatatttcattgccgcttggccttytggtataattgggaggctttctgagtcctcctacaagcagaaaccactatgctttctttacagcctgaagaactgtgagtcaattagacctcttttctttatgtagatacagaaaattaatgctgtgaagtgaagttatgaaatgacttctaggcgtttcccccattctcttggctattagcgctgagctttattcaatg

SEQ ID NO: 581373 - DNA, 584 bp, Homo sapiens
aaattatttgtatttataaaagaactcttttgtctgggcacagtggttcatgcctgtatsccagcactttgagaggctgaggcaagaggatcacttgagctcaggagtttgagaccagcctgggcaacatagtgagacccaatctctactaagaataagataaaaaattgccaggcatggtggtgcatgcctattgtcccagctactagagaggatgaggcaggaggattgcttgagcctgggaggttgagataacagtgagctatgatcccactactgcactccagtctggggaacagagtgagaccttagagtgagaccttgtctcaaaaagagaaaaaaataaagaattgtttcattcttttgtttttcttcagccaagtgaccttgaattagtaacaccacagacagtaagtcttatctcaacaccagtagacaaatcagcagattcaaagtaggcagggaaaaaaaaatagataggcaaaagaactgagactttttcactttagggtttttaaaaatagtaactatttgagttctgaattttctttcatgtaatttggccatcaggtttaaagtgtgca

SEQ ID NO: 581374 - DNA, 584 bp, Homo sapiens
aaattatttgtatttataaaagaactcttttgtctgggcacagtggttcatgcctgtatcccagcactttgagaggctgaggcaagaggatcacttgagctcaggagtttgagaccagcctgggcaacatagtgagacccaatctctactaagaataagataaaaaattgccaggcatggtggtgcatgcctattgtcccagctactagagaggatgaggcaggaggattgcttgagcctgggaggttgagataacagtgagctatgatcccactactgcactccagtctggggaacagagtgagaccttagagtgagamcttgtctcaaaaagagaaaaaaataaagaattgtttcattcttttgtttttcttcagccaagtgaccttgaattagtaacaccacagacagtaagtcttatctcaacaccagtagacaaatcagcagattcaaagtaggcagggaaaaaaaaatagataggcaaaagaactgagactttttcactttagggtttttaaaaatagtaactatttgagttctgaattttctttcatgtaatttggccatcaggtttaaagtgtgca

SEQ ID NO: 581375 - DNA, 584 bp, Homo sapiens
aaattatttgtatttataaaagaactcttttgtctgggcacagtggttcatgcctgtatcccagcactttgagaggctgaggcaagaggatcacttgagctcaggagtttgagaccagcctgggcaacatagtgagacccaatctctactaagaataagataaaaaattgccaggcatggtggtgcatgcctattgtcccagctactagagaggatgaggcaggaggattgcttgagcctgggaggttgagataacagtgagctatgatcccactactgcactccagtctggggaacagagtgagaccttagagtgagaccttgtctcaaaaagagaaaaaaataaagaattgtttcattcttttgtttttcttcagccaagtgaccttgaattagtaacaccacagacagtaagtcttatctcaacaccagtagacaaatcagcagattcaaagtaggcagggaaaaaaaaatrgataggcaaaagaactgagactttttcactttagggtttttaaaaatagtaactatttgagttctgaattttctttcatgtaatttggccatcaggtttaaagtgtgca

SEQ ID NO: 581376 - DNA, 584 bp, Homo sapiens
aaattatttgtatttataaaagaactcttttgtctgggcacagtggttcatgcctgtatcccagcactttgagaggctgaggcaagaggatcacttgagctcaggagtttgagaccagcctgggcaacatagtgagacccaatctctactaagaataagataaaaaattgccaggcatggtggtgcatgcctattgtcccagctactagagaggatgaggcaggaggattgcttgagcctgggaggttgagataacagtgagctatgatcccactactgcactccagtctggggaacagagtgagaccttagagtgagaccttgtctcaaaaagagaaaaaaataaagaattgtttcattcttttgtttttcttcagccaagtgaccttgaattagtaacaccacagacagtaagtcttatctcaacaccagtagacaaatcagcagattcaaagtaggcagggaaaaaaaaatagataggcaaaagaactgagactttttcactttarggtttttaaaaatagtaactatttgagttctgaattttctttcatgtaatttggccatcaggtttaaagtgtgca

SEQ ID NO: 581377 - DNA, 456 bp, Homo sapiens
tcatgtaatttggccatcaggtttaaagtgtgcactagaggtcaggtgcagtggctcatrcgtgtaatcccaacactatcggaggctgaggcaggtggatcacttgaggccaggagtttgagaccagcctggccaatgtgacaaaaccccatctctactgaatatacaaaaattaactgggtgtggtagtgtgcacctgtagtcccagctattcaggaggctgaggcaggataattgctcaaacctgggaggcggaggttgcagtgagccgcgattgtaccaccatgctccatcctgggcaacagagcaagactctgtgtcaaaaagaaaaaggaaaaaaaagtatatatatatgtataggctgggcacagtggctcatgcctgtaatcccagcagtttgggaggccaaggcgggtggatcacttgagatcaggagtttgagaccagcctggccaa

SEQ ID NO: 581378 - DNA, 456 bp, Homo sapiens
tcatgtaatttggccatcaggtttaaagtgtgcactagaggtcaggtgcagtggctcatgcgtgtaatcccaacactatcggaggctgaggcaggtggatcacttgaggccaggagtttgagaccagcctggccaatgtgacaaaaccccatctctactgaatatacaaaaattaactgggtgtggtagtgtgcacctstagtcccagctattcaggaggctgaggcaggataattgctcaaacctgggaggcggaggttgcagtgagccgcgattgtaccaccatgctccatcctgggcaacagagcaagactctgtgtcaaaaagaaaaaggaaaaaaaagtatatatatatgtataggctgggcacagtggctcatgcctgtaatcccagcagtttgggaggccaaggcgggtggatcacttgagatcaggagtttgagaccagcctggccaa

SEQ ID NO: 581379 - DNA, 402 bp, Homo sapiens
cagtcacttgacaggtgacattttaaatctcctctaatttactgtgtcattggcttacacttgttctcaggaaaagttccaaatttttcaccatgaaataaaaacacccatgtcaatgtaattcttgccaagttactcagccttgtttctcaccacttactgcactctgccctttgctctagcaccaaactggatggagtggaactctgcagggctcttcctcacctcaggctctttgcctttgcctctttcctctatctgggaagcttttycttgtccttcaggtatcaacctatgttatctcctccaccagaaagcccatgatattgacataaaagtgggtagatgtcccttctctgtgttccagtagtgccctgctgtatacctgtcatggtatctatg

SEQ ID NO: 581380 - DNA, 217 bp, Homo sapiens
  misc_feature 67, 98: n = A,T,C or G
catgccatatatcttctcacccaacctgtgtgacagaggtcccctcctggggcacaagtcccatacntaaagcatcctgtcccagtcggacctcatcntgagccctgggaggggaggggtaccatgggcccccctgcagcagccaggattaccacccakgggactcggccttctgtggccctggccagacttagaatttggcccaagacaaacttac

SEQ ID NO: 581381 - DNA, 599 bp, Homo sapiens
gagaaagtgagacatcaaactaaaattactagaaacccccaggaagaaggaaaaagaaaccaagaaaacagaaaaacaattaaaccagttaattaaaccttggyatgaccagaagatcagagtttcctaaaggagtggaaatttattgatttgaagaggatttattgattactgatttgaagaggaagaaaaaccatgaatggtctgaagcaaaagcctagtgtctgaagaagtcagtagggtgaaaacaagagctggccagaatatccacagatggtgacaagttggcaaagcctttactagactactcgtgaggctaactagaggccaaggagccaacactgctcctgtccttacagagagaccctacacaggattcccagatatacatggaaggacaacatcttatcaggtcctctctgtgcagatgtggttatcattccaaataatgagctccagccccaagactgttccatcctcaattgctttgagtgggcaatgtaggctctccacacacgagctacgtgtaggttccttgggtacccagatgggagccatgaaacacaaaccctccatggtcaggtctgtatttgtttcct

SEQ ID NO: 581382 - DNA, 599 bp, Homo sapiens
gagaaagtgagacatcaaactaaaattactagaaacccccaggaagaaggaaaaagaaaccaagaaaacagaaaaacaattaaaccagttaattaaaccttggcrtgaccagaagatcagagtttcctaaaggagtggaaatttattgatttgaagaggatttattgattactgatttgaagaggaagaaaaaccatgaatggtctgaagcaaaagcctagtgtctgaagaagtcagtagggtgaaaacaagagctggccagaatatccacagatggtgacaagttggcaaagcctttactagactactcgtgaggctaactagaggccaaggagccaacactgctcctgtccttacagagagaccctacacaggattcccagatatacatggaaggacaacatcttatcaggtcctctctgtgcagatgtggttatcattccaaataatgagctccagccccaagactgttccatcctcaattgctttgagtgggcaatgtaggctctccacacacgagctacgtgtaggttccttgggtacccagatgggagccatgaaacacaaaccctccatggtcaggtctgtatttgtttcct

SEQ ID NO: 581383 - DNA, 633 bp, Homo sapiens
gccaaaattgctgggttgcaagatgcactttccatgatgttgaggtatagaaaagcaagatgtactgtcatgggaatactcatatgaagttatttgtggaatccacatattaataggaaaatrgttaatacagcccagtatatttctataacatttattttagtgaacttataatgtttctttgtattaaattattagattatatctttaggtaatattgttactaaattagtaggtaatacatatttttattcaaaaataaattgtgcatctaatgtctaccaattaatgtacttgtagatgtatcttatcttaacttgagtctttgctgccactaatgaggtgtgaaggactcttctcccatggggaagtttttctttttccggagggaggagggcttttccaggtaatgtgtctagagtgttgggcagaagaatctgggaccacacctcaccagttctctccttaatcgacgtcatttgccttctcttccagctatgtttccagtgtcctctgggtgtttccaagagcaacaagaaacgaataaatctctggtgagttgtttatttgttcttcactttgttttacactgtattttctgagtttatgggtgtctgtgaattaaaaaggaaa

SEQ ID NO: 581384 - DNA, 633 bp, Homo sapiens
gccaaaattgctgggttgcaagatgcactttccatgatgttgaggtatagaaaagcaagatgtactgtcatgggaatactcatatgaagttatttgtggaatccacatattaataggaaaatggttaatacagcccagtatatttctataacatttattttagtgaacttataatgtttctttgtattaaattattagattatatctttaggtaatattgttactaaattagtaggtaatacatatttttattcaaaaataaattgtgcatctaatgyctaccaattaatgtacttgtagatgtatcttatcttaacttgagtctttgctgccactaatgaggtgtgaaggactcttctcccatggggaagtttttctttttccggagggaggagggcttttccaggtaatgtgtctagagtgttgggcagaagaatctgggaccacacctcaccagttctctccttaatcgacgtcatttgccttctcttccagctatgtttccagtgtcctctgggtgtttccaagagcaacaagaaacgaataaatctctggtgagttgtttatttgttcttcactttgttttacactgtattttctgagtttatgggtgtctgtgaattaaaaaggaaa

SEQ ID NO: 581385 - DNA, 633 bp, Homo sapiens
gccaaaattgctgggttgcaagatgcactttccatgatgttgaggtatagaaaagcaagatgtactgtcatgggaatactcatatgaagttatttgtggaatccacatattaataggaaaatggttaatacagcccagtatatttctataacatttattttagtgaacttataatgtttctttgtattaaattattagattatatctttaggtaatattgttactaaattagtaggtaatacatatttttattcaaaaataaattgtgcatctaatgtctaccaattaatgtacttgtagatgtatcttatcttaacttgagtctttgctgccmctaatgaggtgtgaaggactcttctcccatggggaagtttttctttttccggagggaggagggcttttccaggtaatgtgtctagagtgttgggcagaagaatctgggaccacacctcaccagttctctccttaatcgacgtcatttgccttctcttccagctatgtttccagtgtcctctgggtgtttccaagagcaacaagaaacgaataaatctctggtgagttgtttatttgttcttcactttgttttacactgtattttctgagtttatgggtgtctgtgaattaaaaaggaaa

SEQ ID NO: 581386 - DNA, 633 bp, Homo sapiens
gccaaaattgctgggttgcaagatgcactttccatgatgttgaggtatagaaaagcaagatgtactgtcatgggaatactcatatgaagttatttgtggaatccacatattaataggaaaatggttaatacagcccagtatatttctataacatttattttagtgaacttataatgtttctttgtattaaattattagattatatctttaggtaatattgttactaaattagtaggtaatacatatttttattcaaaaataaattgtgcatctaatgtctaccaattaatgtacttgtagatgtatcttatcttaacttgagtctttgctgccactaatgaggtgtgaaggactcttctcccatggggaagtttttctttttccggagggaggagggcttttccaggtaatgtgtctagagtgttgggcagaagaatctgggaccacacctcaccagttctctccttaatcgaygtcatttgccttctcttccagctatgtttccagtgtcctctgggtgtttccaagagcaacaagaaacgaataaatctctggtgagttgtttatttgttcttcactttgttttacactgtattttctgagtttatgggtgtctgtgaattaaaaaggaaa

SEQ ID NO: 581387 - DNA, 627 bp, Homo sapiens
actccagcacagtcatgtggtggaagaagatttgtagacaaaagggaagtggcatamcgaaatcggaagtgaggtacagaaacaactcagcgtttgccttgtttgagcacagtttgaacatttggcagtgcctgattggttgaagtttggccattgggattggccaagatgtagctgttgtttgaggtgcatacactcaagttaggttttcattcttgtttacctattaaggtaggttgcaggtcatccacaaggactcatatatataattatggagtccttctcaggacatacttagttcactttaacaatgccttccctttggttattttctcaattttgagagattagccaaaacttcagtcactggtgtcactattacccttgcaaatgtacttatttggtttagaaacccactgggaaatagaacagtgagatttgaaaaggtggaacaaggacttgagtagaaggtgtcttcttatgctggaatatcctgtttacaggagaaaaacaaaacctggtttgttctaggatttatgtgtttccttaaagtcttagtttgattatgttccatttagcatgagtgactccattttggtttggtttgttctgttgggacctattgca

SEQ ID NO: 581388 - DNA, 627 bp, Homo sapiens
actccagcacagtcatgtggtggaagaagatttgtagacaaaagggaagtggcataacgaaatcggaagtgaggtacagaaacaactcagcgtttgccttgtttgagcacagtttgaacatttggcagtgcctgattggttgaagtttggccattgggattggccaagatgtagctgttgtttgaggtgcatacactcaagttaggttttcattcttgtttacctattaaggtaggttgcaggtcatccacaaggactcatatatataattatggagtccttctcaggacatacttagttcactttaacaatgccttccctttggttattttctcaattttgagagattagccaaaacttcagtcactggtgtcactattacccttgcaaatgtacttatttggtttagaaacccactgggaaatagaacagtgagatttgaaaaggtggaacaaggacttgagtagaaggtgtcttcttatgctggaayatcctgtttacaggagaaaaacaaaacctggtttgttctaggatttatgtgtttccttaaagtcttagtttgattatgttccatttagcatgagtgactccattttggtttggtttgttctgttgggacctattgca

SEQ ID NO: 581389 - DNA, 587 bp, Homo sapiens
tatagtctgaaaggtcatgtcatttggactatgctttgttagtaaagcaaaaaaaacctaatattaaacaagaacttaaattttcatatacctgtgattgcttcttttcacttctttcacacctttcttgctcttcctctaaagccactggtaaggtttgttctgttgacaaattcattgatttagttcaaatgaactaagaagagttagataaagactataatctttataaaaataaatagagaataacatttctttgtattttatattttsagagtttgaatgaaacaatgtttactgaaatatttacttctgtaagaaatacttctaattatccaaaacttcaacaaaccacttggggagacaccagatatcaccagattcaagccatgcaaaatctcagggacactcacaaattgttccacccaacataagtcaacaaaactgttggaaacaaaacagaaatttgaaatacagtcaaaatatacaatgtaatgctttactatacttcataacagtatctttttaacaagacactaattgagttagcagttactaataatttgcaaaattattgttgtttatac

SEQ ID NO: 581390 - DNA, 553 bp, Homo sapiens
taagaattactagaataactaatagttactagagatagtaagaatatcttaagtttcataactggttaagatgttttaaaaattaaatataaaattatgatctattggattctaaaggtatagtctgaaaggtcatgtcatttggactatgctttgttagtaaagcaaaaaaaacctaatattaaacaagaacttaaattttcatatacctgtgattgcttcttttcacttctttcacacctttcttgctcttcctctaaagccactggtaaggtttgttctgttgacaaattcattgatttagttcaaatgaactaagaagagttagataaagactataatctttataaaaataaatagagaataacatttctttgtattttatattttgagagtttgaatgaaacaatgtttactgaaatatttacttctgtaagaaatacttctaattatccaaaacttcaacaaamcacttggggagacaccagatatcaccagattcaagccatgcaaaatctcagggacactcacaaattgttccacccaacataag

SEQ ID NO: 581391 - DNA, 600 bp, Homo sapiens
ctttgtattttatattttgagagtttgaatgaaacaatgtttactgaaatatttacttctgtaagaaatacttctaattatccaaaacttcaacaaaccacttggggagacaccagatatcaccagattcaagccatgcaaaatctcagggacactcacaaattgttccacccaacataagtcaacaaaactgttggaaacaaaacagaaatttgaaatacagtcaaaatatacaatgtaatgctttactatacttcataacagtatctttttaacaagacactaattgagttagcagttactaataatttgcaaaattattgttstttatacctcaattagtgtgcaccccattttttatatcacaaatgttttcccctgctattctgaaaaatttattttcatcttttaagactcagaaagtaggctgggcataatagctcacatctgtaatcccagcactttggaaggccaaaatgggagaattgctcaaggccaaaagtttaagaccagcctgggaaccataggtaaccttgactctacaaaaaattagacaggtatggtgatatgttcctgttgtccccgctactcaagaagctt

SEQ ID NO: 581392 - DNA, 495 bp, Homo sapiens
tttaagaccagcctgggaaccataggtaaccttgactctacaaaaaattagacaggtatggtgatatgttcctgttgtccccgctactcaagaagcttagatgagaagatccctcgagcccagaagtctgaggtttcagtgagtctcaatcatgccattgcactccaatcctgggtgatagagtaagaacttgtctccaaaaagaggaagaaaaaaaggctcagaatgctwtgtgaaatcttccttgattctagctatctttctccacacacacaggtgtctgcttcgttggggtcccttagtaccttgtcaatttttctagtgtcactttaccacctgacctgcacatcatgtctttacatgttgaccccctttgctgctagactgtagaggacaatcttttgaatcatctttgtataaacagtcttaattttgctaaataattacttattgagttcctgctaagtgttaggcactggggaataaggaaggaaa

SEQ ID NO: 581393 - DNA, 495 bp, Homo sapiens
tttaagaccagcctgggaaccataggtaaccttgactctacaaaaaattagacaggtatggtgatatgttcctgttgtccccgctactcaagaagcttagatgagaagatccctcgagcccagaagtctgaggtttcagtgagtctcaatcatgccattgcactccaatcctgggtgatagagtaagaacttgtctccaaaaagaggaagaaaaaaaggctcagaatgctatgtgaaatcttccttgattctagctatctttctccacacacacaggtgtctgcttcgttggggtcccttagtaccttgtcaatttttctagtgtcactttaccacctgacmtgcacatcatgtctttacatgttgaccccctttgctgctagactgtagaggacaatcttttgaatcatctttgtataaacagtcttaattttgctaaataattacttattgagttcctgctaagtgttaggcactggggaataaggaaggaaa

SEQ ID NO: 581394 - DNA, 187 bp, Homo sapiens
agaattaaatttgatgctcctgtgttatctttaaaagacacagcttttctgaaaacccttactcatagtgcatgattatccattaagaaaaggtgatggaatatgtgaatacagctgaggagacaccacaaggcaaatgctaagtggttcccattaatattgsaaaaataaacactataaaacagaa

SEQ ID NO: 581395 - DNA, 187 bp, Homo sapiens
agaattaaatttgatgctcctgtgttatctttaaaagacacagcttttctgaaaacccttactcatagtgcatgattatccattaagaaaaggtgatggaatatgtgaatacagctgaggagacaccacaaggcaaatgctaagtggttcccattaatattgcraaaataaacactataaaacagaa

SEQ ID NO: 581396 - DNA, 617 bp, Homo sapiens
tctagaataaaattttctatgcttctttcccttctttgctctcttkctactctaataactgcgattcacacaggtaaagaagagtgtaattccttgatagaaacacagctccaagattaatcctttctttaactatgaagttcgcgtgtccaaaatctgtggtagttgctgtctgatttttatcactgatggtgatacagatatttatcatcaactcacaacttcccaaatctttgaaaagtcttactattgatggttcaactagtagaaacatgatgtaaaatatctgaaaataaagtttttatttattagaatgtaaataataatacaaattgtaataaggtgtaaaagttctttcttcactgaagcagtaccatgttgtcctctaccccacaaatgcagtactcccccgtggtttaatgtattttaaaagtcttgtaattgctattaactcagaaaagtttacttaacttgttgtaagcttttggtatttactacagtttactttcaatcactcaaccatgtctgttatatatgttgttttccatgagaaatttgtttattagtaattaagattcttcaggtataagaaaatatttcaataactaagtttgtgc

SEQ ID NO: 581397 - DNA, 578 bp, Homo sapiens
gtcttactattgatggttcaactagtagaaacatgatgtaaaatatctgaaaataaagtttttatttattagaatgtaaataataatacaaattgtaataaggtgtaaaagttctttcttcactgaagcagtaccatgttgtcctctaccccacaaatgcagtactcccccgtggtttaatgtattttaaaagtcttgtaattgctattaactcagaaaagtttacttaacttgttgtaagcttttggtatttactacagtttactttcaatcactcaaccatgtctgttatatatgttgttttccatgagaaatttgtttattagtaattaagattcttcaggtataagaaaatatttcaataactaagtttgtgcataaacacattaaggtcaaatacccatgacattattgtgtgtttctgtgtactagagacaaaaacttcaaaaaaaattttaatgaatatacgttaaattaaaaamtgctttcattaaactgagataatcttccctcaatgcatgaataccttcagaattcacatagaccaaataattgtataaagtataatagccttaaaa

SEQ ID NO: 581398 - DNA, 349 bp, Homo sapiens
tcatatcgaagaactggctgtctcaaaaaaatttcaccaaagcatctatatgcaacttaatcatatcttattcactcatgtcagtgaaacttctctccctgaggcctgacagttatcaagtgaaatgagctgctgtggtttaccccaactctagcactccctcctgyctccagtactctccacagcaataacctcttttgtgagactgggcatatgctgaagcaactggaagtgagttgtctcaagttaacttggctttaactcccaagaccccagcaaatgtctttctttcctccttttgtgtcctttcaccatccctcttcctttgaaaaaatgattatcagaactg

SEQ ID NO: 581399 - DNA, 349 bp, Homo sapiens
tcatatcgaagaactggctgtctcaaaaaaatttcaccaaagcatctatatgcaacttaatcatatcttattcactcatgtcagtgaaacttctctccctgaggcctgacagttatcaagtgaaatgagctgctgtggtttaccccaactctagcactccctcctgtctccagtactctccacagcaataacctcttttgtgagactgggcatatgctgaagcaactggaagtgagttgtctcaagttaacttggctttaactcccaagaccccagcaaatgtctttctttcctccttttgtgtcctttcacmatccctcttcctttgaaaaaatgattatcagaactg

SEQ ID NO: 581400 - DNA, 497 bp, Homo sapiens
atctctcttcactgatgatatgattctacacctagaaatccctaaagactgtgccaaaaggctcctagaactgataaaaaaaagtcttcagcaaactttcaggattaaaaaaaacaacatatagaaagaagtatcatttctgtacaccaaaaatgtttaaactgagaggtaaatcaagagtgcaatcctgtttacaacagcaacccccaaaakaaaagaaaagaaaagaagaatatgtctaagcaaggaggtaaatgatatctaaaaggagaactacaaaacactgcagaaaaaaatcatagatgacaaagcaaatggaaaactattccatgctcatggattagaaagatcaatattgttaaaatggctatactgccaaaagcaatctacacattcaacactattcctatgaaacaacccatgtcgtttttcacagaattagaaaaaaatatattctaaatttcatatggatttttaaagagcccagacaaccaaag

SEQ ID NO: 581401 - DNA, 497 bp, Homo sapiens
atctctcttcactgatgatatgattctacacctagaaatccctaaagactgtgccaaaaggctcctagaactgataaaaaaaagtcttcagcaaactttcaggattaaaaaaaacaacatatagaaagaagtatcatttctgtacaccaaaaatgtttaaactgagaggtaaatcaagagtgcaatcctgtttacaacagcaacccccaaaagaaaagaaaagaaaagaagaatatgtctaagcaaggaggtaaatgatatctaaaaggagaactacaaaacactgcagaaaraaatcatagatgacaaagcaaatggaaaactattccatgctcatggattagaaagatcaatattgttaaaatggctatactgccaaaagcaatctacacattcaacactattcctatgaaacaacccatgtcgtttttcacagaattagaaaaaaatatattctaaatttcatatggatttttaaagagcccagacaaccaaag

SEQ ID NO: 581402 - DNA, 497 bp, Homo sapiens
atctctcttcactgatgatatgattctacacctagaaatccctaaagactgtgccaaaaggctcctagaactgataaaaaaaagtcttcagcaaactttcaggattaaaaaaaacaacatatagaaagaagtatcatttctgtacaccaaaaatgtttaaactgagaggtaaatcaagagtgcaatcctgtttacaacagcaacccccaaaagaaaagaaaagaaaagaagaatatgtctaagcaaggaggtaaatgatatctaaaaggagaactacaaaacactgcagaaaaaaatcatagatgacaaagcaaatggaaaactattccatgctcatggattagaaagatcaatattgttaaaatggctatactgccaaaagcaatctacacattcaacactattcctatgaaacaaccmatgtcgtttttcacagaattagaaaaaaatatattctaaatttcatatggatttttaaagagcccagacaaccaaag

SEQ ID NO: 581403 - DNA, 268 bp, Homo sapiens
atcagctttcccaggataacacaaagagagccawgtggcacctgcacattacactgtggaagaaaaaaccaagctcaagaaaccccaacttgtattatgggaagttcacttggctgtacccttcccaagagggagaaattatctgcattatactagacagtaaataaacttttcctttgttccagaaggaggtactggttttctattccaaggctgttttctatacaaacatgcttgaaaacaatcatttggaacaagaaagtcagcg

SEQ ID NO: 581404 - DNA, 593 bp, Homo sapiens
aaagagagccatgtggcacctgcacattacactgtggaagaaaaaaccaagctcaagaaaccccaacttgtattatgggaagttcacttggctgtacccttcccaagagggagaaattatctgcattatactagacagtaaataaacttttcctttgttccagaaggaggtactggttttctattccaargctgttttctatacaaacatgcttgaaaacaatcatttggaacaagaaagtcagcgtccatacttgcaaaatgtgcagaaattaaagagacaaaaaaactgtttctctaccaatttctatttttttaaaatcacattttccccatataatatgcttttaatatgtgataatattctgaaattgtcttagcatttacccccatttctgagtccagaaggatacaataaatttaatttaatttagtaacacttcaaatagtagtgattgtaatagcagagctagtttgtagcataaagaaaaaataataatattattaggtgacacaaataatgctagccaccatttctaagtgtcatggtaagtacagtgattattttctttttttctgactcttttttattgt

SEQ ID NO: 581405 - DNA, 593 bp, Homo sapiens
aaagagagccatgtggcacctgcacattacactgtggaagaaaaaaccaagctcaagaaaccccaacttgtattatgggaagttcacttggctgtacccttcccaagagggagaaattatctgcattatactagacagtaaataaacttttcctttgttccagaaggaggtactggttttctattccaaggctgttttctatacaaacatgcttgaaaacaatcatttggaacaagaaagtcagcgtmcatacttgcaaaatgtgcagaaattaaagagacaaaaaaactgtttctctaccaatttctatttttttaaaatcacattttccccatataatatgcttttaatatgtgataatattctgaaattgtcttagcatttacccccatttctgagtccagaaggatacaataaatttaatttaatttagtaacacttcaaatagtagtgattgtaatagcagagctagtttgtagcataaagaaaaaataataatattattaggtgacacaaataatgctagccaccatttctaagtgtcatggtaagtacagtgattattttctttttttctgactcttttttattgt

SEQ ID NO: 581406 - DNA, 593 bp, Homo sapiens
aaagagagccatgtggcacctgcacattacactgtggaagaaaaaaccaagctcaagaaaccccaacttgtattatgggaagttcacttggctgtacccttcccaagagggagaaattatctgcattatactagacagtaaataaacttttcctttgttccagaaggaggtactggttttctattccaaggctgttttctatacaaacatgcttgaaaacaatcatttggaacaagaaagtcagcgtccatacttgcaaaatgtgcrgaaattaaagagacaaaaaaactgtttctctaccaatttctatttttttaaaatcacattttccccatataatatgcttttaatatgtgataatattctgaaattgtcttagcatttacccccatttctgagtccagaaggatacaataaatttaatttaatttagtaacacttcaaatagtagtgattgtaatagcagagctagtttgtagcataaagaaaaaataataatattattaggtgacacaaataatgctagccaccatttctaagtgtcatggtaagtacagtgattattttctttttttctgactcttttttattgt

SEQ ID NO: 581407 - DNA, 523 bp, Homo sapiens
agaataaatgagttcaaatgaattgtcaaacktatgtgggaaaagtggaatcagtttgtgagaaaaagcaaaaaactcaacagaaatgctgataaagcatcatcccttcatggctagagctgccaggacactagaacaccaaaatcagctagggaaattttgtagaagtcccagatgtactaaatgttctgtgaatacacagagatataattataactgttacctgcatgtagagtaaagatgagaaggcattggtcatggtggcagctacctcaggagttacaaagcagacgtggttccaggacagtgtatgtcagggcaaagctgtcctaggaggctattaggagttggttacggcacagacattgtaagtcagatggtctcattactttcaatgacaaaaccaaaattacttttgcatcagccaatacaacggcctggcaagagcacagaaaaaggccctgtgctgttaggtggggacctctgatgcagcacaattccttcatccccttctccgaaaccc

SEQ ID NO: 581408 - DNA, 388 bp, Homo sapiens
atatttatatttacttatttacattcctggggatgaggaattaaagatttcacaaattttcttattgagaatatcgaagttttcatgtgagcaaaactgaatatgtaaattgatatgtaaattatgctgcagataatatgctcaaatgtttacttgtatttaatttgttacacatgaatattgcatatgtaagataatatrctaagaaattatcacatttaatgaaatgctttaatcaaattcctgattgaatttttgatatcaatatctttttccttgtttaatccatctttagagtgaacagggctgtctaggccaaagtcctcacttctatctaaattgtctgagttacagaactttttgaatttattatgttgtcacaggaagt

SEQ ID NO: 581409 - DNA, 483 bp, Homo sapiens
ctgaaaaccctggactctattgctaaatcaaggctcctgaatccgttccctctgagaaactgttgctgtggtgctgccttcacaagcactctgctgagcactcatattgaggggctgtgctatccgtcatcggacaagctgcacccagaactgttcagctgacaaactggtagcagtccagaaayacagttctgctgcatagtgaaaaaaggccaatttagattctttttcatagagagaaaaacataaacatgtgattgaacgagtctcctgtattagactaattgggttggctttgatatttaattgctaaaaacacacttagaatataaaccttactgtgtcaaggtctcaaagaagaaataattggtatggtataaagtattgaattgtatgctacaaacttctaagctaaaatattttcaatgtatgcaaggataggtggcacacatattatatattattcccccattaagcaaattt

SEQ ID NO: 581410 - DNA, 483 bp, Homo sapiens
ctgaaaaccctggactctattgctaaatcaaggctcctgaatccgttccctctgagaaactgttgctgtggtgctgccttcacaagcactctgctgagcactcatattgaggggctgtgctatccgtcatcggacaagctgcacccagaactgttcagctgacaaactggtagcagtccagaaacacagttctgctgcatagtgaaaaaaggccaatttagattctttttcatagagagaaaaacataaacatgtgattkaacgagtctcctgtattagactaattgggttggctttgatatttaattgctaaaaacacacttagaatataaaccttactgtgtcaaggtctcaaagaagaaataattggtatggtataaagtattgaattgtatgctacaaacttctaagctaaaatattttcaatgtatgcaaggataggtggcacacatattatatattattcccccattaagcaaattt

SEQ ID NO: 581411 - DNA, 483 bp, Homo sapiens
ctgaaaaccctggactctattgctaaatcaaggctcctgaatccgttccctctgagaaactgttgctgtggtgctgccttcacaagcactctgctgagcactcatattgaggggctgtgctatccgtcatcggacaagctgcacccagaactgttcagctgacaaactggtagcagtccagaaacacagttctgctgcatagtgaaaaaaggccaatttagattctttttcatagagagaaaaacataaacatgtgattgaacragtctcctgtattagactaattgggttggctttgatatttaattgctaaaaacacacttagaatataaaccttactgtgtcaaggtctcaaagaagaaataattggtatggtataaagtattgaattgtatgctacaaacttctaagctaaaatattttcaatgtatgcaaggataggtggcacacatattatatattattcccccattaagcaaattt

SEQ ID NO: 581412 - DNA, 483 bp, Homo sapiens
ctgaaaaccctggactctattgctaaatcaaggctcctgaatccgttccctctgagaaactgttgctgtggtgctgccttcacaagcactctgctgagcactcatattgaggggctgtgctatccgtcatcggacaagctgcacccagaactgttcagctgacaaactggtagcagtccagaaacacagttctgctgcatagtgaaaaaaggccaatttagattctttttcatagagagaaaaacataaacatgtgattgaacgagtctcctgtattagactaattgggttggctttgatatttaattgctaaaaacacacttagaatataaaccttactgtgtcaaggtctcaaagaagaaataattggtatggtataaagtattgaattgtatgctacaaacttctaagctaaaatattttcaatgtatgcaaggataggtggcayacatattatatattattcccccattaagcaaattt

SEQ ID NO: 581413 - DNA, 632 bp, Homo sapiens
atgcaatggtttttcaaaatggtagaatgaaagtcacaatataaaaaaataagtacattatagagatagtaaartggaaataattcattgtaatgaaaataaaaaatcaagcttctgccataattagtatcctaaaacatgttatgtaattcaactagctacagaataacagttgacatgctaagttccatacatacttgactttccacttgaaataatttcttctttgggacctgtgtctcatccaaattaatgtgataatgtgatataccttccagtggagactctaacatagttaatttttttaggctgtcagccgcttcttgttgaagttgtctcacaaccacctgagaaaatatttttgttactgattttataaattgccttattaaattatgttaataatatttaactctaacatacgtactttgaaaattatcaccacacatatcaattcaccttcttttaatcacatgtacacatttttatttattactgaattcagtgagggatgcacaatatgttctcttcctgccaaattggtattctcttacttacataacagattcatcccaccattcaatcatcttagaagctcaactcaacctcaaagttcctcacatattcaatca

SEQ ID NO: 581414 - DNA, 183 bp, Homo sapiens
cttctttgggacctgtgtctcatccaaattaatgtgataatgtgayataccttccagtggagactctaacatagttaatttttttaggctgtcagccgcttcttgttgaagttgtctcacaaccacctgagaaaatatttttgttactgattttataaattgccttattaaattatgttaata

SEQ ID NO: 581415 - DNA, 632 bp, Homo sapiens
atgcaatggtttttcaaaatggtagaatgaaagtcacaatataaaaaaataagtacattatagagatagtaaagtggaaataattcattgtaatgaaaataaaaaatcaagcttctgccataattagtatcctaaaacatgttatgtaattcaactagctacagaataacagttgacatgctaagttccatacatacttgactttccacttgaaataatttcttctttgggacctgtgtctcatccaaattaatgtgataatgtgatataccttccagtggagactctaacatagttaatttttttaggctgtcagccgcttcttgttgaagttgtctcacaaccacctgagaaaatatttttgttactgattttataaattgccttattaaattatgttaataatatttaactctaacatacstactttgaaaattatcaccacacatatcaattcaccttcttttaatcacatgtacacatttttatttattactgaattcagtgagggatgcacaatatgttctcttcctgccaaattggtattctcttacttacataacagattcatcccaccattcaatcatcttagaagctcaactcaacctcaaagttcctcacatattcaatca

SEQ ID NO: 581416 - DNA, 632 bp, Homo sapiens
atgcaatggtttttcaaaatggtagaatgaaagtcacaatataaaaaaataagtacattatagagatagtaaagtggaaataattcattgtaatgaaaataaaaaatcaagcttctgccataattagtatcctaaaacatgttatgtaattcaactagctacagaataacagttgacatgctaagttccatacatacttgactttccacttgaaataatttcttctttgggacctgtgtctcatccaaattaatgtgataatgtgatataccttccagtggagactctaacatagttaatttttttaggctgtcagccgcttcttgttgaagttgtctcacaaccacctgagaaaatatttttgttactgattttataaattgccttattaaattatgttaataatatttaactctaacatacgtactttgaaaattatcaccacacatatmaattcaccttcttttaatcacatgtacacatttttatttattactgaattcagtgagggatgcacaatatgttctcttcctgccaaattggtattctcttacttacataacagattcatcccaccattcaatcatcttagaagctcaactcaacctcaaagttcctcacatattcaatca

SEQ ID NO: 581417 - DNA, 505 bp, Homo sapiens
tcaactttaaataaaagcttattctccagttctcctctgtaatcgtttactatggattctgaattggggaaattcctgatctactttaacttctaaacttcttaaaaattactttcaaatatccaagtttatcatttaattcaactgttgacagactttactgtataggattacatatttaaataacaatttgaatttgtatgacacattttaacacctactttgatttacaggttctcttatattctctctatgctagcaaatagcaaagcgtgcatggataattcatcttagtctgattactatcaagaaacagagaggtgtcaattccatacagtttttattcagacaggaagagataaaaatgaatttccaacataaagtggtagagactcttttcccattgtattytgctcaaggtattgtctccaaaataagttgagaaccatggtgtagagaaaagagacttcaagaacacggtgactgagcacaagagaaaaaaaaa

SEQ ID NO: 581418 - DNA, 540 bp, Homo sapiens
aatgaatcgatgttgactttgtcaaatattttatatctatttaaaagattatttgtgttctccccttttagatattatatttatattatgttaatattctatttactgattttcaaatgttaggccattttagcttcctggtataaatcccatttggtgataaaattttacctatattatataataataaattaaaaattttgaaatatatttttatgaaaagtattggcttatagaattcttttatatttaatgtccatatcatgttttgaaaaagaggttaagcccacctaaaaagagatgaaaagtgctactcccccaattttatttttttaatttacaataacattttgaacaaggaaaaaaaaacattttaattcttaaatgtttggaaaaagttaattattaagctatatgaacatgatttactttctttatgcaaaggtttttaatwagtgattcactttccttaagagatgccagatgttccaatattctatttcttcttcctttaggtggcaacttgtgatttcaagaaat

SEQ ID NO: 581419 - DNA, 534 bp, Homo sapiens
tttacaattgaattaattaattagttatatttaattttctacttgcgtacctttttggcatttctttcatttttattgggtttattatagcaccttccttttaatgattaactaatttgctatcactcctcagtcatttatattactttcagaaaattttcccaatttatactgccgaagtgagtcatgttgtatacagttgtttaatattccttcagttattcaaaatatttttaaaatcctgcctctacaaagtaatccggaagtgttttgagaaaaatttgattatatccttttaatttcacatcattatttcaataaattttggaagttcattctatacttctaacatgagtcctagctggcttattccctgctgaattaatcttccatggtactcctctttaactgatcaattcacatagctcctccataaggatttactgaataaatactgctttataaatattgttttataatatgaggacacagtactcaggatgatgggggasaatcacaaatagcttaaattca

SEQ ID NO: 581420 - DNA, 627 bp, Homo sapiens
ctactactgggtatatattcaaaagatattaaatcaatgtgttgaagagaaaacgtcactttcatattcattgcagcattattcaaaatttctgagatatgaaaacagcctgaatatctctaggcagataaatggataaagaaaatgtggtgtatatatttacacacacatatacacacacaaacactgaatactattcagacaaaaaagaaaacaattctgccatttacaaaatcatggatgaaaccgaaggacattatgctaagttaaacaagccagaaatagaaagaaaaatactgcatgatgccacttatatgtggaatctaaaacaaacaaaaaaaaggtttaatacatagagacagagaatgaaacaatagttaacaggggcagggagggaagggaattaggaatatgtggagatgtaagtcacaaggtaaaagttgcagtgatgtgggttggataagtatgaagatttaatctataaataaagactaccgtttaaaatattgtacacctgagatttgctaagagaagattttaggtgctcttaccacacacattsactttcaacacccccacctacacacacacagttactatgtgagctgatggatttttcttttgcat

SEQ ID NO: 581421 - DNA, 512 bp, Homo sapiens
ataagggccattcaatttttttattaaaaaaataaattttacttgggaggctgaagcgggtgaatcacctgaggtcaggagtttgagaccagcctggccaacatggccaaacctcgtttytactaaaaatataaaaactggccaggtgtagtgatgtgtgcctgtagccccagttttcaggaggctgaggcaggagaatcgcttgaacctagtgggccagaggttgcagtgagctgactttgcgccaatgcactgcagcctcgggaacaaagtaagactgtgtcaaaaaaaaaaaaaaaagaaaaattactaaacagaaagctttgctaaaagaccttctctgatactgaattatctgtgaaggtaatagtgtttataatgtgaactaagtcttctgcagtcacctgtgacatcaacaatgatccatggagactttgagcagattctctactatgtaagcagctgggaaaatgacagaggacaagtttcaaatgtcatattttacctttgtt

SEQ ID NO: 581422 - DNA, 512 bp, Homo sapiens
ataagggccattcaatttttttattaaaaaaataaattttacttgggaggctgaagcgggtgaatcacctgaggtcaggagtttgagaccagcctggccaacatggccaaacctcgtttttactaaaaatataaaaactggccaggtgtagtgatgtgtgcctgtagccccagttttcaggaggctgaggcaggagaatcgcttgaacctagtgggccagaggttgcagtgagctgactttgcgccaatgcactgcagcctcgggaacaaagtaagactgtgtcaaaaaaaaaaaaaaaagaaaaattactaaacagaaagctttgctaaaagaccttctctgatactgaattatctgtgaaggtaatagtgtttataatgtgaactaagtcttctgcagtcacctgtgacatcaacaatgatccatggagactttgagcagattctctactatgtaagcagctgggaaaatgacagaggayaagtttcaaatgtcatattttacctttgtt

SEQ ID NO: 581423 - DNA, 605 bp, Homo sapiens
aatgtctgtcttgcttaatacatacaaaaatagcttcttggcctcactagttgcttaatatctcagagtatgtgatccactcattatccaaccatttctttagctgtttgaaatttgctaaccattttccactcccacaatgctgcggtaaatattgttgtgtttatatgtgtgtacatatataaatttaaattacatatatgtattgtgtatatacatatayacacacacacacctagacctagtacttctttaattaaaataacagagacttccaaataatcaggatgagtaaaaatgtatacttccatgaatgttaccatattattctccaaattttaagagttcacaatttccatttaaaatatatgaaagtttgaatttcttgtaccctaaaaacactggaaattttcacaaattttctgcccatgtactactttataacaatgaatattgtatctgcctttttgtttgttttcctgatttcatatatttctaaatatgcttggtgtttgcatatatttaatttttaaaacaagaaaaaaaaacagcagaaaaaagataaacaatatgacagttgataataacactgaaataattattga

SEQ ID NO: 581424 - DNA, 622 bp, Homo sapiens
attaaagaaataaatttttatctttgcttcttcttttgtttttttattctctataactgaacttcctttcttcacaagtcaacccatctcagttacatagaaacctgtgcactcaaactttgtggttcttcctggcatattgagattagcttggactgacctcaggaactcaattctggctgctgctcatagtgaacctctagggttttacttacatcaaccttggctaaacttgactctttagggcttagttcacagagtctcaagctttggtctccagaaaaacaagcagagaagtgtttgtttttgtttttgttgactgtktttcaataccacacgtagaacctactttctaaactactgaaacaaaggctttaggggtagaacttagtcatataacttttgaaaatattatgagattcataactgctttgatatttgtgtgaccatactcattaattataaatgctctgtgctgtcttacgttttacatttacaactattatataacttattcactcatgaacacatttttatggatcgtctattaaagactaaagggagcctttgtctttcaactttcacacaagaatgcttctcaagctctttgtggtggaagaca

SEQ ID NO: 581425 - DNA, 471 bp, Homo sapiens
catactgcccaaggtaatttatagattcaatgccatccccatcaagctaccaatgactttcttcacagtattggaaaaaactaaagttcatattgaaccaaaaaagagcctgcattgccaagaaaatcctaagcaaaaagaacaaagctggagacatcatgctacctgacttcaaactatactacaaggctacagtaaccaaaacagcatggtactcayggcaaaacagagacatagaccaatggaacagaacagaggcctcagaaaaaataccagacatctacaaccatctgatctttgacaaacctgaccaagaaatggggaaaggataccctgtttaataaatgttgctggggaaactggctagccatatgcagaaagctgaaactggatcccttccttacaccttgtacaaaaattaattcaagatagattaaagacttaaatgttagacctaaaaccataaaaccc

SEQ ID NO: 581426 - DNA, 590 bp, Homo sapiens
gtctgtttttgtaccagttttgtaccaaaccaacctgtttttgttactgtagccctgtagcatagtttgaagccaggtagtgtgcgacctttagtttttttctttttttcttcggattgctaaggctatctggactccttttgtttccgtttttttttttttttttttttttttttttttttgaaacaatctcactttgtcacccaagctggagtgcaggggggggatctcaactaactggaacatytgcctcctgagttcaaacaatttttttgcctcaacctcccaagtagctggggctacaggtacctgccaccatgcctggctaaattgtgcttttttctttttcttttttaaaaaaaaacggggttttaccatgttggtcaacctggtcttgaacccctgccctcaagggatccacctgcctcaacctcccaaagtgctgggattataggtgtcatccaccacccctgggctccatatgaattttatattacgtttttataattctgtgaaaaattattttggtcatttgataggaagagctttgaatctgtaaattgctttgagcagtgtgatcatttttaaca

SEQ ID NO: 581427 - DNA, 590 bp, Homo sapiens
gtctgtttttgtaccagttttgtaccaaaccaacctgtttttgttactgtagccctgtagcatagtttgaagccaggtagtgtgcgacctttagtttttttctttttttcttcggattgctaaggctatctggactccttttgtttccgtttttttttttttttttttttttttttttttttgaaacaatctcactttgtcacccaagctggagtgcaggggggggatctcaactaactggaacatttgcctcctgagttcaarcaatttttttgcctcaacctcccaagtagctggggctacaggtacctgccaccatgcctggctaaattgtgcttttttctttttcttttttaaaaaaaaacggggttttaccatgttggtcaacctggtcttgaacccctgccctcaagggatccacctgcctcaacctcccaaagtgctgggattataggtgtcatccaccacccctgggctccatatgaattttatattacgtttttataattctgtgaaaaattattttggtcatttgataggaagagctttgaatctgtaaattgctttgagcagtgtgatcatttttaaca

SEQ ID NO: 581428 - DNA, 590 bp, Homo sapiens
gtctgtttttgtaccagttttgtaccaaaccaacctgtttttgttactgtagccctgtagcatagtttgaagccaggtagtgtgcgacctttagtttttttctttttttcttcggattgctaaggctatctggactccttttgtttccgtttttttttttttttttttttttttttttttttgaaacaatctcactttgtcacccaagctggagtgcaggggggggatctcaactaactggaacatttgcctcctgagttcaaacaattttyttgcctcaacctcccaagtagctggggctacaggtacctgccaccatgcctggctaaattgtgcttttttctttttcttttttaaaaaaaaacggggttttaccatgttggtcaacctggtcttgaacccctgccctcaagggatccacctgcctcaacctcccaaagtgctgggattataggtgtcatccaccacccctgggctccatatgaattttatattacgtttttataattctgtgaaaaattattttggtcatttgataggaagagctttgaatctgtaaattgctttgagcagtgtgatcatttttaaca

SEQ ID NO: 581429 - DNA, 586 bp, Homo sapiens
ctctggggcctggtgaggttgagggtattcctttctttaaacattgaatattttgcagccaccctatggtgcagaatcctaccagatgttcctggccccttctggctgggtctggccacggtaggacacagagtgcttgctgtccttgctgctcttggaagtctggctgggagttctctgcaggattagaatatggtgctaatgaggcctgggccacaaggtggatccaggtgtgagccagtcacctttgcacagagaaaagctttgtcctttggtctcagtttgcacctakcccttgagagccattctaaaaatgggtcagaaggggaaccaggtgagagaatgttcatgaataggggattcattttcactatagggaaatcaaagcacaggacttaataaacccaagtttatagtaacatctttattggtgtgggctagtgggtggtaattaataggagacagacacccaaaccaaaacatgaagctacacagaagtacctgctgcggacacacatcagtggagacacaggccatttacccatgctgtccaggaggaaaacaaggaatttagttaaacatatac

SEQ ID NO: 581430 - DNA, 473 bp, Homo sapiens
ctctctgcctgattcctctagaatttggaaactatatctgtgaatattcttatggcaatatagttgtttgtgtcactgcaataagaatccatttttcttttgcaacaggacacaattggagaaactggtaattttatcaaggctttgactggaagggtatgcttcccttaaacgagtcaatcttgatatgcagagccaataaaagcccagtggggaaagtagcytcatacccttgtctacacagttcctgtacagggttcctgacctgtggtcagtaaagaatgtcactttctaacagatctaggagctccaagtttattatgggaccttaagaggagaggattacctaactcacaggtatttgaggataaacccatggttaggcttggctttaaaaggtcttatctgagattccttgtggaacagacttccatcaaagacaatccaaaaggcctatgtagaaatagttattc

SEQ ID NO: 581431 - DNA, 473 bp, Homo sapiens
ctctctgcctgattcctctagaatttggaaactatatctgtgaatattcttatggcaatatagttgtttgtgtcactgcaataagaatccatttttcttttgcaacaggacacaattggagaaactggtaattttatcaaggctttgactggaagggtatgcttcccttaaacgagtcaatcttgatatgcagagccaataaaagcccagtggggaaagtagcctcatacccttgtctacacagttcctgtacagggttcctgacctgtggtcagtaaagaatgtcactttctaacagatmtaggagctccaagtttattatgggaccttaagaggagaggattacctaactcacaggtatttgaggataaacccatggttaggcttggctttaaaaggtcttatctgagattccttgtggaacagacttccatcaaagacaatccaaaaggcctatgtagaaatagttattc

SEQ ID NO: 581432 - DNA, 603 bp, Homo sapiens
ttgaatacataaaaacttacttgtggcaaaagacatcatatgtgaagtcataagaacaataaactgagggaaaattcacaactcatattacaaaggactaagtgccctagtaaatgaagaatgcctacaaaacagtaagaaaggtgaaaacacaagaaaaaaatggacaaatgatgtgaacattcacagttcacagaaaaggaaatccaaatggggctaaatacatgaaagaatgcttattatcattcatgtaatcagaaatgcaaattaagatatataatatatacttgtatataaacatagtatatactgtatactatatataacctatatattttattatataattatgttagattaattattatgttaattgtcaactgctactccatttcttagaataaaaccaaagtgagtagttggaaagaaagattaggtttatgtcattatgcatttttcctcttagacctgtgcaattgttcttttaatgaggctataatttccctcctaatagcctaaggtttatgctgaactccarcctagatatcaaccagatatgattttacaggcaatagtctgtggggttctgaagtggctactgcc

SEQ ID NO: 581433 - DNA, 536 bp, Homo sapiens
ctataatcccagctactcgggaagttgaggcagaagagtcacttgaacctgggaggcagaggttgcagtgagcagagattgcaccattggactccagcctaggcaacaagaacgaaactctgtctcaaaaaaaaaaaaaaaaagtatacaaagaatccctaccctcaagtaggttacagtctggcaattgtttctacttcacagatgatagattgtggttcagagatgttaagtggcttacaaagatggactgctgataaatgacagaactgggactagttctgaattcttgactcctgtccaatgagttcaccttctatctttttagataaaataaggcccttaaaaatagacttggcttgcaacaagctaagaacatgaagaatcatactcagtatatctatcccactttttaaatgttgcagccatctttctcattaacattggaaatacttctgtcatttgaaaatgcttctgactatgcaagtccctcactatgawcatgttcaagcctttagacttactagaatgaaagg

SEQ ID NO: 581434 - DNA, 583 bp, Homo sapiens
aacaattatgagataaatccaacaaaacaagcacagaatatacggttgctcagaagagaaacattcatttaatcatttattaacctggtacttagatcaatgaaaaagacatgaaggcatgagggagcatgatgtgtctagggaattgcaaatggtttgatggggatatcttgatggtaattaatttctttaaaaaatagctcatttctttagctattattggttattttgctgttgctgttattattattggatcatattcaaaaggatccactgagtgctatgttgtaaatgtttaacaactggctctgaaaaaaagttataattttctataatttgcagcatttttcaatttccatggtgaaaatactcctactatggctgatttgaagctaccaacatgatgtgactttacatggaggtggaaagagaygggcacaccattatacaatattcccattatgcagacacaagtgaaaataacttcaagagcataaataataaaatgcagtaaaataatttgtaagtgatgagttttgagtattcttaccttcattttaaatataatttattttaacattta

SEQ ID NO: 581435 - DNA, 536 bp, Homo sapiens
cagaccagtgacactataaagcaatcatacaaacaagtctgcataataaccactagcatcatggtaacaggatcaaatccacacatttcagtactaaccttgaatgtaaattggctaaatgcttcagtgaaaggcacagagtggcaagctggataaagacccaagattcattgttatgctgtctttgagagacctrtcttacaagcaatcatacccataggctcaaaataaaaaaaatggaaaaaaaatctaccaagcaagtggaaatcagaaaaaacagtggttgcaattctaatttcagaaaaaaaaaaaacagactttaaaccaacaaagatcaaaaaagacaaataagggcattacataatggtaaaggtttcaattcaataagaagacctaactattctaaatatatgtgcacccaatacaggagcacccagtttcataaagcgagtttttagagaccttcaaagagacttagacttctacacaagaatagtgggggacttcaacatctcacagacagtattaggtcaatg

SEQ ID NO: 581436 - DNA, 498 bp, Homo sapiens
catggggagattctaaattttaaaatgaagaaaaatatctttaaattcctgggcatattattctggtaactccagtgtttgctcctgggagcttggagaagaaggtgaaatattggtgattkttttttttcatgtattgtactttccaaatgttgtatagtatgtattatacatcttacgtttgtctgtcttcagaaaactatataaaaccctgaaaacaatattgaaaggctatgacactttcactttgtgtttcacactcacactactgtatctttagtaaatgttattttctattatacagacacatattattgttgttgtcagacagtttaatagcatcataccagctgtgggggagagggcttatttctcccaatctcttcaacattggaagggatttagaaaccatgctatgttggttttagaagagcaaggagtaatggctgtaatacctttgctaggagtggaaatggaggaataggttgagtaggaagt

SEQ ID NO: 581437 - DNA, 565 bp, Homo sapiens
aatcattgcagcattattcgccaatagtcaagatatggaaacaactaaagtgattatcagtggatgaatggataatgaaaatgtggtatatatataatgaaatattattcagcctttaaagaggatattctgccatttgccacaacctagacagatctggaggacattatgctaagtgaaataagctagacacagaaagaagaatattgcatgatctcatttattacatataataaaaacaaagagctcaaacacagagaaatgagaataaaatagtggttatcatggggaatgggaggagaggaagtggggagatgtttgtcattcatacaagcaccaaataggtaggatgaacaagtctaaggatctaacgtgaaatgtgaagattaaagttaataaaattgtattctccacccatcaacccrtcatctacattaggtatttctcctaatgctatccctctcctaaccccccaccccccggtaggcgctggtatttgatgttcccctccctgtgtccatgtgttctcattgttcaactcccatttacaagtgagaacatgcag

SEQ ID NO: 581438 - DNA, 537 bp, Homo sapiens
attttgagtatcccctacactagtcatagtcccaacagaaaacagaggacatactcagatgaaggagttggggagaggaaatatttakaaaacgcaggtaggagtaaaagaaaagggcaacatatagtgtagtgcttggggctagtaattgtgtgtctgcaaccatgcttcacaatgaagaggcaaaaagagaagccataggagaggagcagagccaatgctttggcaatctgccaggacaaagcctggtgaataaataccctgatctcactgtactgttacctgttcatcctttgcctgtctctcattggccatgcccaatcagaagctaaagaagaggaacccattgatgtggaactagaggttatttgtgcctacagtgcacagagcatggagacgagaaatggagagtagctctgaaagaacaaaggaaaaatatccagcacattacttctgcttatactgactgagttatgccagcatgttgcagttcacaatggggaacttcttcccaagtccgaatcagtttcttaggtg

SEQ ID NO: 581439 - DNA, 226 bp, Homo sapiens
gtacccaacagctcattgagaacgggccatgatgacgatggtggttttgtcraatagaaaagggggaaatgtggggaaaagattgagaaatcagattgttgctgtgtctgtgtagaaagaagtagacataggagactccattttgttctgtactaagaaaaattcttctgccttgggatgctgttgatctatgaccttacccccaacctggtgctctctgaaacat

SEQ ID NO: 581440 - DNA, 226 bp, Homo sapiens
gtacccaacagctcattgagaacgggccatgatgacgatggtggttttgtcgaatagaaaagggggaaatgtggggaaaagattgagaaatcagattgttgctgtgtctgtgtrgaaagaagtagacataggagactccattttgttctgtactaagaaaaattcttctgccttgggatgctgttgatctatgaccttacccccaacctggtgctctctgaaacat

SEQ ID NO: 581441 - DNA, 226 bp, Homo sapiens
gtacccaacagctcattgagaacgggccatgatgacgatggtggttttgtcgaatagaaaagggggaaatgtggggaaaagattgagaaatcagattgttgctgtgtctgtgtagaaagaagtagacataggagactccattttgttctgtactaagaaaaattcttctgccttgggatgctgttgatctaygaccttacccccaacctggtgctctctgaaacat

SEQ ID NO: 581442 - DNA, 451 bp, Homo sapiens
  misc_feature 412: n = A,T,C or G
ggaattcccttaatctgataattactccattgaaggcattgctgttgaaatcgtgctttggagctgaaatgtccttctgaagaatccttatggccacaaaatcttggaactcatgaacatttgtaaacaaaaaagtagagatgttgaagaaatgatatggggcagaaaaactaggaccttagacaaaaccataaatgatgcattacattaagttaaataagatggaagttccatcatattccacaccgaattgtgagcatataccaayatgttcagtaatcaatggagcacatagtttctggcatagaggtacagatgcacttcttataagtaagttactgaatgaataagttaagacagagattaggccataatcagtttgttccaccattttgctttttatttacatggnaaaaatttttaccattttttccattttaatgtttcagag

SEQ ID NO: 581443 - DNA, 451 bp, Homo sapiens
  misc_feature 412: n = A,T,C or G
ggaattcccttaatctgataattactccattgaaggcattgctgttgaaatcgtgctttggagctgaaatgtccttctgaagaatccttatggccacaaaatcttggaactcatgaacatttgtaaacaaaaaagtagagatgttgaagaaatgatatggggcagaaaaactaggaccttagacaaaaccataaatgatgcattacattaagttaaataagatggaagttccatcatattccacaccgaattgtgagcatataccaatatgttcagtaatcaatggagcacatagtttctggcatagaggtacagatgcacttcttataagtragttactgaatgaataagttaagacagagattaggccataatcagtttgttccaccattttgctttttatttacatggnaaaaatttttaccattttttccattttaatgtttcagag

SEQ ID NO: 581444 - DNA, 612 bp, Homo sapiens
actaaatatgactatgacatcatcagaaggttgcatgcaaattttaaacatttctatactcttatatacaccatttcaatttcaatttctgtttcccctttgaagttgaaataaatgctttatatattcatttgaaataatacctagtgkgcagcactgctgagaaaaaaactccatcagtcttttgagaataaaagcaaatcaatagtaatatatctcagaatagaagcacttttgttgacagaaggagcatggtttaatgggaagcaaagtaatctttgttttcagtcagactattgggctgtgcatgagaaatggcatgctctgaccacttgttctatattaaagggcagtatggcagattcaaaatagagaaaataatttgcctaatagcaatggacaaccatagctttaacacataacatagagatcattattataagatttgtatgcaattttataaatttgtctttagttcccatttagggctattctgttaattaaatcaaatcatcccagtgccccaaagatgggtgatacagaacctattcacatggtatcctgtaattgtgattaagctattccatgtccaacaccacaactgaagtttta

SEQ ID NO: 581445 - DNA, 612 bp, Homo sapiens
actaaatatgactatgacatcatcagaaggttgcatgcaaattttaaacatttctatactcttatatacaccatttcaatttcaatttctgtttcccctttgaagttgaaataaatgctttatatattcatttgaaataatacctagtgtgcagcactgctgagaaaaaaactccatcagtcttttgagaataaaagcaaatcaatagtaatatmtctcagaatagaagcacttttgttgacagaaggagcatggtttaatgggaagcaaagtaatctttgttttcagtcagactattgggctgtgcatgagaaatggcatgctctgaccacttgttctatattaaagggcagtatggcagattcaaaatagagaaaataatttgcctaatagcaatggacaaccatagctttaacacataacatagagatcattattataagatttgtatgcaattttataaatttgtctttagttcccatttagggctattctgttaattaaatcaaatcatcccagtgccccaaagatgggtgatacagaacctattcacatggtatcctgtaattgtgattaagctattccatgtccaacaccacaactgaagtttta

SEQ ID NO: 581446 - DNA, 603 bp, Homo sapiens
tgtagtctctaattgctttaagaataattgtgtttgatttatattaataaataaaatgtaactgtgaagattgtgttaatttatatattttctgtagaatctcaaaattccaaaaatattttaaacattttttaccwgttattttatatgattagctctgcaagcctcctttaataatatttaattaaaatcagttataatgagctccatccttactaaaaaataccctaaaagtgttactactactaaaaattaaacatcttttttggttaaactaaccattaaatagttattgtttggatgattcttaaaaacttaatgactagagaattataagaaacagaattaaaatatttacacaatttaataaaatatttaatatagctgtattaaaaaatcagcccatttggtatgcctttcattctatatataataaagttaattgagcataatttattcttcataattctgtgatattattacacattcaattggtttctagagatgtacacaaaaagtatttctatatatattcccaattacttcaaattttttaaaccaaataaaatttaatctgaagtttttttcatatttttctttaaa

SEQ ID NO: 581447 - DNA, 590 bp, Homo sapiens
aaaataaaagttaaaaaaagaaagaaaacaaaaaaattagcaatagaaatttgggatacatttggcctcctgatacataattctcctgtaggtttcttgatggggatgggtatattagtctcaactttgggcccttgctttatcccacatagtcccctgtgtctgcaagatgataactggctgttgcaaatttgaagtgcaccacggatcaccaaccaaaaggctgctcctaagggaagcaccaattcaaaatccattctcagggattractaaagaaatcttaggctacacaaaaatgttatcttgaaccaaactgttaactctgatattttctttaatgatatggtatggctataaatgcaacaatgcagctttaaaaatatagataagtgagatccttatattagtcactttaaaagcacctagtacttatctttcttgtatttatcaaagctggaatataacaagtcatgtgattattcatacaatggctcacagtagcagagacttttgtttctttctccctctttccctgtcttcccaagtttgtctttctggatgcttgcacagtgtctggcttatggtaggc

SEQ ID NO: 581448 - DNA, 469 bp, Homo sapiens
ctgtagtcgaatatttttttttgtgtcacatttctaatgaccctaatttctatctttaaatacaggatcttttagcaaagcaaaaaattgggagtgtccattgagacttgataccatcctctttagtatgcgagcagacatgtaatctaccaaatttgtacaagaaagaagaataaatgyatgtgtttctatggtcaggagctaaaggttctttacctattcctaatctattttaagaatttgagaggtcagttcaaaatagatctatgcatagatcaggaatgcaaaatgttatactaaggttgtcactccacacataataacattaaatgcaagtcagatagttttcggaggttctcgatctacagtgctttctggcttagttcttataatttgtcaaattagattttttgtcgaaaaaaattgtcctcaatttaggttcccctttatttaatttgaaacagaaaca

SEQ ID NO: 581449 - DNA, 605 bp, Homo sapiens
acagatagcaatattaaatagagtggtcagggttggcctcctaagtgaaaattgagcaaagacttgaaggaggggaaggagctgaccaaggtactgagggaagagcattataggcagaaacaacagaataaagatgctaagagggaactccgtggtgtgtctgaagctcaggaaagaggtctgtggagtagagagagggagagaagtagggaaggaggccagggagttgttggactcagatcagtacagattgtgtaagccctgggaggctaytgctggggctttggtttttattctgtctgagatgggagatgaggaagggttctgagcagagaggtgacgcgaactgtctactgatttaaaagcatcccatggcagctgagttgagaaagattgtgggaagatttgggtagaagcagggaggccatgctgtggcaacctccaggtgggagatgatagtggttctgaccagggccctggcaatggtgagagatggttgattcttgttgaaatactaagtaattaaaaaaaaaccactactgtttttcccaattatatgaagtatgggatgctagattacagaaatcttaagtcgggccaggtga

SEQ ID NO: 581450 - DNA, 605 bp, Homo sapiens
acagatagcaatattaaatagagtggtcagggttggcctcctaagtgaaaattgagcaaagacttgaaggaggggaaggagctgaccaaggtactgagggaagagcattataggcagaaacaacagaataaagatgctaagagggaactccgtggtgtgtctgaagctcaggaaagaggtctgtggagtagagagagggagagaagtagggaaggaggccagggagttgttggactcagatcagtacagattgtgtaagccctgggaggctactgctggggctttggtttttattctgtctgagatgggagatgaggaagggttctgagcagagaggtgacgcgaactgtctactgatttaaaagcatcccatggcagctgagttgagaaagattgtgggaagatttgsgtagaagcagggaggccatgctgtggcaacctccaggtgggagatgatagtggttctgaccagggccctggcaatggtgagagatggttgattcttgttgaaatactaagtaattaaaaaaaaaccactactgtttttcccaattatatgaagtatgggatgctagattacagaaatcttaagtcgggccaggtga

SEQ ID NO: 581451 - DNA, 605 bp, Homo sapiens
acagatagcaatattaaatagagtggtcagggttggcctcctaagtgaaaattgagcaaagacttgaaggaggggaaggagctgaccaaggtactgagggaagagcattataggcagaaacaacagaataaagatgctaagagggaactccgtggtgtgtctgaagctcaggaaagaggtctgtggagtagagagagggagagaagtagggaaggaggccagggagttgttggactcagatcagtacagattgtgtaagccctgggaggctactgctggggctttggtttttattctgtctgagatgggagatgaggaagggttctgagcagagaggtgacgcgaactgtctactgatttaaaagcatcccatggcagctgagttgagaaagattgtgggaagatttgggtagaagcagggaggccatgctgtggcaacctccaggtgggagatgatagtggttctgaccagggccctggcaatggtgagagatggttgattcttgttgaaatactaagtaattaaaaaaaaaccactactgyttttcccaattatatgaagtatgggatgctagattacagaaatcttaagtcgggccaggtga

SEQ ID NO: 581452 - DNA, 423 bp, Homo sapiens
atggtgagggtgaggcaggaggatccccggagcccaggaggtcacggctgcagttagctatgagtgcacccctgcattgcagccagagtgacagagtgagacccgktctcagaatacagatacaagtaaagaaatctcagctcagagcagtctgtttgtcactatgcagccttttcaaccccatagctgagcgattgggtttgtgttgctggaggtgaggagacccgtgcccaggtgttgttgcctgtctaatcagtttattttaaaatatattaatgaaatttatttcatcatactttatggcctcatacctgagtggttttttgaattctcctttgaatagcttgtaactattcaaacctcttattggttctataattaattctttttctaattagctttttaaaaatcagaattgatatt

SEQ ID NO: 581453 - DNA, 423 bp, Homo sapiens
atggtgagggtgaggcaggaggatccccggagcccaggaggtcacggctgcagttagctatgagtgcacccctgcattgcagccagagtgacagagtgagacccgttctcagaatacagatacaagtaaagaaatctcagctcagagcagtctgtttgtcactatgcagcctttkcaaccccatagctgagcgattgggtttgtgttgctggaggtgaggagacccgtgcccaggtgttgttgcctgtctaatcagtttattttaaaatatattaatgaaatttatttcatcatactttatggcctcatacctgagtggttttttgaattctcctttgaatagcttgtaactattcaaacctcttattggttctataattaattctttttctaattagctttttaaaaatcagaattgatatt

SEQ ID NO: 581454 - DNA, 423 bp, Homo sapiens
atggtgagggtgaggcaggaggatccccggagcccaggaggtcacggctgcagttagctatgagtgcacccctgcattgcagccagagtgacagagtgagacccgttctcagaatacagatacaagtaaagaaatctcagctcagagcagtctgtttgtcactatgcagccttttcaaccccatagctgmgcgattgggtttgtgttgctggaggtgaggagacccgtgcccaggtgttgttgcctgtctaatcagtttattttaaaatatattaatgaaatttatttcatcatactttatggcctcatacctgagtggttttttgaattctcctttgaatagcttgtaactattcaaacctcttattggttctataattaattctttttctaattagctttttaaaaatcagaattgatatt

SEQ ID NO: 581455 - DNA, 584 bp, Homo sapiens
agcttgtaactattcaaacctcttattggttctataattaattctttttctaattagctttttaaaaatcagaattgatattagactaatcagttattagtgaggagatgaaattgagttgtttgtacactttatctaagatartgttatattggctaactcaaatcagtagttcagcaaatgcagaatcagagcttcttcagcgcggaactctcttgtggttcttgaagatgccatttctttttctttttttttttttttttgagacagcatcttcctctgtcaccaggctcgagtgcagtggcacaatctcaattcacagcaacttctgcctcccagttcagggttcaagcatttcttttgcctcagcctctgaagtagctgggactacagggatgtgtcaccatgcccagctaagctttgtattttctgtagttacggggtttcagcatgttggacaggctggtcttgaactcctgaccttgtgatccactggccttggactcctaaagtgctgggattacaggtgtgagccaccgtgcctggcctcttttttcagtctttaataaactgctgccatcatt

SEQ ID NO: 581456 - DNA, 584 bp, Homo sapiens
agcttgtaactattcaaacctcttattggttctataattaattctttttctaattagctttttaaaaatcagaattgatattagactaatcagttattagtgaggagatgaaattgagttgtttgtacactttatctaagataatgttatattggctaactcaaatcagtagttcagcaaatgcagaatcagagcttcttcagcgyggaactctcttgtggttcttgaagatgccatttctttttctttttttttttttttttgagacagcatcttcctctgtcaccaggctcgagtgcagtggcacaatctcaattcacagcaacttctgcctcccagttcagggttcaagcatttcttttgcctcagcctctgaagtagctgggactacagggatgtgtcaccatgcccagctaagctttgtattttctgtagttacggggtttcagcatgttggacaggctggtcttgaactcctgaccttgtgatccactggccttggactcctaaagtgctgggattacaggtgtgagccaccgtgcctggcctcttttttcagtctttaataaactgctgccatcatt

SEQ ID NO: 581457 - DNA, 579 bp, Homo sapiens
gctgggactacagggatgtgtcaccatgcccagctaagctttgtattttctgtagttacggggtttcagcatgttggacaggctggtcttgaactcctgaccttgtgatccactggccttggactcctaaagtgctgggattacaggtgtgagccaccgtgcctggcctcttttttcagtctttaataaactgctgccatcatttcagaccacttgctattttaggcacttagaaatttttcactggaattcatgtaaagaaagaccatgggtgtttgtactggatttagtattcatccttcgactgcatgactcacccctagtgccataattttactaatgaatttttcagatactactcagctggccactgaacctaaccagcaacccaccctcaaccattcagtggtcttttgttcttctctgttcctcctgaatgttgattactctcagaaggtgataaaaacttggatttcttttttttttctttctagagacagagttttgttctgtcacccaggctgcagtgcrgtggcatgatcatggttcactgcagcctgaaaccccagactcaaacag

SEQ ID NO: 581458 - DNA, 579 bp, Homo sapiens
gctgggactacagggatgtgtcaccatgcccagctaagctttgtattttctgtagttacggggtttcagcatgttggacaggctggtcttgaactcctgaccttgtgatccactggccttggactcctaaagtgctgggattacaggtgtgagccaccgtgcctggcctcttttttcagtctttaataaactgctgccatcatttcagaccacttgctattttaggcacttagaaatttttcactggaattcatgtaaagaaagaccatgggtgtttgtactggatttagtattcatccttcgactgcatgactcacccctagtgccataattttactaatgaatttttcagatactactcagctggccactgaacctaaccagcaacccaccctcaaccattcagtggtcttttgttcttctctgttcctcctgaatgttgattactctcagaaggtgataaaaacttggatttcttttttttttctttctagagacagagttttgttctgtcacccaggctgcagtgcgrtggcatgatcatggttcactgcagcctgaaaccccagactcaaacag

SEQ ID NO: 581459 - DNA, 487 bp, Homo sapiens
catggttcactgcagcctgaaaccccagactcaaacagtcctcccacctcagcctcccaagtagctgggactacatacatttgcccctatgcccagctaacttctttattttttattgtacagatgggatcttgctgtgttgctcaggatgttgtcagactcctggcctcaagtgatcattctgcctcagcttcccaaagtgcttggattatatgtaggtgggagccacctgtgttcaatrcccattttctttttctttctttcttttggagatggactctcactctgtcatgcaggctggaatgcagtggtgtgatctcagctgactgcaacctccacctccctggttcaagcaactcccctgcctcagcctcccgactagctggaattacaggcacatgtcaccactctcagctaatatttttgtatttttagtagagacagggtttcagtatgttggccagactggtctcgaactcctgaaatc

SEQ ID NO: 581460 - DNA, 487 bp, Homo sapiens
catggttcactgcagcctgaaaccccagactcaaacagtcctcccacctcagcctcccaagtagctgggactacatacatttgcccctatgcccagctaacttctttattttttattgtacagatgggatcttgctgtgttgctcaggatgttgtcagactcctggcctcaagtgatcattctgcctcagcttcccaaagtgcttggattatatgtaggtgggagccacctgtgttcaatgcccattttctttttctttctttcttttggagatggactctcactctgtcatscaggctggaatgcagtggtgtgatctcagctgactgcaacctccacctccctggttcaagcaactcccctgcctcagcctcccgactagctggaattacaggcacatgtcaccactctcagctaatatttttgtatttttagtagagacagggtttcagtatgttggccagactggtctcgaactcctgaaatc

SEQ ID NO: 581461 - DNA, 605 bp, Homo sapiens
tagcctgggcaacatggcaaaacarcatctctagcaaaaatacaaaaattagctgggtgtggtggctcatgcctgtagtcccaactacttggggacatgagactggaagatcacttgagcccagaagccataggttgcagtgagaccagatggcaccactgcactacagcatgggtgacaaaaggagaccctgtctttaaataactaaagaaaaaaagaaagtatacaattgagtggtttttagaatattcaaggagctgtgcatccatcaccacagtctttcttagaagtgattacccacttgtgagttacccacttatgaatgagaaaccctcacctcttagccgctacctcctacgtaccccatgttcataggcaaccactgatttattttctgtcattgtagttttgcctaatctggaccttttatagaaatagaattgtacaatgtgtgatcttttgtaatttgctttttttttctcttagcagaatgttttcaaatttctttcatgttatagtgtgtatcaggatttctttccttttgtagctgagtaatagtttatgtttatccattcattagttgatggacatttgtgttgtttttg

SEQ ID NO: 581462 - DNA, 605 bp, Homo sapiens
tagcctgggcaacatggcaaaacagcatctctagcaaaaatacaaaaattagctgggtgtggtggctcatgcctgtagtcccaactacttggggacrtgagactggaagatcacttgagcccagaagccataggttgcagtgagaccagatggcaccactgcactacagcatgggtgacaaaaggagaccctgtctttaaataactaaagaaaaaaagaaagtatacaattgagtggtttttagaatattcaaggagctgtgcatccatcaccacagtctttcttagaagtgattacccacttgtgagttacccacttatgaatgagaaaccctcacctcttagccgctacctcctacgtaccccatgttcataggcaaccactgatttattttctgtcattgtagttttgcctaatctggaccttttatagaaatagaattgtacaatgtgtgatcttttgtaatttgctttttttttctcttagcagaatgttttcaaatttctttcatgttatagtgtgtatcaggatttctttccttttgtagctgagtaatagtttatgtttatccattcattagttgatggacatttgtgttgtttttg

SEQ ID NO: 581463 - DNA, 605 bp, Homo sapiens
tagcctgggcaacatggcaaaacagcatctctagcaaaaatacaaaaattagctgggtgtggtggctcatgcctgtagtcccaactacttggggacatgagactggaagatcacttgagyccagaagccataggttgcagtgagaccagatggcaccactgcactacagcatgggtgacaaaaggagaccctgtctttaaataactaaagaaaaaaagaaagtatacaattgagtggtttttagaatattcaaggagctgtgcatccatcaccacagtctttcttagaagtgattacccacttgtgagttacccacttatgaatgagaaaccctcacctcttagccgctacctcctacgtaccccatgttcataggcaaccactgatttattttctgtcattgtagttttgcctaatctggaccttttatagaaatagaattgtacaatgtgtgatcttttgtaatttgctttttttttctcttagcagaatgttttcaaatttctttcatgttatagtgtgtatcaggatttctttccttttgtagctgagtaatagtttatgtttatccattcattagttgatggacatttgtgttgtttttg

SEQ ID NO: 581464 - DNA, 561 bp, Homo sapiens
gtataaatgtgtgagtatacatacatatattttctagctcctctaacaaaagggcctagaaacaacatcatcccagtaacaatgagaacaccattctccaattaaaggaaccaaggctccttggggacatatttgatatcaggattgggcagggaaaatacaagattagtttgaaatattttgtcatgttaggaagtaaggaaatgctcacaaaatggggaaaatgtgaaagggaaacagatccactttgaataaacttccatagccaaatttgagaaaattggggcaataaaatagataacaataataatatattacaatctacaggagaaaattttcaattaatccaggccaggtgcagttgctcatgcctgtattcccagccctttgggaggcagagacgggcagatcacttgaggtcaggagttcaagaccagcctgaccaatgtggtgaatccctgcctctactraaaatacaaaaattagccgggcatggtggcacatgcctgtagtcccagttactcctgaggctgatgcaggagaatggcttgaatcccggaa

SEQ ID NO: 581465 - DNA, 561 bp, Homo sapiens
gtataaatgtgtgagtatacatacatatattttctagctcctctaacaaaagggcctagaaacaacatcatcccagtaacaatgagaacaccattctccaattaaaggaaccaaggctccttggggacatatttgatatcaggattgggcagggaaaatacaagattagtttgaaatattttgtcatgttaggaagtaaggaaatgctcacaaaatggggaaaatgtgaaagggaaacagatccactttgaataaacttccatagccaaatttgagaaaattggggcaataaaatagataacaataataatatattacaatctacaggagaaaattttcaattaatccaggccaggtgcagttgctcatgcctgtattcccagccctttgggaggcagagacgggcagatcacttgaggtcaggagttcaagaccagcctgaccaatgtggtgaatccctgcctctactaaaaatacaaaaattagccgggcatggtggcacatgmctgtagtcccagttactcctgaggctgatgcaggagaatggcttgaatcccggaa

SEQ ID NO: 581466 - DNA, 499 bp, Homo sapiens
tatcaaacatttaagaaagtacagagagtcctcaacttacagtggtttgacttgtgctcttcttacttgataatggtgctttcatctgtgtacrttaatgatgagcatcaatatgaccagtttttcactatcagtatagttttcaataaatttcatgagatactcaatattttaaaatgggccttgtggtagatgattttgcccaattgtaggataatgtaagtgttctgagcaagtttaaggtaggcgaggctaagtcatgatattcagtaggttaaatatattaaatgcgttttagacttacaatattttcaatttaggatgagttcattaagacataaaacaattgtaagttgaggagtatctataacatcaatcttgaacggactctttttaagaaatagaatttaagggctggacacagtggctcacacctgtaatcccagcactttgagaggccaagacgggcagatcacctggggtcaggagtttgagacca

SEQ ID NO: 581467 - DNA, 499 bp, Homo sapiens
tatcaaacatttaagaaagtacagagagtcctcaacttacagtggtttgacttgtgctcttcttacttgataatggtgctttcatctgtgtacgttaatgatgagcatcaatatgaccagtttttcactatcagtatagttttcaataaatttcatgagawactcaatattttaaaatgggccttgtggtagatgattttgcccaattgtaggataatgtaagtgttctgagcaagtttaaggtaggcgaggctaagtcatgatattcagtaggttaaatatattaaatgcgttttagacttacaatattttcaatttaggatgagttcattaagacataaaacaattgtaagttgaggagtatctataacatcaatcttgaacggactctttttaagaaatagaatttaagggctggacacagtggctcacacctgtaatcccagcactttgagaggccaagacgggcagatcacctggggtcaggagtttgagacca

SEQ ID NO: 581468 - DNA, 499 bp, Homo sapiens
tatcaaacatttaagaaagtacagagagtcctcaacttacagtggtttgacttgtgctcttcttacttgataatggtgctttcatctgtgtacgttaatgatgagcatcaatatgaccagtttttcactatcagtatagttttcaataaatttcatgagatactcaatattttaaaatgggccttgtggtagatgattttgcccaatygtaggataatgtaagtgttctgagcaagtttaaggtaggcgaggctaagtcatgatattcagtaggttaaatatattaaatgcgttttagacttacaatattttcaatttaggatgagttcattaagacataaaacaattgtaagttgaggagtatctataacatcaatcttgaacggactctttttaagaaatagaatttaagggctggacacagtggctcacacctgtaatcccagcactttgagaggccaagacgggcagatcacctggggtcaggagtttgagacca

SEQ ID NO: 581469 - DNA, 499 bp, Homo sapiens
tatcaaacatttaagaaagtacagagagtcctcaacttacagtggtttgacttgtgctcttcttacttgataatggtgctttcatctgtgtacgttaatgatgagcatcaatatgaccagtttttcactatcagtatagttttcaataaatttcatgagatactcaatattttaaaatgggccttgtggtagatgattttgcccaattgtaggataatgtaagtgttctgagcaagtttaaggtaggcgaggctaagtcatgatattcagtaggttaaatatattaaatgcgttttagacttacaatattttcaatttaggatgagttcattaagacataaaacaattgtaagttgaggrgtatctataacatcaatcttgaacggactctttttaagaaatagaatttaagggctggacacagtggctcacacctgtaatcccagcactttgagaggccaagacgggcagatcacctggggtcaggagtttgagacca

SEQ ID NO: 581470 - DNA, 361 bp, Homo sapiens
ctcaatgtttagcccccacttataagtgagaacatgcagtgtttgtgtggttttctgttcctgcattaattcacttagaataatggtatccagctccaatcatgttgctgcaaaagacattatttcatcctatgttataggtgtgtagtattccatggtgtatrtacgctgcatttttttaatccagtcttctgttaacaggcatctaagttgattccgtgtctttgctattgtgaatagtgttataatgaaaatatgcgtacatatgtctatgacagaatgatttatattcctttgggtatatacccaataatgggattgctgggttgaatggtagttctgttttaagttatttcagaaa

SEQ ID NO: 581471 - DNA, 446 bp, Homo sapiens
tagagtccttccagatgagaccagggacatcatgaagcaaccaaccmacaccgccctgtccagtgtcttgacccagaaaattgtgacatgtaaaaagaataaattcctggtttaagccagtaaggttacgggtacattgttacatctcagataattaaaaccttgaaaaactcatgagagatcacaagtagaaccttgatctgaaacatggcatgtggcgatttatattgagtattaggttaaaaatgcaagaatggagcatagttaatattttacattaaagctaaaaccataattgcctacttaaaattttcagttaattaggttgtcactttttgttcttaaccaagtaatcaactagttttagtccataaacagttagaactgatgcacacatccgtttctccttattcattttaaacagctatctgaaataggaagtgtaa

SEQ ID NO: 581472 - DNA, 446 bp, Homo sapiens
tagagtccttccagatgagaccagggacatcatgaagcaaccaaccaacaccgccctgtccagtgtcttgacccagaaaattgtgacatgtaaaaagaataaattcctggtttaagccagtaaggttacgggtacattgttacatctcagataattaaaaccttgaaaaactcatgagagatcacaagtagaaccttgatctgaaacatggcatgtggcgatttatawtgagtattaggttaaaaatgcaagaatggagcatagttaatattttacattaaagctaaaaccataattgcctacttaaaattttcagttaattaggttgtcactttttgttcttaaccaagtaatcaactagttttagtccataaacagttagaactgatgcacacatccgtttctccttattcattttaaacagctatctgaaataggaagtgtaa

SEQ ID NO: 581473 - DNA, 446 bp, Homo sapiens
tagagtccttccagatgagaccagggacatcatgaagcaaccaaccaacaccgccctgtccagtgtcttgacccagaaaattgtgacatgtaaaaagaataaattcctggtttaagccagtaaggttacgggtacattgttacatctcagataattaaaaccttgaaaaactcatgagagatcacaagtagaaccttgatctgaaacatggcatgtggcgatttatattgagtattaggttaaaaatgcaagaatggagcatagttaatattttacattaaagctaaaaccataattgcctacttaaaattttcagttaattaggttgtcactttttgttcttaaccaagwaatcaactagttttagtccataaacagttagaactgatgcacacatccgtttctccttattcattttaaacagctatctgaaataggaagtgtaa

SEQ ID NO: 581474 - DNA, 535 bp, Homo sapiens
caggtgcttaaattaaaaagaagaaagatctcaaaccaataacctaacattacacctaaaggggaaaaaaaaaaactaawgacaaaccaagcaaaaggaagaaagtaacagattagaatagagataagcagaataagatcagaaaaaaaggaaaaaaaaaaccactgagttagtttttttaaagatcaataaaaattttaaaactcacagctatattaagaaaaaaagagaaatctcaaatactaaaatcataaataaaagaggtgacagtacaacagattccacagaaatgaaaaagattacaagagactaatgtgagcaaccatatgccacaaaactgggcaacctagaataaatttataaattcctagaaacacaaaccaccatactgcatcatggagaaataaaaaatccaaagagacctgtaactagtaagaagattcaaccagtaatcaaaaaccccccaaaaaagaaaattccaggtccagataacttcactggagaattttaccaaacatttcaagaagaattaatg

SEQ ID NO: 581475 - DNA, 535 bp, Homo sapiens
caggtgcttaaattaaaaagaagaaagatctcaaaccaataacctaacattacacctaaaggggaaaaaaaaaaactaaagacaaaccaagcaaaaggaagaaagtaacagattagaatagagataagcagaataagatcagaaaaaaaggaaaaaaaaaaccactgagttagtttttttaaagatcaataaaaattttaaaactcacagctatattaagaaaaaaagagaaatctcaaatactaaaatcataaataaaagaggtgacagtacaacagattccacagaaatgaaaaagattacaagagacwaatgtgagcaaccatatgccacaaaactgggcaacctagaataaatttataaattcctagaaacacaaaccaccatactgcatcatggagaaataaaaaatccaaagagacctgtaactagtaagaagattcaaccagtaatcaaaaaccccccaaaaaagaaaattccaggtccagataacttcactggagaattttaccaaacatttcaagaagaattaatg

SEQ ID NO: 581476 - DNA, 535 bp, Homo sapiens
caggtgcttaaattaaaaagaagaaagatctcaaaccaataacctaacattacacctaaaggggaaaaaaaaaaactaaagacaaaccaagcaaaaggaagaaagtaacagattagaatagagataagcagaataagatcagaaaaaaaggaaaaaaaaaaccactgagttagtttttttaaagatcaataaaaattttaaaactcacagctatattaagaaaaaaagagaaatctcaaatactaaaatcataaataaaagaggtgacagtacaacagattccacagaaatgaaaaagattacaagagactaatgtgagcaaccatatgccacaaaactggrcaacctagaataaatttataaattcctagaaacacaaaccaccatactgcatcatggagaaataaaaaatccaaagagacctgtaactagtaagaagattcaaccagtaatcaaaaaccccccaaaaaagaaaattccaggtccagataacttcactggagaattttaccaaacatttcaagaagaattaatg

SEQ ID NO: 581477 - DNA, 535 bp, Homo sapiens
caggtgcttaaattaaaaagaagaaagatctcaaaccaataacctaacattacacctaaaggggaaaaaaaaaaactaaagacaaaccaagcaaaaggaagaaagtaacagattagaatagagataagcagaataagatcagaaaaaaaggaaaaaaaaaaccactgagttagtttttttaaagatcaataaaaattttaaaactcacagctatattaagaaaaaaagagaaatctcaaatactaaaatcataaataaaagaggtgacagtacaacagattccacagaaatgaaaaagattacaagagactaatgtgagcaaccatatgccacaaaactgggcaacctaraataaatttataaattcctagaaacacaaaccaccatactgcatcatggagaaataaaaaatccaaagagacctgtaactagtaagaagattcaaccagtaatcaaaaaccccccaaaaaagaaaattccaggtccagataacttcactggagaattttaccaaacatttcaagaagaattaatg

SEQ ID NO: 581478 - DNA, 234 bp, Homo sapiens
attcctttccattccaatctattacattccactcgggttgagtccaaccctttccattccaatccattccaatccattccattcctttccaatccattccattccattcawttccacttggattcaatctattctttccattccattccgttctgctccattccattccattgcattagataccattccattccactcgggatgattccatttaattccattatattccgttca

SEQ ID NO: 581479 - DNA, 234 bp, Homo sapiens
attcctttccattccaatctattacattccactcgggttgagtccaaccctttccattccaatccattccaatccattccattcctttccaatccattccattccattcatttccacttggattcaatctattctttccattccattccgttctgctscattccattccattgcattagataccattccattccactcgggatgattccatttaattccattatattccgttca

SEQ ID NO: 581480 - DNA, 486 bp, Homo sapiens
ccatttcacctaaaatataccctcttaagttttattttaagtgtacaatacaggacggccatgcatcagagatatatgtgggtttggttcctgaccactgcaataaagtgagttatacaatttcttttggttttccagtgcatgtaaaagtatgtttatactggtgctgtataaagtgtgcaatagcatatgtctacaaagtatgcgcgctttaattacaaatactttattgttaacaagtgctaacagtcatgtgagccttcagaaagtggcaatctttttttgtgtgcgtgacagggttttactctgtggctcaggctggagtaattgcagcctcaacctcatgctcaatcaaacccccacctcagactcctgactagmtgaaactacagatgcatgccacctgtccagctaatttttgtattttctttttttgtagagatggggttttgccatgttgccttgacttcccgggctcaagcaatc

SEQ ID NO: 581481 - DNA, 486 bp, Homo sapiens
ccatttcacctaaaatataccctcttaagttttattttaagtgtacaatacaggacggccatgcatcagagatatatgtgggtttggttcctgaccactgcaataaagtgagttatacaatttcttttggttttccagtgcatgtaaaagtatgtttatactggtgctgtataaagtgtgcaatagcatatgtctacaaagtatgcgcgctttaattacaaatactttattgttaacaagtgctaacagtcatgtgagccttcagaaagtggcaatctttttttgtgtgcgtgacagggttttactctgtggctcaggctggagtaattgcagcctcaacctcatgctcaatcaaacccccacctcagactcctgactagatgraactacagatgcatgccacctgtccagctaatttttgtattttctttttttgtagagatggggttttgccatgttgccttgacttcccgggctcaagcaatc

SEQ ID NO: 581482 - DNA, 486 bp, Homo sapiens
ccatttcacctaaaatataccctcttaagttttattttaagtgtacaatacaggacggccatgcatcagagatatatgtgggtttggttcctgaccactgcaataaagtgagttatacaatttcttttggttttccagtgcatgtaaaagtatgtttatactggtgctgtataaagtgtgcaatagcatatgtctacaaagtatgcgcgctttaattacaaatactttattgttaacaagtgctaacagtcatgtgagccttcagaaagtggcaatctttttttgtgtgcgtgacagggttttactctgtggctcaggctggagtaattgcagcctcaacctcatgctcaatcaaacccccacctcagactcctgactagatgaaactacagatrcatgccacctgtccagctaatttttgtattttctttttttgtagagatggggttttgccatgttgccttgacttcccgggctcaagcaatc

SEQ ID NO: 581483 - DNA, 440 bp, Homo sapiens
ggagaaatgcacagattctgggtgccatgtgcatttgttttgggagtgataattgatctaacttatggaaataatactagatagttagcggatggattctgtatctgatgagagtttagggcaaaacgaattcctagtttctgagtcttatttttcccctgattcaagaaaactgtgaattatccagccagtaaaaaactctcacagctccggatgtgagtttaggacactggatttctaccactcattttcttactacttttcttgtgcaaggatcatggcacaagttgcagtttccaccctgcccattgaagatgagaagtctgttgaagatgaggagtccttggagagcaggatggtggtgacattcccgtcagctctcgactccayggtcagaccttctgttctcacattctgtagttcagtaggactgggcggta

SEQ ID NO: 581484 - DNA, 385 bp, Homo sapiens
tgtcgagaggggtacagaacttccatgtcctctattgtgcatgttaccttcctggtatctcccttgtgttcagcaacccagacattctccaactccagttgttgagggcgcttatgaacgcttcattatgcaggcawgattgatgaagtcattgaccattggtaattaagtcagtcttcggccactatttcttcctggagcccagggggtgaggctgacagttccaagcctctaatcacatggtttgttcttctgacaacaaccacccctttttctgaagctgtctaggagctttcagtcacccagtcatctcagtaacatcaccaaatgcattcttactatggtgatcccaaaggtcttagaggctcttgtgttagaaacctgg

SEQ ID NO: 581485 - DNA, 385 bp, Homo sapiens
tgtcgagaggggtacagaacttccatgtcctctattgtgcatgttaccttcctggtatctcccttgtgttcagcaacccagacattctccaactccagttgttgagggcgcttatgaacgcttcattatgcaggcatgattgatgaagtcattgaccattggtrattaagtcagtcttcggccactatttcttcctggagcccagggggtgaggctgacagttccaagcctctaatcacatggtttgttcttctgacaacaaccacccctttttctgaagctgtctaggagctttcagtcacccagtcatctcagtaacatcaccaaatgcattcttactatggtgatcccaaaggtcttagaggctcttgtgttagaaacctgg

SEQ ID NO: 581486 - DNA, 385 bp, Homo sapiens
tgtcgagaggggtacagaacttccatgtcctctattgtgcatgttaccttcctggtatctcccttgtgttcagcaacccagacattctccaactccagttgttgagggcgcttatgaacgcttcattatgcaggcatgattgatgaagtcattgaccattggtaattaagtcagtcttcggccactatttcttcctggagcccagggggtgaggctgacagttccaagcctctaatcacatggtttgttcttctgacaacaaccacccctttttctgaagctgtctaggagytttcagtcacccagtcatctcagtaacatcaccaaatgcattcttactatggtgatcccaaaggtcttagaggctcttgtgttagaaacctgg

SEQ ID NO: 581487 - DNA, 558 bp, Homo sapiens
catcactttcatcaccaaggcctttataagagcttgagaagctctgtgccaggatgaggggcagaaaccaaatgtgtatttcttttctttttcttttgaacacagagtctgtttcacccaatctggagtgcagtgatggtgttgtagctaactgcagcctcaaccacctgtgctcaagcaattctcccacctcagccttccaagcatctgggactacaggtgcacaccatccatgcccagctaatttttgtattttttttttttgtagagrtgggatcttgttatattgccgaggctggtcttgaactctggggctaaagcgatcctttcaccacaacctctcaagtagctgaaactacagatgcatactaccatgcccagctaattttttcttatttctttttgttgtttaattgagggggtctcgccgtgtttcccaggctggtcttgaagttttggcctcaagcgtttctcctgctttgacctcctaaactgttgggattatgggttgtgagccacggcctctgtgtccagcaaacacaagaggtctttataagt

SEQ ID NO: 581488 - DNA, 558 bp, Homo sapiens
catcactttcatcaccaaggcctttataagagcttgagaagctctgtgccaggatgaggggcagaaaccaaatgtgtatttcttttctttttcttttgaacacagagtctgtttcacccaatctggagtgcagtgatggtgttgtagctaactgcagcctcaaccacctgtgctcaagcaattctcccacctcagccttccaagcatctgggactacaggtgcacaccatccatgcccagctaatttttgtattttttttttttgtagagatgggatcttgttatattgycgaggctggtcttgaactctggggctaaagcgatcctttcaccacaacctctcaagtagctgaaactacagatgcatactaccatgcccagctaattttttcttatttctttttgttgtttaattgagggggtctcgccgtgtttcccaggctggtcttgaagttttggcctcaagcgtttctcctgctttgacctcctaaactgttgggattatgggttgtgagccacggcctctgtgtccagcaaacacaagaggtctttataagt

SEQ ID NO: 581489 - DNA, 558 bp, Homo sapiens
catcactttcatcaccaaggcctttataagagcttgagaagctctgtgccaggatgaggggcagaaaccaaatgtgtatttcttttctttttcttttgaacacagagtctgtttcacccaatctggagtgcagtgatggtgttgtagctaactgcagcctcaaccacctgtgctcaagcaattctcccacctcagccttccaagcatctgggactacaggtgcacaccatccatgcccagctaatttttgtattttttttttttgtagagatgggatcttgttatattgccgaggctggtcttgaactctggggctaaagcgatcctttcaccacaacctctcaagtagctgaaactacagatgcatactaccatgcccagctaattttttcttatttctttttgttgtttaattgagggggtctcgcygtgtttcccaggctggtcttgaagttttggcctcaagcgtttctcctgctttgacctcctaaactgttgggattatgggttgtgagccacggcctctgtgtccagcaaacacaagaggtctttataagt

SEQ ID NO: 581490 - DNA, 558 bp, Homo sapiens
catcactttcatcaccaaggcctttataagagcttgagaagctctgtgccaggatgaggggcagaaaccaaatgtgtatttcttttctttttcttttgaacacagagtctgtttcacccaatctggagtgcagtgatggtgttgtagctaactgcagcctcaaccacctgtgctcaagcaattctcccacctcagccttccaagcatctgggactacaggtgcacaccatccatgcccagctaatttttgtattttttttttttgtagagatgggatcttgttatattgccgaggctggtcttgaactctggggctaaagcgatcctttcaccacaacctctcaagtagctgaaactacagatgcatactaccatgcccagctaattttttcttatttctttttgttgtttaattgagggggtctcgccgtgtttcccaggctggtcytgaagttttggcctcaagcgtttctcctgctttgacctcctaaactgttgggattatgggttgtgagccacggcctctgtgtccagcaaacacaagaggtctttataagt

SEQ ID NO: 581491 - DNA, 294 bp, Homo sapiens
gtatgccatctccaagaaacccatctcacattcagtatcatacataggctcaaaatgaaggaatggtgaaaaatctttcaagcmaatggaaaacagaagaaatcaggtgttacactcccagtttcgacaaaacgtatataccaataaagataaaaaaagacagagaaggacattacaaaggtggtcctgacctttgataaatctcgttattgattgataccaacctgggctatctttattgcccaaaccaacaggataatttgctgaggttgtggagcttctcccctgcaaaga

SEQ ID NO: 581492 - DNA, 294 bp, Homo sapiens
gtatgccatctccaagaaacccatctcacattcagtatcatacataggctcaaaatgaaggaatggtgaaaaatctttcaagccaatggaaaacagaagaaatcaggtgttacactcccagtttcgacaaaacgtatataccaataaagataaaaaaagacagagaaggacattacaaaggtggtcctgacctttgataaatctcgttattgattgataccaacmtgggctatctttattgcccaaaccaacaggataatttgctgaggttgtggagcttctcccctgcaaaga

SEQ ID NO: 581493 - DNA, 251 bp, Homo sapiens
gtatggaatggtatggaatggaatggaatggaatgcaatggaatggtatggaatggaatggaaaggaacggaatagaatcaacccaagtggaatggaatggaatggaatggaacggaatcaacacgagtggaatggaatggaaaggaatgcaatcgaatggaatggaatggaatggaatcaacccgagtggaktagaatggaatggaatggaatcaaccgcagtggaatggaatggaatggaatgcaatag

SEQ ID NO: 581494 - DNA, 532 bp, Homo sapiens
atttggtgtttgttgaaggtcaaacattcagacactcacaacgactatagcgacagcagcagtgttcaggaatcytatgtgagggacaaacactcagaagccagctggagtgttctagaatcctatgtgagggccaaacattcagaccccagcagtagtgttgtggaatcctatgtgagggacaaactttcaaacccttgtagcagtgttctggaatgctatgtgagggacaaacattcagaccacgggagcagtgttctggaattctatgtgaaggacaaacattaagactctcatagcagtgtcctggaatcatatgtgagggacaaccattcagacaccagcagaagtgttctggaatcctaggtgtgggaaaaacattcagaacctagtagcagtgttctggaatcctatgtgagggacatacattcagaccacggtagcagtgttctggaatggtatgtgaaggacaaacattcagacccttgtagcagtgttccggaattctatgtgagggacaaacattcagacc

SEQ ID NO: 581495 - DNA, 531 bp, Homo sapiens
aacatactgcaggtattcttccatatttcctgtgctacattcctgggattcagtcatgttaatgagtgcagctctacttcattttcactgctattcaraaatccaatggaagaatataatttatttattcattctgctattaatggacttttaggttatttccaattttttgttttcacaaacagtgcaactatgaatactcatgcacttgtccctggtatagatgtgcaagtttccctagggcagagcttctatacataggtgccacagctcaaatatgtggaggtgtgcagcaagggatatcgaatccctcagccctggggacagctctgtaggaaatgaggtctttggcctagaaagcagactagtctctttgtccagtatctcaaacaaaaatcatttgccatagaggcatccatctaaaagaagtggtgctttatggccctcatactcaaagtgtagtctacagactagcaacacctcatgtggaagtttgttagaaagtagaatcttaggccaagccataaaaga

SEQ ID NO: 581496 - DNA, 531 bp, Homo sapiens
aacatactgcaggtattcttccatatttcctgtgctacattcctgggattcagtcatgttaatgagtgcagctctacttcattttcactgctattcagaaatccaatggaagaatataatttatttattcattctgctattaatggacttttaggttatttccaattttttgttttcacaaacagtgcaactatgaatactcatgcacttgtccctggtatagatgtgcaagtttccctagggcagagcttctatacataggtgccacagctcaaatatgtggaggtgtgcagcaagggatatcgaatccctcagccctggggacagctctgtargaaatgaggtctttggcctagaaagcagactagtctctttgtccagtatctcaaacaaaaatcatttgccatagaggcatccatctaaaagaagtggtgctttatggccctcatactcaaagtgtagtctacagactagcaacacctcatgtggaagtttgttagaaagtagaatcttaggccaagccataaaaga

SEQ ID NO: 581497 - DNA, 623 bp, Homo sapiens
tataatgtaattaattttgaactaattctcatatttcatactgaggttaactacctgatagaacatgtatatgcatgtccaacacacacaagataatctgaatcatcttatagaatcagaaagtagaaaagtgctaaaaacaaataagctaaacaaaaacacaggaataatgagaatttgtcaaagggacacagagaccaactgaaagggctcccgatggccaaagctaaaacaatttacataaaaataataaaaagtagtattgaattaaaacacaaaatataaaataaataaagtgaattcatacaaatatacataaatgattcaataaattgataaggcagaaaagactaaacwtctttggagaaaaatggaagaaatctgaataaagtataaactttaacaaattgtcctgtatcaacatcagttcgttaattgtgacaaatatgccttactaatgtataatgtggggtatatgcaaattctccagatgattgtgacagtcaacattctataaatctaaaactattctaaaataagtagttaattataaatacctaatgttataccacactaaagatatctgaatattaacaaaaaccaaaatgtcaacctgtagaata

SEQ ID NO: 581498 - DNA, 546 bp, Homo sapiens
caaaagggctcaaaaacaattaaaataaaatttaaataaataagtaaagtatgtgtgtacagacaaaaaagtatctatgtatatatattttatatgtgtgtctctgtgtgtgtgtgtctgtgttttyttaccctatccactactgtcaggcagctgccgtagtaaggaatcccctcaatacattcaggaatggagatgacttgagactaagtgccagacttcataaagcttgttctgattgagtgtcagacttcataaggaaacctttgctttcagcctgattttagggtatatatcttgaggggtcccattgagcacctgtgaattttacaagggtccattctctacttgaccatttttttctaccacactacaagaatggcaaattctcctctcaggttttctgtcactttctgttgttctctcatcattaacagcttagtaataaaaaatgcttgtaaagaaaagtagtgcacagaattggccttaaatctctgtaccttctattttctagaatcttgatgctttaagtcttggctgcatcca

SEQ ID NO: 581499 - DNA, 546 bp, Homo sapiens
caaaagggctcaaaaacaattaaaataaaatttaaataaataagtaaagtatgtgtgtacagacaaaaaagtatctatgtatatatattttatatgtgtgtctctgtgtgtgtgtgtctgtgttttcttaccctatccactactgtcaggcagctgccgtagtaaggaatcccctcaatacattcaggaatggagatgacttgagactaagtgccagacttcataaagcttgttctgattgagtgtcagacttcataaggaaacctttgctttcagcctgattttagggtatatatcttgaggggtcccaytgagcacctgtgaattttacaagggtccattctctacttgaccatttttttctaccacactacaagaatggcaaattctcctctcaggttttctgtcactttctgttgttctctcatcattaacagcttagtaataaaaaatgcttgtaaagaaaagtagtgcacagaattggccttaaatctctgtaccttctattttctagaatcttgatgctttaagtcttggctgcatcca

SEQ ID NO: 581500 - DNA, 470 bp, Homo sapiens
acttctctgaattctgactgatatacggctagtggtccttttggcagagtttaaagggtaaaacttctggkaatttcagtgttcagtatacagcctttcacttaatctcactatttttggtacatttctccaactcacagcaagcttgagtcctgagttcactgtctctgtttcaccgttgcaataaatgaaatgtgaaatattctgcaagagcgagagctggtaattacaatgtagtggaagaagatacagagtactccaatcccacttttctagccagccccgcaattacctttcaatgaagaggctaatggctatgcttttctgaggctctgagatacaatcaatctgcttctgtgctttcttgaatggctggaatttcactttggatcgttcctcaaaactttatatgtttttatcagctttccacttacaaaatgtagttgatatttttattttaaatgtatttt

SEQ ID NO: 581501 - DNA, 467 bp, Homo sapiens
catctgaacataaagaaggaaggatgaagtttaatattaagactgaagttggaggaatactgtgttgttactttttcccttgaatccagttgtaaaatgcaaatgaacgttaggagcctcttgagaagctgcwtctgaaagaagtaagccgctatataagacgatagaaaatcccaaattgtcaggcaggagaggccacataaaggcatattgaacaacaaccccacgaagccaccagtttggagtaaatcatctcgaatattcaaccacaccaaaccttcagatggcagacctagtagaatctgactacaggctgatgagggaactcaagtatgaactttgctgcccaacttttaccaaattctgatctctaaaattttgacctaaaaatgttgttgttttaaggcattgagttttgagataatttgtttttcagcaagaaaaattaaaacaacattttttggagt

SEQ ID NO: 581502 - DNA, 467 bp, Homo sapiens
catctgaacataaagaaggaaggatgaagtttaatattaagactgaagttggaggaatactgtgttgttactttttcccttgaatccagttgtaaaatgcaaatgaacgttaggagcctcttgagaagctgcatctgaaagaagtaagccgctatataagacgatagaaaatcccaaattgtcaggcaggagaggccacataaaggcatattgaacaacaaccccacgaagccaccagtttggagtaaatcatctcgaatattcaaccacaccaaaccttcagatggcagacctagtagaatctgactacaggctgatgagggaactcaagtatgaactttgctgcccaacttttaccaaattctgatctctaaaattttgacctaaaaatgtkgttgttttaaggcattgagttttgagataatttgtttttcagcaagaaaaattaaaacaacattttttggagt

SEQ ID NO: 581503 - DNA, 526 bp, Homo sapiens
ttttgtacttattttgaccttctttaatttctttccacagtgttttatagtttttaaagtgtaagttttcacttcctttgcaaatacattcctgttttattctttgggattccaatataaatgaaattttaaaaattgattttaaatttctcccaaagaagattcactccacacctccaccccacaatcccccaaaataaattgatttttatatttgtattgcaaatgtatgaacatactacttacttttttatactgatcttgcattctgtagacttgctgaattcatctaatagttttttaaggggttacttaaaattttcatatacaagatcatgtcatctcaaaaagagatagttygacttcctcctttctaatcctgttaccttgtatttctttctcttactaattgccctggttagaacctcaattacaatgttgaatagaagtggtgaaagtggatattattttcttctacctgatattagaggaaagcatcctgtcttttggcattaagtataatgtt

SEQ ID NO: 581504 - DNA, 441 bp, Homo sapiens
caccagagaaacagccaaaaggaaggtagctaaaggaaaaagtagaagctcttgggagcctggataatgctgatcaactgggtagatgacatcagtaaagtgtaaatgccaaagtttatctaaaaccatcagtagatgaggcgaagttgattatataaaattgaaaactatactaaagatcattaytttaatgacatacaaaactataaatttaagagattcctgaaggaagtgattggaatgaaactgaatgaaaatccattcatagagatttttttaaaccacgtcgggtcaaagaaaagcaagttcatggtaagaaatcatcttacactgacaagggagggacgaattttccttttagcttttcctagatatgtttgtttcttgttggtcaattttcagtctatggagtgttttatagtgagaaattattcagcaagc

SEQ ID NO: 581505 - DNA, 441 bp, Homo sapiens
caccagagaaacagccaaaaggaaggtagctaaaggaaaaagtagaagctcttgggagcctggataatgctgatcaactgggtagatgacatcagtaaagtgtaaatgccaaagtttatctaaaaccatcagtagatgaggcgaagttgattatataaaattgaaaactatactaaagatcattattttaatgacatacaaaactataaatttaagagattcctgaaggaagtgattggaatgaaactgaatgaaaatccattcatagagatttttttaaaccacgtcgggtcaaagaaaagcaagttcatggtaagaaatcatcttacactgacaagggagggacgaattttccttttagcttttcctagatatgtttrtttcttgttggtcaattttcagtctatggagtgttttatagtgagaaattattcagcaagc

SEQ ID NO: 581506 - DNA, 622 bp, Homo sapiens
gcatgcttctgtaaggagcaatttacctgaagtttctctaattcgcattaaataaccttctccgtagagacagtgcatatattttggggtttggtgttttttgtttgttttttacttttattttaggttcaggggtacacgtgcaggtttgttacatgggtaaattgcatgttgctgaggtttgatgtgcaaataatccctacgcccaggtaataaacataatacataatagtttttcaacacttgcccctcctactctcacccaccttcyaccttccccactctagtagtccccagggcctattgttcccatccttgtggctatgtgtattcaatgtttagctcccactaataagtgaaaacatgcattattattttctgttcctgtattagtttgcttaggataatggcctccagttgcatccattttgctgcaaaggacattattttattcctttttatggctgcatagtattctatgatgtgtatgtaccacattttctttatccagtccactgttgatgggcatctaggttgatttcatgtctttgctattgtaaatagtgttgcaatgaatacaaaacatacaagtatttttgaaacaaatattatttgaaacaaa

SEQ ID NO: 581507 - DNA, 546 bp, Homo sapiens
gagaattcttgtgcagggcccttagaacacacatgaaaagataatttattaaaacattaaattcatataaaatcttcctatattttcttcctatcccacctcatttttgggctcagatcacaagctgcctaagtgcatggctttcagggtgtctgttgtaaaaacctcagctcactgacattacacgaagtgaacgagaggctgagaggggcatakggagttgagaaagggaaggagagagttctagacattaggaaggagtgggccctgtttctgggaggtgccctggagtaggtggcagcatctggagggaaacagaagtgcctaggggagcccggccttatcatgggactcctgggtctgccacagtgcttgtgctcaagcaggatatggaagctgccaaccaatgtttctagagacaccacacatgatggggggaaggctttgttgagattcttctccaatgcctgggtttttcattagaccctgggagtcactgcacaactctgggtggggagtaacctaagaataaataagcttacattt

SEQ ID NO: 581508 - DNA, 563 bp, Homo sapiens
tatgatctatttacttgcctatttttttgtgaatttggattttttgtaaattatacttttctactacattatattatctaaaggtttacattcattgagtaaggtaatttatattatgtatattaaatctaatcttcctatatttataactcccttatctttcctaattgcatttatttgtggcttttttttwaatctatatcaatcttctcactggtgtgtatatctatttttacaaagaacaaacttttgcctttattgatactttttttttctatttaatttgtttcttctcttacctttatttttgccttctattatatttgcatttagtttcttagggtttttttttctggcttctttatttagatgcttagtctattaatactgagaaatttgtcttctccaataattatacttaaggctataaattttcctctaaatactttagtcacaccccaaaaataaagttctagttattctctaattttcattattttttattgaggaatgtgtttttaaattttcaacgtctatatcttttaacttttgaaaaattaaaa

SEQ ID NO: 581509 - DNA, 482 bp, Homo sapiens
ggttgcttattattatctttctatgagaaaagaagacgaagaagcctgaaggacagggtgatgtggatgctgcttcccactggatggtcagggatgaacacagaagaggccctgaggaggtgacatctgagtagagaacagaacaaaatgacttaagtcagccacgtgaatatttagaacaattccattctaccaagtgggaggcaaacccagagactctaaacaggccatgatacatgagaaaattgaaccttaaaaataagatagttcaaattaacacaaatactttttatttgtaataaaatatattatataatttcaataaaaaagtaatatgtttgtcaaattaggaattaaaaagggactggtatatctagtagagaaatgttgtcatttamtgtgttctgaaacatttaatctactctgaaatgatttgggagttgaggtaaattatcctttacatgtcattttatactcaaatc

SEQ ID NO: 581510 - DNA, 551 bp, Homo sapiens
tcctgcccctccccataaccatcattctactctctgcttgcatgagttccactttatttttagattacacatrtaagtgagatcatgagttatttgtttttctgtacttggcttatttcatttgcataatggtttccagtgtcatcaatgttgtcacaaatgacagtgttacctctttttcttaaggttaaatagtattgcattatatatagatattgtatataaaaataatttattataatatatatgtatatatgccatattttctttgtccattcatccacggataaatggatcatcattacgttcattctatatcttggctattgtcaataacgctgcaatgaacatgggagttcagctgtatttttgttatacggtactgatttccgttcttttgggtatatacataagagggattgttgggtcacatggcagttctatttttaattttttgaggaatgcctaaattgttttccaccaaacataatactttccctgaaaaaggaatattggagtccactattattagtgtatttctatttttctct

SEQ ID NO: 581511 - DNA, 597 bp, Homo sapiens
ttttgccacttttatcatctatcatyttcaccacaaagtcattataaaatgcatctctagtatcagataaaaatttataggtgtttccactgtaggttgcaccaaagagttaaaacttctcaacacattatacatatattcatacatagggccaaagggataccattctcatttttcatcatcaaagcatttataagatttctatcttcttttgcttttgtgacctctagccagaaaggccaaagtaaataaaggtcaagatagatgtcaaatcaagcaattactaaacagggaacttggctgtgaccctcagattagaaatggtgacctgtcacagcaacaggggaaaaccctcctgcaactcctctcccatctatgaaatacaatctagatttgcagcctagactgaaaaaaaattgatacctttcatttgcgttttaatcttttccacccttcatattggggttgtcctcccattttctccttagctgtcagctctgaatcatagacatttgagagaaaaaattagtgggcatctgtgctagggagggaaatcatacctatcatgaaaaatgagaatgagccagcccaacacaa

SEQ ID NO: 581512 - DNA, 571 bp, Homo sapiens
ggcttggtgtctcacacctgtaatcccagtgctttgggaagtggaagcaggaggatcacttgaggccagragtttgagaccagcctgggcaacatagtgagaccctatctctgcaaaaagattaaaaatttaaaaaattagctggtggtagtagcatgcacctgtagtcccagctactcaggaggatgaggtgggagttcaaggctgcagtgagccattatcatgccactgcactccagcctcggtgacagagtaaggcaccatctttgaaaaaattttaataatttaaaaaaaagtttctaagtcaaaattttttaagaaaataaagtaagtggtaacgagtcatgcatacacacatgactagattttatctttgatgaattgagtacagagtcataggaaagtccacgtctgctaagtgagaggacgggtgagggcgtgaggctgcataaaagacagggactggtcacacatgcccctgaggcccatggtgagaggttgagctttctttccaaatgcaatgggaggccaaggaagagttgtgtgcaggtgtatgacagattggatttac

SEQ ID NO: 581513 - DNA, 571 bp, Homo sapiens
ggcttggtgtctcacacctgtaatcccagtgctttgggaagtggaagcaggaggatcacttgaggccaggagtttgagaccagcctgggcaacatagtgagaccctatctctgcaaaaagattaaaaatttaaaaaattagctggtggtmgtagcatgcacctgtagtcccagctactcaggaggatgaggtgggagttcaaggctgcagtgagccattatcatgccactgcactccagcctcggtgacagagtaaggcaccatctttgaaaaaattttaataatttaaaaaaaagtttctaagtcaaaattttttaagaaaataaagtaagtggtaacgagtcatgcatacacacatgactagattttatctttgatgaattgagtacagagtcataggaaagtccacgtctgctaagtgagaggacgggtgagggcgtgaggctgcataaaagacagggactggtcacacatgcccctgaggcccatggtgagaggttgagctttctttccaaatgcaatgggaggccaaggaagagttgtgtgcaggtgtatgacagattggatttac

SEQ ID NO: 581514 - DNA, 571 bp, Homo sapiens
ggcttggtgtctcacacctgtaatcccagtgctttgggaagtggaagcaggaggatcacttgaggccaggagtttgagaccagcctgggcaacatagtgagaccctatctctgcaaaaagattaaaaatttaaaaaattagctggtggtagtagcatgcacctgtagtcccagctactcaggaggatgaggtgggagttcaaggctgcagtgagccattatcatgccactgcactccagcctcggtgacagagtaaggcaccatctttgaaaaaawtttaataatttaaaaaaaagtttctaagtcaaaattttttaagaaaataaagtaagtggtaacgagtcatgcatacacacatgactagattttatctttgatgaattgagtacagagtcataggaaagtccacgtctgctaagtgagaggacgggtgagggcgtgaggctgcataaaagacagggactggtcacacatgcccctgaggcccatggtgagaggttgagctttctttccaaatgcaatgggaggccaaggaagagttgtgtgcaggtgtatgacagattggatttac

SEQ ID NO: 581515 - DNA, 597 bp, Homo sapiens
attgcgaatgtactaaatgccactaattgttcactttaagatggttaatcttatgtaaatttcacctgaaatattaaaaattatacacaaaacaaaagatccttaaaataatacccctatatagattgttagcttccaggaggattattcaaatgctacatttctaaagtgttagaatttctcccctggaagactttaaactaaggtaataatgctttttaacattcttgagcccttcttatgtatctgaaattatattaaaagttttatatacattatttccttaataatatccatcattaccttcaaaaactgaggtatgggccaggcagggtggctcacacctgtaatcccaggattttgggagsccaaggctggtggatcacttgaggtcaggagtttgagactagcctggccaacatggcaaaaccccgtctctactaaatatacaaaaaaacagcctggcgtggtggtgggcacctgtagtcccagctactcaggaggctgaggcaggagaatcgcttgaaccagggaggcagaggttgcagtgagctgagatggcagcactgcactccatcctgggtaacagagcacgac

SEQ ID NO: 581516 - DNA, 511 bp, Homo sapiens
atgccaattttctttgggttttcccttcgtattatttaataaaagtcaacctcagctatggttagagaaactaaggagaaaacatgtctaaccatgctcaaagcaccattttttaaaatcgactaaggagataagagtgcaattttgttacaagaatatattgattagtggtgaagtttgggctttttgtgtagccatcacctgaatagtagattgtacccattaagtaatttcttatctcgcacccacttcctgcctttccacccttgtgagtctccagtgtctattacttctctccttgtgtccatgcatacacattatttagctcccatttgtaagtgagaacatgtggtatttgactttctgtttctgagttgtttaactgataatggcctctagttccagtcatgttgccacaaaagacatgatttccttcatttttatggctgagtatatgtatgtatgtatgtatgtgtgtrtatatatatatatgtataccatattttcttta

SEQ ID NO: 581517 - DNA, 588 bp, Homo sapiens
agtaacagaaagatatttttattaaacattcctggtacacgtgaacttaaaatgtggcatatatatatgctgacatcctattaggtatttttcatatcattcatgtgctagatgaaatagaatgagaattagaatgaagcaaaacataccagattatgtaaataacagtgagaaagattgtggagtgagtgagttaataaaaaatccctgagcaccaaatctgcttctgagccttaggttaagcattggaatgatttcatccagagttaaaaatttatctttgaattaaatatctaaagggatacctcagaagactaaaattagaaccctagtttccttccaagggaaaagatcaaatacatgtacaaacttacatgtccttgtaattgagtaaccttcagtttgattgaraatttaacactgtaaataaaaggtaagttttaatttaccagctccgtatgggttgttggagaattaaatcattttggggagcccatatttgcataacacaatttattatttgtaattaactaacctttacaaagttccatttttaatttcctcctgtcaagatatctggaaaatgca

SEQ ID NO: 581518 - DNA, 588 bp, Homo sapiens
agtaacagaaagatatttttattaaacattcctggtacacgtgaacttaaaatgtggcatatatatatgctgacatcctattaggtatttttcatatcattcatgtgctagatgaaatagaatgagaattagaatgaagcaaaacataccagattatgtaaataacagtgagaaagattgtggagtgagtgagttaataaaaaatccctgagcaccaaatctgcttctgagccttaggttaagcattggaatgatttcatccagagttaaaaatttatctttgaattaaatatctaaagggatacctcagaagactaaaattagaaccctagtttccttccaagggaaaagatcaaatacatgtacaaacttacatgtccttgtaattgagtaaccttcagtttgattgagaatttaacactgtaaataaaaggtaagttttaatttaccagctccgtatgggttgttggagaattaaatcattttggggagcccayatttgcataacacaatttattatttgtaattaactaacctttacaaagttccatttttaatttcctcctgtcaagatatctggaaaatgca

SEQ ID NO: 581519 - DNA, 541 bp, Homo sapiens
aaagtgctgaaatggctaccattcaacaatatttcatcatatagtctgttttctattcatttcacatttattctctcatctttcatctatggacttcttttctatattttcactagataaatttttattataragagacaactttagaaggggaactctgccagagactcggtgatttattaacaatacagagtctgattcttattaagtacagaggtataattttcatctcctctccatcctttcccattttcaatttctgcttctaatttatgcccccaattcaccttctggtttatgcccccaattcaccttctggtctccacacaatgaccttcttcagccctcactatcataatatagaatccccagcatgaacaggcagactcgcccttctgcaaatagtgactcaaggtcacctgtctctttccattggggaatccagcatctttcatccatagcttccaagcatgagacaatgagatgatggagcataaaaagtgatgttttaagggaaaggcaaagatactctacagatcac

SEQ ID NO: 581520 - DNA, 455 bp, Homo sapiens
cttgcactgttgcccaggctggagtggatctcagctcactgcagcttcatcttcctgggctctagtgatcctcccacttcagcctctggagtagctgggactacaggcgtgtgccaccatgccccgctaatttttgtttttgtttgtagagatgggcttttgccatatcgcccagcctgtgacatttcttacaagaggrtgatttgtggtgtttgttttgagaaggagtcttgttctgtcatccaggctggagtgcagtggggcaatctcggctcactgcaacctccacctcctgggttcaagtgattctcctgcctcagcctcctgagtagctgggattatagtcatgtgtcacaatgccaggctaattattttgtatttttagtagagacaggattttgcatgttggcaaggctggcctcgaactcctgacctcaagtgatctgcccgcctca

SEQ ID NO: 581521 - DNA, 579 bp, Homo sapiens
cctacaaatgcctttggatagatccctggaaaggcatggctccaaatccctctctcttggtttctgttggctggctggtaggcatagcagtgaagtcaggctctatgtgaatgttgggatcctatccctctcctgtcccatgtgttccaacttgaccagtcaagactggctgggcagacacacaatccaactcaaaaccaccaacatcaagcagtttcttggtgtctctgttttgggkgcagaaatgacttttggggaaaggaatctatcctgggggaaagagagtggaagaaatttctattatctgtctacacctatctatgtatctatttatgtactctatctatctatctctctctctctctctctctatatatatatatatatgtatgtatgtatatcatcacgctgctgataaagacatacccaaggctaagcaacctataaaagaaagagttttaattggaattaaagttccacatggctgcggaagcctcacaatcatgatggaagcaaggaggagcaagtcacatcttacgtggatggtggctggcaaaaaatgagagagcttgtgcaggg

SEQ ID NO: 581522 - DNA, 365 bp, Homo sapiens
tgtttagatacataacctcttaccactgtgttcttattgcctgcagtattcagtacagtaatgtagtgcacagatttgtagcctgggagaaagaggctataccatataacctaaacgtggtaggctgtacaatctaggtgtttgtaatactctctgtgatgtttgcaaaatggtaaaattgcctacgaatacatctgttaaaacgtatccctatcattcagtgatgtgtgactgtactaaaatgctcaatgtaagtttcaatgccctccataaaattgttgtactgtgaaatacaaatctctcacccatggcctgaatatgtttgcaaamtaagcagatcatgggaaggagaatgtgctggcacc

SEQ ID NO: 581523 - DNA, 354 bp, Homo sapiens
ggcattttcattattttaagcttctagcacaatgaaagaatttctctttttcatgaacaggatcatacatgaaaaggaggaagagtgtcctatatcatatttattgttcaacaaaacactgctccacggcttaaattcagtttaaaaaagagaatttgttgaacatctaacacatacataaaaggcagtaaagacacatgagaagagggcaggatattgaagtatacagacttcaatgctgagttttatatcttaggragttactccacctgacagaagctcaatttcccctgatttaggaaggcgatgctaatgggtattgcataggtgtaagtataaaaatgttgtatttaa

SEQ ID NO: 581524 - DNA, 644 bp, Homo sapiens
tatcatttactaccataaaatatacacaaatctattataaaaagttaaaacttatcaaaatgtatgcacacaaaccgtacaagtcactatttgcagtcaagagaaacataaacaaacataaagatgctgtattaaaccacaactgcatacaattaacwatagcacatactgtactacccaaataattacttttattttatttttataaatgtgctaggtacaagcatacttttattatatgattgttttgttatttggatatattgctagtggtgaagtctgaggttttactgtactcatcaccccaatagtgaacattgtacccaataatcatttttcaaccctcactcccctccaaccctggcatcttttggaatattctccagcgtctactttccagtgtatgtactattataataattttgtagccaccccctgttgctactgtggtgagctcatgttgccagtatctgccatgagcacttggtctcttcagtaaattctgtatctaagtaaatagtgtgttctctcacagttctcttttcattgtgcttagtgtaatactataaatcttgaataacaccatgagaccaatacaaagtgccacaagtgatgctgggagtgctcccaagaagcagagaaaa

SEQ ID NO: 581525 - DNA, 644 bp, Homo sapiens
tatcatttactaccataaaatatacacaaatctattataaaaagttaaaacttatcaaaatgtatgcacacaaaccgtacaagtcactatttgcagtcaagagaaacataaacaaacataaagatgctgtattaaaccacaactgcatacaattaacaatagcacatactgtactacccaaataattacttttattttatttttataaatgtgctaggtacaagcatacttttattatatgattgttttgttatttggatatattgctagtggtgaagtctgaggttttactgtactcatcaccccaatagtgaacattgtacccaataatcatttttcaaccctcactcccctccaaccctggcatcttttggaatattctccagcgtctactttccagtgtatrtactattataataattttgtagccaccccctgttgctactgtggtgagctcatgttgccagtatctgccatgagcacttggtctcttcagtaaattctgtatctaagtaaatagtgtgttctctcacagttctcttttcattgtgcttagtgtaatactataaatcttgaataacaccatgagaccaatacaaagtgccacaagtgatgctgggagtgctcccaagaagcagagaaaa

SEQ ID NO: 581526 - DNA, 542 bp, Homo sapiens
aataattacttttattttatttttataaatgtgctaggtacaagcatacttttattatatgattgttttgttatttggatatattgctagtggtgaagtctgaggttttactgtactcatcaccccaatagtgaacattgtacccaataatcatttttcaaccctcactcccctccaaccctggcatcttttggaatattctccagcgtctactttccagtgtatgtactattataataattttgtagccaccccctgttgctactgtggtgagctcatgttgccagtatctgccatgagcacttggtctcttcagtaaattctgtatctamgtaaatagtgtgttctctcacagttctcttttcattgtgcttagtgtaatactataaatcttgaataacaccatgagaccaatacaaagtgccacaagtgatgctgggagtgctcccaagaagcagagaaaagttgtgacattatgagaaaaagttagattgcttcctatagattgagttcttcagctgcctgccatttcaaaataaatg

SEQ ID NO: 581527 - DNA, 509 bp, Homo sapiens
ggaattccctgatcactaatgaagttaagcatcaatattattcctttaatatgcaaatgctgaaaatacatttaactataatagatgtcaaaaatctgtaaatcaggctaggtgtggtaggcactcacctgtattcccagccactgggagacttgagtccaggagttccagactgtagtatgcaatgatcaagcctgtgaatagccactgcactccagcatggacaacatagcaagaccccatctttttttaaaraaaagagtctataagacaaaggtcctcataaattaagagaagccaagacagtcactgtgactgcagaatattttaatttttttttattatactttaagttctagggtacatgtgaacaacgtgcaggtttgttacatatgtatacatgtgccatgttggtgtgctgcacccattaactcatcttttacattaggtatatctcctaatgctatccctcccccagccccccaccacagagcaggccccagtgtgtg

SEQ ID NO: 581528 - DNA, 509 bp, Homo sapiens
ggaattccctgatcactaatgaagttaagcatcaatattattcctttaatatgcaaatgctgaaaatacatttaactataatagatgtcaaaaatctgtaaatcaggctaggtgtggtaggcactcacctgtattcccagccactgggagacttgagtccaggagttccagactgtagtatgcaatgatcaagcctgtgaatagccactgcactccagcatggacaacatagcaagaccccatctttttttaaagaaaagagtctataagacaaaggtcctcataaattaagagaagccaagacagtcactgtgactgcagaatattttaatttttttttattatactttaagttctagggtacatgtgmacaacgtgcaggtttgttacatatgtatacatgtgccatgttggtgtgctgcacccattaactcatcttttacattaggtatatctcctaatgctatccctcccccagccccccaccacagagcaggccccagtgtgtg

SEQ ID NO: 581529 - DNA, 412 bp, Homo sapiens
gcaataataaacattggctagcattgtaaggatggattattgtcttccaatgtgtggtcatacattttctttctgggatcttgagtgaaacatgtggatytagaacaagaacaaaatgatgttaccttgatgatctctatgtagggtcacactcaaggcatcttaaaatattttgctggccaacaaaagacacctcctgttctaattgggcattgtccttttctttaaactatgcagacaaacaatattataaagtgagaacatccgcataaaaaacctaaacataaatcttaatagtgagttcatgaaaattcttactgatgaaatggcaatgtcacagactgactgtttatgtccccccaaatttgtatattgaaatcctaacccccaagctactcgtgttaggagatag

SEQ ID NO: 581530 - DNA, 412 bp, Homo sapiens
gcaataataaacattggctagcattgtaaggatggattattgtcttccaatgtgtggtcatacattttctttctgggatcttgagtgaaacatgtggatctagaacaagaacaaaatgatgttaccttgatgatctctatgtagggtcacactcaaggcatcttaaaatattttgctggccaacaaaagacacctcctgttctaattgggcattgwccttttctttaaactatgcagacaaacaatattataaagtgagaacatccgcataaaaaacctaaacataaatcttaatagtgagttcatgaaaattcttactgatgaaatggcaatgtcacagactgactgtttatgtccccccaaatttgtatattgaaatcctaacccccaagctactcgtgttaggagatag

SEQ ID NO: 581531 - DNA, 412 bp, Homo sapiens
gcaataataaacattggctagcattgtaaggatggattattgtcttccaatgtgtggtcatacattttctttctgggatcttgagtgaaacatgtggatctagaacaagaacaaaatgatgttaccttgatgatctctatgtagggtcacactcaaggcatcttaaaatattttgctggccaacaaaagacacctcctgttctaattgggcattgtccttttctttaaactatgcagacaaacaatattataaagtgagaacatcygcataaaaaacctaaacataaatcttaatagtgagttcatgaaaattcttactgatgaaatggcaatgtcacagactgactgtttatgtccccccaaatttgtatattgaaatcctaacccccaagctactcgtgttaggagatag

SEQ ID NO: 581532 - DNA, 486 bp, Homo sapiens
tgaggcgggaggattgcttgagcccaggagtttgagaccaacctgggcaacacagtgagacctcatctctagaaaaaaaaaaatacaaagcctagttctgaacatccttttgtgtaatactaaaagataaaattttattttctatcttgtttaagatctatattctatacgggggatgtgtattaaggtcatttttaaaaagatactcaagraattgtcaacagtgattatcttaaggagagattctagatgtctgggggtaagagactagaggaaagagaattttatatttcatttttacctttatttaattttttgattttcttactgggtgcatgaattatatttttatgtcagcatgttttatcagataaataaaattatgagctatttctgttttctctcatttgttttatgtttaaataaaggaaaatgagatatgtctttttaaattagataatcttgagtccatgattattatgaaag

SEQ ID NO: 581533 - DNA, 486 bp, Homo sapiens
tgaggcgggaggattgcttgagcccaggagtttgagaccaacctgggcaacacagtgagacctcatctctagaaaaaaaaaaatacaaagcctagttctgaacatccttttgtgtaatactaaaagataaaattttattttctatcttgtttaagatctatattctatacgggggatgtgtattaaggtcatttttaaaaagatactcaagaaattgtcaacagtgattatcttaaggagagattctagatgtctgggggtaagagactagaggaaagagaattttatatttcatttttacctttatttaattttttgattttcttactgggtgcatgaattatatttttatgtcagcatgttttatcagataaataaaattatgagctatttctgttttctctcatttgttttatgtttaartaaaggaaaatgagatatgtctttttaaattagataatcttgagtccatgattattatgaaag

SEQ ID NO: 581534 - DNA, 580 bp, Homo sapiens
ctcaatcatctatccaaacttctcttttacagactccatgccaattaaccttctcctatgaaactattatttcttcacataggataaatatggttattgacacacaaactttcttagttacactgcaatccagttgtgcgttcctaaatttataccaattggatttagaatgatcattactaaagaggcttggccttatctcttgcaatttgcttcttccttcttaaattcaattcttgtaatgtaactataatttgggggtatctttttgcctcatattcaaattctctttcaaactgaggtacatttctgtatttctgtatttgtatattgcatataatagtatagaaaacaataatgagattatagtgtacataaaagttttgaagtataattaaatatttaatatataaatatattaaatatgggctgctgactcaccaagcctggtttggcttccatcacttgtgtaatcaatcacctgtattaaatcacctctgcttgaaagaygaagaatagtttctgatttataagcaaacactgaaagctcttctatttcttgtttgctaaacaagatttg

SEQ ID NO: 581535 - DNA, 391 bp, Homo sapiens
attagggtgatgctggcttcatagaatgaatcagggaggctttcttstttctctgtcttgtggaatagtgtgaaaggattggtatcatttcttctttgaatgaaagaagacattctttgaatgtctggtagaattctgctgtgaatctgtctggtcctcggtttttttggttggtaattttaaaattaccatttcgatcttgctgcttgctttattggtctgcttgaggtatctacttcttcctgattaagctaggagggttgtatttttccaggaatttatccaactctcctaggttttctagtttatgtgccaaaaggtgttcatagtacccttgaataatctttaatatttcagtagtgtcagttgtaatatcccctgtttcatttct

SEQ ID NO: 581536 - DNA, 514 bp, Homo sapiens
gtcttgtggaatagtgtgaaaggattggtrtcatttcttctttgaatgaaagaagacattctttgaatgtctggtagaattctgctgtgaatctgtctggtcctcggtttttttggttggtaattttaaaattaccatttcgatcttgctgcttgctttattggtctgcttgaggtatctacttcttcctgattaagctaggagggttgtatttttccaggaatttatccaactctcctaggttttctagtttatgtgccaaaaggtgttcatagtacccttgaataatctttaatatttcagtagtgtcagttgtaatatcccctgtttcatttcttagtgaggttatttggattttctctcttcttttcttggttaatcttgctaatggtctatcagttttatttatcttttcaaataaccaactttttgttttatttatgttttgtatttgttgttgttgttgttgttgttgtgtcgatttcatttagttctgctctgatcttggttattt

SEQ ID NO: 581537 - DNA, 593 bp, Homo sapiens
cttttagaattcacttcttcctcaggtacaccaattaatcttaggtttcatcgtttaacagaatgccagactccttggaggctttgctcatattttcttgttctttyttctttgtctttattggattgggttaaatcaaagaccttgtcttcgaattctgaatttctttcttctacttgttcaattctattgctgagactttccagagaatttcacatttctaaaaatgcgtccaaagtttcctgattttttattattattattattttttatttaagctatttccttgactgtttctccctttacttattgtatcattttttggattttcttgcattgggcttcacctttctctggcccctccctgattagcttaataactaacctgaattctttttcagataaatcagtgatttcttctttgtttggatccattggtgatgaactggtgtgattatttgggggttgtggaagagtcttgttttgtcagattaccagggttggtttcctggttccttctcatttaggtagactctgtcagaggaaaggtctagggctgaagactgttgttcagactcttttgtcacacagag

SEQ ID NO: 581538 - DNA, 593 bp, Homo sapiens
cttttagaattcacttcttcctcaggtacaccaattaatcttaggtttcatcgtttaacagaatgccagactccttggaggctttgctcatattttcttgttcttttttctttgtctttattggattgggttaaatcaaagaccttgtcttcgaattctgaatttctttcttctacttgttcaattctattgctgagactttccagagaatttcacatttctaaaaatgcgtccaaagtttcctgattttttattattattattattttttatttaagctatttccttgactgtttctccctttacttattgtatcattttttggattttcttgcattgggcttcacctttctctggcccctccctgattagcttaataactaacctgaattctttttcagataaatcagtgatttcttctttgtttggatccattggtgatgaactggtgtgattatttgggggttgtkgaagagtcttgttttgtcagattaccagggttggtttcctggttccttctcatttaggtagactctgtcagaggaaaggtctagggctgaagactgttgttcagactcttttgtcacacagag

SEQ ID NO: 581539 - DNA, 544 bp, Homo sapiens
ggcatggcttcctgtgagccaaagtgcattgattgttgtctctcctctgggtctagccacccagcaggtctacctggctttgggctggtactaggggttgtctgcatagagccctgtgatgtgaaccatctatgggtctctcagccatggataccrgcgcctgttccagtggaggtggtgaagggtgcaatagactctgtgagggtccttagctttagtggtttaatgctctatatttgtgctggttggcctcctgccaggaggtgttgctttccagaaagcatcagctgtagtagcatggaggaactggcagcgggcagggccctaggactcccaagattatatgtcctttgtcttccactaccaacttaaacatttgtgagaatatcaatatcagaaatttatgtgtaatcgaatttattctggtagcctaaattctggtagcttattttcttatatgcttcaatctttataatttagttctcacatgagggagatctaatattggaaatactttcaatctgtatgtttatgtatttattct

SEQ ID NO: 581540 - DNA, 581 bp, Homo sapiens
cagctagcttaggagtttcaagactttaggatttcacaaatcaataaaattaaaaagaaaaaaatgtaaggtttaacatagagatatcacttaaacaatgactactattktgataaaaggacattcaacggtaaaggtgtgggaaatataacctcagagatgaaaatgtaatagcttgggccaagctcactaagtgtccttatttttgtgtttccaccatggatggctgacactgtcacctctggcatgagtccacatcagcaccctggaaatgcctcctatagggtaatcctgcagaaggcactagcacccccagactcgggcagacagctggctagacagtgctgctgggagagtactgcctctcaaaacccgtctctctgtatcagctgcccagtgtttctgtttctgcctacttggaggaacaaaagcaatcctgctcctctccccagagacaggtaattatgccgcattttctttcctgtttcttacatgacaagcactcaaaacttgtcactcttttggttctctccagtgccctccaaacagtccatgttcaagccaaagaggaatcacttctg

SEQ ID NO: 581541 - DNA, 514 bp, Homo sapiens
ccttgattagtctgaattaaacagccatattccagaatattaaatatagaatatgaagaaaaactgtcatctccrgtcaatgaagtattttaacttttgagttaatactttttcaaattaatttttttctcttcaaaatgcatcacactacttaactcacttcaaggactggcacagccatcaaccaatgtcatgggggaaaaagccttgtcattttaaggtattaaacagacaatgaaatctgccacaattttggtatttcttctccataagaacataataaattaatggagttttttcttttgcttttttctaagcaacaaagttttatgatatcatgaatgaaaaggtccttaattaccttttggtctacatgtcaaggacttctccctcataaaaccggtagtaatcacaacaaaaggaattaaccataaaaagaggtattaaaaatgtatattgatttttaaatgcaagcatattatttctttacattaaaatttttagatttaaaaag

SEQ ID NO: 581542 - DNA, 514 bp, Homo sapiens
ccttgattagtctgaattaaacagccatattccagaatattaaatatagaatatgaagaaaaactgtcatctccagtcaatgaagtattttaacttttgagttaatactttttcaaattaatttttttctcttcaaaatgcatcacactacttaactcacttcaaggactggcacagccatcaaccaatgtcatgggggaaaaagccttgtcattttaaggtattaaacagacaatgaaatctgccacaattttggtatttcttctccataagaacataataaattaatggagttttttcttttgcttttttctaagcaacaaagttttatgatatcatgaatgaaaagrtccttaattaccttttggtctacatgtcaaggacttctccctcataaaaccggtagtaatcacaacaaaaggaattaaccataaaaagaggtattaaaaatgtatattgatttttaaatgcaagcatattatttctttacattaaaatttttagatttaaaaag

SEQ ID NO: 581543 - DNA, 514 bp, Homo sapiens
ccttgattagtctgaattaaacagccatattccagaatattaaatatagaatatgaagaaaaactgtcatctccagtcaatgaagtattttaacttttgagttaatactttttcaaattaatttttttctcttcaaaatgcatcacactacttaactcacttcaaggactggcacagccatcaaccaatgtcatgggggaaaaagccttgtcattttaaggtattaaacagacaatgaaatctgccacaattttggtatttcttctccataagaacataataaattaatggagttttttcttttgcttttttctaagcaacaaagttttatgatatcatgaatgaaaaggtccttaattacmttttggtctacatgtcaaggacttctccctcataaaaccggtagtaatcacaacaaaaggaattaaccataaaaagaggtattaaaaatgtatattgatttttaaatgcaagcatattatttctttacattaaaatttttagatttaaaaag

SEQ ID NO: 581544 - DNA, 574 bp, Homo sapiens
caaagataacattttaaagaaaaacaagacaaatgtcaaacaatamaaggatatattttgaattaggtaattcaatggtgcatgcataattttaccaatcaagtaaccaaaacttaagacaaggtacatagtacttaccaggtttctagaatatcatcaaattaacaagtactatctcattaatcacataaaaataccaccaggaattaaaataaccagaaataagaatgtgactactcttggggtaagagataggtaacggaataacggtattttggaaaagccacacaagcaatagactggtttcatttttaagtcacaaactcaacccacacacattgaagtccagcaatccaactcattctctccagcaaacactttatttttttccccctccaggattaccctcaggtgttctttcttacccatcaaatctctaacctagctcaggtaatcactatgctgatttcactgagcagcaaccactgcaggtcaattacctcactttcataatttcaaatcaacttgaatctgtacctatgtcttcttccctactattagtagggaagtgttg

SEQ ID NO: 581545 - DNA, 640 bp, Homo sapiens
ctattctatttcaaatcttcaattgcttctcagagcacttaaaagacaaacctttcccagtgcctttctccagctcatcttgtggcacttgtctccctgctgctatgctccagctattctggcttccttgctgtccttcaaacatgccaagctctttatcaatcagagcccaactgactcagaacacttcactataccattccagcccttcaataaatgtctggcattttctttctttctttttttttgagatggagtctcgctctgtcacccaggctagagtgcggtggtgcgatctcggctcactgcaacctctacctcccaggttcaagcaattctcttgcctcragcctcctgagtagctgggattacaggcatgcaccaccacgtccggctaatttttgtatttttagtagagaaaggttgtctccaagttgctcaggctggtctccaactcccgacctcaagtgatctgcccaccttagcctcccaaagtgctgggattacaggtgtgaaccactgcgctgggccaatattatttttttaagaaaatactaataaaaaggaacaattgatattaaataaaatttaactattgactataaatatatgtttcaagagatttgagtgaaaataccat

SEQ ID NO: 581546 - DNA, 436 bp, Homo sapiens
acacccggctgatttttgtatttttagtttcatcatgttggccaggctggtcttgaactctcgacctcaggtgaccctccccccttggcctctcaaagtgctgggattacaggtgtgagccattgcgcctggctgctgctcctttttttttttgtgatggacctgggagatctttaggaatgagggaaatgatcstttctttgaataaggcagaatactaaagactagccagccctcaggctcatggtggttgctgctattctgttgaatgtgaaccatagcctttagaaaggagcaagtctttgtggaatacacaggatttgaagtgcaacaaaggggtggaaacccagctgaccatgataccttcaagtgagtttttccactgaatttgattattttcccatttggcacttctttctgggttttttaagcagcc

SEQ ID NO: 581547 - DNA, 436 bp, Homo sapiens
acacccggctgatttttgtatttttagtttcatcatgttggccaggctggtcttgaactctcgacctcaggtgaccctccccccttggcctctcaaagtgctgggattacaggtgtgagccattgcgcctggctgctgctcctttttttttttgtgatggacctgggagatctttaggaatgagggaaatgatcctttctttgaataaggcagaatactaaagactagccagccctcaggctcatggtggttgctgctattctgttgaaygtgaaccatagcctttagaaaggagcaagtctttgtggaatacacaggatttgaagtgcaacaaaggggtggaaacccagctgaccatgataccttcaagtgagtttttccactgaatttgattattttcccatttggcacttctttctgggttttttaagcagcc

SEQ ID NO: 581548 - DNA, 436 bp, Homo sapiens
acacccggctgatttttgtatttttagtttcatcatgttggccaggctggtcttgaactctcgacctcaggtgaccctccccccttggcctctcaaagtgctgggattacaggtgtgagccattgcgcctggctgctgctcctttttttttttgtgatggacctgggagatctttaggaatgagggaaatgatcctttctttgaataaggcagaatactaaagactagccagccctcaggctcatggtggttgctgctattctgttgaatgtgaaccatagcctttagaaaggagcaagtctttgtggaakacacaggatttgaagtgcaacaaaggggtggaaacccagctgaccatgataccttcaagtgagtttttccactgaatttgattattttcccatttggcacttctttctgggttttttaagcagcc

SEQ ID NO: 581549 - DNA, 606 bp, Homo sapiens
aaaattaccttaccctttatartaaaaccttccattgtaaacttctggcaataactgatctgtgttcctctggcattgcttttttttcagaattttatacaaatggaatcgttcaggatgtagccttttgagtctggctactttcatatactgtatcaacagttattccttttaattgccaaatagtaatccattgtataaatactacatggtttgcttattggtttgtcattggaggaatatggactattttcactttttgataaattataagtggattggaattcacaaagtgctttttgtctgagcataggttttcatttcacttgtgcaaatgcctaagggtaggattgccgagtcacatggtccatgtacgtttgactttatcagaacctgccaaattgtcttccaaagtgctgtgccacttctgtttctttaataaatacaggggtattcaagctgtctgtttcttcttgagtttcggtagtctgtctttcaaggaattgatctatttcacctaatttgtagaatttagaagcatatagttgtttgttttgtttttgtagtgtccattctagccttctagtgtctacaggatttgtaata

SEQ ID NO: 581550 - DNA, 339 bp, Homo sapiens
gttgttgtttggttggttggtttgtttctcttgtatgtttcatggaactttttggtgaaggcacttgggcctggaaatttctttatgggaagttttttcattactgattcaatatatttaatctatgtaagttttttttctactttttgagtsaattttgatttttttcctagaaattcatatctcaccaagtatggtggcttatgcttgtaatcccagcactttgggaggctcaggtgggaggaccacttgactacagtagttcaagaccagcctgggcaatatagtgagactccatctctacaaaaaaaataaaaattagcttggtgtggtggtggg

SEQ ID NO: 581551 - DNA, 339 bp, Homo sapiens
gttgttgtttggttggttggtttgtttctcttgtatgtttcatggaactttttggtgaaggcacttgggcctggaaatttctttatgggaagttttttcattactgattcaatatatttaatctatgtaagttttttttctactttttgagtcaattttgatttttttcctagaaattcatatctcaccaartatggtggcttatgcttgtaatcccagcactttgggaggctcaggtgggaggaccacttgactacagtagttcaagaccagcctgggcaatatagtgagactccatctctacaaaaaaaataaaaattagcttggtgtggtggtggg

SEQ ID NO: 581552 - DNA, 339 bp, Homo sapiens
gttgttgtttggttggttggtttgtttctcttgtatgtttcatggaactttttggtgaaggcacttgggcctggaaatttctttatgggaagttttttcattactgattcaatatatttaatctatgtaagttttttttctactttttgagtcaattttgatttttttcctagaaattcatatctcaccaagtatggtggcttatgcttgtaatcccagcactttgggaggctcaggtgggaggaccacttgactacagtagttcaagaccagcytgggcaatatagtgagactccatctctacaaaaaaaataaaaattagcttggtgtggtggtggg

SEQ ID NO: 581553 - DNA, 433 bp, Homo sapiens
tccttccccctcctcctcctttttacttttcttcctcttcctttctcttcttctttctctccttcattatccctttcgctgtttctctttctccctttctcttttttcttttctttcaattttctcaattactaagagatgtttaagtacccttascatgttagtagatacggttatttctccctttagttctcttttgagatttatagtcactcaaataaagagataacccaaacataagcgtcacaaacaggctttcataccattcttaatttggtcctgtaattcttcattgctgtattaattttctgatgcttttaaggatgttttataacaaattgtgtagctttttccaatggaatgtttattctgaattatctaattcatattgtaagtatagagggagtttaatataaaattattaaactaatat

SEQ ID NO: 581554 - DNA, 595 bp, Homo sapiens
tcgctgtttctctttctccctttctcttttttcttttctttcaattttctcaattactaagagatgtttaagtacccttagcatgttagtagatacggttatttctccctttagttctcttttgagatttatagtcactcaaataaagagataacccaaacataagcgtcacaaacaggctttcataccattcttaatttggtcctgtaattcttcattgctgtattaaytttctgatgcttttaaggatgttttataacaaattgtgtagctttttccaatggaatgtttattctgaattatctaattcatattgtaagtatagagggagtttaatataaaattattaaactaatatttgtgaaagaatgtatttgtgcatttaacaaatatgttaatcctcagactgttattgggcagctcagcatacaggaataaaaataacacaatttttatgtgtacaatatttatggaatacgttactggacccaataaataatttagttaataacatgacaaagaacagaaattgtatacaccatagagcatagtaatggaataatgaatgattaaagttattaatattaggtagaaa

SEQ ID NO: 581555 - DNA, 595 bp, Homo sapiens
tcgctgtttctctttctccctttctcttttttcttttctttcaattttctcaattactaagagatgtttaagtacccttagcatgttagtagatacggttatttctccctttagttctcttttgagatttatagtcactcaaataaagagataacccaaacataagcgtcacaaacaggctttcataccattcttaatttggtcctgtaattcttcattgctgtattaattttctgatgcttttaaggatgttttataacaaattgtgtagctttttccaatggaatgtttattctgaattatctaattcatattgtaagtatagagggagtttaatataaaattattaaactaatatttgtgaaagaatgtatttgtgcatttaacaaatatgttaatcctcagactgttattgggcagctcagcatacaggaataaaaataacacaatttttatgtgtacaatatttatggaatacgttactggacccaataaataatttagttaataacatgacaaagaacagaaattgtatacacyatagagcatagtaatggaataatgaatgattaaagttattaatattaggtagaaa

SEQ ID NO: 581556 - DNA, 646 bp, Homo sapiens
tactatatatccatactatgttacagtaataaatcttagccattacaaccctaagctgatcccatgagtccttctagcaaatctccaaacatggaggcagtcttgtggatccctgacacaaatatagtgttgtgatctcttaaggtttatccttcctcttaaactataaagagctggctgggcacagtggctcacgcttgtaatgycagcactttgggaggccgaggcgggtggatcacgaggtcaaaagattgagaccatcctagtcaacatggcgaaaccccgtctctactaaaactacaaaaattagcagggcgtggtggcacacatctgtagtcccagctactcgggaggctgaggcaggagagtcgcttgaaccagggaggcagaggttgcagtaagccgagatcgcaccactgcactccagcctggtgacagagggaaacttcatctcaaaaaaaagaaagaaactataaagggctgggtgcagtggctcacgcctataatactagcaccttggcaggcccaggtgggagaattgcttgggcccaggaattgagaccaacctggacaacagagcaagaccctgtctcttaaaaaaaaaaaaaaagaaaagttggccgggtgtgatggatcacacctgtag

SEQ ID NO: 581557 - DNA, 646 bp, Homo sapiens
tactatatatccatactatgttacagtaataaatcttagccattacaaccctaagctgatcccatgagtccttctagcaaatctccaaacatggaggcagtcttgtggatccctgacacaaatatagtgttgtgatctcttaaggtttatccttcctcttaaactataaagagctggctgggcacagtggctcacgcttgtaatgccagcactttgggaggccgaggcgggtggatcacgaggtcaaaagattgagaccatcctagycaacatggcgaaaccccgtctctactaaaactacaaaaattagcagggcgtggtggcacacatctgtagtcccagctactcgggaggctgaggcaggagagtcgcttgaaccagggaggcagaggttgcagtaagccgagatcgcaccactgcactccagcctggtgacagagggaaacttcatctcaaaaaaaagaaagaaactataaagggctgggtgcagtggctcacgcctataatactagcaccttggcaggcccaggtgggagaattgcttgggcccaggaattgagaccaacctggacaacagagcaagaccctgtctcttaaaaaaaaaaaaaaagaaaagttggccgggtgtgatggatcacacctgtag

SEQ ID NO: 581558 - DNA, 646 bp, Homo sapiens
tactatatatccatactatgttacagtaataaatcttagccattacaaccctaagctgatcccatgagtccttctagcaaatctccaaacatggaggcagtcttgtggatccctgacacaaatatagtgttgtgatctcttaaggtttatccttcctcttaaactataaagagctggctgggcacagtggctcacgcttgtaatgccagcactttgggaggccgaggcgggtggatcacgaggtcaaaagattgagaccatcctagtcaacatggcgaaaccccgtctctrctaaaactacaaaaattagcagggcgtggtggcacacatctgtagtcccagctactcgggaggctgaggcaggagagtcgcttgaaccagggaggcagaggttgcagtaagccgagatcgcaccactgcactccagcctggtgacagagggaaacttcatctcaaaaaaaagaaagaaactataaagggctgggtgcagtggctcacgcctataatactagcaccttggcaggcccaggtgggagaattgcttgggcccaggaattgagaccaacctggacaacagagcaagaccctgtctcttaaaaaaaaaaaaaaagaaaagttggccgggtgtgatggatcacacctgtag

SEQ ID NO: 581559 - DNA, 635 bp, Homo sapiens
attctgttctttcccacattctgtctcctctgtgctcactcatatacaaaatgacattttctccttatagccaaaagaaasaaaacaagtgtcatatttaatgcaatcggtaataatcgagagtcagcactgctcactttcaagcatttcaggatagaggctttctggggaaccttttaagtggtatcgtgtgcttggttttaaatatggacaggtctcaatacttcactagttgtatctaaggttcttggttttttctttttaagaactcagtcttaataaaacttacatatttgaataaagtgtcatggccactggaagcaagcatggaggtatagctgtacagcagaggtcttaaactgtatactccacaaggaaatcttttctagtattgccataccatgtaatataaatactaacctcagtttcaataataggttgtgaaccatgagtgatttttataccattctcccctgcccttcagacatcactgtgttatatcattgtcagtaaaatgtcagtatagtaagcaaatcaacattatctccttcagaattctttgttgataactacactagtatttattttatagggtaatacaggtttttgtgaatttaggaatcaaaatgaaagat

SEQ ID NO: 581560 - DNA, 635 bp, Homo sapiens
attctgttctttcccacattctgtctcctctgtgctcactcatatacaaaatgacattttctccttatagccaaaagaaagaaaacaagtgtcatatttaatgcaatyggtaataatcgagagtcagcactgctcactttcaagcatttcaggatagaggctttctggggaaccttttaagtggtatcgtgtgcttggttttaaatatggacaggtctcaatacttcactagttgtatctaaggttcttggttttttctttttaagaactcagtcttaataaaacttacatatttgaataaagtgtcatggccactggaagcaagcatggaggtatagctgtacagcagaggtcttaaactgtatactccacaaggaaatcttttctagtattgccataccatgtaatataaatactaacctcagtttcaataataggttgtgaaccatgagtgatttttataccattctcccctgcccttcagacatcactgtgttatatcattgtcagtaaaatgtcagtatagtaagcaaatcaacattatctccttcagaattctttgttgataactacactagtatttattttatagggtaatacaggtttttgtgaatttaggaatcaaaatgaaagat

SEQ ID NO: 581561 - DNA, 441 bp, Homo sapiens
tattttcaaactttatggttttagaaccttaacactctttaaaattactggggacgccatagtttttgttcatgaggattttaactatggactattcagcattttagaaattaaaactaggaacattttgtaacacaagactacagaagcacaacctgtacaatgtcaatgtaatattatgatacaacatgtagcttctataaacaccactgtataattgtgaataaattaaagtgaaaaaaggcaaattaaatcttagtattatttaaacttgttttaactttacagacccactggggttccctagtccacattttggtagctgcagtcctagcattagtttaaccctatacttaagacttggcctttctgggatcactactgaattctaccccctgttcaccagtgtctttgtaytctgactggttgtgcttcacttgt

SEQ ID NO: 581562 - DNA, 600 bp, Homo sapiens
gtgtatgaacatgcccaacccagtattgggcctccgtaggcgctcaataaatgttagttgattgcccctttctgcttctaggtacataagcaccatattaatttatatagtatatttgattatgttaggttaatgcataaatcacatggattggttgtttcttttacagatcactaaagtggttcttagcaaaggttggaggtgtcttgagtgcactgtgtgtgaggcctgtgggaaggcaactgacccaggaagattcctgctgtgtgatgattgtgacataagttatcacacctactgcctagaccctccattgcagacagttcccaaaggagrctggaagtgcaaatggttctctagggtttgtttgccttgttagtctttcaagttcagagctttctcataccactttagtttttaaaaattagccatacctatttaattgaataaaacacatattgtatgatagatacctctgatcaggaagattttcccatacacattaaatcatttgccccattatgttcgtatgcagcttcatgaagggcagtaactgaatacctaagaaagatagaattgaggcttttgggggggatttgg

SEQ ID NO: 581563 - DNA, 586 bp, Homo sapiens
taatataagcccaaaaaagacaaggaatatgtttttgattctgtttctatccccgggccctagaatagggtctgggagatagttgcagcagaatccctagctgaaatggcaatcttgtgctaactggaaraaaagagctcccttgcccccatccctgtttttttttttttttttttttttttttaaaagggaatctccctttgttacccaggctggagtgcaggggggggatttcaaaaaaagccctttcttgatatacttggccatcttctgctaaaagttttttatactcattatacaaacccaccctatttgttacttacacaccctgtatggccctgcttccaccccacaaaaatgcttggggaatgaatgaatggattggtggaagtcagggggactggaacatctgaaaacaaatgtcagtgtgtgtggccagcgtctgtgcacctttcttgattgattgaatcttctgtgcattgatttcatggtattgggcacagaatccccttttttgctcattaccaacaaagatttgtcaagcacccactcactgtgttcacttggggaattcagacatgaacaa

SEQ ID NO: 581564 - DNA, 529 bp, Homo sapiens
attgcagacagttcccaaaggagactggaagtgcaaatggttctctagggtttgtttgccttgttagtctttcaagttcagagctttctcataccactttagtttttaaaaattagccatacctatttaattgaataaaacacatattgtatgatagatacctctgatcaggaagattttcccatacacattaaatcatttgccccattatgttcgtatgcagcttcatgaagggcagtaactgaatacctaagaaagatagaattgaggcttttgggggggatttggatttcaggtgtgttgggtgcagacagtgtggagcaacatctgcaggtctaagatgtggagggcagaacaattgcacacagtgcgctccttgtgcaagyttatcttcctgtccagtgtgctattgaaactatagagaagaagatcttattctgcaatgaagacaatgtgataggtattgtgctattttttcatctttttaaagcttttctctttgaaatgtagcaaaaaaaaaaaaaggaaa

SEQ ID NO: 581565 - DNA, 529 bp, Homo sapiens
attgcagacagttcccaaaggagactggaagtgcaaatggttctctagggtttgtttgccttgttagtctttcaagttcagagctttctcataccactttagtttttaaaaattagccatacctatttaattgaataaaacacatattgtatgatagatacctctgatcaggaagattttcccatacacattaaatcatttgccccattatgttcgtatgcagcttcatgaagggcagtaactgaatacctaagaaagatagaattgaggcttttgggggggatttggatttcaggtgtgttgggtgcagacagtgtggagcaacatctgcaggtctaagatgtggagggcagaacaattgcacacagtgcgctccttgtgcaagtttatcttcctgtccagtgtgctattgaaactatagagaagaagatcttattctgcaatgwagacaatgtgataggtattgtgctattttttcatctttttaaagcttttctctttgaaatgtagcaaaaaaaaaaaaaggaaa

SEQ ID NO: 581566 - DNA, 529 bp, Homo sapiens
attgcagacagttcccaaaggagactggaagtgcaaatggttctctagggtttgtttgccttgttagtctttcaagttcagagctttctcataccactttagtttttaaaaattagccatacctatttaattgaataaaacacatattgtatgatagatacctctgatcaggaagattttcccatacacattaaatcatttgccccattatgttcgtatgcagcttcatgaagggcagtaactgaatacctaagaaagatagaattgaggcttttgggggggatttggatttcaggtgtgttgggtgcagacagtgtggagcaacatctgcaggtctaagatgtggagggcagaacaattgcacacagtgcgctccttgtgcaagtttatcttcctgtccagtgtgctattgaaactatagagaagaagatcttattctgcaatgaagacaatgtgatagrtattgtgctattttttcatctttttaaagcttttctctttgaaatgtagcaaaaaaaaaaaaaggaaa

SEQ ID NO: 581567 - DNA, 586 bp, Homo sapiens
taatataagcccaaaaaagacaaggaatatgtttttgattctgtttctatccccgggccctagaatagggtctgggagatagttgcagcagaatccctagctgaaatggcaatcttgtgctaactggaaaaaaagagctcccttgcccccatccctgtttttttttttttttttttttttttttaaaagggaatctccctttgttacccaggctggagtgcaggggggggatttcaaaaaaagccctttcttgatatacttggccatcttctgctaaaagttttttatactcattatacaaacccaccctatttgttacttacacaccctgtatggccctgcttccaccccacaaaaatgcttggggaatgaatgaatggattggtggaagtcagggggactggaacatctgaaaacaaatgtcagtgtgtgtggccagygtctgtgcacctttcttgattgattgaatcttctgtgcattgatttcatggtattgggcacagaatccccttttttgctcattaccaacaaagatttgtcaagcacccactcactgtgttcacttggggaattcagacatgaacaa

SEQ ID NO: 581568 - DNA, 586 bp, Homo sapiens
taatataagcccaaaaaagacaaggaatatgtttttgattctgtttctatccccgggccctagaatagggtctgggagatagttgcagcagaatccctagctgaaatggcaatcttgtgctaactggaaaaaaagagctcccttgcccccatccctgtttttttttttttttttttttttttttaaaagggaatctccctttgttacccaggctggagtgcaggggggggatttcaaaaaaagccctttcttgatatacttggccatcttctgctaaaagttttttatactcattatacaaacccaccctatttgttacttacacaccctgtatggccctgcttccaccccacaaaaatgcttggggaatgaatgaatggattggtggaagtcagggggactggaacatctgaaaacaaatgtcagtgtgtgtggccagcgtctgtgcacctttcttgattgaytgaatcttctgtgcattgatttcatggtattgggcacagaatccccttttttgctcattaccaacaaagatttgtcaagcacccactcactgtgttcacttggggaattcagacatgaacaa

SEQ ID NO: 581569 - DNA, 538 bp, Homo sapiens
tcagtaagtctttctggagaagtgattgagctggctctgcaggatggagaggtttgaaaattgctaagtgctttgtacaacttataaaaatccacgttgcccagtttccaagcagtctcatgttcagtagacaaaaggcaattttcaaactgaaattctttacttgcatttctatttctattttccttccttcctttcttccttccttccttccttctttccttcccccaccccaccccctgagtcttgctctgttgtccagcagactggagtgcagtggtgtratctcggctcactgcaacctccaactcctgggtttgagtaattctcctgcctcagccacctctctatctttctgtagctgggattacagacacatgccaccatgcctggctaacccagatgcggtttcaccatgttggccaggctcttcttgaactcctgacttcaagtgatccacctgcctctgcctcccaaagtactgggattacaggtgtgggccaccgcgcccggccctttacttgcatttcttaagttg

SEQ ID NO: 581570 - DNA, 511 bp, Homo sapiens
atgccatggcaatattaaaaggtaagaattcaatccatacgtgcttgaggtaaataggagaaacctagaatttatgtaaacagtgagaagattggatgcgttttccgtctcatattttaatactggcagcatattatatatgtcaaaccatcaggcattcagaaatacatgcttatgaaaattttttgcaccatcagacaaaagacaagggtagaagacatttgtaaccctataaacactagtaaattaaaaacagaaggaccttaatgtcctaacatacctgtgttgtgaaaggctgccctgtgaaataccggatttcttaaacatattttaaaaatcataggcgtcaatattttttagatatccttttaaattttctcttgttattttacawtgcctatttatttatttagtggctctgctgattttgatgtatatccaaaactttatattttctttaaaagatgttttatacaactttacgtaaaatgtttctgtatcttcacattct

SEQ ID NO: 581571 - DNA, 586 bp, Homo sapiens
agaaaattaaaaatttatatccttaactcagataasaataatccaaattaaaatttgatttcattacataatttaaaatgacatcagaatgctagtaaaaattatacaaaaaatttatgtaatcttattaagctgtgggactttattagcataaattcaaatacaggaaccaaagtaagattgagacctatagtcaaaggttaaaatgtacacattataggggcatgattaaactaatttaaagcataataacatggagaaatattgcaaaacatacattttactgaattaattgttagtatctaatcattttgtgagaaccaaattaaaaagtagctacacacgcacacacccacacacaagtgcaatactgtcaaataaacgatgttcagctacactagaaatcacacctgtgttttctccacagaaaagattaaaaatcacaataatttttattgtacatatggaggtaaagatactcaaaatattaccctaaaatacattatttttttgagatggagttttgtttttattgcccaggctagagtgcaatggcacaatcttggctcactgcaacttcagcctc

SEQ ID NO: 581572 - DNA, 395 bp, Homo sapiens
ctgcgcgcgaccgactttggaactttaataaattgactggacattatgcatttctctgttgtrtctatgaaaacaataaaaataaaagtcataattttaaaacaagaagacagaaagtgataggagaaaatgagacattatatatatatatatatatatatatatatatatatatatatatacacacacaacaaattactaatacaaaattaagtataaatgatcaaagattaacttaaacctaagtagacaatgtttttgttaaaatacaaagattggcaaaatttaaaacatccatctctatcatagttacaagagacacagctaatatataaatttacagaaactttgaagttcaaacaatacagatactgtgtatatatgatatacataca

SEQ ID NO: 581573 - DNA, 395 bp, Homo sapiens
ctgcgcgcgaccgactttggaactttaataaattgactggacattatgcatttctctgttgtatctatgaaaacaataaaaataaaagtcataattttaaaacaagaagacagaaagtgataggagaaaatgagacattatatatatatatatatatatatatatatatatatatatatatacacacacaacaaattactaatacaaaattaagtataaatgatcaaagattaacttaaacctaagtagacaatgtttttgttaaaatacaaagattggcaaaatttaaaacatccrtctctatcatagttacaagagacacagctaatatataaatttacagaaactttgaagttcaaacaatacagatactgtgtatatatgatatacataca

SEQ ID NO: 581574 - DNA, 413 bp, Homo sapiens
gtgaattcctcaaactcttgcatattcaaaatcacatttttgaacctcgatgcttgaagtgtagcttgggtaacagrtgggctttaagccaattttggcatgcaaggggttgagtttattaggcatcagcaccgctgaaaatcgtggggatgcaggcttaatttcaacactattctaaatacttgaaagatattatataagtctttaataaactcctgtgtctacaaatggttcacattaactcaatatccatgatgaaacatctataaaatcaaggcactgttatttagtggagacttgctggctattctatgagaggaggtattgttattgtaatctcatcatctcataaaattgtatcatattactcataaccagcccttcatattctattcctattttggtattttaaa

SEQ ID NO: 581575 - DNA, 413 bp, Homo sapiens
gtgaattcctcaaactcttgcatattcaaaatcacatttttgaacctcgatgcttgaagtgtagcttgggtaacagatgggctttaagccaattttggcatgcaaggggttgagtttattaggcatcagcaccgctgaaaatcgtggggatgcaggcttaatttcaacactattctaaatacttgaaagatattatataagtctttaataaactcctgtgtctacaaatggttcayattaactcaatatccatgatgaaacatctataaaatcaaggcactgttatttagtggagacttgctggctattctatgagaggaggtattgttattgtaatctcatcatctcataaaattgtatcatattactcataaccagcccttcatattctattcctattttggtattttaaa

SEQ ID NO: 581576 - DNA, 413 bp, Homo sapiens
gtgaattcctcaaactcttgcatattcaaaatcacatttttgaacctcgatgcttgaagtgtagcttgggtaacagatgggctttaagccaattttggcatgcaaggggttgagtttattaggcatcagcaccgctgaaaatcgtggggatgcaggcttaatttcaacactattctaaatacttgaaagatattatataagtctttaataaactcctgtgtctacaaatggttcacattaactcaatatccatkatgaaacatctataaaatcaaggcactgttatttagtggagacttgctggctattctatgagaggaggtattgttattgtaatctcatcatctcataaaattgtatcatattactcataaccagcccttcatattctattcctattttggtattttaaa

SEQ ID NO: 581577 - DNA, 574 bp, Homo sapiens
ctaccgtcattcttttcatcagtttcagaggaataataaatttcaaaattgttcaaggtacttcttttagttcaagtaacatttgacaggtgtaaaactgtagacagactgatacaaacgtattctaattgactcaaaattatatgggacctattttaaaatctagattttaaaatgtcgtgtcaacatacacatgttctccttgtgaaataattgttttttattctctggatagaataatttaatctttaaaccttccattcactcttagaamcaatatattacataaggatatgcttataaaaataattcccaactagcttttcagttcagaaatatatgtgaagaatcatcaaacatctaatggatttcaaggagaaatgggttagtaatttattccatatgtctcaatttttcctagactcaaggcttcctttaaaataattgtaggcatttaagaaaccatgcaaactaaaaagaagaaactgtgacgctgccgcttaggctttttaagtctttggacatgattcaatatattttttaaattgtatcttaattagacattgtgagttca

SEQ ID NO: 581578 - DNA, 371 bp, Homo sapiens
ttacttaaaaaaagtgctgtttcttggaaggaagaagtttattccattttctttactaatcaagggttggtatcaaatcacaaaaacaagaaaaaagcaaaactgtggtaattaaatttaagaatatatggtttagacatacaatgaaatgctaaaaatgataatttaaaggtataactaatgccatcagaagttattcttatatgctgaaaaatttcagagaaatttcttcactggactcagagagatgtggtrgaaaaggaaagtggaggagaggtgaggtataaggagcgatcagagagactggaagcataacaactccatccacattgctgccctcgaaaatagagaaataaaataagtcaagtatt

SEQ ID NO: 581579 - DNA, 251 bp, Homo sapiens
aatacaggaagtaaaagaagctgtaaaacaataagctttagaactacatataaataaaaattgcaagattttatttatttacatggactgcattttayattaaaatccttagggtcagaatatatttatctgaatattaaatttaatgtttaatataatgtattaaagccaaaaataggctaaaaatgaataaatttatttgagctttaaatatgtttgaagtcctaaatcctgttctctacccaattgct

SEQ ID NO: 581580 - DNA, 589 bp, Homo sapiens
ccctttttggagacccaggattctatgtgggctctacccagagatcagagatgcagttaaaagattggtagttctgtctaaataaaattgatccccttatacagtcctatgatagatttctctaattttatgtttcatttggcatacaactttaatctccctctcacaccaccagactttttctgtctgtaccctgggatgtaaattttgctgtctgatttttcacctaagagttgtttccttcaaacacagatttagggctatttacctgacaackgccagggtaatgaaacagcttatcaagagtttgcaagttttagttaggggaaaaaagaaggttttatgaatctgtaagatatactactatcggtatgccaatacatctatgtattatgtgttgtgtacacagtgtttcaccattaaaaatatataaaagatctctaattaattggcttaaagaaaaatagaagcccttaaataaaatacttcatcagaaaaaaaggaaagactggtcaaatgctttttcaagtttgcatgacttaagtaaaatttttaataaaatgctagctttaaaattattggtaaagta

SEQ ID NO: 581581 - DNA, 502 bp, Homo sapiens
agctcctatactttaggataatttattattcagcaaaagaaagctgatttttttcggaaccaaaatttctgtttggaaccaaaagtgagatgcaagaaaacaaacttgaaatgtgagagtgagtttgaaactagraagtagacctggaggagagttacagtgaaagcccatagtgctttgagggaactgttaatggaagacttacgctcttggataaggctgtgcataacagggttgcagaaaagtgggacaggcattattagaaattagagaaaggagattgttttaatataatggcagagagcatagcaataccatacttaactaaagttaattagcaagtcataaatggttgaccaggctaatgtagtcatatactgtgacacatttgaaatcttattgtgctttgcaagctaacagtggagactgccacaattccattgatgctagcagaagctatccaactcctaggtcagagaaaaagagctttttttcctcaaaa

SEQ ID NO: 581582 - DNA, 599 bp, Homo sapiens
tggtccagcgacctagtaaatggaaccccacccaagttctgaatgaggagggaggagtgccactggaaagatgatgtgaaaatcatcccagaaactgagatctttcaaatccaggacacctccatcatttcactgtctatgccatcttcctttttcctcccaaattactttccagaatagttgccctcacccgcacctctcgccagcaggacacaaagagttccccatgttcaagtcaatgctgatgttttccaacttcaaaatgtctgacagtttgttgattatcttgacttaattggcatgtctctgattgctaatgagattgagcatctttccatatcctgacaagcatttggctttcccccctgcaaatttcctactcatgtcctttgcctgtagttctattggtttcctgcctttttatattatagaagctaatcytttcttggttgtgtgacttacaaataccttctcccagggtattagtgctggctgtggtgtccagggtaggtactcactgcccctaccggaaggaggattacacacacacctgacccattgatgagaagcttgaccatgtgacttgctttggtcattaa

SEQ ID NO: 581583 - DNA, 599 bp, Homo sapiens
tggtccagcgacctagtaaatggaaccccacccaagttctgaatgaggagggaggagtgccactggaaagatgatgtgaaaatcatcccagaaactgagatctttcaaatccaggacacctccatcatttcactgtctatgccatcttcctttttcctcccaaattactttccagaatagttgccctcacccgcacctctcgccagcaggacacaaagagttccccatgttcaagtcaatgctgatgttttccaacttcaaaatgtctgacagtttgttgattatcttgacttaattggcatgtctctgattgctaatgagattgagcatctttccatatcctgacaagcatttggctttcccccctgcaaatttcctactcatgtcctttgcctgtagttctattggtttcctgcctttttatattatagaagctaatcctttcttggttgtgtgacttacaaataccttctcccagggyattagtgctggctgtggtgtccagggtaggtactcactgcccctaccggaaggaggattacacacacacctgacccattgatgagaagcttgaccatgtgacttgctttggtcattaa

SEQ ID NO: 581584 - DNA, 599 bp, Homo sapiens
tggtccagcgacctagtaaatggaaccccacccaagttctgaatgaggagggaggagtgccactggaaagatgatgtgaaaatcatcccagaaactgagatctttcaaatccaggacacctccatcatttcactgtctatgccatcttcctttttcctcccaaattactttccagaatagttgccctcacccgcacctctcgccagcaggacacaaagagttccccatgttcaagtcaatgctgatgttttccaacttcaaaatgtctgacagtttgttgattatcttgacttaattggcatgtctctgattgctaatgagattgagcatctttccatatcctgacaagcatttggctttcccccctgcaaatttcctactcatgtcctttgcctgtagttctattggtttcctgcctttttatattatagaagctaatcctttcttggttgtgtgacttacaaataccttctcccagggtattagtgctggctgtggtgtccagggtaggtactcactgcccctaccggaaggaggattacamacacacctgacccattgatgagaagcttgaccatgtgacttgctttggtcattaa

SEQ ID NO: 581585 - DNA, 461 bp, Homo sapiens
caaatgggggagccctgaaaactctgctctgtagataggccaaatcagaatggctgttgagcagcaccacaacgtaggggatttgttctatgagtccctcaggcaggaacccctacccaaccttcccatgctgccagaatatctgagacctcccccacctaagatgggtggaactctgattcttttctaggactgaggcaaacctgggcttaaccaccatctagtgttgaaaatgaggcagtaacatagtgggggtggtgggagagagaaaatctgcaggaaaattaaaaagaaactctaaacacatccaacaaaaaaatagtacaagccagacaaagaagattagaatgaataactattcaatccaaaggcacagatgtacatccaaaaggascaagagaaaaagagaaccatgacttccccaaaaggacaaagcaaggtacaagtgactgaccctaaca

SEQ ID NO: 581586 - DNA, 620 bp, Homo sapiens
caaaagaccaaatctaaaaattattggtattcaagagcaagttgagwaggatccaaaggtagaaagtttactcaaagaaataataacaagaaactttccaaaacttgaaaaagagatacatatgaggcacagaaaggtcagagaacatcaaacagatttgacccaagtgaaactaccctaaggcatataataaacaaactctcaaaggtcaaggacatatagaagatctcaaaagcagcaagataaaaagcaaataacctaaagaaactccaatgcatctagcaacagacttcacaacagaaaccaaacaggccacaagggactcggatgacattttcaaagtgatattaaaaaaaaaaaataagaacactatcatctgagaataccatatccagcaaagctatacttcaaatatgaaggagatggaaagtcttttccagacaaacaaaagctgagagaattcactaccaccagaaccattttacaagaaacactaaagggatttctgcaattggagagaaaaaaaaaaacccactaacatgcagaaagaaaacatttgaaggtataaaacccactggtattaagtacatggacaaacccagactaatgcaatactgtaa

SEQ ID NO: 581587 - DNA, 620 bp, Homo sapiens
caaaagaccaaatctaaaaattattggtattcaagagcaagttgagtaggatccaaaggtagaaagtttactcaaagaaataataacaagaaactttccraaacttgaaaaagagatacatatgaggcacagaaaggtcagagaacatcaaacagatttgacccaagtgaaactaccctaaggcatataataaacaaactctcaaaggtcaaggacatatagaagatctcaaaagcagcaagataaaaagcaaataacctaaagaaactccaatgcatctagcaacagacttcacaacagaaaccaaacaggccacaagggactcggatgacattttcaaagtgatattaaaaaaaaaaaataagaacactatcatctgagaataccatatccagcaaagctatacttcaaatatgaaggagatggaaagtcttttccagacaaacaaaagctgagagaattcactaccaccagaaccattttacaagaaacactaaagggatttctgcaattggagagaaaaaaaaaaacccactaacatgcagaaagaaaacatttgaaggtataaaacccactggtattaagtacatggacaaacccagactaatgcaatactgtaa

SEQ ID NO: 581588 - DNA, 620 bp, Homo sapiens
caaaagaccaaatctaaaaattattggtattcaagagcaagttgagtaggatccaaaggtagaaagtttactcaaagaaataataacaagaaactttccaaaacttgaaaaagagatacatatgaggcacagaaaggtcagagaacatcaaacagatttgacccaagtgaaactaccctaaggcatataataaacaaactctcaaaggtcaaggacatatagaagatctcaaaagcagcaagataaaaagcaaataacctaaagaaactccaatgcatctagcaacagacttcacaacagaaaccaaacaggccacaagggactcrgatgacattttcaaagtgatattaaaaaaaaaaaataagaacactatcatctgagaataccatatccagcaaagctatacttcaaatatgaaggagatggaaagtcttttccagacaaacaaaagctgagagaattcactaccaccagaaccattttacaagaaacactaaagggatttctgcaattggagagaaaaaaaaaaacccactaacatgcagaaagaaaacatttgaaggtataaaacccactggtattaagtacatggacaaacccagactaatgcaatactgtaa

SEQ ID NO: 581589 - DNA, 620 bp, Homo sapiens
caaaagaccaaatctaaaaattattggtattcaagagcaagttgagtaggatccaaaggtagaaagtttactcaaagaaataataacaagaaactttccaaaacttgaaaaagagatacatatgaggcacagaaaggtcagagaacatcaaacagatttgacccaagtgaaactaccctaaggcatataataaacaaactctcaaaggtcaaggacatatagaagatctcaaaagcagcaagataaaaagcaaataacctaaagaaactccaatgcatctagcaacagacttcacaacagaaaccaaacaggccacaagggactcggatgacattttcaaagtgatattaaaaaaaaaaaataagaacactatcatctgagaataccatatccagcaaagctatacttcaaatatgaaggagatggaaagtcttttccagacaaacaaaagctgagagaattcactaccaccagaaccattttacaagaaacactaaagggatttctgcaattggagagaaaaaaaaaaacccactaacatgcaraaagaaaacatttgaaggtataaaacccactggtattaagtacatggacaaacccagactaatgcaatactgtaa

SEQ ID NO: 581590 - DNA, 257 bp, Homo sapiens
gctcacacttcaacaaagcaaatgttctgagagagaagggcctaaacaaggctagactgtatctgtctatctatctatctatctatctatctatctatctatctatctatctatctatcatctatctatttattgtagagatgggggtctcactatgttgcccaggctagtctccaactcctgaccttaagccatcctcccaccttggcctcccaaastgttgggattacaggtgggagcccaccacttctggccca

SEQ ID NO: 581591 - DNA, 436 bp, Homo sapiens
ttctccccatccctttaatggatgccaatgacttgtagatttgtcctcttcacatagtcccatacttctcagaggttttgttcaatccttattcttactttttctttatttttgtttcttttatttcagagaaccagtcttcaggttctgagattctttcctcagcttggtttattctgctgttaatacttgtgattgcattgtgaaattcttgtattggattattccgctctgtcagagccattatgtwtctttttttatatggactatttcatcctttagctcctgtatcactttattgtaattcttattttccttggattgggttttgccatcttctcgaatctcgatggtgtttgttcctatctgtattctgaattctatttctgccattgcagccagtttggtctggttaagaactcttgttggagagctg

SEQ ID NO: 581592 - DNA, 436 bp, Homo sapiens
ttctccccatccctttaatggatgccaatgacttgtagatttgtcctcttcacatagtcccatacttctcagaggttttgttcaatccttattcttactttttctttatttttgtttcttttatttcagagaaccagtcttcaggttctgagattctttcctcagcttggtttattctgctgttaatacttgtgattgcattgtgaaattcttgtattggattattccgctctgtcagagccattatgtatctttttttatatggactatttcatcctttagctcctgtatcactttattrtaattcttattttccttggattgggttttgccatcttctcgaatctcgatggtgtttgttcctatctgtattctgaattctatttctgccattgcagccagtttggtctggttaagaactcttgttggagagctg

SEQ ID NO: 581593 - DNA, 462 bp, Homo sapiens
gggcgtccttgtcttgattcatttctcaggggtaatgctttcaacttctccccgttcagtataatgttggctgtgggtttgtcatagatggtttttattaccttaagatatgtccattctatgccagttttgctaagggtttttaccatacagggatgctggaatttgttaaatgctttttctgcatctattgagatgatcttgtgatttttgtttttaattccgtttatgtggtgtatcacatttattaacttgtggatgttaaatcatacctgcatccctggtatgaaasccacttgatcatggtggattatctttttggtatgctgttggattcggttagctagtattttgtgctctttcagactttttgatgtagacatttaatactatgaactttcctcttagcattgcttttgctgtatcccagaggttttgataggttgtgtcatcattatcatt

SEQ ID NO: 581594 - DNA, 620 bp, Homo sapiens
tcacatcctagagaatggggtatccatcccctcaagcatttatcttttgtgttataaacaatccaattacactattttagttattttaaaatggacagttattactgactatagttaccctgttcagctatcaaatagtaggtcttatttattctttctattttttgtacccattaacagtgctcaccacccccaacccctccacaacccttcccagcctctgataactatccttctactctctatgtccatttcaattgtttkgattcaaaagatcttttatttcaatatgaatgtgtaaaaaaagttcattgttatcagagtgttttgcaaagcatactttaggtcttaaacattcatgtttttgtgtctaaaccaaggagtatgtcacttggtagtaacggaaatgaaatgtcctccatctcaatgcccactaatttggatccccatgtactcaaccaaatatccacaggaagattacatggctctgtcccttttactgactctcccaatgtttctttgacctggtctatttctagtcctgcagcaatatatgtattttcatgataaagtgctatattaaatgtctctggggtttcaaagacttgaattaaaaaaaa

SEQ ID NO: 581595 - DNA, 469 bp, Homo sapiens
atggctctgtcccttttactgactctcccaatgtttctttgacctggtctatttctagtcctgcagcaatatatgtattttcatgataaagtgctatattaaatgtctctggggtttcaaagacttgaattaaaaaaaaaaaaaacttctagaaaaggatattctgaaatgccratagataaaatttaaaattagaaattaatattatttaatttaaataattagagaatgccatggcaattctcaaagccttcttttgtttgaggcaaatattgagcaaaatatttttatgttataagaaaatgttatccagttatgctagttttttttttttttttgatatggagtcgtgctctgtcacccaaactggagtacaacagtgccgtctcggctcactgcaacctccgcctcctgggttgaagcaattctcctgcctcagcctcctgagtagctgggattacacacgccc

SEQ ID NO: 581596 - DNA, 579 bp, Homo sapiens
gcttcaaactatactacaaggytgtcattaccaaaacaacatggtactggtataaaaataggcatgtagaccaatggaatagaatagagaacccagaaataaggtcaaatacttacagccaactgacatttaacaaagcaaacagaaacataaagtggggatagaacacacttttcaacaaatggtgctgggataattggcaagccacatgcagatttttatacaaaaatcaactcaagatgaatcaaagacttaaatctaagacctgaaaccataataattctacaagataacatcataaaagcccttcttgacagtggcttaggcaaagagtttatgaccaagaacccaaaagcaaatacaacaaaaacaaagataaacagatgggatgtaattaaactaaaaagcttctgcacagcgaaagaaataaatcagcaaattaaacagacaccccagagagtaagagaaaaccttcgcaaactatgcatccaacaaaagactaatatgcagaatctataaggaattcaaacaaatcagcaagaaaaaacaaataatcccatcaaacagtgggcaaagaac

SEQ ID NO: 581597 - DNA, 447 bp, Homo sapiens
cctgctttctgtcagatactgtgctatattctctctctatattatctcatttaatcctccataaatccccaaaaggtgggtacgaatgtccccatttcacatatggggcaacagagggtcaaaggggtagagtgatctgctcaaggcctcacagctattatgtagcatagtcttcattctaacccaggcccatctggcactaaagcccatgcctttgtttcacagattgcttggaaaatgatactgtgggtctttataaaaacaaaatcacartcctactgcaataccactttctggagatggcccaggctcagccagaccccaaacattgtcaatgccccacaaagtaacttctcctttcagttccatgatcaccaaggaggagccctcttcccggccagctccctgtccttgcaatgccaaggcgaggagaaagggagatggagt

SEQ ID NO: 581598 - DNA, 611 bp, Homo sapiens
aatcctcacagcagctgttttccattccaagagcatcctaaatccractcttaggggaagacagaatgctttatagtcctgtcttcctgaaatgtttcagtatctcttcctaacacttcaaaatgcgtctgtatcttcgcccttcttttctgcctgcttatttcatgaaacaagtgattttcctttccaagagtaactccttttcctgtaatactgatttagtgacactgctaattgttcccttcttttctctatttactgactcctttgtttctgctagatatgcttcagtctctcaatttaaaaaaagcaagaagaagaacaaaaataaggatagccatttggatactatcctctctcttcctattaccaacaaaaaagtttatttatttatgtatttagatgacatgatacactacttactttctattttacacacactcccaaactttaaggtacaattttccccttttatcttgtggttcccttatgcacaagtcatcatcagctcttcattgtctttcatatagcatcctgaccccttttcttgctatttaagatttcctccaatctagtttccactgccattttctttctttctttttctgaga

SEQ ID NO: 581599 - DNA, 625 bp, Homo sapiens
aatatgctggatatgtttatggaaggctgcataggaaaccagtcaccacagttgtgtctaagaaaaaagacaggcacagagatcaggagcaggaaagaaataaacttttcactgacttatgtgatgttttaagccatattcatgtattatctgttcaaacaaattattatatatataatttgaaagaaataaaaatatttttataagtattaacaattccataaagcagctaggcagatggagagccattccagagaagaaaaggggtcattgtttaatcccattatctttcagggaagaattctagcttctacatatgtaaatgmagctactgttttatctagtataacaagttggacaaacaaaatatctggactaatattcaggatacttctagtatgtttctgcaatatcctttctgccatgtgcatgtgagaagatgctaccttacaaaccagccatttcaatataaaagagtatgctgtgcaaagagatggtacattttactcaaatgctagtttgtgagtggaaataagtgaaaacctccaggataatgccagtagaggtgagaacagcagaataaaaatagaagattgagcactgaattggcttccaggggtggtaa

SEQ ID NO: 581600 - DNA, 305 bp, Homo sapiens
taaattggctttaaaattagcataaaataatataaaattgattaatggcaccgtatcatccataataaggttttattcagtgaattttttttccatttttaaagcttgcttccctccatcacctatccttcctagtccatgatgccatatctgctctgtcagcccrgtaacccatttaatttatttttatgtatttagttaaaacttatatagtgctatacaagctaggcactattttaagccattggcaaactttagaaatctggtgaatactgtagatttcttctgaaaataatgtttttaaa

SEQ ID NO: 581601 - DNA, 565 bp, Homo sapiens
aaaaggaaataatttggcactcattaatattaaattgagcattttttattatcagattcagtatgcatcttttttttttttttgcctctttcctgttttccctgtttatgactttgctatagcacagtaactatagccactttcactggggttcttagggttgaaaaggctgctgcccctctttgaatgaatcctcattaaacgtggcaaatattaattactgacattagaagtagaagggctgtgaagtacayaaaagagcatattagggcagttagcatgatacagtttttttcttctgagaaaatgtgagcaaatgacaggtatcataaactcattaattgttctaatatgggacaggctcacaggtcttgagcatgaaaacacttgtattaaaattggcaaaacaacttgattaaatggtattgtatacacagatgtgaaaggtaaatttcattaataattattattatgaataagaacaattcaactccagactcattttcttttcttttctttttcttctcttattttttttttgagatagaatgtcactctgtcaccc

SEQ ID NO: 581602 - DNA, 554 bp, Homo sapiens
ctactttgaggaggtggtttgggaataagaatgctggaactttctattttagacttaaaataatttattcttttttgctttaagtttggattgtttttcttttggcttagtctaatcctgatgattcacaattatagcaaaatggatttttaaattttatgataattattatattctgaatcctaaagccaggtatgtcccacattttcagggaatgtgccaatttacattattcttccattttcatcatcagcaaaattagaaagacaaatactgcctgacttcacttatatgtagaatctaaaaaagttggacttatggcaacagagaataaattggtggttaccaagracaggggagcagaggaagaggaaagatgttggccaaagggtacaaactttcagtcgcaagataagtaaattcaggggactttagttaacgatactgtattgtatacttaaaatttgcttgaatgttctcaccaaaaacagaataaaacaaaaagggaagcaatgaccttgggtaataaatatgttaactcatttgattgtggt

SEQ ID NO: 581603 - DNA, 604 bp, Homo sapiens
acttacccaggcatggtggyacgtgcctgtaatcccagctactcaggaggctgaggcaggaggatcgcttgaacccaggaggcggaggttgcagtgagcagagatcgaggcactgcactccagcctgggcaagagagggagactccttctcaaaaaaaagagaaagctctcctcaacatcttgccacacagactgaggggggatatggcacttatcaatttcacgtgtccgggacacagctctagagatggtacctggagaaccatcatcacctttctacaatgctcacatttaaataaaaaattagtctccattcagcccagattcatgaattgatagctttattacctgggaggaaaaatatttgctgacataaatgaatacaaaagacagcagcagtttcaaggagaaacagtgaaaacacacagcaggctagaattttacaaatcattagatttgtttactctataaatatgcaattcattcagagtaattaatctgaaagggaacattagttaaaatttatttgtgttgttcaggtgcctgagcaatttaaaatcattttccaaggagaatgatacctgagatgatcaaataagtatat

SEQ ID NO: 581604 - DNA, 604 bp, Homo sapiens
acttacccaggcatggtggtacrtgcctgtaatcccagctactcaggaggctgaggcaggaggatcgcttgaacccaggaggcggaggttgcagtgagcagagatcgaggcactgcactccagcctgggcaagagagggagactccttctcaaaaaaaagagaaagctctcctcaacatcttgccacacagactgaggggggatatggcacttatcaatttcacgtgtccgggacacagctctagagatggtacctggagaaccatcatcacctttctacaatgctcacatttaaataaaaaattagtctccattcagcccagattcatgaattgatagctttattacctgggaggaaaaatatttgctgacataaatgaatacaaaagacagcagcagtttcaaggagaaacagtgaaaacacacagcaggctagaattttacaaatcattagatttgtttactctataaatatgcaattcattcagagtaattaatctgaaagggaacattagttaaaatttatttgtgttgttcaggtgcctgagcaatttaaaatcattttccaaggagaatgatacctgagatgatcaaataagtatat

SEQ ID NO: 581605 - DNA, 435 bp, Homo sapiens
tattgattctttctagctattttwtgtacccattgaccatccccaccttcccctcaccacctcattaccttctcagcctctagtaaccatccttctacactttatgtccatgaatttaattattttgatttttagatcccacaagtaagtgagaacatgtgatgttcatctttctgtgcctgccttatttaatttaacataatgatctctagttccatccatgtggttgcaaatgacagaatctctctctcttttttttttttttttgagacaaaattttgctcttgtcgcccaagctgaagtgtagtggcacaatctcggctcactgcaacctcagcctcctgggttcaaatgattcttgtgcctcagcctcctgagtagctgagattacaggcatgcgccaccactcctggctattttgtatttccttagtag

SEQ ID NO: 581606 - DNA, 619 bp, Homo sapiens
ttatggtactttcagttcattacactgcgctatagataacataaactaggtagatgtatttgctgatcatattatttagttttgactaaaataaccatcagtaaatagacaagagattgattcacttttcctcaaagaaaccagaattgggaagataatacaaaaaaagaaccaycaaacagtttcacaatcatgtttctatttgcgtacttcatctcttcttaatccaaaaaataggtaaaaacaataacagtctaaaacaatcagcaagactttggtcagaaaaactggaaaatcttaagaaggatacacgaaatatgtatgtatatcctttgttgtgaataatggactttacctaagtatatattgtgccttgaaatagaagctaatgataacacaaagccatcaaaagtagcaagactttcaaaaaattattaataaaaatatttatggagtaaaatagtcatctaaaatactatttaatttatctttatctcactatatttttctattatgtatttttataatatgtatatactacaaaagtaaaacaagacatatttcctttgcaaataataatatgtttatattaatgatttttgcatgaaaatatttacat

SEQ ID NO: 581607 - DNA, 619 bp, Homo sapiens
ttatggtactttcagttcattacactgcgctatagataacataaactaggtagatgtatttgctgatcatattatttagttttgactaaaataaccatcagtaaatagacaagagattgattcacttttcctcaaagaaaccagaattgggaagataatacaaaaaaagaaccaccaaacagtttcacaatcatgtttctatttgcgtacttcatctcttcttaatccaaaaaataggtaaaaacaataacagtctaaaacaatcagcaagactttggtcagaaaaactggaaaatcttaagaaggatacacraaatatgtatgtatatcctttgttgtgaataatggactttacctaagtatatattgtgccttgaaatagaagctaatgataacacaaagccatcaaaagtagcaagactttcaaaaaattattaataaaaatatttatggagtaaaatagtcatctaaaatactatttaatttatctttatctcactatatttttctattatgtatttttataatatgtatatactacaaaagtaaaacaagacatatttcctttgcaaataataatatgtttatattaatgatttttgcatgaaaatatttacat

SEQ ID NO: 581608 - DNA, 562 bp, Homo sapiens
attaaaagtctgtctaatgtaaaaaaagtcagtgcatttttttgttttgattttttataataagtatcttattttagagaaattttagatttacagaaactttgtgaaggcagtgcaaggactttcccaataccccacacccaatttcccctattcacatgtgaagtatatgtggtagtttcatcacaattagtgaattattcctgttctattattatgaattaaagtccattccttatttagatttattagtttttacataaygccacttttttttttctgttccagaatcctgtccagaataccacaatatattcagtcataatgtctccttaggcacatctaaacggtgacagtttctaagatcttcaagtttgtgatgaccttggttgtttcgagaaagtatcgatcagatattttgtagaatgctcatcgatagtagtttgtgagatgtttcttcatgattagattgggattttgggttttgtggaggaagaacaaagacatgaagtgccttttcatcacatcatatcaagagtacatactatgaacacaacttatc

SEQ ID NO: 581609 - DNA, 559 bp, Homo sapiens
gtgaatcttcaacaaggtgccaagaatgcacaaacagaaaatgatagtgttttgaacactatcattgaacaaatgatgatgttggcaaaattggatattcacatgcaaaaaaaaawcatgaaattggatgcaagtcttacatgacatgcaaaaatcaactcattgtgaatcaaagattaaaacattatatctgactctataaaactcctagaagaaaatatgtgggaaaagtccatgatattgaacttggcaatgattttttagatacggcactaaaagcacaggcaacaaaataaaaaataaacacgggaaacttcatcaaaagtaaaaagtttctgcacaggaaaggaaacaatcaacaaaataagaagggaacctatggaatgtgagaaaatatttgcaaacctataaagatttaatatatcctatacctggttaatatccaaaatatagaaggagctcatgtaactcaacagcagaaggcaaatcatctgattaaaagtgagcaaaggacctaaataaaaattttatgaagaagagatataaatggccagcaggt

SEQ ID NO: 581610 - DNA, 559 bp, Homo sapiens
gtgaatcttcaacaaggtgccaagaatgcacaaacagaaaatgatagtgttttgaacactatcattgaacaaatgatgatgttggcaaaattggatattcacatgcaaaaaaaaatcatgaaattggatgcaagtcttacatgacatgcaaaaatcaactcattgtgaatcaaagattaaaacattatatctgactctataaaactcctagaagaaaatatgtgggaaaagtccatgatattgaacttggcaatgattttttagatacggcactaaaagcacaggcaacaaaataaaaaataaacacgggaaacttcatcaaaagtaaaaagtttctgcacaggaaaggaaacaatcaacaaaataagaagggaacctatggaatgtgagaaaatatttgcaaacctataaagatttaatatatcctatacctggttaatatccaaaatatagaaggagctcatgtaactcaacagcagaaggcaaatcatctgattaaaagtgagcaaaggacytaaataaaaattttatgaagaagagatataaatggccagcaggt

SEQ ID NO: 581611 - DNA, 645 bp, Homo sapiens
tcgcaccactgcactccagcctgggcaacaagagtgaaaccccatctcaaaaatagataaaaataaatgtaaacaaaaatgtatgttggaaattcttaagacatttctaatattactttaccaataattttaaagctagcttatttattaaagattttacttaagtcacataaacttgaaaaaacatttgactagtctttcctttttctgataaagtatttgatttaagcacttttatttttctgcaagccaattaattggagttcttttatgtattttcactagtgaaacrttgtgtgcacaacacataactacacagatgtattagccatgccaatagaagtacatcttatagattcctaaagaccttttttgtttctccttagactttcagattcctgataacctgtttcacaaccccaggcatttttcagctaaatagccttaaattttcgtattaaaggaaacaactcaggtgaaaatcaaatagcaaatgtacgtcagaatgtacacagaaaaagtctggtggtgctagagggagattaaagatggatgccaaatcaaacttaaaattgtagaaatctatcataggattgtagaaggagaccagtttcatttagatggggactaccgatcttttaactg

SEQ ID NO: 581612 - DNA, 574 bp, Homo sapiens
agcatgattaaaaagacttttgggaggaaaatctatagtaaatgttgtctgactcagtataaggattgtggaagatggaattatatctgaaagctctactttgagatgaaatagtttcttgataatgcatatttacttcactttcttcaaactttgctgtgaaaaatttaatcaatttcttcctatgtgatagatgaatgattgacacttttaatttttgcatttctcattactagataagaaaactcaaatcatatcattgttctcacagattttcatatagaatgttaattctgaattaratgattctccttagcataagacttttattatgtctttttatgatccttgattccattaatatcactgttgatacttttttcttggttgtacaaaaattgtaatatttgtttaatgcagaaatgttataagtaaaagcgttgagttaaagttagcaagattaggctgggtgcagtggctcacacctgtaatcccagcactttgggtggccgaggtcaggagttcgacaccagcctggccaacgtggggaaacactgcctctactaaaaataca

SEQ ID NO: 581613 - DNA, 563 bp, Homo sapiens
atactaagtctaaattagttaaaggcctatagggacaatagaaaatttaccagctgtgcatcactaccagcaaggacactaatttcatatatgaagacaaacacaagtgttgtgataaagctacataatgattctgagattacatgaataatggaactctaaaattaacctgagagtcactggttggcagaagctgcctcgtcctgtcagtcaatcttaaatcaattaatagattctgaataaactgcctccacagagagaattcattcattttaacacgtcaatctcattgaatatttttcactacacactaaaaatgactttatgcagacacacatttaatttggaccacttgaagattgtttctccttcttataccttaaagtactgaccgtaaaaaattttgaaataaaattaaattttattccttaaatatttgaagttttgagcaagtgagaaagtgacaggattgaaaagagagaatagaatttatgattaaaatggggaggggtacgattcaattggcaccyagtctgtaatgtgaaagttgtatacagtattta

SEQ ID NO: 581614 - DNA, 632 bp, Homo sapiens
ttattactttttattttatttatttatttattttttagatggagtctcactctgtcacccaggctggcatgcagtggcatgacctcagctcactgcaagctctgcctcccgggttcatgccattctcctgcctcagcctcccgagtagctgagactacaggcgactgccactgcgcccggctaattttgtgtatttttagtagagacagggtttcactgtgttagccaggatggtcttgatctcctgacctcgtgatccacccrcctcagcctcccaaagtgctgggattataggtgtgagccaccgtgcccggcctattacattattgagaacattttgtacatttgattgatcaatagattaatctaggagtgtgagaatttgattggaaattttattttaatcatgtatttttttaattttgtaatgctgtatgtagaaatgacaagataataattttctctttatctaatgacaagctcattttcacatgatgatttcagtatatcttataaaatatcatgaaggagatatacaaacacttagaactattgcaaataaacttttgtgtaaatttatttggaaagtgtaatgattataatgagaatgtgattgacgattcaggtcatat

SEQ ID NO: 581615 - DNA, 632 bp, Homo sapiens
ttattactttttattttatttatttatttattttttagatggagtctcactctgtcacccaggctggcatgcagtggcatgacctcagctcactgcaagctctgcctcccgggttcatgccattctcctgcctcagcctcccgagtagctgagactacaggcgactgccactgcgcccggctaattttgtgtatttttagtagagacagggtttcactgtgttagccaggatggtcttgatctcctgacctcgtgatccacccacctcagcctcccaaagtgctgggattataggtgtgagccaccgtgccyggcctattacattattgagaacattttgtacatttgattgatcaatagattaatctaggagtgtgagaatttgattggaaattttattttaatcatgtatttttttaattttgtaatgctgtatgtagaaatgacaagataataattttctctttatctaatgacaagctcattttcacatgatgatttcagtatatcttataaaatatcatgaaggagatatacaaacacttagaactattgcaaataaacttttgtgtaaatttatttggaaagtgtaatgattataatgagaatgtgattgacgattcaggtcatat

SEQ ID NO: 581616 - DNA, 507 bp, Homo sapiens
tgtatatttttcaaaaaattatgtttcactgagattttcaagtggttttaaaatattttaagcgtatcatctgctcatttcttaaactttttaatgttctttttctttaaaatatattttctacacacttctctattttgatttttccaggaaccagatcttgaatttctaaaacttttatcttagttgtctttttcaatgtatttttcaacaaagtttgtgataaaacagcatcaaatattcttaaactatgtcatttcacttttcttctttttttccttcctcgtgctacctagtctaagatcgtttcacttttcttccacttgttggtctgtcccttgcacttcacttcattttcttctaagtrgcccaatctactgagtcccccacaaaaaggcagatatagccatctttgctctttaaaaaaaaaaaaaaaaaagagtctcactctgttgcccaggctggagaacactgacaggatctcagctcactgcaacctccgcctcc

SEQ ID NO: 581617 - DNA, 333 bp, Homo sapiens
ttacactgtatataatattctagcataaaatctttttctttcatcattttaaatatgtcatgccactctcctggccagtaaagtgttcactcagaartcagctaacatacttattaaagctttgtctatgttggtttttttcttttgctgcttttaggatcctttctttatccttgacccttcagagtttgattattaaatccttgatgtggtcttactaagtttaaagctgcttggtgttctgtaacttccttgtatttgaatattgatacctttctccaggtttagaaagctctctgttattaacttgttgaatagattttctatcctgat

SEQ ID NO: 581618 - DNA, 601 bp, Homo sapiens
tcttcctggagggaaagctattacacaaccactgatggccatccataaaatgcaggatctgttctgaccctaagaatgagactcattgagctagatgtatatagcaaccagatatatagtaaaaggcagggtgcttctaaaagcaagacgggagatgtgtagaagtaactttggtagtagggaataagaatgtgaccctgccttacatctattaaatttatacagcagaaaattgaagcatgaaccaaacactcatgtgaaaggagagaaaagatgactgtgagcaaagacaatagtaaaattttcttacaagcttaaaaaaaggggggacattaccataaaaaatatacttctacaagctactcaggtttaagaagaatttaaataatwgtatttatattattatttcttgtaatgttctaatatttgaacacatgaagaaagaatcacactcaaaccattgataaaacctgctatatttacacatcctccaccaaatgaattttgtaattgaaagtgtgtccttaagtctaaagttttcccttttagtggttaccggctttattttccatacttagtgaccttaatagaatatgtggta

SEQ ID NO: 581619 - DNA, 370 bp, Homo sapiens
agaatggacatttcagatctctttgaaccccaaagtgaaaaagcgaatctcccatgataaaaaacagaaggaatctatctgataaactgccttgtgatgtgtacattcacctcaaagagttaaacttttcattcagcagtttggaaaaactgttttggtagaatctgcaaaggtgtacttgggagtgcattggggccaaactagaagtttccttttagtttttatctgatgatactttctttttcaccagaggtctcaatgtgctcccacctatcccttcrcagagactacaaaaacagtgattccaaactgctgaatgaaaataaaggtttcagtctgtgggatgaatgcacatatcacaaagccattt

SEQ ID NO: 581620 - DNA, 371 bp, Homo sapiens
tccttctagtttttatcctgggatattccctttttctccattgctctcaatgagctcccaaatgtccaatcacagaatgggcaacaacagtgtttccaaactgctgaacgaaaagaaaagaaagttttaaytctgcaagatgaatatacacatcagaaagcggtttctcatatagcttcctctcagttttaatcctgagacattcaccttatcaccattggcctcacagtgcccccaaatatccattcgcagaatggactgaaacagtgttccaaggtgctgaatcataagacaattttaactctgtgacatgaatgcatacatctcaaagcactttctcagaaagatacattctagttattacctgaaga

SEQ ID NO: 581621 - DNA, 371 bp, Homo sapiens
tccttctagtttttatcctgggatattccctttttctccattgctctcaatgagctcccaaatgtccaatcacagaatgggcaacaacagtgtttccaaactgctgaacgaaaagaaaagaaagttttaactctgcaagatgaatatacacatcagaaagcggtttctcatatagcttcctctcagttttaatcctgagacattcacmttatcaccattggcctcacagtgcccccaaatatccattcgcagaatggactgaaacagtgttccaaggtgctgaatcataagacaattttaactctgtgacatgaatgcatacatctcaaagcactttctcagaaagatacattctagttattacctgaaga

SEQ ID NO: 581622 - DNA, 610 bp, Homo sapiens
gtatttgctttttcaacattggactcagtgagctcccaaaggtccattcacagaatggacagaacactttttacaaactgccaagtgaaaagaactgtttgacactgcaagatgaatgcacacatcacaaagagtttcctcagataacttctctctaatttccttttttgccataggcctcaatgagctcccaaatatccctttgcagatgctacaaaaaaagtgtttctaaactactgaatgacaagaaaggtttcactttgtgggatgaatgcacacaccacaaagcggtttcacagatggattccttctactttttatcttgggattttcaagtttttccttttggcsccagtgagatcccaaatgtccactcacagaatggacaaaagcagtgtttccacactgccgagtcaaaggaatgctttaactaagtgagataaatgcacacatcacaaaggagtatctcagaaagtttccttctactttttatgtgaagatattttctttttcacaataggcttcaatgtgcacccaaatatccatttgcagtttcctcaaaaacagtgtttctaaactgctgaatgaaaagtatggctttactctgtga

SEQ ID NO: 581623 - DNA, 610 bp, Homo sapiens
gtatttgctttttcaacattggactcagtgagctcccaaaggtccattcacagaatggacagaacactttttacaaactgccaagtgaaaagaactgtttgacactgcaagatgaatgcacacatcacaaagagtttcctcagataacttctctctaatttccttttttgccataggcctcaatgagctcccaaatatccctttgcagatgctacaaaaaaagtgtttctaaactactgaatgacaagaaaggtttcactttgtgggatgaatgcacacaccacaaagcggtttcacagatggattccttctactttttatcttgggattttcaagtttttccttttggccycagtgagatcccaaatgtccactcacagaatggacaaaagcagtgtttccacactgccgagtcaaaggaatgctttaactaagtgagataaatgcacacatcacaaaggagtatctcagaaagtttccttctactttttatgtgaagatattttctttttcacaataggcttcaatgtgcacccaaatatccatttgcagtttcctcaaaaacagtgtttctaaactgctgaatgaaaagtatggctttactctgtga

SEQ ID NO: 581624 - DNA, 491 bp, Homo sapiens
ttatcctgggatatacactttttcacctttggcctaaatgatctcccacatctccattcactgaatggaaaaaaaaacagtgtttgcaaactgctgaatcaaaagaaagtttaaactctgcgagatcattgcacacatcacaaagcagtatctcagaaagctttattgtagttttcttctgaagatattttgtttttcaccttagacctcaatgccctcccaaatatgcctttgtaggttctaaaaaaagtgtttccaaactgctaaatgaaaagaaagcattgactctatgagaccatcaaaaagcggtttctcagatagcttcattctggtttttatcctgggatrtgcactcttttgccattggtctcagagctccctaatatgcattcgcagaagagacaaaaatagtgtttccaaactgctgaatcaaaagaaaggtttaactctatgagttgaaggaacccatcacaaagcagtttttctgaaag

SEQ ID NO: 581625 - DNA, 491 bp, Homo sapiens
ttatcctgggatatacactttttcacctttggcctaaatgatctcccacatctccattcactgaatggaaaaaaaaacagtgtttgcaaactgctgaatcaaaagaaagtttaaactctgcgagatcattgcacacatcacaaagcagtatctcagaaagctttattgtagttttcttctgaagatattttgtttttcaccttagacctcaatgccctcccaaatatgcctttgtaggttctaaaaaaagtgtttccaaactgctaaatgaaaagaaagcattgactctatgagaccatcaaaaagcggtttctcagatagcttcattctggtttttatcctgggatatgcactcttttgccattggyctcagagctccctaatatgcattcgcagaagagacaaaaatagtgtttccaaactgctgaatcaaaagaaaggtttaactctatgagttgaaggaacccatcacaaagcagtttttctgaaag

SEQ ID NO: 581626 - DNA, 539 bp, Homo sapiens
atgcattcgcagaagagacaaaaatagtgtttccaaactgctgaatcaaaagaaaggtttaactctatgagttgaaggaacccatcacaaagcagtttttctgaaagcttctttctagatttaatctgaagataatttttttaccataggccccattatgctcctaaataccccttagcagattttataaaarcagtttttccaaactaatgaatgaaaataaaggattaactctatgagaagaaggcagacatcacaaagcaatttctcaggtcgcttccttctagtttttatcctgcaatatttgctttttcagcattggcctaaatgagctcccaaatgtatgttcccagaatatgcaaaaacagtatttacaaactgccaaatcaaaaggaaaatttatctgtgtgcaatgaatgcacatatcacaaagctatttctcaggtagcttagttctggtttttatcctgggatattcacttttcctccattggcctcaatgagctcccaaatgtccattcacagaagggacaaaaaca

SEQ ID NO: 581627 - DNA, 539 bp, Homo sapiens
atgcattcgcagaagagacaaaaatagtgtttccaaactgctgaatcaaaagaaaggtttaactctatgagttgaaggaacccatcacaaagcagtttttctgaaagcttctttctagatttaatctgaagataatttttttaccataggccccattatgctcctaaataccccttagcagattttataaaaacagtttttccaaactaatgaatgaaaataaaggattaactctatgagaagaaggcagacatcacaaagcaatttctcaggtcgcttccttctagtttttatcctgcaatatttgctttttcagcattggcctaaatgagctcccaaatgtatgttcccagaatatgcaaaaacagtatttacaaactgccaaatcaaaaggaaaatttatctgtgtgcaaygaatgcacatatcacaaagctatttctcaggtagcttagttctggtttttatcctgggatattcacttttcctccattggcctcaatgagctcccaaatgtccattcacagaagggacaaaaaca

SEQ ID NO: 581628 - DNA, 205 bp, Homo sapiens
tcacagatccttcaaaaactgtgtttccaaatgctaaatgaaaagaaatgttaacatatcataaagcagtttttcagatagcttcattctagtttttatctttgtattttcacttttttgcaattcaccwcaatgagatcccaaatatccattcacagaaagtacaaaaacagtgtttacaaacagctgaatcaaaagaaagttt

SEQ ID NO: 581629 - DNA, 489 bp, Homo sapiens
atgtagtttttatcgtggcatattttctgttttgtcattggtctcaataagctgccaaatgtccatttgcagaatggacaaaaacagtgtttccaatctgctgaacaaaaagaaaggtttaactctgcaggatgaatgcacacatcacaaagcagtayctcagaaagattctttgtagtttttatctgaatttaatttcttttccactgtagtcctcattgcactcccaaatatgtctttgcagattctacaacaacagtgtttccaaactgctgaatgaaaagaaaaatttaattctgtgagatgaatgcacaatttacaagtggtttctcagatagtgtccttctagtttttatcctgagatattaacttttttgccagcctcaaggagctttcaaaagtctattcacagaattgacagagacagtgtttctaaactgctgaatcaaaagaaagggttcactctgtgagaagaatgcacacatcaca

SEQ ID NO: 581630 - DNA, 489 bp, Homo sapiens
atgtagtttttatcgtggcatattttctgttttgtcattggtctcaataagctgccaaatgtccatttgcagaatggacaaaaacagtgtttccaatctgctgaacaaaaagaaaggtttaactctgcaggatgaatgcacacatcacaaagcagtatctcagaaagattctttgtagtttttatctgaatttaatttcttttccactgtagtcctcattgcrctcccaaatatgtctttgcagattctacaacaacagtgtttccaaactgctgaatgaaaagaaaaatttaattctgtgagatgaatgcacaatttacaagtggtttctcagatagtgtccttctagtttttatcctgagatattaacttttttgccagcctcaaggagctttcaaaagtctattcacagaattgacagagacagtgtttctaaactgctgaatcaaaagaaagggttcactctgtgagaagaatgcacacatcaca

SEQ ID NO: 581631 - DNA, 489 bp, Homo sapiens
atgtagtttttatcgtggcatattttctgttttgtcattggtctcaataagctgccaaatgtccatttgcagaatggacaaaaacagtgtttccaatctgctgaacaaaaagaaaggtttaactctgcaggatgaatgcacacatcacaaagcagtatctcagaaagattctttgtagtttttatctgaatttaatttcttttccactgtagtcctcattgcaytcccaaatatgtctttgcagattctacaacaacagtgtttccaaactgctgaatgaaaagaaaaatttaattctgtgagatgaatgcacaatttacaagtggtttctcagatagtgtccttctagtttttatcctgagatattaacttttttgccagcctcaaggagctttcaaaagtctattcacagaattgacagagacagtgtttctaaactgctgaatcaaaagaaagggttcactctgtgagaagaatgcacacatcaca

SEQ ID NO: 581632 - DNA, 489 bp, Homo sapiens
atgtagtttttatcgtggcatattttctgttttgtcattggtctcaataagctgccaaatgtccatttgcagaatggacaaaaacagtgtttccaatctgctgaacaaaaagaaaggtttaactctgcaggatgaatgcacacatcacaaagcagtatctcagaaagattctttgtagtttttatctgaatttaatttcttttccactgtagtcctcattgcactcccaaatatgtctttgcagattctacaacaacagtgtttccaaactgctgaatgaaaagaaaaatttaattctgtgagatgaatgcacaatttacaagtggtttctcagatagtgtccttctagtttttatcctgagatattaacttttttgccagcctcaaggagctttcaaaagtctattcacagaattsacagagacagtgtttctaaactgctgaatcaaaagaaagggttcactctgtgagaagaatgcacacatcaca

SEQ ID NO: 581633 - DNA, 462 bp, Homo sapiens
ggtctcaaactcctgaccccaggtgatctgtccacctcgacctcccaaagttctgggattacaggcatgagccaccgtgcctggccttttacaaacattcttcatggattaattgtataattaaaatttcaatgaataaaataattagattgatataagtaatataataatattatataaaacttgggaaaaagagaaacctgatgtgattaackcaacttctgattccatattagtatatatccagctgcttttcctaaatattttatttcctcaattgattcatacactttcttgaggatagcaaatcttttggaatattttccaaccagaatgaggggatttcctaaatatatgtaaaaaattcagttgtcttagcttttaaaatatagcatattaaaaatattcaccttttcttgggaccattttgtccctgcaatgaaactcaacactagtgtgcat

SEQ ID NO: 581634 - DNA, 384 bp, Homo sapiens
tgaagaagaaaagagacccataaaatctccagtttcatataacatatccaatgaattcttaaaaaatatttgaattactctttggtcaatatgttacagctaaatttggatggaaattacagaaatacaaaagtaatgkcatgttttcctttaaggcaggaaatggctaagtttgagtgttgcctttgtcaaaggatagcaggagtgaatttcagtcagaaaatatgcagaaataaatgggaacctatctccccctaaaatgtttaaggggaaattatcaaacatcaataggcaatttagtagagaaagggaaagtataattcagagggatactctgcatcaagtatattttttgacattccttatttgccaaatcaggaagca

SEQ ID NO: 581635 - DNA, 384 bp, Homo sapiens
tgaagaagaaaagagacccataaaatctccagtttcatataacatatccaatgaattcttaaaaaatatttgaattactctttggtcaatatgttacagctaaatttggatggaaattacagaaatacaaaagtaatgtcatgttttcctttaaggcaggaaatggctaagtttgagtgttgcctttgtcaaaggatagcaggagtgaatttcagtcagaaaatatgcagaaataaatgggaacctatctccccctaaaatgtttaagggraaattatcaaacatcaataggcaatttagtagagaaagggaaagtataattcagagggatactctgcatcaagtatattttttgacattccttatttgccaaatcaggaagca

SEQ ID NO: 581636 - DNA, 384 bp, Homo sapiens
tgaagaagaaaagagacccataaaatctccagtttcatataacatatccaatgaattcttaaaaaatatttgaattactctttggtcaatatgttacagctaaatttggatggaaattacagaaatacaaaagtaatgtcatgttttcctttaaggcaggaaatggctaagtttgagtgttgcctttgtcaaaggatagcaggagtgaatttcagtcagaaaatatgcagaaataaatgggaacctatctccccctaaaatgtttaaggggaaattatcaaacatcaataggcaatttagtagagaaagggaaagtataattsagagggatactctgcatcaagtatattttttgacattccttatttgccaaatcaggaagca

SEQ ID NO: 581637 - DNA, 335 bp, Homo sapiens
tacgtaagtatatttttagatatattttctactaaatataacaggcagtacatggtgggctcacacctttaatcctagcactttgggaggccaaggcagaaggattgcttgagcccaagagttgagaccaacttgrgcaacagagtgaaaccccatcttcacaagaaaataagaaattagcctggtatgtggtgtgtgcctatagtccaagtactcagtagcctgagggaggaggtcccttgagatcaggagttcgaggctgcactctagcctggctgacagagcaagatcctgtctcaagaaaataaaatataataaaaataaaaaataatata

SEQ ID NO: 581638 - DNA, 335 bp, Homo sapiens
tacgtaagtatatttttagatatattttctactaaatataacaggcagtacatggtgggctcacacctttaatcctagcactttgggaggccaaggcagaaggattgcttgagcccaagagttgagaccaacttgggcaacagagtgaaaccccatcttcacaagaaaataagaaattagcctggtatgtggtgtgtkcctatagtccaagtactcagtagcctgagggaggaggtcccttgagatcaggagttcgaggctgcactctagcctggctgacagagcaagatcctgtctcaagaaaataaaatataataaaaataaaaaataatata

SEQ ID NO: 581639 - DNA, 335 bp, Homo sapiens
tacgtaagtatatttttagatatattttctactaaatataacaggcagtacatggtgggctcacacctttaatcctagcactttgggaggccaaggcagaaggattgcttgagcccaagagttgagaccaacttgggcaacagagtgaaaccccatcttcacaagaaaataagaaattagcctggtatgtggtgtgtgcctatagtccamgtactcagtagcctgagggaggaggtcccttgagatcaggagttcgaggctgcactctagcctggctgacagagcaagatcctgtctcaagaaaataaaatataataaaaataaaaaataatata

SEQ ID NO: 581640 - DNA, 380 bp, Homo sapiens
aatcaccaatagactgtgtaactgcccaatgggttcacctcgtgccctgcttagacagagctgatttatcaagacaggggaattgcaatggagaaagagtaattcaggcagakctggctgtgcgggagatcagagttttattattactcaaatcagtctccctgagcattcggggatcagaacttttaaagataatttggcaggtaggggcttgggaagtgggaactgcttattcatcaggttggagatgaaatcatacggggttgaagtgatgacgttttcttgctgtcttctgtttgtgggtggggtggcagaaccagttgagccatattaccagtctgggtggtgtcagctgattcatccagtgcagggtctgcaaa

SEQ ID NO: 581641 - DNA, 380 bp, Homo sapiens
aatcaccaatagactgtgtaactgcccaatgggttcacctcgtgccctgcttagacagagctgatttatcaagacaggggaattgcaatggagaaagagtaattcaggcagagctggctgtgcgggagatcagagttttattattactcaaatcaktctccctgagcattcggggatcagaacttttaaagataatttggcaggtaggggcttgggaagtgggaactgcttattcatcaggttggagatgaaatcatacggggttgaagtgatgacgttttcttgctgtcttctgtttgtgggtggggtggcagaaccagttgagccatattaccagtctgggtggtgtcagctgattcatccagtgcagggtctgcaaa

SEQ ID NO: 581642 - DNA, 380 bp, Homo sapiens
aatcaccaatagactgtgtaactgcccaatgggttcacctcgtgccctgcttagacagagctgatttatcaagacaggggaattgcaatggagaaagagtaattcaggcagagctggctgtgcgggagatcagagttttattattactcaaatcagtctccctgagcattcggggatcagaacttttaaagataatttggcaggtaggggcttgggaagtgggaactgcttattcatcaggttggagatgaaatcatacggggttgaagtgatgaygttttcttgctgtcttctgtttgtgggtggggtggcagaaccagttgagccatattaccagtctgggtggtgtcagctgattcatccagtgcagggtctgcaaa

SEQ ID NO: 581643 - DNA, 608 bp, Homo sapiens
tcagcttctcctaaccttcttctgcctgctttattcgagccatgctggcagctgattttatggtgcccacccacattgagggtggatctgcctttcccagtccactaaataaatgttaatctcctttggcaacaccctcacagacacaaccgggaacaataatttggatccttcaatccaatcaagttgacacttacttaatattaaacttcacaatgtaatattcatcccatttgtaatttttctttaatatacaagctcgttgagaacatgcaccatttgatcttgtctctctgttgtgttgggaggcagtggagaagagaagagttaaatgtgtgggtgtggagtgagactgtcagatttgcatcttggctcccctacttattggatctctgtccttgagtaaattayttaacatctttctcagtttccttacctgtaaatgagtggtgacatatatggaacttagaacaagagccaagcaagtattcaataaaagctaatgttgttgtctactgttcattctcagtgtttggcatagtagccagcaaaaggaagaggatttttttttttttatttttttcagacagtctccctctgtcacccag

SEQ ID NO: 581644 - DNA, 608 bp, Homo sapiens
tcagcttctcctaaccttcttctgcctgctttattcgagccatgctggcagctgattttatggtgcccacccacattgagggtggatctgcctttcccagtccactaaataaatgttaatctcctttggcaacaccctcacagacacaaccgggaacaataatttggatccttcaatccaatcaagttgacacttacttaatattaaacttcacaatgtaatattcatcccatttgtaatttttctttaatatacaagctcgttgagaacatgcaccatttgatcttgtctctctgttgtgttgggaggcagtggagaagagaagagttaaatgtgtgggtgtggagtgagactgtcagatttgcatcttggctcccctacttattggatctctgtccttgagtaaattacttaacatctttctcagtttccttacctgtaaatgagtggtgacatatatggaacttagaacaagagccaagcaagtattcaataaaagctaatgttgttgyctactgttcattctcagtgtttggcatagtagccagcaaaaggaagaggatttttttttttttatttttttcagacagtctccctctgtcacccag

SEQ ID NO: 581645 - DNA, 322 bp, Homo sapiens
gcctggaaatatttttttgaaacatgactgataacaatattttttgaaagaatgacagataccaatcatgaaggaaaagattttsacaaatgacaataaaaaactttaacttctgaatggtaaaaagagtgagaaaattaaaagccaaattacaaattgaaaaaactaaagtatataaaacaaaggttttcattctcaatttaatgcagaatcttgacaaatcaaaaagaaaaaaaggtgaacccacctaaaagaaataggcaaaaaactttcaagaaaagcagtttacaaaatgccaatgactaataaacatggatattta

SEQ ID NO: 581646 - DNA, 322 bp, Homo sapiens
gcctggaaatatttttttgaaacatgactgataacaatattttttgaaagaatgacagataccaatcatgaaggaaaagattttgacaawtgacaataaaaaactttaacttctgaatggtaaaaagagtgagaaaattaaaagccaaattacaaattgaaaaaactaaagtatataaaacaaaggttttcattctcaatttaatgcagaatcttgacaaatcaaaaagaaaaaaaggtgaacccacctaaaagaaataggcaaaaaactttcaagaaaagcagtttacaaaatgccaatgactaataaacatggatattta

SEQ ID NO: 581647 - DNA, 322 bp, Homo sapiens
gcctggaaatatttttttgaaacatgactgataacaatattttttgaaagaatgacagataccaatcatgaaggaaaagattttgacaaatgacaataaaaaactttaacttctgaatggtaaaaagagtgagaaaattaaaagccaaattacaaattgaaaaaactaaagtatataaaacaaaggttttcattctcaatttaatgcagaatcttgacaaatcaaaaagaaaaaaaggtgaacccacctaaaagaaataggcaaaaaactttcaagaaaagcartttacaaaatgccaatgactaataaacatggatattta

SEQ ID NO: 581648 - DNA, 442 bp, Homo sapiens
aagacttaaatctaacacctaaaactataaaaattctagaaggtaacattggaaatacccttctagacatttgcttaggcaaagayttcatgaccaagaacccaaaagcaaaggcaacaaaaacaaagataaatagatgggacttaattaaactaagaagcttctacacagcaaaagaaataatcagcagagtaaaaagacaacctatagagtgggagaaaatctttacaaactatgcatccaacaaagtactaatatccaaaatctataaggaactcaaatcagcaagaaaaaaacaatttatcctatcaaaaagtgtgctaaggacatgaatagacacttcccaaaagaagatataaatggccaagaaacatgaaaaaatcctcaatatcactaattatcagggaaatgcaaacaaaaccaaaatgcgataccatctcac

SEQ ID NO: 581649 - DNA, 442 bp, Homo sapiens
aagacttaaatctaacacctaaaactataaaaattctagaaggtaacattggaaatacccttctagacatttgcttaggcaaagacttcatgaccaagaacccaaaagcaaaggcaacaaaaacaaagataaatagatgggacttaattaaactaagaagcttctacacagcaaaagaaataatcagcagagtaaaaagacaacctayagagtgggagaaaatctttacaaactatgcatccaacaaagtactaatatccaaaatctataaggaactcaaatcagcaagaaaaaaacaatttatcctatcaaaaagtgtgctaaggacatgaatagacacttcccaaaagaagatataaatggccaagaaacatgaaaaaatcctcaatatcactaattatcagggaaatgcaaacaaaaccaaaatgcgataccatctcac

SEQ ID NO: 581650 - DNA, 442 bp, Homo sapiens
aagacttaaatctaacacctaaaactataaaaattctagaaggtaacattggaaatacccttctagacatttgcttaggcaaagacttcatgaccaagaacccaaaagcaaaggcaacaaaaacaaagataaatagatgggacttaattaaactaagaagcttctacacagcaaaagaaataatcagcagagtaaaaagacaacctatagagtgggagaaaatctttacaaactatgcatccaacaaagtactaatatccaaaatctataaggaactcaaatcagcaagaaaaaaacaawttatcctatcaaaaagtgtgctaaggacatgaatagacacttcccaaaagaagatataaatggccaagaaacatgaaaaaatcctcaatatcactaattatcagggaaatgcaaacaaaaccaaaatgcgataccatctcac

SEQ ID NO: 581651 - DNA, 648 bp, Homo sapiens
ttacttaatttttgatgaatccacgagtgacggtggttatagcagtgatggttaaaatcaaagaataaatgtttacaaagtgaaaattgtaaggagcacctcctcccactatacagttcaaaaacaaacacaaatatggtaggctggctgagagttttcacatcacattgtttattgtcttgcatttgtatggttatcatatacttaacaaaattttattttgcaataatttatattcattcatttattcattgtacaatccactagttcagggtcattgtacaatccactagaatactagttcagggtcaaaggtgactgaaacttaatccaaaaaaatcaaggagggactccctccctaacacattctaygaatctagtatcacaattatacccaaatcaggcaaagccacacacacacacacacacacacacacacacacacacacacactactggtcaatatccctgatgaacagagatgcaaaaattctcaactagcaaaatcaattcaatagtacatcaaagagataatatagttaagtgggttttactccagaaatacaaggatggttcaacatgtgaatcattcttccataaagacatatacacacatatgttcattgtggcactattcacaataaaaag

SEQ ID NO: 581652 - DNA, 648 bp, Homo sapiens
ttacttaatttttgatgaatccacgagtgacggtggttatagcagtgatggttaaaatcaaagaataaatgtttacaaagtgaaaattgtaaggagcacctcctcccactatacagttcaaaaacaaacacaaatatggtaggctggctgagagttttcacatcacattgtttattgtcttgcatttgtatggttatcatatacttaacaaaattttattttgcaataatttatattcattcatttattcattgtacaatccactagttcagggtcattgtacaatccactagaatactagttcagggtcaaaggtgactgaaacttaatccaaaaaaatcaaggagggactccctccctaacacattctacgaatctagtatcacaattatacccaaatcaggcaaagccacacacacacacacacacacacacacacacacacacacacactactggtcaatatccctgatgaacakagatgcaaaaattctcaactagcaaaatcaattcaatagtacatcaaagagataatatagttaagtgggttttactccagaaatacaaggatggttcaacatgtgaatcattcttccataaagacatatacacacatatgttcattgtggcactattcacaataaaaag

SEQ ID NO: 581653 - DNA, 648 bp, Homo sapiens
ttacttaatttttgatgaatccacgagtgacggtggttatagcagtgatggttaaaatcaaagaataaatgtttacaaagtgaaaattgtaaggagcacctcctcccactatacagttcaaaaacaaacacaaatatggtaggctggctgagagttttcacatcacattgtttattgtcttgcatttgtatggttatcatatacttaacaaaattttattttgcaataatttatattcattcatttattcattgtacaatccactagttcagggtcattgtacaatccactagaatactagttcagggtcaaaggtgactgaaacttaatccaaaaaaatcaaggagggactccctccctaacacattctacgaatctagtatcacaattatacccaaatcaggcaaagccacacacacacacacacacacacacacacacacacacacacactactggtcaatatccctgatgaacagagatgcaaaaattctcaactagcaaaatcaattcaatagtacatcaaagagataatatagttaagtgggttktactccagaaatacaaggatggttcaacatgtgaatcattcttccataaagacatatacacacatatgttcattgtggcactattcacaataaaaag

SEQ ID NO: 581654 - DNA, 542 bp, Homo sapiens
tcttgctgttgttgtcctttacacgatggtgttgcaagaaaatggatatggtgytgaggaagacattccaaccttactaatggctgctagcagtatggatgacattctggttatcactggattcaatacatgcttgagcatagtcttctcctcgggtaaacaagaaaatataacaaccaccagatcattcatgaccttttttgttagttctttaaacagggtttctggctttgcttcttcatttattaaccaagactgttcaatttaacatctttttaatctccatagaaagctcattccagaccaaggaagatatttcagtggcttaagataccactacttaacacacatgatctcactttaataatcatgtgacaattaatttgataaaccatattattactatttatctgcttatgttgcttttgaattttatcagttctcactagaaaaaattaagcagcagtattatttgtactactaatattttaataggcatttttgaaatgtgcctttttggccatcctaataaacaaatggtt

SEQ ID NO: 581655 - DNA, 542 bp, Homo sapiens
tcttgctgttgttgtcctttacacgatggtgttgcaagaaaatggatatggtgctgaggaagacattccaaccttactaatggctgctagcagtatggatgacattctggytatcactggattcaatacatgcttgagcatagtcttctcctcgggtaaacaagaaaatataacaaccaccagatcattcatgaccttttttgttagttctttaaacagggtttctggctttgcttcttcatttattaaccaagactgttcaatttaacatctttttaatctccatagaaagctcattccagaccaaggaagatatttcagtggcttaagataccactacttaacacacatgatctcactttaataatcatgtgacaattaatttgataaaccatattattactatttatctgcttatgttgcttttgaattttatcagttctcactagaaaaaattaagcagcagtattatttgtactactaatattttaataggcatttttgaaatgtgcctttttggccatcctaataaacaaatggtt

SEQ ID NO: 581656 - DNA, 542 bp, Homo sapiens
tcttgctgttgttgtcctttacacgatggtgttgcaagaaaatggatatggtgctgaggaagacattccaaccttactaatggctgctagcagtatggatgacattctggttatcactggattcaatacatgcttgagcatagtcttctcctcgggtaaacaagaaaatataacaaccaccagatcattcatgaccttttttgttagttctttaaacagggtttctggctttgcttcttcatttattaaccaagactgttcaatttaacatctttttaatctccatagaaagctcattccagaccaaggaagatatttcagtggcttaagataccactacttaacacacatgatctcactttaataatcatgtgacaattaatttgataaaccatattattactatttatctgcttatgttgcttttgaattttatcagttctcaytagaaaaaattaagcagcagtattatttgtactactaatattttaataggcatttttgaaatgtgcctttttggccatcctaataaacaaatggtt

SEQ ID NO: 581657 - DNA, 559 bp, Homo sapiens
tgggagtgcaatggtgtgatctcagctcactacaacttctgcctcctgggttcaagcgattctcctgcctcagcttcccgagtagctgggattataggcatgcgccactgtgcttggctccatctgtgatttctttcagcagtgttttgtaattttcattgtagaggtcttttgattcctttgttaggtatattactaagttttttttgtttgttttttttgttttttgcagctattgcaaaaggggttgagttcttgatgtgattctctgcttggtagctgttgatgtatagaagagctactgatttgtgtacaataatcttgtatctggaaactgcagaattattttatcatttctaggagctttctagaagagtccatagggttttcaaggcaaaagatcatatcgtcagcaaccagtgacagtttgacttcctstttaccgatttggatttcctctatttccttcttttgtctgattgctctggctaggacttccagtactatgttgaagaggagtggtgagagtaggctcctcatcttgttgcagttctcaagg

SEQ ID NO: 581658 - DNA, 657 bp, Homo sapiens
atccaaaacacatatatctgtctttttttttttttttaagtttttsttgttctcaacctgagctggcctgagcaaaactgttaggtgtagagtattagaacagagaatggggacagtcttcccagagtcccagaagtacggggctgaggctggattgcccaaggagttcctggaccagtaatccccagagaaacagcatttagctcaagtaacagcctttagctcaagctacgagttctgtcccccatctccacagaaaacggattgatacagtttggctttatgtccctacccaaatctcatctcaaattgtattatcctggtggtgagaaagggaactgttgagaggtgattgtctcatgggggcagttccccccaggctattctcatgatagtgagttctcatgagatctgacagtttcataaaaggctcttcgcccttcacttccttcacaagctctctcacctgctgccattaagacacgccttcttccccttccaccatgattgtaagtttcctgaggcctccccagccatgtggagctgtgagtcaattaaacctcctttctttataaattacccagtcttgggcagttctttatagcagtgtgagaacagactaatacacagaccaaaagaaaattaatagaaaggggc

SEQ ID NO: 581659 - DNA, 657 bp, Homo sapiens
atccaaaacacatatatctgtctttttttttttttttaagtttttcttgttctcaacctgagctgrcctgagcaaaactgttaggtgtagagtattagaacagagaatggggacagtcttcccagagtcccagaagtacggggctgaggctggattgcccaaggagttcctggaccagtaatccccagagaaacagcatttagctcaagtaacagcctttagctcaagctacgagttctgtcccccatctccacagaaaacggattgatacagtttggctttatgtccctacccaaatctcatctcaaattgtattatcctggtggtgagaaagggaactgttgagaggtgattgtctcatgggggcagttccccccaggctattctcatgatagtgagttctcatgagatctgacagtttcataaaaggctcttcgcccttcacttccttcacaagctctctcacctgctgccattaagacacgccttcttccccttccaccatgattgtaagtttcctgaggcctccccagccatgtggagctgtgagtcaattaaacctcctttctttataaattacccagtcttgggcagttctttatagcagtgtgagaacagactaatacacagaccaaaagaaaattaatagaaaggggc

SEQ ID NO: 581660 - DNA, 604 bp, Homo sapiens
tgctgaatcaaaagaaaggtttaactctgtgagacgaatgcacacatcacaaagtggtttctcagaaaggttccttctagtttttatctgaagatattttctttttcaccatagggtgcaacatactctcaaatatcccttcaccaatcgtacaaacacagtgtttccaaaatgctgaatgaaaagaaaggtttaactttgtgaggtgaatgcacacatgacaaaatagtttctcagatagctttcttgtagtttttaacctgggatattcccctttttccattttcctcaatgagctcccaattgtccatttgcacattggacaaaaaatgtgttcccaaactgctgaatcaaaagtatggtttaactctgacctgaatgtacacatcacaaagttatttatcaggtagtttccttctagtttatatcctgggatattygcttttccaccacgggcttcaatgagcttgcaaatttccattcccagaatggacaaaaacagtgtttccaaactgctgtatgaaaaggaaaggtaaagtctgtaagatgaatgcacacgtcacaaagcagtttctcagaaagcttctttctagtttttatgtga

SEQ ID NO: 581661 - DNA, 604 bp, Homo sapiens
tgctgaatcaaaagaaaggtttaactctgtgagacgaatgcacacatcacaaagtggtttctcagaaaggttccttctagtttttatctgaagatattttctttttcaccatagggtgcaacatactctcaaatatcccttcaccaatcgtacaaacacagtgtttccaaaatgctgaatgaaaagaaaggtttaactttgtgaggtgaatgcacacatgacaaaatagtttctcagatagctttcttgtagtttttaacctgggatattcccctttttccattttcctcaatgagctcccaattgtccatttgcacattggacaaaaaatgtgttcccaaactgctgaatcaaaagtatggtttaactctgacctgaatgtacacatcacaaagttatttatcaggtagtttccttctagtttatatcctgggatattcgcttttccaccacgggcttcaatgagcttgcaaatttccattcccagaakggacaaaaacagtgtttccaaactgctgtatgaaaaggaaaggtaaagtctgtaagatgaatgcacacgtcacaaagcagtttctcagaaagcttctttctagtttttatgtga

SEQ ID NO: 581662 - DNA, 185 bp, Homo sapiens
gtgtttccaaactactctatcraaagagaggtttagctgtgagaggaatgtacacctgtcaaagcagtttctcagaaagcttctttctagtttttatctgtattttctttttcaccatagtctcaaaattctcccaaatatgccttcacatattctacaaaatcattgtttccaaactgcttaat

SEQ ID NO: 581663 - DNA, 185 bp, Homo sapiens
gtgtttccaaactactctatcaaaagagaggtttagctgtgagaggaatgtacacctgtcaaagcagtttctcrgaaagcttctttctagtttttatctgtattttctttttcaccatagtctcaaaattctcccaaatatgccttcacatattctacaaaatcattgtttccaaactgcttaat

SEQ ID NO: 581664 - DNA, 185 bp, Homo sapiens
gtgtttccaaactactctatcaaaagagaggtttagctgtgagaggaatgtacacctgtcaaagcagtttctcagaaagcttctttctagtttttrtctgtattttctttttcaccatagtctcaaaattctcccaaatatgccttcacatattctacaaaatcattgtttccaaactgcttaat

SEQ ID NO: 581665 - DNA, 410 bp, Homo sapiens
acaaaaacagtgtttccaaactcctgaatgaaaagaaagatttaactctgagagacgaatgctgacttcacaaaggggtttctcagataatatccttccasttttcttcctggggtatacagtttttcacaaatggcatcagtgagttccctaatgtccattcccagaatgtacaaaaacagtgtttccaaactgctgaatcaaaggaaaggtttaaccctgtgagaggaatgcacacctctttaagcagtttctcaggaaacttctttctaatttttatctgaagatatttcctttttcaccacaggcctcaatgcactcgcaaatatcccttcacagattctacaaaaacagcattcccaaactgctgactgaaaaggaaagtttacctctgccaggtgaatgcacac

SEQ ID NO: 581666 - DNA, 410 bp, Homo sapiens
acaaaaacagtgtttccaaactcctgaatgaaaagaaagatttaactctgagagacgaatgctgacttcacaaaggggtttctcagataatatccttccagttttyttcctggggtatacagtttttcacaaatggcatcagtgagttccctaatgtccattcccagaatgtacaaaaacagtgtttccaaactgctgaatcaaaggaaaggtttaaccctgtgagaggaatgcacacctctttaagcagtttctcaggaaacttctttctaatttttatctgaagatatttcctttttcaccacaggcctcaatgcactcgcaaatatcccttcacagattctacaaaaacagcattcccaaactgctgactgaaaaggaaagtttacctctgccaggtgaatgcacac

SEQ ID NO: 581667 - DNA, 410 bp, Homo sapiens
acaaaaacagtgtttccaaactcctgaatgaaaagaaagatttaactctgagagacgaatgctgacttcacaaaggggtttctcagataatatccttccagttttcttcctggggtatacagtttttcacaaatggcatcagtgagttccctaatgtccattcccagaatgtacaaaaacagtgtttccaaactgmtgaatcaaaggaaaggtttaaccctgtgagaggaatgcacacctctttaagcagtttctcaggaaacttctttctaatttttatctgaagatatttcctttttcaccacaggcctcaatgcactcgcaaatatcccttcacagattctacaaaaacagcattcccaaactgctgactgaaaaggaaagtttacctctgccaggtgaatgcacac

SEQ ID NO: 581668 - DNA, 410 bp, Homo sapiens
acaaaaacagtgtttccaaactcctgaatgaaaagaaagatttaactctgagagacgaatgctgacttcacaaaggggtttctcagataatatccttccagttttcttcctggggtatacagtttttcacaaatggcatcagtgagttccctaatgtccattcccagaatgtacaaaaacagtgtttccaaactgctkaatcaaaggaaaggtttaaccctgtgagaggaatgcacacctctttaagcagtttctcaggaaacttctttctaatttttatctgaagatatttcctttttcaccacaggcctcaatgcactcgcaaatatcccttcacagattctacaaaaacagcattcccaaactgctgactgaaaaggaaagtttacctctgccaggtgaatgcacac

SEQ ID NO: 581669 - DNA, 559 bp, Homo sapiens
tatattctctgcaaagagaatattcatgagcctcctcctgaarccagcagcctagagatagttttataaattggatacaagttggaaacctatactctttaagtttttgaaatattagcttcccagggaagaaaatcaaattcataagatctgttaggacaatttaactcaagatgttcaaaactgaaatgacatattctacaatatgtgataaaaccaccccctaataccttaaagcaaaacaggggtggaccttaaagacctgccttttcctcatcccccagccaatcagttttcaaatcttgcattttattctgaaagggccttatacccctggtctcttgtttctagacttggcacatatttaaagttgctacctctatctactgaattgtctctcttcaaacagtatctatgcctgccaaatgtgaacatacaaacaacaaatcagaatgtgccattctgatttaaactgcttattagttaataccctcaagataacatctgggttgttagctgcaatgagtcaagcctacttacatctttttttgtctttggc

SEQ ID NO: 581670 - DNA, 559 bp, Homo sapiens
tatattctctgcaaagagaatattcatgagcctcctcctgaagycagcagcctagagatagttttataaattggatacaagttggaaacctatactctttaagtttttgaaatattagcttcccagggaagaaaatcaaattcataagatctgttaggacaatttaactcaagatgttcaaaactgaaatgacatattctacaatatgtgataaaaccaccccctaataccttaaagcaaaacaggggtggaccttaaagacctgccttttcctcatcccccagccaatcagttttcaaatcttgcattttattctgaaagggccttatacccctggtctcttgtttctagacttggcacatatttaaagttgctacctctatctactgaattgtctctcttcaaacagtatctatgcctgccaaatgtgaacatacaaacaacaaatcagaatgtgccattctgatttaaactgcttattagttaataccctcaagataacatctgggttgttagctgcaatgagtcaagcctacttacatctttttttgtctttggc

SEQ ID NO: 581671 - DNA, 593 bp, Homo sapiens
tgaagctgttgttaactcctgatatattctctgcaaagagaatattcatgagcctcctcctgaagccagcagcctagagatagttttataaattggatacaagttggaaayctatactctttaagtttttgaaatattagcttcccagggaagaaaatcaaattcataagatctgttaggacaatttaactcaagatgttcaaaactgaaatgacatattctacaatatgtgataaaaccaccccctaataccttaaagcaaaacaggggtggaccttaaagacctgccttttcctcatcccccagccaatcagttttcaaatcttgcattttattctgaaagggccttatacccctggtctcttgtttctagacttggcacatatttaaagttgctacctctatctactgaattgtctctcttcaaacagtatctatgcctgccaaatgtgaacatacaaacaacaaatcagaatgtgccattctgatttaaactgcttattagttaataccctcaagataacatctgggttgttagctgcaatgagtcaagcctacttacatctttttttgtctttggctgcacatttcct

SEQ ID NO: 581672 - DNA, 504 bp, Homo sapiens
acctatactctttaagtttttgaaatattagcttcccagggaagaaaatcaaattcataagatctgttaggacaatttaactcaagatgttcaaaactgaaatgacatrttctacaatatgtgataaaaccaccccctaataccttaaagcaaaacaggggtggaccttaaagacctgccttttcctcatcccccagccaatcagttttcaaatcttgcattttattctgaaagggccttatacccctggtctcttgtttctagacttggcacatatttaaagttgctacctctatctactgaattgtctctcttcaaacagtatctatgcctgccaaatgtgaacatacaaacaacaaatcagaatgtgccattctgatttaaactgcttattagttaataccctcaagataacatctgggttgttagctgcaatgagtcaagcctacttacatctttttttgtctttggctgcacatttcctatcacatcacactccagcaa

SEQ ID NO: 581673 - DNA, 476 bp, Homo sapiens
ctatactctttaagtttttgaaatattagcttcccagggaagaaaatcaaattcataagatctgttaggacaatttaactcaagatgttcaaaactgaaatgacatattctacaatatgtgataaaaccamcccctaataccttaaagcaaaacaggggtggaccttaaagacctgccttttcctcatcccccagccaatcagttttcaaatcttgcattttattctgaaagggccttatacccctggtctcttgtttctagacttggcacatatttaaagttgctacctctatctactgaattgtctctcttcaaacagtatctatgcctgccaaatgtgaacatacaaacaacaaatcagaatgtgccattctgatttaaactgcttattagttaataccctcaagataacatctgggttgttagctgcaatgagtcaagcctacttacatctttttttgtctttggctgcaca

SEQ ID NO: 581674 - DNA, 504 bp, Homo sapiens
acctatactctttaagtttttgaaatattagcttcccagggaagaaaatcaaattcataagatctgttaggacaatttaactcaagatgttcaaaactgaaatgacatattctacaatatgtgataaaaccaccccctaataccttaaagcaaaacaggggtggaccttaaagacctgccttttcctcatcccccagccaatcagttttcaaatcttgcattttattctgaaagggccttatacccctggtctcttgtttctagacttggcacatatttaaagttgctacctctatctactgaattgtctctcttcaaacagtatctatgcctgccaaatgtgaacatacaaacaacaaatcagaatrtgccattctgatttaaactgcttattagttaataccctcaagataacatctgggttgttagctgcaatgagtcaagcctacttacatctttttttgtctttggctgcacatttcctatcacatcacactccagcaa

SEQ ID NO: 581675 - DNA, 476 bp, Homo sapiens
ctatactctttaagtttttgaaatattagcttcccagggaagaaaatcaaattcataagatctgttaggacaatttaactcaagatgttcaaaactgaaatgacatattctacaatatgtgataaaaccaccccctaataccttaaagcaaaacaggggtggaccttaaagacctgccttttcctcatcccccagccaatcagttttcaaatcttgcattttattctgaaagggccttatacccctggtctcttgtttctagacttggcacatatttaaagttgctacctctatctactgaattgtctctcttcaaacagtatctatgcctgccaaatgtgaacatacaaacaacaaatcagaatgtgccattctgatttaaactgcttattagttaataccctcaagataacatctgggttgttagctgcaatgagtcaagcytacttacatctttttttgtctttggctgcaca

SEQ ID NO: 581676 - DNA, 390 bp, Homo sapiens
cacagaatgtaaaaaaaaaaaaaaaaacagtgtttccaaaatgctgaatcaaaagaaatgtttaacactgtgagataaatgcacacataaaaatgcagtttctcagaaagcttctttctagtttttatctgaaggtgtttcctttttcascacaggcctcaatgcactgcaaaatatccctttgcagattctgcaaaacagtgtttccaaactcctcaataaggtttaattctgtgtgaggtatgcacataaccgaagcagtttctcatataggttccttccagttttatcagggaacatttgctacttaactttggcctccatgagctcccaaatgtccattcacagaatggacaaaaacagtgtttccaactgctgaatgaaaagaaa

SEQ ID NO: 581677 - DNA, 390 bp, Homo sapiens
cacagaatgtaaaaaaaaaaaaaaaaacagtgtttccaaaatgctgaatcaaaagaaatgtttaacactgtgagataaatgcacacataaaaatgcagtttctcagaaagcttctttctagtttttatctgaaggtgtttcctttttcaccacaggcctcaatgcactgcaaaatatccctttgcagattctgcaaaacagtgtttccaaactcctcaataaggtttaattctgtgtgakgtatgcacataaccgaagcagtttctcatataggttccttccagttttatcagggaacatttgctacttaactttggcctccatgagctcccaaatgtccattcacagaatggacaaaaacagtgtttccaactgctgaatgaaaagaaa

SEQ ID NO: 581678 - DNA, 390 bp, Homo sapiens
cacagaatgtaaaaaaaaaaaaaaaaacagtgtttccaaaatgctgaatcaaaagaaatgtttaacactgtgagataaatgcacacataaaaatgcagtttctcagaaagcttctttctagtttttatctgaaggtgtttcctttttcaccacaggcctcaatgcactgcaaaatatccctttgcagattctgcaaaacagtgtttccaaactcctcaataaggtttaattctgtgtgaggtatgcacataaccgaagcagtttctcatatagrttccttccagttttatcagggaacatttgctacttaactttggcctccatgagctcccaaatgtccattcacagaatggacaaaaacagtgtttccaactgctgaatgaaaagaaa

SEQ ID NO: 581679 - DNA, 310 bp, Homo sapiens
agtttctcagatagcttcctcctaattgtcatcyggggttattcctttttcaccactgtcctcaacgagctcccaaatgtacattagcagaatggacaaaaacagtgtttccggactgcttaatccaaagagaggtttaactctctgtaatcaatgcacacatcacagagcagtttgtaggattgcttccttctagtttttattctgggatgtttcctttttcacctttggcctcagggagactacaaatgtttattttcagaatggacaaaaagtgtttccaaactagtgaatcaaaagaaaggttgaa

SEQ ID NO: 581680 - DNA, 535 bp, Homo sapiens
ttttattctgggatgtttcctttttcacctttggcctcagggagactacaaatgtttattttcagaatggacaaaaagtgtttccaaactagtgaatcaaaagaaaggttkaactctgtaagatgaatgaacacatcataaagcagtttcttataaaactactttctaattcttatctgaagatattttcttttttaccatagatctcattgtgctcctaaatatctcttcacagtttctacaaaaacagtgtttccaaactacttaatgaaagacagttttatctctgggatatgaatgcatgcagcccaaagctgtgtctcacatggcttccttctagtttttatgctgttatatccactttttcatcattgccctcaatgagctccaaaatctgcttttgcagaattggcaaaaacagtgtttcaatactattaaatcaaaagaaaggtttaattctgtgagatgaattcatacctcattcatacgtcacaaagtagttgctcagaaagtttctttccagtttttatgtaaa

SEQ ID NO: 581681 - DNA, 535 bp, Homo sapiens
ttttattctgggatgtttcctttttcacctttggcctcagggagactacaaatgtttattttcagaatggacaaaaagtgtttccaaactagtgaatcaaaagaaaggttgaactctgtaagatgaatgaacacatcataaagcaktttcttataaaactactttctaattcttatctgaagatattttcttttttaccatagatctcattgtgctcctaaatatctcttcacagtttctacaaaaacagtgtttccaaactacttaatgaaagacagttttatctctgggatatgaatgcatgcagcccaaagctgtgtctcacatggcttccttctagtttttatgctgttatatccactttttcatcattgccctcaatgagctccaaaatctgcttttgcagaattggcaaaaacagtgtttcaatactattaaatcaaaagaaaggtttaattctgtgagatgaattcatacctcattcatacgtcacaaagtagttgctcagaaagtttctttccagtttttatgtaaa

SEQ ID NO: 581682 - DNA, 535 bp, Homo sapiens
ttttattctgggatgtttcctttttcacctttggcctcagggagactacaaatgtttattttcagaatggacaaaaagtgtttccaaactagtgaatcaaaagaaaggttgaactctgtaagatgaatgaacacatcataaagcagtttcttataaaactactttctaattcttatctgaagatattttcttttttaccatagatctcattgtgctcctaaatrtctcttcacagtttctacaaaaacagtgtttccaaactacttaatgaaagacagttttatctctgggatatgaatgcatgcagcccaaagctgtgtctcacatggcttccttctagtttttatgctgttatatccactttttcatcattgccctcaatgagctccaaaatctgcttttgcagaattggcaaaaacagtgtttcaatactattaaatcaaaagaaaggtttaattctgtgagatgaattcatacctcattcatacgtcacaaagtagttgctcagaaagtttctttccagtttttatgtaaa

SEQ ID NO: 581683 - DNA, 535 bp, Homo sapiens
ttttattctgggatgtttcctttttcacctttggcctcagggagactacaaatgtttattttcagaatggacaaaaagtgtttccaaactagtgaatcaaaagaaaggttgaactctgtaagatgaatgaacacatcataaagcagtttcttataaaactactttctaattcttatctgaagatattttcttttttaccatagatctcattgtgctcctaaatatctcttcacagtttctacaaaaacagtgtttccaaactacttaatgaaagacagttttatctctgggatatgaatgcatgcagcccaaagctgtgtctcacatggcttccttctagtttttatgctgttatatccactttttcatcattgccctcaatgagctccaaaatctgcttttgcagaattggcaaaaacagtgtttcaatactattaaatcaaaagaaaggtttaattctgtgagatgaattcatacmtcattcatacgtcacaaagtagttgctcagaaagtttctttccagtttttatgtaaa

SEQ ID NO: 581684 - DNA, 552 bp, Homo sapiens
ttgtttttcactataggcctcaatgtgttcccaaatatccctttgaaggttctacaaaaacagtgtttccaaattgctgaatgatagaatttttttaactctgtgagatgaattcacacatcactaagctgtttcactgaaatcttctttctggtttttatctgaatatattttctttttcactgaaggcctgaatgtgctccctaagatcccttcacagattctacaaaaaccgtgcttccaaactactgaataaatataaaggtttaattctgccaaacgaatgtgtacatcactaagttatttctcagatatcttcctactggtttttatcctgggatattaactttttcaccattggcctcaatgagctcccaagtgttcattcacagaatggacaaaaacagagtttacaaactgctcaatcaaaaatagtttaactctgcaagatgaatgttcacatcataaagcrggctctcagatagattccttccagtttttaaccttggatattcacttttttgccatggacctcaaagagctcccaaatgt

SEQ ID NO: 581685 - DNA, 552 bp, Homo sapiens
ttgtttttcactataggcctcaatgtgttcccaaatatccctttgaaggttctacaaaaacagtgtttccaaattgctgaatgatagaatttttttaactctgtgagatgaattcacacatcactaagctgtttcactgaaatcttctttctggtttttatctgaatatattttctttttcactgaaggcctgaatgtgctccctaagatcccttcacagattctacaaaaaccgtgcttccaaactactgaataaatataaaggtttaattctgccaaacgaatgtgtacatcactaagttatttctcagatatcttcctactggtttttatcctgggatattaactttttcaccattggcctcaatgagctcccaagtgttcattcacagaatggacaaaaacagagtttacaaactgctcaatcaaaaatagtttaactctgcaagatgaatgttcacatcataaagcaggctctcagatagattccttccagtttttaaccttggatattcacttttttgccatggrcctcaaagagctcccaaatgt

SEQ ID NO: 581686 - DNA, 594 bp, Homo sapiens
gaatggacaaaatcagtttttccaaactactgaatcaaaagaaaggtttagctctctgagaggaatgcacacatcacaaagcagtttctcagaaaacttctttctggtttttttctgaagacattttctttttcacaataggtctcaatgcactcccaaatatcccatcacagaytttttaaaaatagtgttccaactgttgaaagaatagaaaggtttaactctgtgagatgaaggtacacatgacaaagcagattctcagacagcttccttcgagattttatcctgggatatttgctttttcacaattggcctcaatgagctcccaaatgtccatttatccaacggagaaatacagtttccaaactgccgaatcaaaagaaaggtttaaatttgtgagatgaatgcgcacctcccaaagcagtttttcagaaagcttctttctagttttcatctgaagatattttctttttcaccataggcctcaatacgctcccaaatatcccttcacagattctacagaaacagtgtttccaaactgctgaatgaaaagaatggcttcactctgtgagactaatgcagacatcacaaagc

SEQ ID NO: 581687 - DNA, 594 bp, Homo sapiens
gaatggacaaaatcagtttttccaaactactgaatcaaaagaaaggtttagctctctgagaggaatgcacacatcacaaagcagtttctcagaaaacttctttctggtttttttctgaagacattttctttttcacaataggtctcaatgcactcccaaatatcccatcacagactttttaaaaatagtgttccaactgytgaaagaatagaaaggtttaactctgtgagatgaaggtacacatgacaaagcagattctcagacagcttccttcgagattttatcctgggatatttgctttttcacaattggcctcaatgagctcccaaatgtccatttatccaacggagaaatacagtttccaaactgccgaatcaaaagaaaggtttaaatttgtgagatgaatgcgcacctcccaaagcagtttttcagaaagcttctttctagttttcatctgaagatattttctttttcaccataggcctcaatacgctcccaaatatcccttcacagattctacagaaacagtgtttccaaactgctgaatgaaaagaatggcttcactctgtgagactaatgcagacatcacaaagc

SEQ ID NO: 581688 - DNA, 594 bp, Homo sapiens
gaatggacaaaatcagtttttccaaactactgaatcaaaagaaaggtttagctctctgagaggaatgcacacatcacaaagcagtttctcagaaaacttctttctggtttttttctgaagacattttctttttcacaataggtctcaatgcactcccaaatatcccatcacagactttttaaaaatagtgttccaactgttgaaagaatagaaaggtttaactctgtgagatgaaggtacacatgacaaagcagattctcagacagcttccttcgagattttatcctgggatatttgctttttcacaattggcctcaatgagctcccaaatgtccatttayccaacggagaaatacagtttccaaactgccgaatcaaaagaaaggtttaaatttgtgagatgaatgcgcacctcccaaagcagtttttcagaaagcttctttctagttttcatctgaagatattttctttttcaccataggcctcaatacgctcccaaatatcccttcacagattctacagaaacagtgtttccaaactgctgaatgaaaagaatggcttcactctgtgagactaatgcagacatcacaaagc

SEQ ID NO: 581689 - DNA, 594 bp, Homo sapiens
gaatggacaaaatcagtttttccaaactactgaatcaaaagaaaggtttagctctctgagaggaatgcacacatcacaaagcagtttctcagaaaacttctttctggtttttttctgaagacattttctttttcacaataggtctcaatgcactcccaaatatcccatcacagactttttaaaaatagtgttccaactgttgaaagaatagaaaggtttaactctgtgagatgaaggtacacatgacaaagcagattctcagacagcttccttcgagattttatcctgggatatttgctttttcacaattggcctcaatgagctcccaaatgtccatttatccaacggagaaatacagtttccaaactgccgaatcaaaagaaaggtttaaatttgtgagatgaatgcgcacctcccaaagcagtttttcagaaagcttctttctagttttcatctgaagatattttctttttcaccataggcctcaatackctcccaaatatcccttcacagattctacagaaacagtgtttccaaactgctgaatgaaaagaatggcttcactctgtgagactaatgcagacatcacaaagc

SEQ ID NO: 581690 - DNA, 526 bp, Homo sapiens
tgtctcaaaatatatgaaagtagataaaattagtttacttgctgaacataatcaaatatagcaactttccagtaaaagactattaggacaaactatgttaacacaacctcagatgatgcagcatagttaaaacaaaacaaaacagctttgggcatattctatactccaacctctgtggtgcaaagggactatatggccaactaggtgttgaggcagtcacagaactgctgcacatgtggtttttaaacaagatttttaattccccctaaagtggaagaagtcatctaacaaaatttattatgacttaaattgctacttctttatttagttttyctcaaactttaacaaaataaattatgtagtaaattatagtcattaagcttgaaaaatgtttcaattgaatgggaaaacttcctgtgataaagcctccaatcatcaaggaataagtcaatatattttacacataaattttccaacatgttaagcactaagcttttaactaaatagctaaggggaaattgttgcc

SEQ ID NO: 581691 - DNA, 526 bp, Homo sapiens
tgtctcaaaatatatgaaagtagataaaattagtttacttgctgaacataatcaaatatagcaactttccagtaaaagactattaggacaaactatgttaacacaacctcagatgatgcagcatagttaaaacaaaacaaaacagctttgggcatattctatactccaacctctgtggtgcaaagggactatatggccaactaggtgttgaggcagtcacagaactgctgcacatgtggtttttaaacaagatttttaattccccctaaagtggaagaagtcatctaacaaaatttattatgacttaaattgctacttctttatttagtttttctcaaactttaacaaaataaattatgtagtaaattatagtcattaagcttgaaaaatgtttcaattgaatgggaaaacttcctgtgataaagcctccartcatcaaggaataagtcaatatattttacacataaattttccaacatgttaagcactaagcttttaactaaatagctaaggggaaattgttgcc

SEQ ID NO: 581692 - DNA, 370 bp, Homo sapiens
agaatggacatttcagatctctttgaaccccaargtgaaaaagcgaatctcccatgataaaaaacagaaggaatctatctgataaactgccttgtgatgtgtacattcacctcaaagagttaaacttttcattcagcagtttggaaaaactgttttggtagaatctgcaaaggtgtacttgggagtgcattggggccaaactagaagtttccttttagtttttatctgatgatactttctttttcaccagaggtctcaatgtgctcccacctatcccttcgcagagactacaaaaacagtgattccaaactgctgaatgaaaataaaggtttcagtctgtgggatgaatgcacatatcacaaagccattt

SEQ ID NO: 581693 - DNA, 370 bp, Homo sapiens
agaatggacatttcagatctctttgaaccccaaagtgaaaaagcgaatctcccatgataaaaaayagaaggaatctatctgataaactgccttgtgatgtgtacattcacctcaaagagttaaacttttcattcagcagtttggaaaaactgttttggtagaatctgcaaaggtgtacttgggagtgcattggggccaaactagaagtttccttttagtttttatctgatgatactttctttttcaccagaggtctcaatgtgctcccacctatcccttcgcagagactacaaaaacagtgattccaaactgctgaatgaaaataaaggtttcagtctgtgggatgaatgcacatatcacaaagccattt

SEQ ID NO: 581694 - DNA, 561 bp, Homo sapiens
atgtagaaagaggcttaaaattctaaattttctgcaaactaaaatagaattttgacatcaactctagcttttttataattatattctagttttctttcaagcaagtggccataagatctgcgctgtatcgtggatattgcattgagtcatgccttgtggaaagaggtgattatcagataaaaaataagaccaattgtatttttttctaaaacccacagacaataatggcttgattttctgagatatgtatatattcttaaatggtattatcatttttatggtagttttttaaattatggttaaaaaaatgagatcttatggtccataaaaataaaaatwcattattgtgttaattgatgaaatgtctctaatccttcaagcacctcagcctggacattttttatgttctacatattttttttccttctagagtttcctgggagtttcctgggagtttcctgggagttaccaaacttaggccacagatatttttttcacaaagtctttattgtctctctgaattgccctaatttctgaaagcattttaggggattgggtagt

SEQ ID NO: 581695 - DNA, 504 bp, Homo sapiens
ttttgttggttcctagttaagcctcagagtaacatgtcttatttaaggaaatttggttaggattttgaaattaaaaactaacataatcaagaattctagtttcagctcagacatgtagaaagatagagagctccacayttacaacattgaaaatgttggacaggctgcaaatttgatgacttttcttgaggccatcagaaaactgaggtcacagggtaactcactatagtaaaatcttagaaaagaggtatctcctgagaaaaacaggacctgagtaagcatctgcttgcttgcagcagtttctgtgcatgtcttattgcatggcagaggcacctgacagtcacaactgaagcaaaccctgagaatgaccctatggtctaagaagcatgttgctttaaagttctgagtcaaggaatcatgaagtgaccagcctggaaattcactccttatctgtgaaggaactcacggcttaactcttggaacacaggtggtccaaggaataga

SEQ ID NO: 581696 - DNA, 504 bp, Homo sapiens
ttttgttggttcctagttaagcctcagagtaacatgtcttatttaaggaaatttggttaggattttgaaattaaaaactaacataatcaagaattctagtttcagctcagacatgtagaaagatagagagctccacatttacaacattgaaaatgttggacaggctgcaaatttgatgacttttcttgaggccatcagaaaactgaggtcacagggtaactcactatagtaaaatcttagaaaagaggtatctcctgagaaaaacaggacctgagtaagcatctgcttgcttgcagcagtttctgtgcatgtcttattgcatggcagaggcacctgacagtcacaactgaagcaaaccctgagaatgaccctatggtctaagaagcatgttgctttaaagttctgagtcaaggaatcatgaagtgaccagcctggaaattcactccttrtctgtgaaggaactcacggcttaactcttggaacacaggtggtccaaggaataga

SEQ ID NO: 581697 - DNA, 541 bp, Homo sapiens
gaagctggaaactatcattctcagcaaactaacacaggaacagaaaaccaaacaycgcaagttctcactcataagtgggagctgaacaatgagaatacatagacatggggaggggaacatcacacactggggcctatcgcggggtgaggggcaagggaagggaaagcattaggacaaatgcctaatgcatgcagggcttaaaacctagatggcaggttgatgggtgcatcaaaccaccattgcatatgtatagctatgtagcaaacctgcatgttctgcccatgtatcccagaacttaaagtataataaaaaaattttaaaaagaagaaaataaaatttctctaacattcagcctccctctttcttaatgcttctttagtaatttacttctttccccctaaagctttatctagtctcttcttatttaaccctccttctcactggttcctctaactaaaagagttggtccttctttctaaggttaaatcaatgctctagttattactctatcagacaccaattttttctttctttcatcttc

SEQ ID NO: 581698 - DNA, 602 bp, Homo sapiens
ggctttctcaggtccccttggcatgtattgaatattctctcctctgtcattttttgttagctgagatgattatttaaaaaattccagcactgttccagattaaaggtgggcaccactccttcctatcagccctcctcccacaaccagtctctggatgagtgcagaaaaacacaacagccctattcaattgattttattttcattttttattgaaagcttcatcaaagaaaacagaagtttaaacctaacatccactgatctacagaaagcccaagggatgggggagatggttgctaatttgactgtggtacagatgaagaaattaaaaataaaaccagaaacaccttagaattacagaactttccatgacagtcagagacagcagtacaaaaatgctcttaaataaagttcaaaattgaatgatgtttcagaagttccatgaagttgaatatggactgaaacaagggttttaaaagaagctgtgtccctttttttttttatagagactgaatatctcatagcagatactacyacatatatttttttaaattaagattccatttttcttcttcttcttttgaaataaatggaagcatttgtgt

SEQ ID NO: 581699 - DNA, 569 bp, Homo sapiens
taactttgaacaaaatctcctcccaaagcacacaggtctttttgaagttttcacatgcaatgtactctcactttcagggtctaatcttacacatatgcsatttgaaaattaactatgttctttagaaatgttcaccatcattaaatcaagcttttcttataggaggagatagctctgtagacaagggcaaagcagggtatggaaagaacaaggggtgctgaaatggaaaggcagtgagttgtggacttaatttctttcccagagcttcctctgaggagttagatttagagatgtgagaaactcactaattgtaaactatttgccaaatccccttaatgtctggtagagttaataatttctttacatttagagatttagattgattgaagttttttgctataatagagcaataatcagtatttgcaataaagctctgcaaatttgagatctgtccttaggacagattcccagttgtagaataactagttcaaagggcttgatttgttttattcatgccacttcatgtatatgtattactcagatattttctgtagatattcttataatta

SEQ ID NO: 581700 - DNA, 569 bp, Homo sapiens
taactttgaacaaaatctcctcccaaagcacacaggtctttttgaagttttcacatgcaatgtactctcactttcagggtctaatcttacacatatgccatttgaaaattaactatgttctttagaaatgttcaccatcattaaatcaagcttttcttataggaggagatagctctgtagacaagggcaaagcagggtatggaaagaacaaggggtgctgaaatggaaaggcagtgagttgtggacttaatttctttcccagagcttcctctgaggagttagatttagagatgtgagaaactcactaattgtaaactatttgccaaatccccttaatgtctggtagagttaataatttctttacatttagagatttagattgattgaagttttttgctataatagagcaataatcagtatttgcaataargctctgcaaatttgagatctgtccttaggacagattcccagttgtagaataactagttcaaagggcttgatttgttttattcatgccacttcatgtatatgtattactcagatattttctgtagatattcttataatta

SEQ ID NO: 581701 - DNA, 587 bp, Homo sapiens
tatttaaaattaaattttggaagtgaagttgctaagagagcagggaagtcgtgttggtacctgaagaccaggcattaattaatcttacataagratgacaaatcaagaaacatgtatgcaagtattttatttaaatatatatatgttttaattgcataacattccattaaaaaaatcaaaagacaaacaatagattggaacgaaatatttgcaacatgtagtaaatatattgggataataactctaacatacaaataaatttagaaactgttaagaaaaagacaaatcaaaggaaagttatttaaaggatataataaccaatcctgagaaagggtaatccagatgaacaacaaatatataaataatgacgatggcatataagtttttgagcccttgattaattttatttaaaaattaataattttgtgatattaaataatattcaatggcaatatgcatttggagaactgaaactcatacatttcctcatgagttcacactgtggcagtgtgaatttctacacgtctttggaaagtaatcagaaaatgtttattaaaatttgagcaaagtcacatgggagattatgt

SEQ ID NO: 581702 - DNA, 587 bp, Homo sapiens
tatttaaaattaaattttggaagtgaagttgctaagagagcagggaagtcgtgttggtacctgaagaccaggcattaattaatcttacataaggatgacaaatcaagaaacatgtatgcaagtattttatttaaatatatatatgttttaattgcataacattccattaaaaaaatcaaaagacaaacaatagattggaacgaaatatttgcaacatrtagtaaatatattgggataataactctaacatacaaataaatttagaaactgttaagaaaaagacaaatcaaaggaaagttatttaaaggatataataaccaatcctgagaaagggtaatccagatgaacaacaaatatataaataatgacgatggcatataagtttttgagcccttgattaattttatttaaaaattaataattttgtgatattaaataatattcaatggcaatatgcatttggagaactgaaactcatacatttcctcatgagttcacactgtggcagtgtgaatttctacacgtctttggaaagtaatcagaaaatgtttattaaaatttgagcaaagtcacatgggagattatgt

SEQ ID NO: 581703 - DNA, 646 bp, Homo sapiens
aaaataacacaaatatattcagaattattttacattcayattgataatttagcatttaatgttcattaggttgtttagtaaaaaaacataaaatttactttttaaaaaaattaaggacagtgattattattctaaactgcctcagaaaatggaaagttgatttgtagtagcacagaagaggggagggaatatgctatatgacacataaagattctctttgtcagttagctatgagatgcaaaatagcatctacttactaaggaacttttgtactttgtagaatatctttgatatttagttgacccttggttctcaaaaaataagtggcttgtaatttgaccttttgctctatcatgttttcttttttataatctgcttgactttgatgagtgtttttccaatgtttcatttgtttttgcaagggtattttgccatcctttccttccatgatgtgattcttcacgccaagaagaaaaagatgtgtctgtagctaaaattacctcatccttggtgtttttcagcctaggatcactatatgtagctaatgccgttacattacaactaagacaagttccaatacttttttttttctcctcgatctgcagagattcaccaacaatagcaaattacacactggcttggaaag

SEQ ID NO: 581704 - DNA, 588 bp, Homo sapiens
caagtctttcccatgctgttctcgtgattgagagtaagcctcacaagatctgatggtttaaaaagaggagttcccgtgcacaagctctctctctttgcctgttgccatccatgtaagacatgacatgctcctccttgccttccaccatgattgtgaggcttcaccagccatgtggaactgtaagtccaattaaacctttttcctgtattaattacccrgtctcaggtatgtctttatcagactaatacaggtaggaagagcacagagaaaaagtgccatcctcatcacatctcatcaaggatacatactatcaaaatgacttgtcactgtggatgtaatccttgatcacctcacggagtcagtgtttgtcagatttctccactggaaagctactctttttgatcctttccatgctgtatgtattcttcagaagggagccgttctatgcagcccactcttcagaagtgcagcattatgctccatctcctcgggagcagggtatctacggaaatcacttggaatttttatgtccaggagatttgtccatttcctcttatttaatatttaatgatttatatcaacataggt

SEQ ID NO: 581705 - DNA, 547 bp, Homo sapiens
agttcatgttctttgcagggacatggatgaagctggaagccatcatcctcagcaaactaacacaggaacagaaaaccaagcaccacatattgtcacgcataagtgggacttgaacaatgagaacacatagacacagggaagggaacaacacacattggggcctgtcagggttggggkcaaggggagggagagcattaggacaaatacctaatgcatgcagggcttaaaacctagatgatgtgttgataggtgcagcaaaccagcatggcacatgcatacctatgtaacaaacctgcacattctgcacatgtattctggagcttaaagtaaaagaaaaaaaaaaaaagattggctgtgtcatgtacttcctttgttatgtaggaaaagacaagaatccctctgagattcactttctttttttgcaaatcaggatagttatgtttaccttaggttgcccctcaagtgtataataacaccataatatctgagggatgaatcttatcaatgcttacttgctattaggattagaacttctggcctgggagat

SEQ ID NO: 581706 - DNA, 547 bp, Homo sapiens
agttcatgttctttgcagggacatggatgaagctggaagccatcatcctcagcaaactaacacaggaacagaaaaccaagcaccacatattgtcacgcataagtgggacttgaacaatgagaacacatagacacagggaagggaacaacacacattggggcctgtcagggttggggtcaaggggagggagagcattaggacaaatacctaatgcatgcagggcttaaaacctagatgatgtgttgataggtgcagcaaaccagcatggcacatgcatacctatgtaacaaacctgcacatkctgcacatgtattctggagcttaaagtaaaagaaaaaaaaaaaaagattggctgtgtcatgtacttcctttgttatgtaggaaaagacaagaatccctctgagattcactttctttttttgcaaatcaggatagttatgtttaccttaggttgcccctcaagtgtataataacaccataatatctgagggatgaatcttatcaatgcttacttgctattaggattagaacttctggcctgggagat

SEQ ID NO: 581707 - DNA, 514 bp, Homo sapiens
taaaccactcctagactcctgtcccaccaaacagtgagctaataaatgagtgatactttaggctgtcacatttatgatgatatcgccacacagcaatggataactaatactcacatcatgctgtttctcaccttcttctcttaaccttgacactgtcacctactarcctttgttcagctaacaaactcttatttgtccttgatgaccaatttcatcatttctacaaagcctgttaattcttttctaattctgcccttttataaaatacaaataaccattcatcttgctgcttaacataattaattttaaacttcaatttttgtacgtttcacactatattaggtatgtttattttccatttactaaacttgaagacagagactatatcatatttatctttgtgccctggggctgtaataaacttgaaaggcagtctaggccacaaggactgcaacttttacatgagtcctagtgctgaactgggcacagagacagcagactgggggacacacaa

SEQ ID NO: 581708 - DNA, 258 bp, Homo sapiens
atagcacatgcaagtgcacctccttcatcccctctccaagagagagatggtcaaggcctggcccccttgctcatttgtgccatgaagctccgaagtcctgtgtgggcctggataaggactctggggcaactacatctccattcaattcctccttctgacagaacctccctcccctaytcccttacgggctattctgccacgagggctccccagtcaacttcttgtttgtcaatctccatctcaggattgaattctagg

SEQ ID NO: 581709 - DNA, 530 bp, Homo sapiens
cagctgaggcaggaggattgcttgtgcctgggaggtcgaggctatagtaagatcaaggatgcagtgagtcaagatcacaccaycgcattccaggttggacaacagagtgagatcctgtctcaagaaaaaaaaaaaagaaaaaaaaaagaactatacaagccaaacatttaaagaaatccaattagaagatgaaccaaaaaaggaacattttaccacagagaataaacggcaaataagcatataaaaatatgtttaacattagagaaatccaaattaaaatcacaatgagataataccacacccatcagattggctaaaataaaatataatagcaacatcaaatgctggtgaagatgcagagaaattggatcacacatacattgctggtgggaataaaatggttctgcactctgtaaaatgatttgtcagatttttctttaaaacaggtatttgcttccagtgtaacccagtaattgcactcttgggcatttattacagaaaaactgaaaacttttgctaatgtaaaacat

SEQ ID NO: 581710 - DNA, 530 bp, Homo sapiens
cagctgaggcaggaggattgcttgtgcctgggaggtcgaggctatagtaagatcaaggatgcagtgagtcaagatcacaccaccgcattccaggttggacaacagagtgagawcctgtctcaagaaaaaaaaaaaagaaaaaaaaaagaactatacaagccaaacatttaaagaaatccaattagaagatgaaccaaaaaaggaacattttaccacagagaataaacggcaaataagcatataaaaatatgtttaacattagagaaatccaaattaaaatcacaatgagataataccacacccatcagattggctaaaataaaatataatagcaacatcaaatgctggtgaagatgcagagaaattggatcacacatacattgctggtgggaataaaatggttctgcactctgtaaaatgatttgtcagatttttctttaaaacaggtatttgcttccagtgtaacccagtaattgcactcttgggcatttattacagaaaaactgaaaacttttgctaatgtaaaacat

SEQ ID NO: 581711 - DNA, 577 bp, Homo sapiens
gaaatattctgagatgctatcatgtaactggcctttaaactcatgaaaatgcttgagaacactcaggggaaaaagtgagtaagtagagaaaaaagaaagtactcagctaagtgggttgaagacagtacaggaaatattgaaggagactgtctattgtttgattgatttctttcaaagaaagaatacaaagtaagttgataactgaaggacaacggtaggtcaatgtaaacttttaacaaaaagggaattattcattaatgagaatgataatactaaaatgagagggagagctaagggacagaatttacttaatattgggagatctcatcaatttagcataagacatgtggtaactttgtagaaggttattgttatgaatgctgtgggagtgaatgcattgggaaactaaaatagaatgtttggcactgttgagtatccttttaagttttgtaatgaattgaaatcatgttattagttacaacgtagatgagcctggaggacattaygttaagtgaaataagacaggcacagagagagaaaaaccacatgttctcacttatatgtgggagctaaaaat

SEQ ID NO: 581712 - DNA, 533 bp, Homo sapiens
aatgctgaaaattctgtattttaggttctttatgatctagagttcttcacatgtatttagtaaaccattccaagtgctatatttcttgctaataaaaccaaataacaatgttcagggtaaattttaatgaattaatgcttataatgcaaactatgctttcatcaattttattcagaagcacacgattaattatacaacagatattttatatgattgytcagagtaaagactatttttatttgcttgaatgacaacataatttattaaatgaataaatacacggattcgtcttctccatcaccattttaggcatgtttttgtgacatataccttcttcaccatgaactccttcctaaccaaccattatatctaaaataaattatcagcaaacataaatattgtgctattccataactacctcacatgagctagatgatgggaggcataattcataataagcagaccctacctttaaattctataaagccacagcatttaaattataactatgccacacagcagtaacctatttt

SEQ ID NO: 581713 - DNA, 495 bp, Homo sapiens
aaagtggcccaaaatttgccatagatctatgatgttttaattaatactgacctctgaatgatctagaaaataatggtaaaccatgtatacatatttgtgtgtgcacatgtgtgcatgtatccatagcatctgtgtgtgtgtacattttatagattttgtctttgtatgaagaaatatattgaatatccaaataagcataatttctmtacaagtgaggtatgtgggttaaaatctagtgaacaaaatataactatacattcatgatttggaaaccttttaacatgattcctgaggaattactcaattgttaattgtttctgccttctctaccaaatgactaatatttggactgaaaagaaaaaaagagaacctcagtaaggaaaagtggaatttctgtaggtggtaactctggaatatcccaccaagagaatgaatcagattaaaataatgactgtagaaatttccttgttagtgaatattcagcctggccttaag

SEQ ID NO: 581714 - DNA, 495 bp, Homo sapiens
aaagtggcccaaaatttgccatagatctatgatgttttaattaatactgacctctgaatgatctagaaaataatggtaaaccatgtatacatatttgtgtgtgcacatgtgtgcatgtatccatagcatctgtgtgtgtgtacattttatagattttgtctttgtatgaagaaatatattgaatatccaaataagcataatttctatacaagtgaggtatgtgggttaaaatctagtgaacaaaatataactatacattcatgatttggaaaccttttaacatgattcctgaggaattactcaattgttaattgtttctgccttctctaccaaatgactaatatttggactgaraagaaaaaaagagaacctcagtaaggaaaagtggaatttctgtaggtggtaactctggaatatcccaccaagagaatgaatcagattaaaataatgactgtagaaatttccttgttagtgaatattcagcctggccttaag

SEQ ID NO: 581715 - DNA, 545 bp, Homo sapiens
cattgctctctagcggaatactttttcttaaatgggtttattagtraattgagaacttgatttgatgtttactctgacgtgtgatgtaaagttcttcctaaagccccctttcttttcctttttaaaattattaacatagatgaatacagagaatgtgaacatattagctatacagatatcacaacaggagaacagtaaatgttatgttttagactatttcaaccctaaaatatggacacaggttggaatgaggatccaattcagcataatagcctctaatggagtaggaaacatataaaatcctgtgttgctttatgaaatgttgcttatttgctgcatggttttaaaaagtatcagttttatttaatagtgggatctttatgtcagtgattactgatgtttccagcaagctaattcataccagggagacaatgtaaacatttagaaaggggattatatttctgtactatctgcatatgtcagatgacaacgagagtttcaaagtacaatcttatgaagggttgtattgcagatttggcctagaa

SEQ ID NO: 581716 - DNA, 561 bp, Homo sapiens
  misc_feature 1, 2, 3, 4, 5, 6, 7, 8, 9, 10, 11, 12, 13, 14, 15, 16, 17,18, 19: n = A,T,C or G
nnnnnnnnnnnnnnnnnnntaatccaagtactttggggggtcgaggtgagaggatagcatgtggccagaagttcaagaccagcctgggcaacatagcgagactccatctccacaaaaaartgttaaaaattagccagacatggtggtgcatgtcttagttctaactactcaggaggctgagaaaggaagattactttagcccaggagctcaaaggtgcagtgagctgtgactgcactccagcccgtctaaaaaaaaaaaaaaaaggaaagaaaagaaaaaaagaaataaaaaggtatacacattttttttctgaagtggatggaaatatgtcatgtcagaggtaaattgtgacttgagtaagttttatgttgagcaactctttttgtttacattttctatgttgcccaaataaagtcttattttcataaatcactgctttacataacaacttttcctgcagccctgggtatggtggcacacagttgtagtcccaggtacactggatgctgaggcaaaaggatcatttgaacccagaacttcaaggtcaacctgggcaacat

SEQ ID NO: 581717 - DNA, 530 bp, Homo sapiens
acaagttgcaagtttatgaaagtcattgtttttgaaagtaagttttagattaaaaaaacaaaagaaaggaaaagaaaaatcttttaaggggaaacaatgtctttatgtgtttaaagtttcaaaatgtaatttataaagaaatcaaatctagttaaaaataactaatcaaagatgaatatttagtgtagaagaacatggatatggataaactgtaggrtattttatttatctttttctttcagcaaagatctaactaaaattagagaaatgatgtgttttattctagaaccatcacgatacaagcaataatatgttgtttttcatcttgtattggataaacactattaatcccattaatccattcctctttgcttcttcaattaaaattctgtgtattatataaatacctccctctaccctctgcagtgtaggagaatcagggaaatctcatcccatctgccgaaacagagatgtatcctgtatgtaccttgccaatgatggcaacttcttttcctttgtcgagatataat

SEQ ID NO: 581718 - DNA, 530 bp, Homo sapiens
acaagttgcaagtttatgaaagtcattgtttttgaaagtaagttttagattaaaaaaacaaaagaaaggaaaagaaaaatcttttaaggggaaacaatgtctttatgtgtttaaagtttcaaaatgtaatttataaagaaatcaaatctagttaaaaataactaatcaaagatgaatatttagtgtagaagaacatggatatggataaactgtagggtattttatttatctttttctttcagcaaagatctaactaaaattagagaaatgatgtgttttattctagaaccatcacgatacaagcaataatatgttgtttttcatcttgtattggataaacactattaatcccawtaatccattcctctttgcttcttcaattaaaattctgtgtattatataaatacctccctctaccctctgcagtgtaggagaatcagggaaatctcatcccatctgccgaaacagagatgtatcctgtatgtaccttgccaatgatggcaacttcttttcctttgtcgagatataat

SEQ ID NO: 581719 - DNA, 530 bp, Homo sapiens
acaagttgcaagtttatgaaagtcattgtttttgaaagtaagttttagattaaaaaaacaaaagaaaggaaaagaaaaatcttttaaggggaaacaatgtctttatgtgtttaaagtttcaaaatgtaatttataaagaaatcaaatctagttaaaaataactaatcaaagatgaatatttagtgtagaagaacatggatatggataaactgtagggtattttatttatctttttctttcagcaaagatctaactaaaattagagaaatgatgtgttttattctagaaccatcacgatacaagcaataatatgttgtttttcatcttgtattggataaacactattaatcccattaatccattcctctttgcttcttcaattaaaattctgtgtattatataaatacctccctctaccctctgcagtgtaggagaatcagggaaatctcatcccatctsccgaaacagagatgtatcctgtatgtaccttgccaatgatggcaacttcttttcctttgtcgagatataat

SEQ ID NO: 581720 - DNA, 530 bp, Homo sapiens
acaagttgcaagtttatgaaagtcattgtttttgaaagtaagttttagattaaaaaaacaaaagaaaggaaaagaaaaatcttttaaggggaaacaatgtctttatgtgtttaaagtttcaaaatgtaatttataaagaaatcaaatctagttaaaaataactaatcaaagatgaatatttagtgtagaagaacatggatatggataaactgtagggtattttatttatctttttctttcagcaaagatctaactaaaattagagaaatgatgtgttttattctagaaccatcacgatacaagcaataatatgttgtttttcatcttgtattggataaacactattaatcccattaatccattcctctttgcttcttcaattaaaattctgtgtattatataaatacctccctctaccctctgcagtgtaggagaatcagggaaatctcatcccatctgccgaaacagagatgtatcctgtatgtrccttgccaatgatggcaacttcttttcctttgtcgagatataat

SEQ ID NO: 581721 - DNA, 395 bp, Homo sapiens
cagttgccccagaggcacatcacgttctttgaatgcttcagtatagtcctcttcattyagcaatcagtgaggcaatacactggcatcatgatccctttttttaggaactctgtacaaaattccctttgaaaatataaattttggaaatgagtgatgagcaaaggggtttcattaacattatcacaatctcttgatatatctgcttgataatgtagcacctattatttggggccattaggaccttggcagaaattctggtaaatgtaaagaaaccacatttaacatccagttaatttagtttgtttgtttgttttgtttttgtttttgtttttgagacgttgtcttactctgtcacccaggctagagtgcggtggtgtgatctcgactcactgcaa

SEQ ID NO: 581722 - DNA, 395 bp, Homo sapiens
cagttgccccagaggcacatcacgttctttgaatgcttcagtatagtcctcttcatttagcaatcagtgaggcaatacactggcatcatgatccctttttttaggaactctgtacaaaattccctttgaaaatataaattttggaaatgagtgatgagcaaaggggtttcattaacattatcacaatctcttgatatatctgcttgataatgtagcacctattatttggggccattaggaccttggcagaaattctggtaaatgtaaagaaaccacatttaacatccagttaatttartttgtttgtttgttttgtttttgtttttgtttttgagacgttgtcttactctgtcacccaggctagagtgcggtggtgtgatctcgactcactgcaa

SEQ ID NO: 581723 - DNA, 596 bp, Homo sapiens
cacatcaatgttgcatcttcaaatctaagaacatggtagatctttacatttatttaagtcttctgtaatgtttctctacaagaaattttaaaaagttttagtgtgaaagatttttaaaggtttcacttaaattattcttaactatttttataccattaaaattttacttttaaatgtattctcaattgtttatttctagtatttagaaattccattaattttccatattgtattttgtgtattgaccttgcattctacacattctgcaccattattgaatttgattcttattattcacagctttttaaataaatatattaggattttcttcatatacaatatacatatatatgttctgtgaataaaaatattttttcttttcacttttcaatttttatgcttttcatttcttraccccatgcaagtccgaaatccagaggggcagccaaatcttaaagctccaaaatgatctcctttgactccatgtctcacatcctgatcatgcagatgcaagaggtgggttcccatggtattgggcagctctgcccctgtggctttgcgggatatagcctgccttctggctgcttttgtgggct

SEQ ID NO: 581724 - DNA, 596 bp, Homo sapiens
cacatcaatgttgcatcttcaaatctaagaacatggtagatctttacatttatttaagtcttctgtaatgtttctctacaagaaattttaaaaagttttagtgtgaaagatttttaaaggtttcacttaaattattcttaactatttttataccattaaaattttacttttaaatgtattctcaattgtttatttctagtatttagaaattccattaattttccatattgtattttgtgtattgaccttgcattctacacattctgcaccattattgaatttgattcttattattcacagctttttaaataaatatattaggattttcttcatatacaatatacatatatatgttctgtgaataaaaatattttttcttttcacttttcaatttttatgcttttcatttcttgaccccatgcaagtccraaatccagaggggcagccaaatcttaaagctccaaaatgatctcctttgactccatgtctcacatcctgatcatgcagatgcaagaggtgggttcccatggtattgggcagctctgcccctgtggctttgcgggatatagcctgccttctggctgcttttgtgggct

SEQ ID NO: 581725 - DNA, 602 bp, Homo sapiens
agctctctgttgtatatgttaatgctgataatgtttttttgttttgtttttgagatagagaaggagatcttagagacraaaaaggggaagctccattaaaattggtaaaggaagaaacataatatgaaaggagggaaataataaggtaaaagatgcagagactgctttccagacaaagtaagaatgaacttcactttggaataacaaagcagtgcttgcttggcaaggtgagtcttagaatctgactaacatcaacagggcagagtctcaggtaattaacaaaaccaggaaggaacagggagcagcaatgctaaaacacaagaaaccaggttactttgtcctacttcatagttgttattttcctaatcattggagataagctatgattaacagaaaaactacccatgtaaaatattgtcacccaacttttaagaaaaacaagaaagaagatacaaaacttagcaaacagaataagtaatttcagagaatcagaattaagaaaagaaacaaatgtaattacagtaagtgtaattcatatcttcagagacatgcaagaagaggttgcattttagaaaatactgataatagctcttggattaaaa

SEQ ID NO: 581726 - DNA, 299 bp, Homo sapiens
agaactgaaaaaaaattgttatctmaaagtccacacaaaagatgaagccaagagtttttttaataaacaatactgatagatcattagctagattagcaaagaaaaagagaagatccaaataagtataatcagaaattataaagattatattaaaattgatcccatgaaaatacaaaagatatgcagagactattatgagcacctctctgcacacaaatctagaggaaatgaataaattcctggaaacacacaatctcccaagattgaatcaggaagaaagtgaaaacctgaacggacca

SEQ ID NO: 581727 - DNA, 507 bp, Homo sapiens
gagagaagttttgagattcttcaaataacttaaaatagaactaccatttgacccagcaatcccactattgagtatatatacccaagggaaaataayttattttatctaagagacacatgcacccgtatgttcattgcagcactattcacaataccaaagcaatagaattaacctaagtgtccatcaatagagaattgggtaaagaaaatatggtatgtatacatcacaaaaaacaatgcagccataaaaatgaacaaagtcatgttctttgtggcaacatgaatggagctggagaccattatcctaagtgacctaatagaagaacagaaagccacataccacatcttctcacttatagatggtagctaaacattgaatacacatgttaagatgggaacaatagacattggggaccactagattggggaggaaaggtaggggttgtgggctgaagaactacctgttgggtactgtgttactgcctgggtggtaggatcactgggactc

SEQ ID NO: 581728 - DNA, 393 bp, Homo sapiens
tgcagagacagaaatgactgtcatgtgttcttatacacataaagccctagaaacaggagccacarcacatcatgcactggggccatatggggaagtaccagagtcagtgaaggcaaaaggagcaagactaaagcatgagccagagcctttaatatggttttccttggaaggaatgagtgagacagtgtaagcagctgagcaggtttaagactgggtagtgtgagtactttttgtgtaatttagtccctagtgttccagcacctgattctggggtgacgaaagcagagggataatgtcccagaccacaggagccatataataagagtcaagtgagggtgtggattctggattggttggtttgcatataaataacatgatcataggcaagttgtt

SEQ ID NO: 581729 - DNA, 585 bp, Homo sapiens
gggcttcctcaaaataagattttctactcatcaagagaaagcattgaaaaaaattaaaaggcaggacacagaatcagaggaattatttttaatacatacaaatgacttagaagatcttaataagtartactattcagtaataaaatgtctaacagcctctccccaaataggcatgggtcttgaatatcttacaaaggaagatatgcaatgtcacatgaacaggcactggacatcattattcattaggaatatgcaaatatacatgacaatgacagccattgcacattcactagaaattatttaaagaaattttaaaatactgacaataccaaaaattatagatatgtagcaactggaagtctttttgtttcttaagagtgtaaaatggggcaaacactccagagaacagttaattattttcttataaagtttaaaatatatttttctttgacccagtaagttttttctctgttacgtatacaaaagaaataataactgatgccacgataaagatttattcaaaacttattagaacagttttattcttaaaactaaaccttgaaacaacccaaacaaccttcaata

SEQ ID NO: 581730 - DNA, 585 bp, Homo sapiens
gggcttcctcaaaataagattttctactcatcaagagaaagcattgaaaaaaattaaaaggcaggacacagaatcagaggaattatttttaatacatacaaatgacttagaagatcttaataagtagtactattcagtaataaaaygtctaacagcctctccccaaataggcatgggtcttgaatatcttacaaaggaagatatgcaatgtcacatgaacaggcactggacatcattattcattaggaatatgcaaatatacatgacaatgacagccattgcacattcactagaaattatttaaagaaattttaaaatactgacaataccaaaaattatagatatgtagcaactggaagtctttttgtttcttaagagtgtaaaatggggcaaacactccagagaacagttaattattttcttataaagtttaaaatatatttttctttgacccagtaagttttttctctgttacgtatacaaaagaaataataactgatgccacgataaagatttattcaaaacttattagaacagttttattcttaaaactaaaccttgaaacaacccaaacaaccttcaata

SEQ ID NO: 581731 - DNA, 585 bp, Homo sapiens
gggcttcctcaaaataagattttctactcatcaagagaaagcattgaaaaaaattaaaaggcaggacacagaatcagaggaattatttttaatacatacaaatgacttagaagatcttaataagtagtactattcagtaataaaatgtctaacagcctctccccaaataggcatgggtcttgaatatcttacaaaggaagatatgcaatgtcacatgaacaggcactggacatcattattcattaggaatatgcaaatatacatgacaatgacagccattgcacattcactagaaattatttaaagaaattttaaaatactgacaataccaaaaattatagatatgtagcaactggaagtckttttgtttcttaagagtgtaaaatggggcaaacactccagagaacagttaattattttcttataaagtttaaaatatatttttctttgacccagtaagttttttctctgttacgtatacaaaagaaataataactgatgccacgataaagatttattcaaaacttattagaacagttttattcttaaaactaaaccttgaaacaacccaaacaaccttcaata

SEQ ID NO: 581732 - DNA, 292 bp, Homo sapiens
tgtaaactgtgactctgagcacaaatcccaatgctattgccaatttaattccaatttttgtgttcacacatgaaatgtagtttttcttttattgagttttaaaaatctgtaagatttacctatctgaatatacactcaggtctagcttcatgttcctgtgacctgtgtggtcacamaaggacccatgtacataatgacctcatacttggcctaatgctctcctgttgccatcttgaaacgcttaacactttgaacgaggtacaacatccacttcattttgcgctgggccctg

SEQ ID NO: 581733 - DNA, 582 bp, Homo sapiens
  misc_feature 1, 2, 3, 4, 5, 6, 7, 8, 9, 10, 11, 12, 13, 14, 15, 16, 17,18, 19, 20, 21, 22, 23, 24, 25, 26, 27, 28, 29, 30, 31,32, 33, 34, 35, 36, 37, 38: n = A,T,C or G
nnnnnnnnnnnnnnnnnnnnnnnnnnnnnnnnnnnnnnaacattggctgtgatgtcttacattttaatgcattgcttatttctgcatggaacttttttaagttttccttcaatattttcataaattacattggtgtttaatttactttccctttactatccttgtcaggttataatatcagagtcataatagcataataaaatraaatagagtatgttctttcctgtttcatgctcagaaagaattgtatgtaagattggaattattgttttgtttcatgtttgaaacaacttgccagtaaagtcatcatggcttgaaattatctttatgatatgatttctgactactgattacatgcatttgttgtagcacaattcagatttttcttttcactttaggttacttttggaaaaatgcatgtttcaagtaattgtacacattttacatatatttccaaatttattgaattaaacgttttcatactacactaatttaccttcttgatatttgtattatttataacaaaactcaataaactgtggcaaataagccagacagtatttataaataaagtattactgg

SEQ ID NO: 581734 - DNA, 582 bp, Homo sapiens
  misc_feature 1, 2, 3, 4, 5, 6, 7, 8, 9, 10, 11, 12, 13, 14, 15, 16, 17,18, 19, 20, 21, 22, 23, 24, 25, 26, 27, 28, 29, 30, 31,32, 33, 34, 35, 36, 37, 38: n = A,T,C or G
nnnnnnnnnnnnnnnnnnnnnnnnnnnnnnnnnnnnnnaacattggctgtgatgtcttacattttaatgcattgcttatttctgcatggaacttttttaagttttccttcaatattttcataaattacattggtgtttaatttactttccctttactatccttgtcaggttataatatcagagtcataatagcataataaaataaaatagagtatgttctttcctgtttcatgctcagaaagaattgtatgtaagaytggaattattgttttgtttcatgtttgaaacaacttgccagtaaagtcatcatggcttgaaattatctttatgatatgatttctgactactgattacatgcatttgttgtagcacaattcagatttttcttttcactttaggttacttttggaaaaatgcatgtttcaagtaattgtacacattttacatatatttccaaatttattgaattaaacgttttcatactacactaatttaccttcttgatatttgtattatttataacaaaactcaataaactgtggcaaataagccagacagtatttataaataaagtattactgg

SEQ ID NO: 581735 - DNA, 582 bp, Homo sapiens
  misc_feature 1, 2, 3, 4, 5, 6, 7, 8, 9, 10, 11, 12, 13, 14, 15, 16, 17,18, 19, 20, 21, 22, 23, 24, 25, 26, 27, 28, 29, 30, 31,32, 33, 34, 35, 36, 37, 38: n = A,T,C or G
nnnnnnnnnnnnnnnnnnnnnnnnnnnnnnnnnnnnnnaacattggctgtgatgtcttacattttaatgcattgcttatttctgcatggaacttttttaagttttccttcaatattttcataaattacattggtgtttaatttactttccctttactatccttgtcaggttataatatcagagtcataatagcataataaaataaaatagagtatgttctttcctgtttcatgctcagaaagaattgtatgtaagattggaattattgttttgtttcatgtttgaaacaacttgccagtaaagtcatcatggcttgaaattatctttatgatatgatttctgactacwgattacatgcatttgttgtagcacaattcagatttttcttttcactttaggttacttttggaaaaatgcatgtttcaagtaattgtacacattttacatatatttccaaatttattgaattaaacgttttcatactacactaatttaccttcttgatatttgtattatttataacaaaactcaataaactgtggcaaataagccagacagtatttataaataaagtattactgg

SEQ ID NO: 581736 - DNA, 582 bp, Homo sapiens
  misc_feature 1, 2, 3, 4, 5, 6, 7, 8, 9, 10, 11, 12, 13, 14, 15, 16, 17,18, 19, 20, 21, 22, 23, 24, 25, 26, 27, 28, 29, 30, 31,32, 33, 34, 35, 36, 37, 38: n = A,T,C or G
nnnnnnnnnnnnnnnnnnnnnnnnnnnnnnnnnnnnnnaacattggctgtgatgtcttacattttaatgcattgcttatttctgcatggaacttttttaagttttccttcaatattttcataaattacattggtgtttaatttactttccctttactatccttgtcaggttataatatcagagtcataatagcataataaaataaaatagagtatgttctttcctgtttcatgctcagaaagaattgtatgtaagattggaattattgttttgtttcatgtttgaaacaacttgccagtaaagtcatcatggcttgaaattatctttatgatatgatttctgactactgattacatgcatttgttgtagcacaattcagatttttcttttcactttaggttacttttggaaaaatgcatgtttcaagtaattgyacacattttacatatatttccaaatttattgaattaaacgttttcatactacactaatttaccttcttgatatttgtattatttataacaaaactcaataaactgtggcaaataagccagacagtatttataaataaagtattactgg

SEQ ID NO: 581737 - DNA, 585 bp, Homo sapiens
tggtttgagaacaaagctgtcattacttgcaagatgaaaacagtaaaaattgcatgtgtttattaaaacacagaagtatattcctgtgcaaattaatgcagattctgaagcgaaagacaggacttttgagagattttgagtccaagggttcacctcttcaaacacaactgaaaaaactctattttttctatttttaaatctaatcagtttatatatgcccaggtccagcaaaaagaagctgggttgataatgtgttttgcagttattcaagctagtttgaaagagtacctggcagtgattgtgaagaccaatgattgtgctactaaggtctctcaattgccagacacccaccaagtattttttaaatatgctattctgttttgaaactcaaaaccttgtatttttgttaatctagttacctgccaaatcaaacaggaatccaaagtttcataaccctgctgtgttctctggttactagaaataagcatatttttgatgttttaacaaccttttaaaataataatttctaataatgaaatagaatatttstattttaagtagctattgggtagtatctttacataa

SEQ ID NO: 581738 - DNA, 408 bp, Homo sapiens
tcatgcggtacctgctgagtggatgacaccctcaactctttcccagaggcccagggtcccatggggcagggaaacagrggaagatggagctcctcaagggcctgacaaggagctgagtcccagccagggcctcacccaagatgaggattctccatgggtttggagttgggtttccttttcctgccctggaggaggaggcagaggtactaggatgggggctgagctccagctgagcagggttaagggaagtgtgtccaccaggcatctgtgcatgggggagttgttgggaaagcactggccactgcccagtgttctgccccagggcagctcagggggccctgagcacctagggtccaggaagtgccgtgcattgaggtttgttgagttggctcctctggtgttttgctg

SEQ ID NO: 581739 - DNA, 408 bp, Homo sapiens
tcatgcggtacctgctgagtggatgacaccctcaactctttcccagaggcccagggtcccatggggcagggaaacagaggaagatggagctcctcaagggcctgacaaggagctgagtcccagccagggcctcacccaagatgaggattctccatgggtttggagttgggtttccttttcctgccctggaggaggaggmagaggtactaggatgggggctgagctccagctgagcagggttaagggaagtgtgtccaccaggcatctgtgcatgggggagttgttgggaaagcactggccactgcccagtgttctgccccagggcagctcagggggccctgagcacctagggtccaggaagtgccgtgcattgaggtttgttgagttggctcctctggtgttttgctg

SEQ ID NO: 581740 - DNA, 577 bp, Homo sapiens
agtttcctgaattatatcctcaaaaatgttttccaagttgctcactttctcttcttctctgttagaaawgccagtaagtcagccgggcacagtggctcatgccagtaatcccagcactttgggaggccaaggtgggaggatcacccgaggccagaagtttgagatctaactggccagcatggcgaaaccccatctttactaaaaatacaaaaattagcgaggcatgctggcacacgcctgtaatctcagatacttgggaggctgaggcacgagaattgcttgaacccagaggtggaggtttcagtgagccaagatcatgccactgcactacagactgggtaacagagtgagattctgtctcaaaaaaaaaaaaaaaaattccaataagtcatagattttgttcctttacctaatcctatatttctcaaaagtttggttcattatttttaaattctttttttatttttgtctgactgggttgattcaaaggtctggtctttgagctcttaaattatttcttctatttggtctagtctgttgctaaggctgtgaactgttttttgaaattcctatagta

SEQ ID NO: 581741 - DNA, 577 bp, Homo sapiens
agtttcctgaattatatcctcaaaaatgttttccaagttgctcactttctcttcttctctgttagaaaagccagtaagtcagccgggcacagtggctcatgccagtaatcccagcactttgggaggccaaggtgggaggatcacccgaggccagaagtttgagayctaactggccagcatggcgaaaccccatctttactaaaaatacaaaaattagcgaggcatgctggcacacgcctgtaatctcagatacttgggaggctgaggcacgagaattgcttgaacccagaggtggaggtttcagtgagccaagatcatgccactgcactacagactgggtaacagagtgagattctgtctcaaaaaaaaaaaaaaaaattccaataagtcatagattttgttcctttacctaatcctatatttctcaaaagtttggttcattatttttaaattctttttttatttttgtctgactgggttgattcaaaggtctggtctttgagctcttaaattatttcttctatttggtctagtctgttgctaaggctgtgaactgttttttgaaattcctatagta

SEQ ID NO: 581742 - DNA, 577 bp, Homo sapiens
agtttcctgaattatatcctcaaaaatgttttccaagttgctcactttctcttcttctctgttagaaaagccagtaagtcagccgggcacagtggctcatgccagtaatcccagcactttgggaggccaaggtgggaggatcacccgaggccagaagtttgagatctaactggccagcatggcgaaaccccatctytactaaaaatacaaaaattagcgaggcatgctggcacacgcctgtaatctcagatacttgggaggctgaggcacgagaattgcttgaacccagaggtggaggtttcagtgagccaagatcatgccactgcactacagactgggtaacagagtgagattctgtctcaaaaaaaaaaaaaaaaattccaataagtcatagattttgttcctttacctaatcctatatttctcaaaagtttggttcattatttttaaattctttttttatttttgtctgactgggttgattcaaaggtctggtctttgagctcttaaattatttcttctatttggtctagtctgttgctaaggctgtgaactgttttttgaaattcctatagta

SEQ ID NO: 581743 - DNA, 516 bp, Homo sapiens
ggctgacactcaagccctaagtgaataccaaactctaggtgaataattcaacccaggtggtcattaggacccagctggataccagtccccaggttaacacaaggcccccagtgggcacctaggcaccagctggacatcaggccctatgtaaatacccgggtctcaggtgaacaccatgccccaggtggacatcaggcmctaggtgaacacggggccacaggtggacatctagcccctgggcaacatccagccccaggcggagataaccatttccatggataaaccattcccaggtggatatcaggcctcaagaggatggcagtcaccaggtagacatcaggcctcagatagacaccaaggtcccagatgtacagcaggccccaactgaaccccagactcatgtggacatcaggccacaggtagacaccaagccttaggtagatacctaacttcaggtagtcatcagacccaaggtggacacccagtccccaggtggacagtcaggccccaggcaca

SEQ ID NO: 581744 - DNA, 516 bp, Homo sapiens
ggctgacactcaagccctaagtgaataccaaactctaggtgaataattcaacccaggtggtcattaggacccagctggataccagtccccaggttaacacaaggcccccagtgggcacctaggcaccagctggacatcaggccctatgtaaatacccgggtctcaggtgaacaccatgccccaggtggacatcaggcactaggtgaacacrgggccacaggtggacatctagcccctgggcaacatccagccccaggcggagataaccatttccatggataaaccattcccaggtggatatcaggcctcaagaggatggcagtcaccaggtagacatcaggcctcagatagacaccaaggtcccagatgtacagcaggccccaactgaaccccagactcatgtggacatcaggccacaggtagacaccaagccttaggtagatacctaacttcaggtagtcatcagacccaaggtggacacccagtccccaggtggacagtcaggccccaggcaca

SEQ ID NO: 581745 - DNA, 516 bp, Homo sapiens
ggctgacactcaagccctaagtgaataccaaactctaggtgaataattcaacccaggtggtcattaggacccagctggataccagtccccaggttaacacaaggcccccagtgggcacctaggcaccagctggacatcaggccctatgtaaatacccgggtctcaggtgaacaccatgccccaggtggacatcaggcactaggtgaacacggggccacaggtggacatctagcccctgggcaacatccagccccaggcggagataaccatttccatggataaaccattcccaggtggatatcaggcctcaagaggatggcagtcaccaggtagacatcaggcctyagatagacaccaaggtcccagatgtacagcaggccccaactgaaccccagactcatgtggacatcaggccacaggtagacaccaagccttaggtagatacctaacttcaggtagtcatcagacccaaggtggacacccagtccccaggtggacagtcaggccccaggcaca

SEQ ID NO: 581746 - DNA, 323 bp, Homo sapiens
atattttttccacttgttttgtcatgaagaatgagaagtagaatcagcatcaagtttgtgctaaacaagtacaataataagaagcacagcaaatgstgactagactgtaagaatatttttgcttttaggccacccgaaaaagataagatatatgaggtgatcaaagtgaataattatataaacaagaggaattagaatatgaataagccaggaaaaataggaataggccaagaaaacacacacacccatttcttatttaaacctaaagggagacaaattcattcaatctatacatatttattttgctacctcaatagagataa

SEQ ID NO: 581747 - DNA, 468 bp, Homo sapiens
atgtatacttgtgccatgctggtgtgctgmacccattaactcgacatttagccttaggcatatctcctaatgctatccctccccgctctccccaccccacaacagcccccagagtgtgatgttccccttcctgtgttcatgtgttctcattgttcaattcccacctataagtgagaacatgcggtgtttggttttttgtccttgcgatagttgactgagaatgatgaattaaaataaaaatgcatgcactttcaaatgtacttagtgcaacatattgaacttacattccagttttcctggaattacttgtgtcttgagctaaaggctgtatttggtataacagggaaggaaagaaattatttttcctataaaattagtttaaaaacacatataattaaacaaaataaaaatattatcccaccttttaaagaacatttactaagtcacagatattacccgaagtttaga

SEQ ID NO: 581748 - DNA, 468 bp, Homo sapiens
atgtatacttgtgccatgctggtgtgctgcacccattaactcgacatttagccttaggcatatctcctaatgctatccctccccgctctccccaccccacaacagcccccagagtgtgatgttccccttcctgtgtycatgtgttctcattgttcaattcccacctataagtgagaacatgcggtgtttggttttttgtccttgcgatagttgactgagaatgatgaattaaaataaaaatgcatgcactttcaaatgtacttagtgcaacatattgaacttacattccagttttcctggaattacttgtgtcttgagctaaaggctgtatttggtataacagggaaggaaagaaattatttttcctataaaattagtttaaaaacacatataattaaacaaaataaaaatattatcccaccttttaaagaacatttactaagtcacagatattacccgaagtttaga

SEQ ID NO: 581749 - DNA, 468 bp, Homo sapiens
atgtatacttgtgccatgctggtgtgctgcacccattaactcgacatttagccttaggcatatctcctaatgctatccctccccgctctccccaccccacaacagcccccagagtgtgatgttccccttcctgtgttcatgtgttctcattgttcaattcccacctataagtgagaacatgcggtgtttsgttttttgtccttgcgatagttgactgagaatgatgaattaaaataaaaatgcatgcactttcaaatgtacttagtgcaacatattgaacttacattccagttttcctggaattacttgtgtcttgagctaaaggctgtatttggtataacagggaaggaaagaaattatttttcctataaaattagtttaaaaacacatataattaaacaaaataaaaatattatcccaccttttaaagaacatttactaagtcacagatattacccgaagtttaga

SEQ ID NO: 581750 - DNA, 468 bp, Homo sapiens
atgtatacttgtgccatgctggtgtgctgcacccattaactcgacatttagccttaggcatatctcctaatgctatccctccccgctctccccaccccacaacagcccccagagtgtgatgttccccttcctgtgttcatgtgttctcattgttcaattcccacctataagtgagaacatgcggtgtttggttttttgtccttgcgatagttgactgagaatgatgaattaaaataaaaatgcatgcactttcaaatgtacttagtgcaacatattgaacttacattccagttttcctggaattacttgygtcttgagctaaaggctgtatttggtataacagggaaggaaagaaattatttttcctataaaattagtttaaaaacacatataattaaacaaaataaaaatattatcccaccttttaaagaacatttactaagtcacagatattacccgaagtttaga

SEQ ID NO: 581751 - DNA, 501 bp, Homo sapiens
ttttaacagccagtgcactcctgttcttcagctgaatgtccccttcattctgaatgtctgcagtagaattgaattggggagcagttaggttccaggaacatattcactcctgttttgttctctccccaatctcagcctttcggtgactgtttgggcaaagcctcccttgtggtagaagatgcctcacttctggggagaggagactcctcatcttgcagacaagargcagcacccactggttcctgctccaaaagccattaacattataaactggccaggtgtggtggctcaaacctgtaatcccagcaccacttgggaggttgaggcagaaggattgcttgagcccaggagtttgagaacagccttggcaacaaagtgagacccaatctctacaaaaactagagaaaaaatagcggggtgtggtggcactcacctatactaaggaggctgggctgggaggatctcttgagcccaggtggttgaggcttcagtgagccaaga

SEQ ID NO: 581752 - DNA, 501 bp, Homo sapiens
ttttaacagccagtgcactcctgttcttcagctgaatgtccccttcattctgaatgtctgcagtagaattgaattggggagcagttaggttccaggaacatattcactcctgttttgttctctccccaatctcagcctttcggtgactgtttgggcaaagcctcccttgtggtagaagatgcctcacttctggggagaggagactcctcatcttgcagacaagaagcagcacccactggttcctgctccaaaagccattaacattataaactggccaggtgtggtggctcaaacctgtaatcccagcaccacttgggaggttgaggcagaaggattgcttgagcccaggaktttgagaacagccttggcaacaaagtgagacccaatctctacaaaaactagagaaaaaatagcggggtgtggtggcactcacctatactaaggaggctgggctgggaggatctcttgagcccaggtggttgaggcttcagtgagccaaga

SEQ ID NO: 581753 - DNA, 501 bp, Homo sapiens
ttttaacagccagtgcactcctgttcttcagctgaatgtccccttcattctgaatgtctgcagtagaattgaattggggagcagttaggttccaggaacatattcactcctgttttgttctctccccaatctcagcctttcggtgactgtttgggcaaagcctcccttgtggtagaagatgcctcacttctggggagaggagactcctcatcttgcagacaagaagcagcacccactggttcctgctccaaaagccattaacattataaactggccaggtgtggtggctcaaacctgtaatcccagcaccacttgggaggttgaggcagaaggattgcttgagcccaggagtttgagaacagccttggcaacaaagtgagacccaatctctacaaaaactagagaaaaaatagcggggtgtggtggcactcacctrtactaaggaggctgggctgggaggatctcttgagcccaggtggttgaggcttcagtgagccaaga

SEQ ID NO: 581754 - DNA, 577 bp, Homo sapiens
gaaatattctgagatgctatcatgtaactggcctttaaactcatgaaaatgcttgagaacactcaggggaaaaagtgagtaagtagagaaaaaagaaagtactcagctaagtgggttgaagacagtacaggaaatattgaaggagactgtctattgtttgattgatttctttcaaagaaagaatacaaagtaagttgataactgaaggacaacggtaggtcaatgtaaacttttaacaaaaagggaattattcattaatgagaatgataatactaaaatgagagggagagctaagggacagaatttacttaatattgggagatctcrtcaatttagcataagacatgtggtaactttgtagaaggttattgttatgaatgctgtgggagtgaatgcattgggaaactaaaatagaatgtttggcactgttgagtatccttttaagttttgtaatgaattgaaatcatgttattagttacaacgtagatgagcctggaggacattatgttaagtgaaataagacaggcacagagagagaaaaaccacatgttctcacttatatgtgggagctaaaaat

SEQ ID NO: 581755 - DNA, 585 bp, Homo sapiens
tatgtttttaatccatttggaatttatttttggatttgttgtgaaattgagatacaagttcattttgctccagawgaataggcagttatgccagcaatacttattaagtaagccattctttcccacagaattgaaatactacctttgtcacatattaaattatgatatatactgagatctatttttggatccactcttctgttccactgatttgtctactcttatgccaataccacgttgattgtattccagtgatttttattacagtggctttcagttgaaggcaagtctctcattatttatcttctgcatattttctttgttattcaggcacttacatttccatgtggcttttaaaataattttatccaacgcattctaccccccaaaaagagaactattaggataatacatggaattttgctatatttatttaggggaatattattagtttttcaatctgtaaaaattttagtctttctttcttaacatttattatatcttaaaaattagcaataatttcttgatatgattaaatatctagtcactgcttaaatttccccaattgtctcaggatagtttaat

SEQ ID NO: 581756 - DNA, 585 bp, Homo sapiens
tatgtttttaatccatttggaatttatttttggatttgttgtgaaattgagatacaagttcattttgctccagaagaataggcagttatgccagcaatacttattaagtaagccattctttcccacagaattgaaatactacctttgtcacatattaaattatgatatatactgagatctatttttggatccactcttctgttccactgatttgtctactcttatgccaataccacgttgattgtattccagtgatttttattacagtggctttcagttgaaggcaagtctctcattatttatcttctgcataytttctttgttattcaggcacttacatttccatgtggcttttaaaataattttatccaacgcattctaccccccaaaaagagaactattaggataatacatggaattttgctatatttatttaggggaatattattagtttttcaatctgtaaaaattttagtctttctttcttaacatttattatatcttaaaaattagcaataatttcttgatatgattaaatatctagtcactgcttaaatttccccaattgtctcaggatagtttaat

SEQ ID NO: 581757 - DNA, 596 bp, Homo sapiens
ttccaaactgtaccagaccctaaaaggagacttgttgctccttgaataatactctcaaatctcctttctactgatcaagcctatggacaatgacttgaatgaaatcttagaggaaaccggataatacatgtaataaattcagagatgaaattatacatcatgtactgggtgccaagatataggaaagggtatttttatgacattctatattttttttaaatgttgcttgaataggaagatggcacttttatatgtagatcatttctaacatcttctttggtttcgaaaaaaaggataatrtgcatgtagtcgctgctttgaaaatatctcaactttcacatattcttcctaaaaatgtgtagaactgtggctccaagcctagtatctcaagtgaaacaaacaaaaaaccaagaaataaaacctaatttaaagattaatagttattaaatattgatgccatttcagggtatcagtttgataaattatctaggatgtcttttcctgaaacaaaattcaagttgcataaaacatagtcattgcatacagagaatgttcgtttgtttccaaagaaaattgttaggggttagcatttaaat

SEQ ID NO: 581758 - DNA, 596 bp, Homo sapiens
ttccaaactgtaccagaccctaaaaggagacttgttgctccttgaataatactctcaaatctcctttctactgatcaagcctatggacaatgacttgaatgaaatcttagaggaaaccggataatacatgtaataaattcagagatgaaattatacatcatgtactgggtgccaagatataggaaagggtatttttatgacattctatattttttttaaatgttgcttgaataggaagatggcacttttatatgtagatcatttctaacatcttctttggtttcgaaaaaaaggataatgtgcatgtagtcgctgctttgaaaatatctcaactttcacatattcttcctaaaaatgtgtagaactgtggctccaagccyagtatctcaagtgaaacaaacaaaaaaccaagaaataaaacctaatttaaagattaatagttattaaatattgatgccatttcagggtatcagtttgataaattatctaggatgtcttttcctgaaacaaaattcaagttgcataaaacatagtcattgcatacagagaatgttcgtttgtttccaaagaaaattgttaggggttagcatttaaat

SEQ ID NO: 581759 - DNA, 573 bp, Homo sapiens
aataacaatattaacttgttaagaatagatgtaaaataattattaatatmattaaaatatataatttgctatagtacaaccaccataactaaatagtttacatgtactaattcattgaatatcctcagcaacttggtttgattatacaaacgagaaaaatgcagtctaggaagataatatcccaaatgtacaagactagcaaagtgatgtggttgcacttcaagcctatgttttaacatagcacgtgacatggttgagaatataaaatgggattgtgtagtaactgaaatagctcccttcttggcatgcattaaatgccaagttcaaaatacaaaatacaaaattcaaaatacaaattctgaattccttgtgtgcagaagcattgcttgttgatttctctatctaacatctcccagcaaaagacataggacatataaatgttcaataaacgctttcttaattgagcaattattttgtccttcatacaccagacacaaacatactcacactttttttctttacaaatttttaatctcttttccccacctagaaacaaaaaagaacatttatttt

SEQ ID NO: 581760 - DNA, 573 bp, Homo sapiens
aataacaatattaacttgttaagaatagatgtaaaataattattaatataattaaaatatataatttgctatagtacaaccaccataactaaatagtttacatgtactaattcattgaatatcctcagcaacttggtttgattatacaaacgagaaaaatgcagtctrggaagataatatcccaaatgtacaagactagcaaagtgatgtggttgcacttcaagcctatgttttaacatagcacgtgacatggttgagaatataaaatgggattgtgtagtaactgaaatagctcccttcttggcatgcattaaatgccaagttcaaaatacaaaatacaaaattcaaaatacaaattctgaattccttgtgtgcagaagcattgcttgttgatttctctatctaacatctcccagcaaaagacataggacatataaatgttcaataaacgctttcttaattgagcaattattttgtccttcatacaccagacacaaacatactcacactttttttctttacaaatttttaatctcttttccccacctagaaacaaaaaagaacatttatttt

SEQ ID NO: 581761 - DNA, 586 bp, Homo sapiens
aaatcactatattgaaaagatatctgtactctcatgtttgttgcagcactagtcacaatagctaatatttggaagtgacctacgtgtccatcaaaagatgaatagattaataaaatgtggtatttatacacaatggagtactattaagctacaaaaaagaataagaccctgtcattttcaacaacatggatgaaactgtaggtcattatgttaagtgaaataagccaggcacagaaagacaaactttgcatattctcayttatttctgggagctaaaaattaaaacattgaactcatggagatagagagtagaaggatggttaccagaggctgggaagggtagtggagtgggggtagagggtagggatgactaatggttattagttattataactattaaaaaatagttaaaaagaatgaataagtatttgatagtacaagtgtgactatattaaaaataatataattatacattttaaaaataaatgagtataattggattgtctgtaacacaaagcataaatgcttgaggtagtggatacctcattttccctgatgtgattattacacatgtatgcctgtatca

SEQ ID NO: 581762 - DNA, 586 bp, Homo sapiens
aaatcactatattgaaaagatatctgtactctcatgtttgttgcagcactagtcacaatagctaatatttggaagtgacctacgtgtccatcaaaagatgaatagattaataaaatgtggtatttatacacaatggagtactattaagctacaaaaaagaataagaccctgtcattttcaacaacatggatgaaactgtaggtcattatgttaagtgaaataagccaggcacagaaagacaaactttgcatattctcatttatttctgggagctaaaaattaaaacattgaactcatggagatagagagtagaaggatggttaccagaggctgggaagggtagtggagtgggggwagagggtagggatgactaatggttattagttattataactattaaaaaatagttaaaaagaatgaataagtatttgatagtacaagtgtgactatattaaaaataatataattatacattttaaaaataaatgagtataattggattgtctgtaacacaaagcataaatgcttgaggtagtggatacctcattttccctgatgtgattattacacatgtatgcctgtatca

SEQ ID NO: 581763 - DNA, 239 bp, Homo sapiens
tgtttgttaccaattttcttttaacaaaatcattttggaaaactggttttcaccacacaaattttaagaaacacattcagaccacaatacttggtctctctaagaaatgacctttaagctgaaaggactgagctatggaatggaattaakctcgttgttttatctaagaaggtcagcatgtctggaccagagtgagaaaggagtcagagaggtaggcaggggctaaatcatgcaggcca

SEQ ID NO: 581764 - DNA, 431 bp, Homo sapiens
taacccaacacacaatagcagggcacccatgtgcaggcatttctccacatcccaggctttccgattttacctttgtgccaggcactgtgataagcactttctatggaaagtttgattgaatcctaaaaacaagtagtaggttagaataggtcaaactggtttaatacttacaatttcatatgcttctaccgtatacatgaattaggtcttattattttttacattgtacagatgaaaactctgagacatgagagagtaagcaacgtaattatggtctcacagacggtgtttctcaaactgtaatgtgcactggggaccttgtgtaagtgcagattccgattcagtaagtctggggaccatttgagattcagcatttctccaagttcacaggtggttcctgctggatggaycacatgctttgagtaggtgat

SEQ ID NO: 581765 - DNA, 590 bp, Homo sapiens
aaataaataaataaataaataaataaataaataaataaataaataaagcattactttctagtcctgaccctttcacaaactggctgaggaactcaagcaagtsttttaaagccctcaaaatgaggaatggtatagtcactctgtattctgtacttaagacagatgcatagaaaggcttctttctgaacgtcttattttcacattgtatggacaagctggagcataaccagaggcctcggactcagcactggaaagaattcacctttgtgaggctttccatcatgtagtagacaccgagctagggttttacctatatggtctcggttaatcttcacatcaatgctgaaatgttttttattattctaaaaaaaaagagttttttcttttttttttggaataaacttgcctaagatcgctcccactgaaagtgaaagggctgactcctaaatgcatgtccttcccactactaggatagaaaaatatctaaaaaccatgtcatgagagggcagctatggaaaccaagaataacaatagctatccaaaaaaatatatgaaggactgttaggtccaggaaaatagatttattcgtt

SEQ ID NO: 581766 - DNA, 590 bp, Homo sapiens
aaataaataaataaataaataaataaataaataaataaataaataaagcattactttctagtcctgaccctttcacaaactggctgaggaactcaagcaagtcttttaaagccctcaaaatgaggaatggtatagtcactctgtattctgtacttaagacagatgcatagaaaggcttctttctgaacgtcttattttcacattgtatggacaagctggagcataaccagaggcctcggactcagcactggaaagaattcacctttgtgaggctttccatcatgtagtagacaccgagctagggttttacctatatggtctcggttaatcttcacatcaatgctgaaatgttttttattattctaaaaaaaaagagttttttcttttttttttggaakaaacttgcctaagatcgctcccactgaaagtgaaagggctgactcctaaatgcatgtccttcccactactaggatagaaaaatatctaaaaaccatgtcatgagagggcagctatggaaaccaagaataacaatagctatccaaaaaaatatatgaaggactgttaggtccaggaaaatagatttattcgtt

SEQ ID NO: 581767 - DNA, 590 bp, Homo sapiens
aaataaataaataaataaataaataaataaataaataaataaataaagcattactttctagtcctgaccctttcacaaactggctgaggaactcaagcaagtcttttaaagccctcaaaatgaggaatggtatagtcactctgtattctgtacttaagacagatgcatagaaaggcttctttctgaacgtcttattttcacattgtatggacaagctggagcataaccagaggcctcggactcagcactggaaagaattcacctttgtgaggctttccatcatgtagtagacaccgagctagggttttacctatatggtctcggttaatcttcacatcaatgctgaaatgttttttattattctaaaaaaaaagagttttttcttttttttttggaataaacttgcctaagatcgctcccactgaaagtgaaagggctgactcctaaatgcatgtccttcccactactaggatagaaaaayatctaaaaaccatgtcatgagagggcagctatggaaaccaagaataacaatagctatccaaaaaaatatatgaaggactgttaggtccaggaaaatagatttattcgtt

SEQ ID NO: 581768 - DNA, 326 bp, Homo sapiens
agaattttatttcttccccttactagaytggggagccatttagcttttctctgtactcagttttgtcatctgtagaaatgggaataacagtccagctgttgagaggattaaatgaataatgagtctgaaaatgttttgttaactttggggcactgaaagcctagaaactttttttcataaattatagaaacagttatgcttagtccacatcgacttttctgccttgtgaaataggtccccaagggctatatacttgtcaataatttttttaatttattcaacagatatttactgtatacccgatttccatcgggtacttggaattc

SEQ ID NO: 581769 - DNA, 653 bp, Homo sapiens
tccagtggctgctgtattttcctttctttcctttggaagtcatgcagcrtcacttcagccatatccaactgattaccatcaactcactcagcccgcccagattcaaggggaggggaattaccctctacctcttgttggaagcgtggcaagttcatattgcagaacagtacgtgagatgggggctagtgtagccacttttggaaaatacagtatcccaacaggattttcctattctaagcatttcgtctcattggaactgtgtgatacatggtcttttgtgtctgtggagctcttattttaacacaaggcaaatgcccctaaactaagtgctttgcaaaggtgacctcactatacctttatgagatgaggactgtaatatccccattttacagatgggaaacacagaaaggttcaataacttgctgcaagtcccagctagtgagtggcggagccagattttgaacccttgtccctggcactgctaaactgtatgcaaatgaatgtcttttagagacagggtttcatctcctctatctacagtaagaaaatggaagtctatgatgcattcatagctatttattgagcccctacaatgtgccagacactgctacatcagagccacagattaggcaagaagaaaggcaattaaacca

SEQ ID NO: 581770 - DNA, 578 bp, Homo sapiens
ctaaaactgaagaacttggagtctgatgttygagggcaggaagcatccagcatgggagaaagatgtaggctgggaggctaggccagtctcatcttcacatttttccgcctgccttatattctagccgtgctggcagtcgattagatggttcccatccagattaacggtgggtctgcctttcctagcccactgactcaaatgttaatctcctttggcaacaccctcacagacacaccaaggatcaatactttgcatccttcagtccaatcaagttgacactcagtattaaccatcacacgtgcaaagagcacagcttcttctgcaggtcctacacaacactgagggtggaggacatggtagacagatgcagcttccagtttaccttcatgggttcctcattttccactaagttccagttcattcttggtctccatcacgtcatgtccagctgtccttcctgacttccagcctggctgacctgtatgaactttaggcacaacacacaacacagacacttcagcagccaatgcaattgtgtaaggtctaatttctagaatacattccttattctatgtcag

SEQ ID NO: 581771 - DNA, 608 bp, Homo sapiens
atatatatatayacaccacaatttctttatccactcattgattgataggcatttggaccggttccatacttttgcaattgcgaattgtgcgaattgtgctgctataaacatgaaactctttagtttaattaagtcctacctatttatctctgtttatgttgcatttgcttttgggttcttggtcatgaaacccttgcctaagccaatgtctacaagggtttttctaatgttatcttctagaatttttatagtttcagtcttagatttaagtccttgatccaccttgagttgatttttgtataaggtgagagaagaggatccagtttcattctcctacatgtggctagccaattatcccagcaccattttttgagtaaggtgtcctttctcactttatgtttttgtttgctttgtcaaagatcagttggctgtaagtatttgggtttatttctgggttctctattctgttccactggtctatatgcccatttttgtaccagtaccatgctgtttcagtcactatggccttatagtttgaagttaggtaatgtggtgcctccagatttgttcgttttgcttagtcttgctttggctatgtgggctctttt

SEQ ID NO: 581772 - DNA, 564 bp, Homo sapiens
ctttttgtttcatttatcttttgtttgtttgtttgtttgtttccatttcatttagttctgctctgatctttgttatttcatttcatctgctgggtttgggtttggtttgtcattgtttctctagttccttgaggtgtgaccttagattgtctatttgtgctccttcagaatttttgatgtaggcatttaaggctatgaactttcctcttagcactacttttgctgtatctcagaggttttgataggttgtgtcactattatcattcagttcaaagaatkttttaatttccatcttgatttgattattgatccaatggtcattcaggagcaggttatttatttattcatttatttacatatttattttggaggctgagtctcattctgtcacccatgctggagtgcagtggtgtgatctcggctcactgcaacctctgcctcccaggttcaagcaattctcctgcctcagcctcccaaatagctgggattacaggcatgtgccaccatgcctggctgatttttgtatttttagtagagatggggttttggcatgttggccagact

SEQ ID NO: 581773 - DNA, 371 bp, Homo sapiens
gtactcccagctacttgggaggctgaggtgggaggaccacctgagcccaagaggtcaaggctagagtgagcagtgagttcaccactacactccagcctgagcaagcttaagaccctgtctcaaaaaaaaaaaaatacgctatttaagcatgaggtctcagaaaaatagagattcctgcaaggtatttgataatgtccctcaaattcactagggcaaaaaataagtagctcttatcttgagaatatcatttatagatttagagacaacacygaggtgcaataaattttctcctagtaatattacgatctgcaaacttgtcaacatttctgtaatatccccttttaggaaaaaacatcctacatggggaggac

SEQ ID NO: 581774 - DNA, 560 bp, Homo sapiens
tttttactttaagcactttaaatgccaaacttgaggaaatactgacaccttgtggaaaacctcagaaaacgcttgctctcaaattaatggcaattarttacaattttgcctttgtttttatcaattttgaaatgttttcctggaaagtatagctgaattttagatttaatctcctttatattaatgctcatagcttaactaggagcagaattattaaattaaatggacacaatagaaaaaataccaaagataataacttaaaatcacaatttattgaagaatttaaaatttttctggcaggattttcagtctacactttaggcgagtaattgtgctatagcaggaagaaaaaagggggaaaatacataatgttcacattgacatgttttatagctaccaaaagaatcaacagcctacctgaaactcaaaaaaccctgttttcaaagcttctttaaacatcatcttttcatagttttgatctgtttttataattcctgcattcaattcactattgaatacggggaaaaaaaggttattgagtttaaaggcacttatacata

SEQ ID NO: 581775 - DNA, 560 bp, Homo sapiens
tttttactttaagcactttaaatgccaaacttgaggaaatactgacaccttgtggaaaacctcagaaaacgcttgctctcaaattaatggcaattaattacaattttgccttygtttttatcaattttgaaatgttttcctggaaagtatagctgaattttagatttaatctcctttatattaatgctcatagcttaactaggagcagaattattaaattaaatggacacaatagaaaaaataccaaagataataacttaaaatcacaatttattgaagaatttaaaatttttctggcaggattttcagtctacactttaggcgagtaattgtgctatagcaggaagaaaaaagggggaaaatacataatgttcacattgacatgttttatagctaccaaaagaatcaacagcctacctgaaactcaaaaaaccctgttttcaaagcttctttaaacatcatcttttcatagttttgatctgtttttataattcctgcattcaattcactattgaatacggggaaaaaaaggttattgagtttaaaggcacttatacata

SEQ ID NO: 581776 - DNA, 574 bp, Homo sapiens
ctgcaacctgtaggagagaatccttgcttgcctcttcctagcttctggtatttgcccacaatccttggcatttgctagatccttgtagattcttcagttcatatttctgcttctatcctcacatgaccatcttctctatgtgtctgtgtttatgtccaaattaccctgtacttatcaggacagaagtcccataggtccaccctaatgaccttatctagtttgatgacatattcaaagaacctatttccaaataaggtcacattcacaggttttggggcttagagcatcaacatgtcttttttgggagacacaattcaacccataacaagtggcttgattttcttytgagaaaccatcatacttccagtctcaggtgtgagttttgaataggattgagttgaccccattctcaattccaaggaaggactatgacttatttaatcagagaattctgtccttatttgcatatatttcagtcaaaacattaagacactaggagaaatttgtaagtgttcttgggggaaaagattcttttctttctttctttctttctttctttctttctttctttctt

SEQ ID NO: 581777 - DNA, 517 bp, Homo sapiens
tacccaaggtggccactttatgtgaacttaaaggttcccacaggccagaagtggtgactcatgactgtaatcccagcactttgggaggccgaggcaggaggatcgcttgggcccaggagtttaagaccagcctgggcaacatagggagaccttgtctctacaaaaaaaaaaaaaagaaaaaattttaaaagaaattagctgggcatgtggtgcacacctgtaggtccagctacttaggaggctgaggtgggaggattgtttgayactgggaggtcaaggctgcagtgagctgtgatcataccacctcattctagcactccagcctcggtgataaagaccctcattcccacagctcaaatattctgatagtagctttcaatccctgttccctgaaccttgggggtgggggctcacagctactataagacatgccagtccacatatgtacaaggtgaaatttgtatactgggtaacattatacacaacgcagagccaatcaaggaaatcataaaatcat

SEQ ID NO: 581778 - DNA, 543 bp, Homo sapiens
aacttttctcttccatacccaaattcctagtgttatacagtccaaggatgaggtatgggaacccaaacatgaagttgtcagtgtgtcttacaggaaaagtactaagtgaatgattctgtctattctgtggaggccaagtgatgtaatctttagaaaaaatagacatgatgtgatattatttgggggattttgtaaaccttaaggatatatggtagcgatagtggacaatgtttctcagagacatctttcctcagtactagttttgagagctctcctacagaaagatgtgggtccacaggccaaggatacactctaccccagtcctaactctattgtcagatcatgaattatccatgcaggaatatgtctttcaagtacattgttttggattcctgagagctttaaatacaattcaatcattattatttttctaatccaaaaatcagtagagtgaataatggcccacaaaattcatctaaagggatcttgacttgattaaaatgactcacycaggttcatataaatgtcttgcacataatttca

SEQ ID NO: 581779 - DNA, 431 bp, Homo sapiens
ttataaataaaaccattttcatatttctaaataaagatgtaaaataatttgaaataaatacatggctataacatgagttattgaatgtcttataagttccataaatcccatgagattacaattattcacatatgcatcaacttcagttcttaacacttttacctacaaatgtaagatatccagtaatcaattttaattttccaataattctctatatagatagaaagaaaacratgtgcgttttttaagttcaatgaggcacagcattctttctagtaatgtcatgacccaagtaacaaatatgcatatcatgttctccaaattaagtcagacaatgttatagttttatttatgtgtacacacatatatacatataacaatactaaataattttatctgatgtataagaaattctgcatccaaccaaaaaa

SEQ ID NO: 581780 - DNA, 556 bp, Homo sapiens
acactaatacatttgcctttcacctttttcttattcatttgtgctttttctgtttgaagaaatccatcctactgcagtatcatcagggtagattcctatattttcttctaagttgtaaagtttgcttttcacatttagcttgttattaatccatctggaacttatttttgtgtttggagtaaagtaggattctaactatctttttccatggaatgggtcaattgtctcaacaccatttatttaacagttcatcatagctccattggaatgctgttatcttccaaattccattactatataggtcagtttccatgctaccctattcctctgtcccatttgtctctccttgtactgattcccactaattattactgctgtataaagcaatatatacttggtaggataagtgaccctacatkttgttcttaaaaattatcttggcgatttttgacccaatagcttttccaaattaatcataggataagcttgccatgttttactccccacctctaccccctaaaaggagagaacactgtgttttgcctgaaacaatatt

SEQ ID NO: 581781 - DNA, 417 bp, Homo sapiens
aaacatctacacttgagagaccaagagtaagataacacttagatttgatgagtttgttatgccatctaattcttttttaattcatattcagtacttagcacagtatttagtaaagagcaggtgttcaatactttagattgaataaatataaaatgcatcttcagcaatggtgttattgtgyagcatttgtgatatttatataaagaattcagctggacggtgcagtggtttgtacctgtaatcccagcactttgggaggctgaggcaggtggatcccttgagcccaggagtttgagaccagcctgggcaacacggtgaaaccccatctcaaccaaaaaaacacacaaaaactagccagacatggtggtgcacacctgtagtcccagctacttcggaggctgagatgggagaaagaat

SEQ ID NO: 581782 - DNA, 436 bp, Homo sapiens
ttgagtattactatttgccatgaagattgtttaaggtaaaaayacaggccttggacatcctgtatctttatcttgaaagtaccatgatcttggaaatgccagaaaggaaagtcccatatttaataagcattctacattaaatatttaaatatttctaaatcaaagaaaactgtaattgaatttaaaacattttccagctataaagttttcagttcttttgtttgatttaggttgctcactgccctgcgttgcatgaacaacatgagttgttgtagtgcgaggctgctgtcaaatacttaaaaattttacttaacagaaagatttttcatgaaactaataagctaaatgcaaagtgacaattttcccacatacagtaccttgagaaatttggaatgttgtcacttaatttagtttgaaaaatattagcaaaagactt

SEQ ID NO: 581783 - DNA, 555 bp, Homo sapiens
atcacacaccagggcctgtcagtgggtggggggcaaggggagggatagcattaggagaaatacctaatttagatgatggtttgatgggtgtagcaaaacaccatggcatatgtatacctatgtaacaaacctacacattctgcacatgtaacccagaacttaaagaataataattttaaaaaactggaagaaaaaagaaatcatagacgatataaacaaatggaaacacatcccatgctcatggatgggtagaatcaatattgtgaaaatgtccatactgtcaaaagcaatctacaaattcaatgccatcctcatcaaaatatcatcataattattcacagaattagaaagaaaaacaattctaaaattcatatggaaccaaaaaagagcccaaatagccaaagcaagactatgcaaaaataacaaatctggaggcatcatactacatgatttcaaactatactataaggccatggtcactaaaacrgcatggtactggtataaaaataggtgcgtaagaccaatggaacagaatagagaacccagaaacaaacc

SEQ ID NO: 581784 - DNA, 625 bp, Homo sapiens
tgttcatcactaacaaaatgtactgatttacttagagaataaaatacaatatattttgggtgaagatacttattcttttattcatttggaaacatttaatacatactaggacatcaaattgtggtagtcaaagataaaacaatgatgatcatatgtgacacctattctcaatggattcgtaagccatagaatacaaatgggtaatgaaataataaaataaaacaataaaattatgcaggaagtactatgttccttaagaaatgaacacaagtgctaaggaagtctgtaaaaggaaaaattacatgaggctgaagaaaaacaagaacagaccaaaatttatttatatatatatatgagagaaataaaagcctatatgtatatatctayagatataggcatatacagaaaaagagagaagaaagaccagtagaatgattaaaataagaaaacaagaatccctcagccagagtcccatccagaatctttaataaagcatggtaaggtaagcatatggaatcagttttgacgagaagtattgtctatcttctatgtattttaaaatttatgccaggcacagtgcctcatgcctgtaatctcagcattttgggaggccaaggcaggtaga

SEQ ID NO: 581785 - DNA, 605 bp, Homo sapiens
tgctactgcactccagcctgggcaacaagagggaaactccatctcaaaaaaaaataaaaataaaaaataaaaagaatcccataaaaataagtaaaaaaggggagatttaaaattccctctctgcatccttttcatgcttgtgcagctaccagctggcaagggcaaatggtcttaccttattacttttatttgtgtgtcttcaagccgaattccataggtgtgatggaaatccttgctttgggctgcctgttccagagagagacccaaacgttcagtgcacttggccttgactggatgttgaaacaactaagaagacagatattttagagatattgttttgaataaaggaacatcataatggagcagtcatgagtctaaacttgctagccagtagccagagtccttggggttgaactctttcgtggcaatttgatagctgtgtcatgttaagcaaatatctaactcctcagtgcctcagttttctcatctataagatggggttaataatgctacttatattatagggtcatggtgaggttttaaggggtttataatgtgcaatgagttcagaagggtkactggcatacaataagtgccttgtaact

SEQ ID NO: 581786 - DNA, 540 bp, Homo sapiens
agatggatagatgaaaatttgggaattagctaacttcactggtgtgagaatattgtaaagttgtttggaaacagatggacaacatatgctatttgtcatctttatctcctgcaggtgttttgcacaagtgtgagcgctgtgaagcagagcacatctgcccattgcctctgggtctcctgcccttagggcagtgctaggtccctggttatgtatttattgaaggaatgaatttaatgcaaaacaggggctacatttcaataattacaaaataastctgggtacggtggctcacgcctgtaatcccaacactttgggaggctgaggtgggcggatcacctgaggtccggagtttgagaccagcctgaccaaacaatgaaatcccgtctctactaaaaatacaaaattagccaagtgtggtggcacatgcctttaatcccagctacttggcaggctgaggcaatagagttgcttgaacctggtaggtggaagttgcagtgagccgagatcgtgccatggcactccagcctgggcaacaagatc

SEQ ID NO: 581787 - DNA, 540 bp, Homo sapiens
agatggatagatgaaaatttgggaattagctaacttcactggtgtgagaatattgtaaagttgtttggaaacagatggacaacatatgctatttgtcatctttatctcctgcaggtgttttgcacaagtgtgagcgctgtgaagcagagcacatctgcccattgcctctgggtctcctgcccttagggcagtgctaggtccctggttatgtatttattgaaggaatgaatttaatgcaaaacaggggctacatttcaataattacaaaataactctgggtacggtggctcacgcctgtaatcccarcactttgggaggctgaggtgggcggatcacctgaggtccggagtttgagaccagcctgaccaaacaatgaaatcccgtctctactaaaaatacaaaattagccaagtgtggtggcacatgcctttaatcccagctacttggcaggctgaggcaatagagttgcttgaacctggtaggtggaagttgcagtgagccgagatcgtgccatggcactccagcctgggcaacaagatc

SEQ ID NO: 581788 - DNA, 515 bp, Homo sapiens
aatatataaacaatatccttggcattcttataataaataaaaccaaaagcttcatagggttgttttctctgatatcctttaaacacaaattaaatattatgtaggcacttggtagaagatagagatggagacaaataagacatttgaattattctctctctcaaacctcaaacttttttttatacggtgtcttgctttgtcacccaggctaaagtgcaatgttgtgatcatgcctcactgcagcctccatatcccaggctcaggtgatcctcctgcttccatctcctgagtagcttggactacaggcatgcaccatcaaactcagctaattaacataatttttatagagacaagtgttcaccatgtgttcaggctgtcctccaactcctgggctccagcaatcctccctcctcagcctcccaaagtgctgggattacagcacttgagccaccatgtctggcatatctttttctttaatttcractcctgttttagattcagggtgtaaatgtgca

SEQ ID NO: 581789 - DNA, 441 bp, Homo sapiens
ttcttattgacatataggagttctttagattgtctccatacaagactcctgtattttaatttacttctattgttttctccaagtagcttaagtttgttccctgaatcatcttctccctttcattcattacccttaagtttccaaaacttttgaacttaagcttctctgctggctttctacctttgtagaccccaaatttgcatccaaaaaagtgagttagatgtaattgactgaaaatccttttaaaattttatcctctaatattcatcttttttagttttttaatttttttattattatactttaagttctaaggtacacgtgcataatgtgcaggtttgttacataggtatgcatgtgccatgttggtttgctgcacccatcaactcgtcatttacattargtatttctcctaacactatccctcccccagaccccacc

SEQ ID NO: 581790 - DNA, 191 bp, Homo sapiens
taattgcgttaactacacaaattgtacagcatgtgtgtttgagcaatatgaaatgtgggcaccctgaaaaaagaacargataagagcaattgttcagggaataagagagataaccttaaactctgaccgccggtgagctgggcagaacagagccatatttctcttctttcaaaagcaaatgggagaaatat

SEQ ID NO: 581791 - DNA, 191 bp, Homo sapiens
taattgcgttaactacacaaattgtacagcatgtgtgtttgagcaatatgaaatgtgggcaccctgaaaaaagaacaagataasagcaattgttcagggaataagagagataaccttaaactctgaccgccggtgagctgggcagaacagagccatatttctcttctttcaaaagcaaatgggagaaatat

SEQ ID NO: 581792 - DNA, 191 bp, Homo sapiens
taattgcgttaactacacaaattgtacagcatgtgtgtttgagcaatatgaaatgtgggcaccctgaaaaaagaacaagataagagcaattgttcagggaataagagagataaccttaaactctgaccgccggtgagcygggcagaacagagccatatttctcttctttcaaaagcaaatgggagaaatat

SEQ ID NO: 581793 - DNA, 536 bp, Homo sapiens
atgcttcacgaagttcttgtgctgtgtttttcagctccatcaggtcatttatattcttctctaaactggttattctagttaacaattcgtcttttttcaaggttcttagcttccttgcattgctcctttagctcagaggagtttgttattatccaccttctgaagcctacttctgtcaattcgtsaaactcattctccatcctgttttgttcccttgctgacgaggagttgtgatcctttgtaggagaagaggcgttctggtttttcgaattttcaggcttttttgcactggtttctccccatcttcatggatttatctacctttggtctttgatgttggtggccttcagatgaggtttctttgtggacatcctttttgttgatgttgatgcccttcctttgttagttttccttctaccagtcaggcccctctgctgcaggtctgctggagtttgctggaggtccactccagaccctgtttgcttgggtatcaccagtggaggctgcagaacagcaaagatcgctgcctggaggct

SEQ ID NO: 581794 - DNA, 536 bp, Homo sapiens
atgcttcacgaagttcttgtgctgtgtttttcagctccatcaggtcatttatattcttctctaaactggttattctagttaacaattcgtcttttttcaaggttcttagcttccttgcattgctcctttagctcagaggagtttgttattatccaccttctgaagcctacttctgtcaattcgtgaaactcattctccatcctgttttgttcccttgctgacgaggagttgtgatcctttgtaggagaagaggcgttctggtttttcgaattttcargcttttttgcactggtttctccccatcttcatggatttatctacctttggtctttgatgttggtggccttcagatgaggtttctttgtggacatcctttttgttgatgttgatgcccttcctttgttagttttccttctaccagtcaggcccctctgctgcaggtctgctggagtttgctggaggtccactccagaccctgtttgcttgggtatcaccagtggaggctgcagaacagcaaagatcgctgcctggaggct

SEQ ID NO: 581795 - DNA, 610 bp, Homo sapiens
aaactaagcttcataaatgaaggagagataaagtctttttccaacaaatgctgagagaatttgccactaccatgtcagcactacaagaaatgctaaaaggggttctaaatcttgaaacacaaccttgaaatacaccaaaatagaacctcctttaagcataatctcacagggtctataaaataataacacaacagaaaaaaaacaacaacaaggtattaaggcaacaacattgctgttgagcagtacctcacatctcaatagmaacattgaatgtaaatgacctaaatgctccacttaaaagatacagaatggcagaatggataaaaaaaaaaaatctaccaaccaagaatctgctgtcttcaagagactcacctaacacataaggactcacataaacttagggtggtaaagggaaggaaaaagatattccatgcaaatggacaccaaaagtgagcaggagtagctatgcttatatcagacaaaacagactttaaagcaacaataacaacaaagacaaagatggatattatataataataaaaggattagtccaacaggaaaatatcacaatcctaaatacataagaacctaacactggagctcccaaatt

SEQ ID NO: 581796 - DNA, 622 bp, Homo sapiens
acattcaaatgcccaatggtcaaagataaagaaaggattctaaaagcagccagagaaaagaaacaaataacacacaatggagctccaatacacctggcagcagacttttccrtggaaaccttacaggccaggagagaatggcatgacatatataaagtgctgaaggaaaacaactattatcctagaatagtatatctgacaaaaatatatttcatacatgaaggagaaataaacactttcccagacaaagaaaagctgagggatttcatccttccatagagttttaaagacctgtcccataagaaatgctaaagggagatcaccaatctgaaagaacaggacattaatgagcaatcagaaatcagaaatgaaggtgcaaaactcactggtaatagtaagtacatagaaaaacacaaaatattataacattgtaattgtgttgtgtaaactatttgtatcttaaatagaaagactaaaagatgaactgatcaaaaataataactacaacaatttttcaagacatagtacaataagatctaaacagaaacaacaaaaagttaaaaagtggggaggggatgaagttaaagaacagacattttgttttctttttgcttgtttgttg

SEQ ID NO: 581797 - DNA, 521 bp, Homo sapiens
agatggaggcagagataaatgacaattgttgagcagatttgtaacgagtattctggagagacatgtgtgagccttgtgggcttccaccacaagttcctacttctggacttggctctgacagcagccacttcccctctttcctcatygctagaatgggagggtggacaaaggctctctcgcactgcctctagggggtcatggtgctgctagtgggttgcctctgatttttttttaatatctgttcccttggggccaagttgtctggcagtccttgcttagcacagttttattctgcacacattgatcaccacagtctacttggataagaccagtcccctcccaacatggttcaaattccagtagccctggtgcatgaatggtggggaactccataacacacaagaacacttgactctggcaggctgctgggtaggcgatggaatatgggggtccttctgcagtcaccccacaggtggagtctcaggatttataatcagaagaatctgctgtgaaggtcccag

SEQ ID NO: 581798 - DNA, 521 bp, Homo sapiens
agatggaggcagagataaatgacaattgttgagcagatttgtaacgagtattctggagagacatgtgtgagccttgtgggcttccaccacaagttcctacttctggacttggctctgacagcagccacttcccctctttcctcattgctagaatgggagggtggacaaaggctctctcgcactgcctctagggggtcatggtgctgctagtgggttgcctctgatttttttttaatatctgttcccttggggccaagttgtctggcagtccttgcttagcacagttttattctgcacacattgatcaccacagtctacttggataagaccagtcccctcccaacatkgttcaaattccagtagccctggtgcatgaatggtggggaactccataacacacaagaacacttgactctggcaggctgctgggtaggcgatggaatatgggggtccttctgcagtcaccccacaggtggagtctcaggatttataatcagaagaatctgctgtgaaggtcccag

SEQ ID NO: 581799 - DNA, 544 bp, Homo sapiens
tcatttaaacatttgtagttttaagcttctaagttttgtagtaatttgttataccataatagataacaaatgcatggtcagataacattttgtatgatttcaatctgttttaaatttggttaaactaaataaaaaagtaaagaaagacagaaagataaatttggttaaacttacaaaatgtgtttagcgggggccagataacttttgattttggtgactatcccatatgtaccagggaggagcttgtattttgctgctgtcatgacgttcatttgatcaaggtggttctcagtgtagttcgagtcttctatacccttaccgattttattgcctacttgttcgatcattcacagacagtactgatgtgtctaactacaattgtggatctgtctatttatccttttggctttattagtttttactgtatgtattttgaagctatattaattaataaaacacacttaatattgttatgtattcttgatgtaattattwttttttaactctgggaatatttcttgttctgaagcctactttaaaaata

SEQ ID NO: 581800 - DNA, 596 bp, Homo sapiens
tccagtaccctctctgtcatrtgctgcttttctaaaacctgtgtggaattatttattacagagagataccgggtttattatttgtaagggcgagaacacttgacatgcagggggagggaaagacattgacgttgtaatcctgtggtgtagcttatttttaatcacagagagaaatgctgaggtttgttttaactgagatacaaaatgttagaaataagctttggttgttaggaatagtaattcacagagcggtctctagattcactatgttagcccaaatctgaggcaagcaagttcttttaaagcccaacatcagaactcatgtactgacctagtttaaaatgttaaaagtgcagctcatcccatcaggaggaaactactatagagcgtgctcttcgagtttcttctttatttgtctagggggcttcttttttcctcagagagagggcattagttgcataattttgcagggcaactggcttcttattccttttgcactccttagtggtgtctcagctttgcagttttagggggaaatgagctttgatgtgtagtaaaaatgataactgattttaatataaaatagtgaatgctgg

SEQ ID NO: 581801 - DNA, 575 bp, Homo sapiens
ccacctctcagtcccccgagtagctgggactacaggcacacgccatcatgcccagctaattttttgtagaggcagagtttcaccatgttgctcaggctcttctggaacttctgggctcaagccatcctcctgcytcagcctcccaaagtgctgggattacaggtgtaagccacacatgcccagccttgtgtttgtttttacccccaccctaaccccagtttggagcaaaacagaggagttttatcatgttgtgtcagatattcaagagcttcttcatatatatgtcaagtattgtctatagaacaaattagcaatgtcccagaattatattttgctacgtttaaaatgtacataaggcctactatgactaatgaaatatgaattgcctcgatagcctttttgtcttgatatgttctctctccaaggatactgaaagtacaactactattgtctgcagggaagtgtcaccaaacttttagaccttcaaagatgcccccacctttctctcccagcacagtgcctgcactggctcggtgggtaacaaaggcagtggctgggggctgtcccagagctcc

SEQ ID NO: 581802 - DNA, 574 bp, Homo sapiens
tataatatgatatacgcattccttaaaaaattgcattctagtaaattacatactaaaaataagagacttatgaggaaaatatagaccacttaaggcctgcacaactttgtaagcacagcactgacaaaaaccaaagtaatttcagtaaaatattaatgtatttaagatgctatattcccaataataagtgayacaataaataatacagtatgcctccaaagcttgctatgttcatatgtattagtgtactttgcatttagttgctgtatttagtggtcaaaataattaatgtgctagagaaaaagtcaactgtaagccatagctgcttttgtattatactgacaggcttctactatttgccaattgtgaacgaactaattcatgttactaaagcatgtcctgtagaagaatagactgtacttaaatgacaatcactataaatggggacagggtagcaaagcaggtcaactgataatcatttgagatacacctacattctaaaatagaaattttgaaaaaaagaaagaagcacatcataaaaaaaaattttaaataaactgtaaaacaacaaaag

SEQ ID NO: 581803 - DNA, 574 bp, Homo sapiens
tataatatgatatacgcattccttaaaaaattgcattctagtaaattacatactaaaaataagagacttatgaggaaaatatagaccacttaaggcctgcacaactttgtaagcacagcactgacaaaaaccaaagtaatttcagtaaaatattaatgtatttaagatgctatattcccaataataagtgacacaataaataatacagtatgcctccaaagcttgctatgttcatmtgtattagtgtactttgcatttagttgctgtatttagtggtcaaaataattaatgtgctagagaaaaagtcaactgtaagccatagctgcttttgtattatactgacaggcttctactatttgccaattgtgaacgaactaattcatgttactaaagcatgtcctgtagaagaatagactgtacttaaatgacaatcactataaatggggacagggtagcaaagcaggtcaactgataatcatttgagatacacctacattctaaaatagaaattttgaaaaaaagaaagaagcacatcataaaaaaaaattttaaataaactgtaaaacaacaaaag

SEQ ID NO: 581804 - DNA, 551 bp, Homo sapiens
cgttaccggggctgcacccaccctcatctgaaatccaaagctattcttcctatgctgcagagaggaacagccacagctctctacctcttgctccarttgttcataacgtctaatcaagataacagcaaagggggccaggtgcggtggctcacgcctgtaatcccagcactttgggaggccagggcggggggagggagcagatcacttgaggccaggagttcaagaccagcctgaccaatatggcaaaaccctgtctctactaaaaatacaaaaattagctgggcatagtggtgcacacctgtaatcccatctactcaggaggctgaggcacgagaattgcttgaaccccggagacagaagttgcagtgagctgcgattgtgccactgcactctagcctgggtgacagagtgagactctgtttcaaaaaatgaaaaaagataatagcaaagatgtttgtgagtctgctctcacgctgctatgaagaaataccctagactgggtaatttataaagaaaacaggtttaattgactcacagttccacatggctgg

SEQ ID NO: 581805 - DNA, 589 bp, Homo sapiens
taacttcttgtaggtgctaagtgatttgtagtgctcaggatcaaaatttcattggttcattctttcattcattcattcatacattcattttgtgctttctatatgctggtcactatttaaattgcttgggatcaaccaaggaacaagacagaaaatatccttcctcttctggagcttatcttctactggggcaatggcagtaggagaaagaaccatccaccttatagattagagaggaattcctcggaaatactaagaaattactcatggaaggaaatactagaatgaatatactttatgtgaatggggggcatgtggggacttgaagtttgaatatcagaaagtgaatttaattaaaattagaatctggtacccctgcaaggtgatgtttcaagcacaagaatgtttwgtggaggtaatgcatgcattacttttcatgttaaattacatatatacagagagtaatgtgtgtgtgtgtgtgtatatatatatatacatatataatgtgtatgtatgtttatacatgtgtgtgtttatgtatgtgtgtttgtgtgtgtatatatatatgtatgtatgtatatataaatca

SEQ ID NO: 581806 - DNA, 589 bp, Homo sapiens
taacttcttgtaggtgctaagtgatttgtagtgctcaggatcaaaatttcattggttcattctttcattcattcattcatacattcattttgtgctttctatatgctggtcactatttaaattgcttgggatcaaccaaggaacaagacagaaaatatccttcctcttctggagcttatcttctactggggcaatggcagtaggagaaagaaccatccaccttatagattagagaggaattcctcggaaatactaagaaattactcatggaaggaaatactagaatgaatatactttatgtgaatggggggcatgtggggacttgaagtttgaatatcagaaagtgaatttaattaaaattagaatctggtacccctgcaaggtgatgtttcaagcacaagaatgttttgtggaggtaatgcatgcattacttttcatgttaaattacatatatacagagagtaatgtgtgtgtgtgtgtgtatatatatatatacatatataatgtgtatgtatgtttatacatgtgtgtgtttatgtatgtgtgtttgtgtgtgtatrtatatatgtatgtatgtatatataaatca

SEQ ID NO: 581807 - DNA, 424 bp, Homo sapiens
gtttcccacttaaagtttatcattttccatattttgttttactttaatgaatatastttctttgtaaaaatttctaattttatttcagtattactgttaattttttagatattctttcatttcattaatgaggatactaacaatgtataccttaaaatctgtaccaagtgttttgttaatgtagttacagctagaattgaatctttgggggggtattttttaatattagatttcacgtgctttggaattttggttagcatgcttatcacatgtgtggagtttgttcttgctctttttaatttttctgcttgctcatgagtttggctttggttgtctccacccataactccaaaaccaagtcttattatggcagtactaggagttctgccctagatgatttcagaatgatcacagattttattac

SEQ ID NO: 581808 - DNA, 552 bp, Homo sapiens
gttaatctgataggttttcctttataggttacctggtgcttctgtctcacagctcttaagattctttccctcattttcacttcggataacctgatggcaatgcgtctaggtgaagatctttttgtgatgaatttctgggtattctttgtgcttctccatgctgtcagaggaaatgtctagtgctgaaggctrttgtttagattattttgtcctacgtgttgttcccttgatgcagtactcttccccttttcctacagatatggcttcctgtgagctgaactacagtgattgttgtctctcttctggatctagccacccggtaagtctacctggctccaggctagtgctgggggttgtcttcacagagtcctgtgatgtgaatcatctataggtccctcagccttggataccagcacctattccagtggaggtgacagcaggtcaggggttgtgcaatggactccatgagggttcttagctttggtggtttaatgctttatttttgtgctggttggcctccttccaggaggtggcactttccagagagcatag

SEQ ID NO: 581809 - DNA, 589 bp, Homo sapiens
ttagcatctatgttcatcaaggatatcaatctgtagttttcttttttggttgtttcttttcctggttttggtattagagtgaygatggcttcatggaatgaattagggagggtttcttctttctctatcttgtggaatagtgtcaaaaggattggtactaattcttctttgaaagtctgatagaattctgctatgaatctgtctggtgctggacttttttttgttggtaattttttaaattaccatttcaatcttgctgcttgttatttgactgttcagggtatctaattcttcctgatttaagctaggaggattgtattttcccaggaatttatccatctcttcaaggttgcctagtttatgtgcataaaggtgcctatagtagccttgaatgatcttttgtatttcaatggtgccagttgtaatatcgcctattttatttcttagtgaagttatttggatttttctctcttcttttcttggttaatctttctgatggtctgtcaattttatttatctttttaaaggaccagcttcttgtttcatttatcttttgtggggttttttgtttcaatttcatttagttctg

SEQ ID NO: 581810 - DNA, 590 bp, Homo sapiens
gaaacccacttgatcacgaagaattatctttttgatatgctgctggatttggttagctagtgtagtattgaggatttttacatctatgttcatcagggatattggtctgtagttttctttttttatgtcctttcctggttttggtatttggtgatactagatttatagaaagatttagagaggattccctttttctgtatgttttggagtagttttagtaggattgatatgaattctttgagtgtctgatagaattcagctgtgaatccatctggtcctgaacttttttattggcaatttttaaattattgattcaatcttgctgcttgttattggtctgttcagagtttctatctcttcctgagttgatctaggagggttgtatatttccaagaatttatccatcttttctagcttatctagtttttgtgcaaaatggtattcatagtagccttgaatgatcttttgtatttctgtgatatcagttgtaaaataccccatttcakttctaattgagtttatttgaatctttgctcttcttttctttgttaatctcactaatggtctatcagttttatcttttcaaggga

SEQ ID NO: 581811 - DNA, 553 bp, Homo sapiens
cctgtcttccttgccctatccagggtcctttctaagccaaggggaagacggaggctttgtttctgagagaaaggcaggaaactgtgtcaggctctacacagatatgaagttctccatccccatcctctgtcccttttcccaactttattgtcctcacatttcatacatttatttggtgctatgtgttgtgtgtccccacttctaaaccatgaggcacatgaaagccgcaaggttgtcttgtttatccccaatgaccgcctcaggacctggcacagagtaagtgttcaataaacatctcytggttgaatgaataaatgagtgagtgagtggaaaacattatttttatccaataaactgtgaagagatgtagcaagaaagaaaagtacaacagtgtgatatatgtctggcactgctagggaagaaggtgtccacatcacaattgaagcttactccttggagaaacaaactttttatttggaagcctttttaatccaaaaaaaaagtctaaaatgctctaatactttgatggtaacttctagaacagcagagcaaa

SEQ ID NO: 581812 - DNA, 533 bp, Homo sapiens
ctgctagggctgctataacaaaacacacaggctggggaggcttaaacaatagaaatttattttctcacagtctggaggctggaagtataagatcaagatgccagtgaaaccgcctttgcaaagttacaattgagtaaattatggcagtgaaagccgactccatcttgcttctaaccttcaagctgtccttgttcattcctgggcataggccgaactaactttaggaaggaattcmgttcatggtttgactctgaaataaaattgataatagccctttccctaaaagacccccttcttgcctggggactagtctgcctttgcaagactaacaaattagctacaagattagaaattacagataggggtcacgcagcctctggctccaagagtccaaacctccccaaattgttcttggggataatatcactattttaaaacctaagatcagtgcttgtgatattttgcagaccctgcactatatggattagctgataccatccagactggtaacctagctcaaccagttctgcctt

SEQ ID NO: 581813 - DNA, 513 bp, Homo sapiens
ccagactggtctctgacttctgacctcaagtgatcctcctgcctccgccaccacacccagctaatttctctatttttagtagagagagggtttcatcatgttgtccagactggtctccaacttctgacctcaagtgatcctcctgcctcggcctctcaaagtattgggattayaggcgtgagccattgtgcccagccagctctctctttttatgtcagggtttctcagtcttggctctactgactttgtgggctggataattctttgttgtaggagactgtcttgtgttttgtagtgttaactaaaaggtatctgatacggacctcaatcagtttagaagtttattttgccaagattaaggacatgcccggaagaaaaaaacatggaatcacagaagcagcctgtggcttgtgcctttctccaacgatacatttgagagctccaatatttaaaggggaaaagtgagctggaggggaaatagggagggtacggtaatccacatgttgcaagaga

SEQ ID NO: 581814 - DNA, 513 bp, Homo sapiens
ccagactggtctctgacttctgacctcaagtgatcctcctgcctccgccaccacacccagctaatttctctatttttagtagagagagggtttcatcatgttgtccagactggtctccaacttctgacctcaagtgatcctcctgcctcggcctctcaaagtattgggattacaggcgtgagccattgtgcccagccagctctctctttttatgtcagggtttctcagtcttggctctactgactttgtgggctggataattstttgttgtaggagactgtcttgtgttttgtagtgttaactaaaaggtatctgatacggacctcaatcagtttagaagtttattttgccaagattaaggacatgcccggaagaaaaaaacatggaatcacagaagcagcctgtggcttgtgcctttctccaacgatacatttgagagctccaatatttaaaggggaaaagtgagctggaggggaaatagggagggtacggtaatccacatgttgcaagaga

SEQ ID NO: 581815 - DNA, 542 bp, Homo sapiens
aatttatttattgattgatttttattttttaagtagagatgggagttgcaccatgttggctaggctggtctagaactcccaacctcaggtgatctgcccaccttggcctcccaaagtgctgggattgtaggtgtgagccaccacacctggccctaatcttttgaatggtttttcgtgtctcaatctccttcagttcagctctgatttgggttatttcttgtcttctgctagctttgggatttgtatgctctcagttctctagcacttttagttgtgatgttaggttgttaacttgagatctttctaactttttgatgtgggcatttagtcctataactttccttcttaatactgcctttgctgcatcccagaaattctgtatctttgttctgattagtttcaaagaacttcttgatttttgcataattttattatttacccaaaagtcattcaggagcaggttattcaaatcccatgtaattgtctggttttgagtkaatttcttagtcttgattcataatttgtgctgtggtccgtgagac

SEQ ID NO: 581816 - DNA, 635 bp, Homo sapiens
atggaggaaacttaaatgcatattactaggtgaaagaagccaacctgaaaaggctacatactgtagccaactatatgacatgctggaaaagggaaaaaactatgaagacagtaaaaagatcattggctgccaaggcttagttgggaaagataaataggtggagcacagaagatttttagggcagtgaaatgaatctgtatgatactatagtggtagatacatgttatccatttttcataaacatagaatgtacaactgcaagagttacccttactgtaagcttggactttgggtaataatgacacrtcaatgtagatttgattgtaacaaatgtaccactctggtgggggctgttgatagtgagtgaggctatgaatttgtgtgggcagtgggtatatggtaagtttttgtacctctggacaatgttactgtgaacctaaaacagctctaaaaaataaagacgatatagataaacttggcagacattatgctaagtgaaataagccagacacaggaagacaaatactgcacagtctcacttattcgtgttatgtagaagagaggaacttatggaagtttagagtagaatgatggttatcagagactgggagagggggtggagatgggacagaatg

SEQ ID NO: 581817 - DNA, 509 bp, Homo sapiens
tacatttatgcaaatattgcagcagaacatctaaaggaagagaaaaatagcttgcaaccaattggtttggttttggaccaaaatccacagggtccatttaaacattgcagattgtgcaactgacaattaagacttatagtgttttttaatactagctgtgatggtagaaatagcaggcaaaaagttgaagtccagagagacaattctatttctgctctcatctttttaacctctcatgaatgttaaaatatagttgcaaaaaatcaaaaatcaaatgatgcatgtgtgttcaaccatatgccaggctctgctgtttgtttcttttattcatatcccaggcatatgtacccttgcacactaaagkttccatttaattaaagttagttaaaagcttagaccacagagatcaggacagctgcttgagatattaacctaggtgctgtctggggacagcatgaagcctttgctgttattctgtctcctattacatattttggtggggtttttcc

SEQ ID NO: 581818 - DNA, 546 bp, Homo sapiens
actatgtgttttcacttataagtgggagcaaaatgataacttaagaacacaaaataggaaacaaccaacactggcttctacttgagggtggagtgtgggaggagagagagaagcagaaaagataaaaattggatactgggttatgacctgggtaatgaaataatctatccaaaaaccactgtgacacaagtttacctttgtaacaaaccttcatgtgtacctccaaaactaaaataaaagcttaaaaaaagggaatgtatttaacactaccaaactgtaaacttaaacatggttaagatggcaaattttgtgtgatgtgtacttaaaataagaaatctgcccaggcgtggtggctcacgcctgtaatcccagcactttgggaggtaatggtggggggatcacctgaggtcaggagttcaagaccagcctgaccaacatggtgaaaccccatstctactaaaaatacaaaattagccgggtgtggtagcaggcacctgtaatcccagctacttgggaagctgaggcaggagaattgcttgaatcagg

SEQ ID NO: 581819 - DNA, 612 bp, Homo sapiens
aggagaggcacagttgggccccaattacattttttgtgtgagacttgggatttctayattgctttgaatctacagaattctattttagtataaaaaatggttataaaaaggaacaatgtatcacgcatattgtggtggatgttattgaaaagagatgaaaagcagactgacatcccttgctatcaatgtagctgatgttacagaggcctaggtatgtatgatgctatatagatctgtgtggaaaagattttaaataatcgtaattcttttccataggaggtcgcaatctgtaaccagactgtggagaactcaacagtcaaaagaaggcctcccagaacttaaagtataagaaaaaatgtttaaaaaagaattatatacacacatacacaaataaattaatataaaaactggcaaaatctaaataagtactgtatgtaggttgtaccaatgtcaatttcctagtttcgatattgtactagagttacatgttacctatagagtaaatgggataaagaggacaggagacttctctgcattatttttgcaacttcttgatctatatttatttcaaattaaaagttaaggaaagataaaaaatagaaagaaataact

SEQ ID NO: 581820 - DNA, 612 bp, Homo sapiens
aggagaggcacagttgggccccaattacattttttgtgtgagacttgggatttctatattgctttgaatctacagaattctattttagtataaaaaatggttataaaaaggaacaatgtatcacgcatattgtggtggatgttattgaaaagagatgaaaagcagactgacatcccttgctatcaatgtagctgatgttacagaggcctaggtatgtatgatgctatatagatctgtgtggaaaagattttaaataatcgtaattcttttccataggaggtcgcaatctgtaaccagactgtggagaactcaacagtcaaaagaaggcctcccagaacttaaagtataagaaaaaatgtttaaaaaagaattatatacacacatacacaaataaattmatataaaaactggcaaaatctaaataagtactgtatgtaggttgtaccaatgtcaatttcctagtttcgatattgtactagagttacatgttacctatagagtaaatgggataaagaggacaggagacttctctgcattatttttgcaacttcttgatctatatttatttcaaattaaaagttaaggaaagataaaaaatagaaagaaataact

SEQ ID NO: 581821 - DNA, 586 bp, Homo sapiens
ccacgttttaacataatttcctttataatgcccctctcttcaaacataatcagattttgaagtaccagaagttagaacattaatatatgagtttttggtgtgacacaattcagcccctaacagataatgaattataaattacattttctgtgtctaccttttattgataaaaaatttacatacaataaaatacatccattctcaggtatagtttgatccattttgacaaattcatatacccatgcatacctatacagcatcaagacacaaaacatactcatcacccccaaatttccctcatgctcctttttattawtctgccccaaactcaatctgagctttagttaaggactgatctgctttcagccactaaagattaatttgcattttcctatatttcaattaaatgaaatgatttaatatgtcctcttctgtatttgtctggttgcactcatggaacattccactataatccaatatattatcctatcatacagtcgtttccaagtgcttctagaaattgaaatattatccccttcttcattcttgatattggtagcattttttctcttctctctgtatctca

SEQ ID NO: 581822 - DNA, 439 bp, Homo sapiens
ctcagaccacagtggaatgaaactggaaatcaactccaaaaggaaccttcaaaaccatgcaaatacatggaaattaaataacctgctcctgaatgagcattgggtcaaaaaagaaatcaaaatggaaattaaaaaattcttctaactgaatgacaataatracacaacctatcaaaacctctgggatacagcaaagatggtgctaagaggaaagttcacagccctaaacacctacatcaaaaagtctgaaagagcaaaagcagacaatctaaggtcacacctcaaggaactagagaaacaagaacaaactaagcccaaacccagcagaagaaaggaaataaccaagatcagagcagaactaaatgaaattgaaacaataaaaaagaatacaaaagataagtgaaacaaaaagtttgttgtttgaaaagataaataaaat

SEQ ID NO: 581823 - DNA, 439 bp, Homo sapiens
ctcagaccacagtggaatgaaactggaaatcaactccaaaaggaaccttcaaaaccatgcaaatacatggaaattaaataacctgctcctgaatgagcattgggtcaaaaaagaaatcaaaatggaaattaaaaaattcttctaactgaatgacaataatgacacaacctatcaaaacctctgggatacagcaaagatggtgctaagaggaaagttcacagccctaaacacctacatcaaaaagtctgaaagagcaaaagcagacaatctaaggtcacacctcaaggaactagagaaacaagaacaaactaagcccaarcccagcagaagaaaggaaataaccaagatcagagcagaactaaatgaaattgaaacaataaaaaagaatacaaaagataagtgaaacaaaaagtttgttgtttgaaaagataaataaaat

SEQ ID NO: 581824 - DNA, 439 bp, Homo sapiens
ctcagaccacagtggaatgaaactggaaatcaactccaaaaggaaccttcaaaaccatgcaaatacatggaaattaaataacctgctcctgaatgagcattgggtcaaaaaagaaatcaaaatggaaattaaaaaattcttctaactgaatgacaataatgacacaacctatcaaaacctctgggatacagcaaagatggtgctaagaggaaagttcacagccctaaacacctacatcaaaaagtctgaaagagcaaaagcagacaatctaaggtcacacctcaaggaactagagaaacaagaacaaactaagcccaaacccagcagaagaaaggaaataaccaagatcakagcagaactaaatgaaattgaaacaataaaaaagaatacaaaagataagtgaaacaaaaagtttgttgtttgaaaagataaataaaat

SEQ ID NO: 581825 - DNA, 643 bp, Homo sapiens
aatgtatttttccctctaggaactcttagtttagcaggacaggaggacatgcctgtggataagtgccttttgaaactggttccacctgacaactgcagtcctggctaaagtgagcagagtgtgtggaacagaagccatgccccttatggaccaggcttaactaggctgattcaaatctatgtgctttagattatgtaggtgagcatgctgggagaattttaccaacagttcttcctatttttgatgctatccagaaagttctgtcactatttggaaaatagaattttgtgtagtagttaagaatataaacactgaagtcaaaagaatctatgcttatgttgtgtataaaatgcacagaaaagtgcctggatcttggaatcttagtctggatatctccaatacagaacatgagacaaggttccaatgctaatgttttatgggaaggtgtaaatccaaggcagtgagagtgaaggaaaaataaagtggggctgggaaagatgaaagcaaatacctacgtgattattgtaccaggctttcatgaagagttggaaccatacattcagccatgcaggagatctgtttagargcaactatgcttcagaataatcccaaacacccatgcttcagagaaatgcatgcagag

SEQ ID NO: 581826 - DNA, 599 bp, Homo sapiens
tactaaaacatattaagtattagacataaagtgctgtggaacctcggaggacttccctttcaggaggtcatggaaagcttcacaaaagtgatgatcagggcagatcgaggtttagagggttctgaagcttttgaaggttgtcagaatcaaaatggagtcacttgaattaaaatcctaacaaatgggggcagagaaggctgtgaagggagggtcctcatgcatgtgtgcctcataacaagaacagtcacaaaagatggcaaaaactacagccttgcacaaaagccacagtaaccttacatagaaaatacttctgcaaggacgtctatccagcaactgccgtctaaccttggactgatgccacccttgttattgaaccttgtaggcaacgatacttgattcaaaatgcttgatgtatttcttctcattttgcctttaaaaccttcccctttggccgggcgcggtggctcacgcctgtaatcccagcactttgggaggctgaggcggrtggatcacttgaggtcaggagtttgagaccagcctggccaacatggtgaaaccccgcctctgctagaaatacaaaaattagccaggtgtggtgg

SEQ ID NO: 581827 - DNA, 624 bp, Homo sapiens
atgatatctaaaatagtgaatcctttctagaaggttttcaatttccaccagagaaatcactatctatggcagctatagccttacaaaatattctttttctttctttctttctttctttctttctttctttctttctttctttctttcyttccttccttccttccttccttccttccttccttctcctcctcctcctcctccttcttcttcttttttgaggggagacagagtcttgctctgtcaaccaggctggagtgcagtggcatgatcatggctcactgcagccttggcctcccagacttaagagatcctcctgcctcagcctcctgaataactgggaccacaggcatgtgccaccatgccccgctaatttttatttttcatgctgatgaggtctccctatattgcccaggctccataatatacttcttaaacaataagacttgaaagtaaaaattactccttgatccatgggttgcacaatggatgatgtctatggcaatttcttccaatgaaaggctgtctcttctatattgcaaatctgttgttaaagtaaccagcttcatcaataatctttgccaaatcttctaacttgctgtagcttctccatcagcacttgtactg

SEQ ID NO: 581828 - DNA, 393 bp, Homo sapiens
ttttttggctaccagaggatcccatggaatccaaagcagaattgaacaaggaagtttcaggaacagcaggaagctgggaagctctgagaaaaacagcaggagttattggaacttttctgaactccaagcctctccttccttactaaacccatcagtcctgggtcccagtttagaattctaaattcctgggagagaatcttaatttaattgattgagcttagcacaagtgcttgtycctggagagaggcaatgagtctctaacactggaagtattggggttggggaatgggtggtactggcaaggtaggtttgtcatatgtatacaagccagcaaaaatcctattaaaatgtactacatgattattaatttggtttttcactgacctaaacttg

SEQ ID NO: 581829 - DNA, 492 bp, Homo sapiens
taaacttgcatgcatgaaaacacattaaacagactcatttgtctgggaatattcattgcaactctcaaggctagamgtgtttttgtggctcatctcagtcattgcttccctcccattgtattcccattctatcattaaataaatgtaattcatctctaaatgactatagtaaaaagaatctagaatctaaagcttatttctttagcaatttctttatgttgatctggttcagaaggtcacatggtatatggctgaattagtttcccagctcatatgccacttggaagactgagagtgagacttaggttgattaatgaacaaacattatgagaacattctccgaaccattgtttagatagcaggactagtctactttgacacataattacacatttagaaaaccccgctgtaactgtacacatgggattttcttgaatagaaaatttgactaaatcaaataattgataaagagaaaaaagaagcagcaagtga

SEQ ID NO: 581830 - DNA, 492 bp, Homo sapiens
taaacttgcatgcatgaaaacacattaaacagactcatttgtctgggaatattcattgcaactctcaaggctagaagtgtttttgtggctcatctcagtcattgcttccctcccattgtattcccattctatcattaaataaatgtaattcatctctaaatgactatagtaaaaagaatctagaatctaaagcttatttctttagcaatttctttatgttgatctggttcagaaggtcacatggtatatggctgaattagtttcccagctcatatgccacttggaagactgagagtgagacttaggttgattaatgaasaaacattatgagaacattctccgaaccattgtttagatagcaggactagtctactttgacacataattacacatttagaaaaccccgctgtaactgtacacatgggattttcttgaatagaaaatttgactaaatcaaataattgataaagagaaaaaagaagcagcaagtga

SEQ ID NO: 581831 - DNA, 355 bp, Homo sapiens
acttggaagactgagagtgagacttaggttgattaatgaacaaacattatgagaacattctccgaaccattgtttagatagcaggactagtctactttgacacataattacacatttagaaaaccccgctgtaactgtacacatgrgattttcttgaatagaaaatttgactaaatcaaataattgataaagagaaaaaagaagcagcaagtgaacctctgtctttttgaagttggactttctctttctccaaagccaggaactctacttgtaacatgcctacctcattctttttactattattatactttaagttctggtacatgtgcacaatgtgcaggtttgttacgtatgt

SEQ ID NO: 581832 - DNA, 651 bp, Homo sapiens
ttctctgttgtgttcttggcactcttgtcaaacatcagttgatcatatatgtgtaggtttacttctggactctctattctgttcctgtgacttgtatatcttcctttataccagaaacatagtgttttaattattgtagaattgtaatatatatttaaatgaggaaatatgaagcctccagttttgttcttctttctcaaggttactttggctgttctgggccttttgtggttccatataaagtttagttttttgttttctatttctgtaaaaaatgccattgggattttgatggggatagcatcaagcctgcagatcactttggayagtatggacattttaacaatattaagtttttctatccataaacataggttatcttttatttatgtctcttttaacaccttttatcaatattatgtagtttttgatgtacaagtctttcacttttttggttaagtttattcctaagtattttattatttttaatggtattgtaaatggaattgttttcttagtttccttttcagatggctcactattaatagatggaaattcaactaatttttgtatgttgattttgtatcctgcaaccttactgaatttcattattacttatgacattttttgtagtttttagggttttctata

SEQ ID NO: 581833 - DNA, 457 bp, Homo sapiens
cagaggttgcagcaagccaggatcacaccacagcactccagcctgggcaasagagagaaagattctgtctcaaataaagaaaggaaagaaaagaaaatctagggtttttctctctcttcctcccataaaccatgttcattaaaatagcattttcttattaatgatttttaaattttgtttggctgtaaagtattctccatttttgtgtgtgccaccctgagagaatgacacaatgacctcaagaactatctcaacttcctcaaaactatgttaatttttctgcatttcaggtatttttcttccatctatttagcactttagtagagggagttcatggtttcagcagggaaggtcggagaatcaaatggatggcttcggagtgtgatcacacaagatcatcagtcataatatcaaggacctattatagctgactcacagaattaaattattaggaagc

SEQ ID NO: 581834 - DNA, 457 bp, Homo sapiens
cagaggttgcagcaagccaggatcacaccacagcactccagcctgggcaagagagagaaagattctgtctcaaataaagaaaggaaagaaaagaaaatctagggtttttctctctcttcctcccataaaccatgttcattaaaatagcattttcttattaatgatttttaaattttgtttggctgtaaagtattctccatttttgtgtgtgccaccctgagagaatgacacaatgacctcaagaactatctcaacttcctcaaaactatgttaatttttctgcatttcaggtatttttcttccatctatttagcactttagtagagggagttcatggtttcagcagggaaggtcrgagaatcaaatggatggcttcggagtgtgatcacacaagatcatcagtcataatatcaaggacctattatagctgactcacagaattaaattattaggaagc

SEQ ID NO: 581835 - DNA, 457 bp, Homo sapiens
cagaggttgcagcaagccaggatcacaccacagcactccagcctgggcaagagagagaaagattctgtctcaaataaagaaaggaaagaaaagaaaatctagggtttttctctctcttcctcccataaaccatgttcattaaaatagcattttcttattaatgatttttaaattttgtttggctgtaaagtattctccatttttgtgtgtgccaccctgagagaatgacacaatgacctcaagaactatctcaacttcctcaaaactatgttaatttttctgcatttcaggtatttttcttccatctatttagcactttagtagagggagttcatggtttcagcagggaaggtcggakaatcaaatggatggcttcggagtgtgatcacacaagatcatcagtcataatatcaaggacctattatagctgactcacagaattaaattattaggaagc

SEQ ID NO: 581836 - DNA, 565 bp, Homo sapiens
agtgccattttgtcagtagcttacaatttccttggatccacaagaaatacgtacattgaacaagacgaaaactaatgctgggaggtagaaacagaacagtcagtgtaataagatcctaggggaaagtaaggtgagcaagggcttcgacggacactttttctacctgtgtttcttcattgagcacccatagtcgctgggtgtggtgttagaggctgcagatttgacactcagtccctgttcctatgggctcataggccaacgtagctgagagaaatagtgcagcgggacggggtggtctggaaaacctcccagagcaagtaacctcgataaatggagcctaactacagaatggatgctgtgcctgtgaagtcaaaggagagctctgcacagagggagggggctgcagatataggggagggtagcagagaaaagaactccaagaaggaaggaaggcttgggctcaatttaaaaatacttttctgaggtcccccagatgcttctcctaggccaggactcttcccttcactaatactgtttttgsctaattgaagttaaggaaagcact

SEQ ID NO: 581837 - DNA, 648 bp, Homo sapiens
tagcaatggctaagagttctagtttcttcacattcatgccaacacctggtattgtcaatcttttttattgcagtcattatagtgggtgtgcgcttttaatttacttttccctagttactaaaagatgtttagtatcttttcatgagcttgtgagcaatttctgtgtatgtgtttttggttttttttagtgaaatgtctgttcaaacattttatctatttttattgaattgtttgttatattattgagttgtaagagttattgatatattctggacacaagtcctttattagatatgttattttcaaatatcttatttcagtctatggttttctttatttttctaaagttggcatttgaaaagcagatttttaaaatttttatgaagttcaatttccaattatattatttaatgagtcacacttttggtatccaatcaagtaaaattttgcctaaattaaggccagaaagattttcttctatgttttattctaaagttttatagktttagctcttacttacatttaggtctatgttctattttggagtagtttttatgtctaatataagccaagggtttatgatcattttttttctcatgaatatttaattgttttagcatcatttgttgaaatcactctccttttcta

SEQ ID NO: 581838 - DNA, 665 bp, Homo sapiens
aatgtctgttcaaacattttatctatttttattgaattgtttgttatattattgagttgtaagagttattgatatattctggacacaagtcctttattagatatgttattttcaaatatcttatttcagtctatggttttctttatttttctaaagttggcatttgaaaagcagatttttaaaatttttatgaagttcaatttccaattatattatttaatgagtcacacttttggtatccaatcaagtaaaattttgcctaaattaaggccagaaagattttcttctatgttttattctaaagttttataggtttagctcttacttacatttaggtctatgttctattttggagtagtttttatgtctaatataagccaagggtttatgatcattttttttctcatgaatatttaattgttttagcatcatttgttgaaatcactctccttttctaatgaattgtcttggcctctttgttaaaactcaattgaccataaaggtaagagtttatttctggactctatattctgttcctytgatttatttctctgtctttattactccaatatcattacactcttgattactgtagctttatggttagtatcaaaattagtcagtgtgatatgaataggaggtactaggtagaaaagggtggggtc

SEQ ID NO: 581839 - DNA, 619 bp, Homo sapiens
tttgggttgtttccactttttggctattgtgaataatgctgttatgaacatgggtgaacaaatatctttttgagtccctgctttcagttcttttgggtatacagtcatccctcagtatccacgggggactggtcccaggaccccctgggatagcagaatccacaaacgctcaagtctcttatataaaatggtgtagtatttgcatataacctatagcacatcttcccatatactctaagtcatctttaaattacttacaatgtacaatacagcgtaaatgctatgtaargagttggtataacatattgtttaggggataatgacaagaaaataaaagtctgtacattttgagtacagagacaaccatcctcttttttcaaatatttttgatccatgaatcttttcaatttgaaaaatatattttttcaatgtttttcaaatatatttgaatccatggatgcagaacccatgggcaaagagggctgactatgtatccagaaatggaattgccagatcatgtggtaattctatgtttaattgcttggagaactgacatactgtttttcatacgggatgcaccatttaacattcccaccaacagtacacaagtgttcctatt

SEQ ID NO: 581840 - DNA, 615 bp, Homo sapiens
tttttgcctatgataaataaagctgtcatcaaaatctcttgtccatgtcttttagtgatttctgttgggtccatatccaggaataaaattgttgggttatactgaatgtgtatgtttagctttagtagatattgccaaacatttttttccaaagtggttgtattaatttttactcccaccagcaatgtataagaagactagcttcccaagctaatcaacacttctatagtcagtcttttaaatttttagccattctagtgtgttgcggtatctcattgtagttttaatttctatttctctaaggactaatgatgttgagcacatttattggccacttctatatcttcttttgtgacatgtctgctcaagttctttgcccattttaaattgagctctcttttatgtatttatttatttaattttatttatttatttttttgagacaagagtctcactctgttgtccaggatggagcacagtggcacartctcagttcactacaacctctgccccccaggttcaagtgattctcttgcctcagcctcccaggtagttgggattacaggcacatgccaccatgcccagctaatttttgtattttcaatagagacgagg

SEQ ID NO: 581841 - DNA, 412 bp, Homo sapiens
gtaatcccagctacttgggaggctgaggcaggagaatcactggaacctgggaggcagaagttgcagtgagccgagattgcgccactgcacttcagcctgggtgatggaaggagactccatctcaaaaaaaaaaaaaaaaaagaaagaaagtggccagccccatgaacatctggggcactgatgttccagacagagaggaggtcaagtgccaagtgctgagattggagcatgctggacattctccaggagctgaaagaagacccatagagctggacacttgtttgttttctctgagaatttgggaagtcattggaggttttycagccagatctggttcatgcacaaaggagaacattctggctctttgtggagaacaaactggagctgcttgttggccagggtagaaacggga

SEQ ID NO: 581842 - DNA, 412 bp, Homo sapiens
gtaatcccagctacttgggaggctgaggcaggagaatcactggaacctgggaggcagaagttgcagtgagccgagattgcgccactgcacttcagcctgggtgatggaaggagactccatctcaaaaaaaaaaaaaaaaaagaaagaaagtggccagccccatgaacatctggggcactgatgttccagacagagaggaggtcaagtgccaagtgctgagattggagcatgctggacattctccaggagctgaaagaagacccatagagctggacacttgtttgttttctctgagaatttgggaagtcattggaggtttttcagccrgatctggttcatgcacaaaggagaacattctggctctttgtggagaacaaactggagctgcttgttggccagggtagaaacggga

SEQ ID NO: 581843 - DNA, 641 bp, Homo sapiens
ttcaccatgttagccaggatggtctcgatctcctgacctcgtgatccgcctgccttggcctcccagaatgctgggattacaggagtgagccactgtgcccagcctctgttatttttgaagcactctcctctctttaggttttacagctgcagcctgtttttccagaacttctcctttcatctcctatcctacatgtgataggttcctgagagccagagagagacagacagaagggaaatgaaggaccagagggcaaaattccctctgtgattggagatggagacaggttcactggatacaggtttagacagacggttgctttcatatgtcagagacctcaaacagacgtgtccattcaatttgtacggtagcattcttggcctcagaatctggagatctaagccaaactcagcatgccagggaaggacacatatgtgaccacacaaggtcatggacatacatacaggcacaagatggtttccaggcttggatacatatatagactgtgtgccttaagcagaaattcatatgcatgtacrtgtggcttatataataagagcccaagtgatcacatgtgcatataaatatggacaggcatgggtgtaagcacacacatacacattcatagacacagatttgga

SEQ ID NO: 581844 - DNA, 508 bp, Homo sapiens
aaagaacaagactccacctccaaaaataaaaataaaaattaaatataaaaatggtgtattttcctactaaactcttcaagggaaaaaaaaaaaaaaaacctcttcatggagatccaccagaataaattattctatgatttggggatacctttaccacgtcaatggggtgctaatggtatacacattctggtatgaaatgcacaagtctacatgacaaagtagaacacaacctcaagaaagcagattatccgatagcattcaaagtgaaacatcactagtgtgttaagtgactcttcaactagatatgtcagtaaatggtccacacaatggaaatgactgaaagtggttttctcccaatcaggttataatccatgagggaatctttatggatgtgttgtgtttatagtggatgaaaggaattaatttagaaagaaatctatctcatattttcttttttaaatataaattcatcaagttctttttttttkttttgttttgtttttgagca

SEQ ID NO: 581845 - DNA, 631 bp, Homo sapiens
cctacttcaaaataaacatcaaagagaaaagttcataaatatacacactgawgctagtgtgtggaatgtgaatggcccgctgctttgctctcagcctgcgatggtgattcataggtcagtcgtagccatgagaatccctctttgcattcttacatgacagctgcagtggaagacaatcaggcctggaagtcaggtcacatgtcttacggactcaatgaccccagcattgtcatttatcctccttgaacttcagtctcctcttctggtatgtgagctgttatttgatccccataatgacatggcagtgaagaagcagggaactgaggacactcaatctgtaaggagttaagtgactctccccaaagtcgcatagttaggaatggcaaaaagaaaggcttaaacttgggtttttggactgtgagcctagtgctacttcctcttcataattacagagcctgtgcatttatatgatttatatgactcaggtcttctttaggaggttgagagcacagacttctaggcctggggttaccaattgttctggtttacctgggactgaaagcttccttgggcatgagacttacagttttaaaatgaggaaacctggacaaacaaggacaaattggtcact

SEQ ID NO: 581846 - DNA, 631 bp, Homo sapiens
cctacttcaaaataaacatcaaagagaaaagttcataaatatacacactgaagctagtgtgtggaatgtgaatggcccgctgctttgctctcagcctgcgatggtgattcataggtcagtcgtagccatgagaatccctctttgcattcttacatgacagctgcagtggaagacaatcaggcctggaagtcaggkcacatgtcttacggactcaatgaccccagcattgtcatttatcctccttgaacttcagtctcctcttctggtatgtgagctgttatttgatccccataatgacatggcagtgaagaagcagggaactgaggacactcaatctgtaaggagttaagtgactctccccaaagtcgcatagttaggaatggcaaaaagaaaggcttaaacttgggtttttggactgtgagcctagtgctacttcctcttcataattacagagcctgtgcatttatatgatttatatgactcaggtcttctttaggaggttgagagcacagacttctaggcctggggttaccaattgttctggtttacctgggactgaaagcttccttgggcatgagacttacagttttaaaatgaggaaacctggacaaacaaggacaaattggtcact

SEQ ID NO: 581847 - DNA, 589 bp, Homo sapiens
ctcaaccctgtagtcattcttgagtgcattcaagttgataaacactgagttaaggggaggagcaaaagtaaagtatatstttgagcattctaatagttattctgcctttaaaagagaattatatcaaatttatcaataatggggaatgagtacagaattctaaagtattaactaattttctgcatggtatactaagttatgtttaatgataactctttataacctaagatgatctttttttttcttgtttgcctgggactaagggctttgattggatgtaggaatttcagtgctaaaaccagacaactcaggatgtgccatcaccctactataagtttaatacatttgtctgttgagactattgaaggagatattaatgggagagcacatagtgcactgcttggcacatagtaactgctccttaagttgtggtagaattgagtctaaatcttttgtagcattaagtctaaatctacatattttgtagaattgagtctaaatctaaatcttgattgagccgattcatacactgctctttgataaattgtagggaagaacttggccaactgctttgttgttcctttgaaca

SEQ ID NO: 581848 - DNA, 603 bp, Homo sapiens
atacagttgatgcttacttaatgactgtacatgctgattattccagatcacttcatgaacttaggcaggtgaggatttaatctgcaaggtgaacaaatacacttcttttttcactaaaactaaagtgaaatcacatttacttaagrtgatgatgttatcatctttaattcctcttgaaggaaagacataacctggtgataatgagcatagactttagagccatacagatctggatttgaattatggctcctccatttaatatctatgtgactttgggtcgagttacttaagttttcagtctcccttttcttatatgtagaataggaatatgatatctacttcatttaattgttgtgataaattatgtgctataatatatgtaaagtgattaacagtctctggataatcatgataaacctgttggaagagaccatttctctttagatgctagcaggtacctctggtattttttccttcctactctaataataaaaatgtgttctgcatttatattttaattcacacttttcagatattcatgtgagtttttagcaaaagtctagaaacaaggaaagttgtcaaaggattgattgaaggaacggc

SEQ ID NO: 581849 - DNA, 633 bp, Homo sapiens
ttgtttcctttgctataaagaagctttttggtttgatgtagtcccaattgtttatttttgtttctgttgctcatgcttttgaggcctagtgtaaaaacatccctgcccagactgatgttgtgtagtgtttctcctgaattttcttctagtaatttcatagttttgggccttacatttgaatctttaatttattttgagttgatttttatatagtaagaaataggggtcaaatttcattcttttgcatgttgatattcagtcttccaagtgaaataagctaggcacattaagacaaatactacacaatctcactcatacatgaaatctaaaaaayttgatctcatagaagttgacagtagaatagtggttaccagagactgggaagaatgtgggaatggaggagatgggaagaggttggtcaatgggaacaatgttacagttaggaggagtaagttctggtgttctgtttgtggagtagaatgactatagctaataaaaatgcattgtatatttcaaatagctagaagagaggattttgaatgctctcacagtaaagaaatgataaatgtttaaggtgatgaatatgctgattaccatgatttgatcattacacaatgtatacatgtatcaaaa

SEQ ID NO: 581850 - DNA, 585 bp, Homo sapiens
gtatgcatgattgctgatcctaacagtattccataatgttgatgtactgtagtatgtttagtcattaccttgttgaacatttgccctgtttgctgtttatttgcattataaatagggatactatgtatttcttygttcaaatttctcccccatttacattcctgaacataaataccccaaagtaaaattactaggtcaatggataacaactagacttttgttaaatatttctgagtagcttcctgaaagtattggaacaaagtcatgtacggatgtcgctttgttatttttttcttttatttttctcctgtttgatgtgtttccccctagtagataactatcttgatctctatttcttctccttgttacttctgcagagttttaagccttttcattcagtgttggccattcttctagtatgtgtgtgtctctgcccagattgttaaaaaaaaaaaaaaagcctcttattcaatattgttattagaattgatgtagcaatagaagtggattgatatgaggaacagattgagtttggggttatttgtagctttctgttatttttctccaacagtaatataattaatg

SEQ ID NO: 581851 - DNA, 585 bp, Homo sapiens
gtatgcatgattgctgatcctaacagtattccataatgttgatgtactgtagtatgtttagtcattaccttgttgaacatttgccctgtttgctgtttatttgcattataaatagggatactatgtatttctttgttcaaatttctcccccatttacattcctgaacataaataccccaaagtaaaattactaggtcaatggataacaactagacttttgttaaatatttctgagtagcttcctgaaagtattggaacaaagtcatgtacggatgtcgctttgttatttttttcttttatttttctcctgtttgatgtgtttccccctagtagataactatcttgatctctatttcttctccttgttacttctgcasagttttaagccttttcattcagtgttggccattcttctagtatgtgtgtgtctctgcccagattgttaaaaaaaaaaaaaaagcctcttattcaatattgttattagaattgatgtagcaatagaagtggattgatatgaggaacagattgagtttggggttatttgtagctttctgttatttttctccaacagtaatataattaatg

SEQ ID NO: 581852 - DNA, 585 bp, Homo sapiens
gtatgcatgattgctgatcctaacagtattccataatgttgatgtactgtagtatgtttagtcattaccttgttgaacatttgccctgtttgctgtttatttgcattataaatagggatactatgtatttctttgttcaaatttctcccccatttacattcctgaacataaataccccaaagtaaaattactaggtcaatggataacaactagacttttgttaaatatttctgagtagcttcctgaaagtattggaacaaagtcatgtacggatgtcgctttgttatttttttcttttatttttctcctgtttgatgtgtttccccctagtagataactatcttgatctctatttcttctccttgttacttctgcagagttttaagccttttcattcagtgttggccattcttctagtatgtgtgtgtctctgcccagattgttwaaaaaaaaaaaaaagcctcttattcaatattgttattagaattgatgtagcaatagaagtggattgatatgaggaacagattgagtttggggttatttgtagctttctgttatttttctccaacagtaatataattaatg

SEQ ID NO: 581853 - DNA, 529 bp, Homo sapiens
aacctctccttttattaagatgtttacactaggatctagtccttttccatcaatgctcaatgatacatattttcctttatttcattttgggtstgaggggtttgtgattaccagttctaaagggctgcagctcccacagtggggctgcttttcctttctggagccaaacaggacctttttaatcctgtttccaagtaagtccaaatgacacaagaccagtattgacacatctcacataaatatgattcttgacagatatacttaatttttttttttactgtgtaacttttttttccagtctagagaactgcaccctattccttgctgattactattaatagaagcacaagcatcaaattttaaggttacatgtttggggacccctctttcttctgttctagctattactttacttgtgtcaccaggaaaaggaccagtccttagtcttacttcaaagactgtgatcatgggaggttcagaggggtcatagcacacatcgggctggtcacttcctggattacatacttgg

SEQ ID NO: 581854 - DNA, 419 bp, Homo sapiens
ctccctgctggtctttccttgcctctgccagccacttatgctgctgttctcttaactactgttgggtggggaagggggtctaaaaccaggtgtaattgtctatgtgtggaaactggtctgggtgccttggcttacaggttaccttgggtcatacctttgaaacaagggacctgtccaggcttccttctggtggccaacctacctctaatgctggccagtctatttcacacaaagttctaagtttttctggtgtcatgtaacactataatctcccttaaatcctttcttgaaatttttcaacatagttcctagtggggtgggcttatttgtgcctgacctatgcttctttgagacaaaataccacactcacaccacatgcacaccacaaaacaaaaaacasttaaaaagggcacacacac

SEQ ID NO: 581855 - DNA, 555 bp, Homo sapiens
ctagctctttcgcccaggctggactgcagtggcgctatcttggctcactgcaagctctgcctcccgggttcaygtcattctcctgcctcagcctcccgagtagctgggattacaggcacccaccaccacgcccggctaattttttgtatttttagtagagatggggtttcaccatgttagccaggatggtctcgatctcctgacctcgtgatccgcccgcctcggcctcccaaagtgctgggattacaggcgtgagccaccatgcccgacctacttcatccttaatatgatttatttaattatactttaatatattttaatttttaatattataaaaatctcacaaaatttctgaaattccaaaatcctgcagccagtcctggctggctctgacaaaagctttctgggttctgagcttgaagggcaaatgcatttcccagacaattttctctcagccacataccactaacctccaattaacagtgactctaaggcccaagttcccctgctatgagttaatcagtccaaagggtatgggatgtctggtatgaagtt

SEQ ID NO: 581856 - DNA, 620 bp, Homo sapiens
tctacttgttaatatttctcctaatgaaataagtctttatttcagcttaattacatcacatgtttttgtttttgtcttattatccarttgttttgattttggtgcttagagtgacatttagatgtctttccttggtgatctagtttcttcttaatttcctgagcaaaaccaagttttcaagagacctttccaatgacaggcctttccaacctttattagttgattagacattggatttggaataaaaatatagctgctttttaggttcaaaccgaaaactccagtagcctgtctaggactctgatattttagctcatattcaaagaccattcaattaaactctttggagccaatttgaaactatttggtgaggacttaatccttgatttatgacaaacctcaggaatcaaagagcttagccccgctccagttcttttcattggctctaagtgctatacaaaatagaaagaaacagcacttgtgacatgggatctagatttgcctaccatgcctggcaggaacaacacactggtgctttgtggaagccagctcccttttttagtatcttattccagcctgcagacacagccaccacaacaaatattgttcagtctttcttc

SEQ ID NO: 581857 - DNA, 620 bp, Homo sapiens
tctacttgttaatatttctcctaatgaaataagtctttatttcagcttaattacatcacatgtttttgtttttgtcttattatccaattgttttgattttggtgcttagagtgacatttagatgtctttccttggtgatctagtttcttcttaatttcctgagcaaaaccaagttttcaagagacctttccaatgacaggcctttccaacctttattagttgattagacattggatttggaataaaaatatagctgctttttaggttcaaaccgaaaactccagtagcctgtctaggactctgatattttagctcatattcaaagaccattcaattaaactctttggagccaatttgaaactatttggtgaggacttaatccttgatttatgacaaacctcaggaatcaaagagcttagccccgctccagtycttttcattggctctaagtgctatacaaaatagaaagaaacagcacttgtgacatgggatctagatttgcctaccatgcctggcaggaacaacacactggtgctttgtggaagccagctcccttttttagtatcttattccagcctgcagacacagccaccacaacaaatattgttcagtctttcttc

SEQ ID NO: 581858 - DNA, 620 bp, Homo sapiens
tctacttgttaatatttctcctaatgaaataagtctttatttcagcttaattacatcacatgtttttgtttttgtcttattatccaattgttttgattttggtgcttagagtgacatttagatgtctttccttggtgatctagtttcttcttaatttcctgagcaaaaccaagttttcaagagacctttccaatgacaggcctttccaacctttattagttgattagacattggatttggaataaaaatatagctgctttttaggttcaaaccgaaaactccagtagcctgtctaggactctgatattttagctcatattcaaagaccattcaattaaactctttggagccaatttgaaactatttggtgaggacttaatccttgatttatgacaaacctcaggaatcaaagagcttagccccgctccagttcttttcattggctctaagtgctatacaaaatagaaagaaacagcacttgtgacatgggatctagatttgcctaccakgcctggcaggaacaacacactggtgctttgtggaagccagctcccttttttagtatcttattccagcctgcagacacagccaccacaacaaatattgttcagtctttcttc

SEQ ID NO: 581859 - DNA, 583 bp, Homo sapiens
gtatgcaatttaaaacttatgaattgtttatttctgcctgtttttttcatttattgttttcacaccatgattggccatgggtaactaaaaccatgaaaagtgaaactgcagataaccagaggctgctgagtatattttaattgacatcactaaccaaaatacactacgggaagatcacagagttaaatgtattttaaaaataaaataatgaaaggrcagttaaatgtatattgcaatatgtgtatgatggcatttttttttctgcctctcaagtgacatttttaatgaaaatttattggcaaaggaatatagttgtgtcatcctaagttttagttacaaaacacagaaatctttccaggtattgtatgtagaaaggaaattcactaaaggttatctgctcagataatccctaaaacagtcagataattatgatttaacatcatgcagaaaaatgcccaatccatactttatcattagtgcaggcacaatcgcaacattcccaagcacgagaccagaaggttcttccttagattttgagagtggaccctaccatgaagctaataccactgatattcctgaaagc

SEQ ID NO: 581860 - DNA, 455 bp, Homo sapiens
acccatatagaacctccttaaagcataactctcacaaggcctataaacagtaatgaaatgggaaagtaaataaggtatttaggtgacaactggcatgatgaatagaatagtacctcatatctcaatactaatgttgaatgcaaatggcctaaatgctccacttaaaagatacagaatgrccgggtggataataattcaccaacaaagtatttgctgtctctgagagactcacctaacacttaaagattcacatatagttaaggtaaagggatggaaaaagatattccatgcaaatggacaccaaaagtgatcaggagtagctatccttgtatcagacaaaacagactttaaagcaacaacagataaaaaatacaaagaaggacattacataatgatataagaactaatccaataggaaaatatcacaatcctaaatatatatgcacctaacactg

SEQ ID NO: 581861 - DNA, 453 bp, Homo sapiens
ggtgaattcaagaacatagtaatcataaatgtgtacacagctaatagggtttcagaatacatgaaaaatttgacagaatagaaaggagcaatagtcaatttcatatgcatagttaataatattaacacttctctcccaacaatgtatagattaaragataaataattaataaacatattgatgatcccagtgacactactaattatcttaatctaactgatatttataaaagactgctctcaactatggaatataaatgttgaattgcatgtagcatatatatcaagatagattatatattgtgacctaaaataagtctcaataagtttaaaaggattgaaataatacagaatatgttctctgaccacaatggaattgaattagaaagcaattaacaataagatctctagtaaaatacaaaatatttgagaactggtatcaattctattgaaa

SEQ ID NO: 581862 - DNA, 576 bp, Homo sapiens
ggtaagtatactgatgaattttttactttgataagtttagtccrtatgttcaaatttcaagaataacctctaatataatagaaaaagtaaataatttccaaacaaaaacagagggagactagaattaaaaaacaaagtttaagctaaaaaaaaccccatgaacacaggagtaaagcataaaacattaaaaaagaaataaagagcacagaatgatttgataaaataaagttacatatgtcaaaataaatggtaatagctaaaatctttagttaaaacaaaaataacaaaattcatctatatgcttttttaaagcagactcactaaagtatatagagaaaaaaatgttgagagtaaaattatgattaaaaaactataggataaatactaatttcaatagtctggcatagctatattattataatatcaaacaaaacagattttaaggcaaaaatattattacacataaagagagtgccttcaaaatgctaggaggttcacgttaaaaaggtccgttcaaaaaaactaatggaagatacaaacatttcaaattggctgtcttagtccattttcatgctg

SEQ ID NO: 581863 - DNA, 576 bp, Homo sapiens
ggtaagtatactgatgaattttttactttgataagtttagtccgtatgttcaaatttcaagaataacctctaatataatagaaaaagtaaataatttccaaacaaaaacagagggagactagaattaaaaaacaaagtttaagctaaaaaaaaccccatgaacacaggagtaaagcataaaacattaaaaaagaaataaagagcacagaatgatttgataaaataaagttacatatgtcaaaataaatggtaatagctaaaatctttagttaaaacaaaaataacaaaattcatctatatgcttttttaaagcagactcactaaagtatatagagaaaaaaatgttgagagtaaaattatgattaaaaaactataggataaatactaatttcaatagtctggcatagctatattattataatatcaaacaaaacagattttaaggcaaaaatattattacacataaagagagtgccttcaaaatgctargaggttcacgttaaaaaggtccgttcaaaaaaactaatggaagatacaaacatttcaaattggctgtcttagtccattttcatgctg

SEQ ID NO: 581864 - DNA, 576 bp, Homo sapiens
ggtaagtatactgatgaattttttactttgataagtttagtccgtatgttcaaatttcaagaataacctctaatataatagaaaaagtaaataatttccaaacaaaaacagagggagactagaattaaaaaacaaagtttaagctaaaaaaaaccccatgaacacaggagtaaagcataaaacattaaaaaagaaataaagagcacagaatgatttgataaaataaagttacatatgtcaaaataaatggtaatagctaaaatctttagttaaaacaaaaataacaaaattcatctatatgcttttttaaagcagactcactaaagtatatagagaaaaaaatgttgagagtaaaattatgattaaaaaactataggataaatactaatttcaatagtctggcatagctatattattataatatcaaacaaaacagattttaaggcaaaaatattattacacataaagagagtgccttcaaaatgctagraggttcacgttaaaaaggtccgttcaaaaaaactaatggaagatacaaacatttcaaattggctgtcttagtccattttcatgctg

SEQ ID NO: 581865 - DNA, 480 bp, Homo sapiens
acccatctcgttctatagtcaattgctttattttcacatctaccaccaccagccataagatatcatgatgtttgttcatcattcttttccactagattgtaaaccccatgactgcagggaattgttcagatttatttactgctgtttccttggagtctaaaacagtgcctggcagattgtaagcattcttaaatgttttctgtacaaatgaatacaatgtaagtctattaggcacttgctgtcctgaaatatagtttatgtggtctcttaggttttcaagaaacaccccgtctcagtattccttggtayataatcctcattcctgaaaaggaagtggacaaacttaaaaaatcctccttgaatgagaagaaaagagactcatttgaagttcaatgttaccattaggaataacctaattgagagttactggaagaaaggaaaataagggccccaaactaaattcataagggcagaagtaag

SEQ ID NO: 581866 - DNA, 424 bp, Homo sapiens
gttctcacttataagtgggagctaagctatgaggacgcaaaagtctaaggatgagtcaatggactctgagggctctggggaaagggtgggagtggggcatgagattggggactacacattaggtagtgtatactcctcaggtgatggtgcaccaaaatctcagaaatcaacagtaaagaacttttccatgtaactaaccaccacctgttccccaaaaacmtattgaaataacaacaacaacaacaaaaaaaactgaagaagaagggagaatggatgcagctaaaattagagatagaaaactgagagatttcctagctcattgataactattttctgtgctagaaaaaacaattggtattttaccatgggttgctgaactagaacacagataaatgttgttgttgttgagaaagtaaacactttg

SEQ ID NO: 581867 - DNA, 424 bp, Homo sapiens
gttctcacttataagtgggagctaagctatgaggacgcaaaagtctaaggatgagtcaatggactctgagggctctggggaaagggtgggagtggggcatgagattggggactacacattaggtagtgtatactcctcaggtgatggtgcaccaaaatctcagaaatcaacagtaaagaacttttccatgtaactaaccaccacctgttccccaaaaacctattgaaataacaacaacaacaamaaaaaaaactgaagaagaagggagaatggatgcagctaaaattagagatagaaaactgagagatttcctagctcattgataactattttctgtgctagaaaaaacaattggtattttaccatgggttgctgaactagaacacagataaatgttgttgttgttgagaaagtaaacactttg

SEQ ID NO: 581868 - DNA, 584 bp, Homo sapiens
ttattgtttgctccttcccctgcaaaaccagtcttcactcccatcgacccagtctgaggtcctagaaagctattgcttaaggcctacgtcacgcagccactctttcaatttgtttataggtggatttagccaaagcgagtcgtgagcagaagattggaaggcaagagaaaagacaggttgctgtgtttctctcaggctccctcctttatgccagcacctmttccagtagcacctgaattcttccaagactagagcccctggggagtagcccttccccaacatctcacactctcacaggattctgtagacatatttcttctctgtgcctttttagccctagaggtggtaatgcctccccatttttgctaatgtctgcatgtcttaatatcccttattttaccccataacccacctacttctctgtaagcagtcagttattaaaaggctttcatttagccaatacaagttctttctcttgcttgctgtgcctctcagtgatacaagaggcagtagggaattgttgagaaagcttacattacctagcagctacaagtaggtgaactatgggagaaccagcattttct

SEQ ID NO: 581869 - DNA, 569 bp, Homo sapiens
caactattataatgcacatcaaaacatggagacaattaccctcttagttgcttactgctaatcattcagttccttgccttcaggaatcaaatggattttaagagaggatgatgcattcactttccttttcccatcctagaatggctggtttgctcacaggaggaaatactgcctctgtcccaccaggccttccccaaccccatgctttttctctccatcggcaaggttaatgcccagacaaaagacgagtgccatgatatagcaacccggttgtacccyaagctatgtctctggtgttcatacctccataagtggagaagagcatctcagctcaagaagaaatctctcttgaatttaacaaagcaaaagaaatatttattccaaatggtagtttaaacaacattgtatttttttcccaattttattcttttaggtttctgagccagctggtaaactaagataccgagaggttctgtggttcacacaaactttcaaggcagcttaatttaaaacagcattgtttcttcaaagtagttcaaactaccatcttttcagttttgtcatttagc

SEQ ID NO: 581870 - DNA, 517 bp, Homo sapiens
gtggtcctagacactgttcagaacccagacttaacttttagagtcttagcctcattcttttcactaccagtgtctgtacatttttaattttttgcagactgtctacttaatctagttccagcataaattcctgggtttcattttatttagcatgtcatatgacttaaaattaggcctggctaaaatgactgaggctgggggtaagagaaagcaattataaccagaaagataaatcagaaaacaagactattcatatyagggtaccttgttttatatttgtaatggttgaaaaaaaacttaaagccaagaaacagaagagcatctaaagacccaattgctttttaaactgcattgattcatgtgttttgaattcagaatgctggagctaaaatggtagtgtcagcaaagccacttaactattgagccgttgtctggaatcttctggttgagagagtcccagacctgttctcaaaatcctgcaagttctcagtgatctccagggctatcatgaagttct

SEQ ID NO: 581871 - DNA, 523 bp, Homo sapiens
cattttctcctctgtgcataacccactccacacaaaagcatcatttaaaatagtttcccttctaattttaataatgcatacaaatttatagacaatttggaaaggataaataaaartcactcataattacactagccaaagccatgctaaaatactagcagatgtattttctcatatgtgtgtgtctgtgtgtgtgtgtgtggttgagtgtaatttactaggcacactagaagaaaatatattattaggccaggacaaaactatctcagtataaatacaataaaataaggcagaaaggaaatggttgaattttacatataatgattttatttgttatttatccaaatatctcaaaccacattaaagagcaagtgacaaattaggagaaatgtttgtaacatacaaaatagggttaaaactttaaataaagactctaaaaatcactgagaaaaacattaggccatcaaatagagattaggataatgattagcctgctatctagaagatgacaaaataaatggtt

SEQ ID NO: 581872 - DNA, 557 bp, Homo sapiens
ccctacgtgccttatccacacctccaacaagtggcagtcaacctaatcagaggaggccagtccacctcccgctggtcccacacccccatcacttctcatcaccagagagggcccctggcttgggcccacagcacagacctttcatcctgtgctgattctgctgagcaattrctgacctgcatctctctgggatggagcctcccaggagacaatcaaatgacccttgaccaaaaccactactaagatcccttcctctgctgcctccaagttggggaaggaacataaacaataagattgccccagagctgcagcaggcagctcaggagtgccaagtcacaatctacagccagcattcaaggggaagaggaacccatgctttcagagcattgagaggaaacatggctgcaactgtgaggaaatagggaagccacacaacaagcaagagtttaccaactgactaataagcctacgtgccacctgctggatcatactgtaaaggtttatcaccaaaaacacctcactaacatacctctgccgaaaccagagacaagaaggta

SEQ ID NO: 581873 - DNA, 557 bp, Homo sapiens
ccctacgtgccttatccacacctccaacaagtggcagtcaacctaatcagaggaggccagtccacctcccgctggtcccacacccccatcacttctcatcaccagagagggcccctggcttgggcccacagcacagacctttcatcctgtgctgattctgctgagcaattactgacctgcatctctctgggatggagcctcccaggagacaatcaaatgacccttgaccaaaaccactactaagatcccttcctctgctgcctccaagttggggaaggaacataaacaataagattgccccagagctgcagcaggcagctcaggagtgccaagtcacaatctacagccagcattcaaggggaagaggaacccatgctttcagagcattgagaggaaacatggctgcaactgtgaggaaayagggaagccacacaacaagcaagagtttaccaactgactaataagcctacgtgccacctgctggatcatactgtaaaggtttatcaccaaaaacacctcactaacatacctctgccgaaaccagagacaagaaggta

SEQ ID NO: 581874 - DNA, 533 bp, Homo sapiens
tcctgaagtgaaagacagtctgataattagggaagcagtaactaatacagtagaaccatctgagttcaaattctgactttatcatttactagcctattatggctcagtttcctcatccataaaatgggtaaaataggagttccttccccatggagttaatttgggattcacaggagataacacatgtaaaatgatatataccatgcctggaatatactataagtgctcaataaatattagtatacttacaataatgacaaataatgtgctagagttggtgagttggtgagggggtgaagggaagggaaaaggagtgaaaaataagtctgtgaacatagaaactagatcatgcaggacctgatatgcatactttggactatcttttatactttaagtttcagggtacatgtgcacaatgtgcaggttagttacatgtgtatacatgtgccatgctggtgtgctgcayccattaactcgtcgtttagcattaggtatatctcctaatgctatccctcccccctccccccacccca

SEQ ID NO: 581875 - DNA, 516 bp, Homo sapiens
tttagataactaatttaggagcataatgtgagacaggttaaaattccttccccctcccccttattcatatccaattgaccagaaccatttactgaaaaggcatgcttttcccaaggcatggtcatgttttgtcaacaggtctgggtttgtttctgaattgttattctattcattatttacttagttgtgtttattcattttctttgtttattatttctttatttgtttatttattattgtgcttattcattttcattattcttcctccttcttccttcctacaactttcacccccagcctgaaataaggcaacttgcattcgtcactgtgtcctgagggccttgaacattgcctgacatataatagatatttaatttaagagtatttgttcatgaaygtgtcacgcaaaccaaggtgaatagccagacagcatacacactggggctgaatttactatgaaaatcacagagacaggagcagaatggcatacaaagatatagcaggaccagagtcaga

SEQ ID NO: 581876 - DNA, 607 bp, Homo sapiens
ttaggtatttactgcagtctttgtagtctgagcttatttgtacccattcctctttggaaggcttttgagatgttataaaggacttgggtgttgtgatctaagtttctgctttagggagcaccccaagctcagtagtgctgtggttatttcagacttgtagaggtaccaccttgattgtccggaagaaaatctagaagaattctccagattatcaggcagagactcttattaccttcccttactttctcccaaacaaatgtagtctctctgttctgagcaacccraagctggatgtggaatgacaaaagcacccctgtggccaccaccactaggactatgctgtgtcagacctgaagccagcacagcactgggtctcatccaaggcctattgtaaccattccttggctactgcctatgtttgctcaaggctatggggctctataatcagctctacaatcagcaagtgatgaaactagtcaggcttatgtccttcccttcaagtcagtaagctcctccaggccccaggtgggtccagagttgccattacatgagccaggaactagaattaaaccttagaagtctacctggtgttctattttcctgtggc

SEQ ID NO: 581877 - DNA, 517 bp, Homo sapiens
aatttttctgcttcagcctcccaaagtgctgagattacaggtgtgagatactacaccctcccttcacattcctttttaatccytacttcccacttcctcttgcttctgccacctcctatttttcagacaaccactgatctactttctttcactttggatttatttgaattttctataaattttataaatggaaccacataatatatggtcatttttgtctagtttatttcattagcataattattttgctaattaggaaggaaaaaataaataaaagacatccagattagaagtgaagaagtaaagtggtctttattcacagtctccatagtggtgtatgacaaaatctgttagaatctattttaaaagctactagaactaacaagcaaatttagcaatgtggtcatgccattttattgctaaatagtattctattgtatgactatatgataatttatttttacatctgttaatggatattttgttgttcttgtttttttaatattttattttattt

SEQ ID NO: 581878 - DNA, 517 bp, Homo sapiens
aatttttctgcttcagcctcccaaagtgctgagattacaggtgtgagatactacaccctcccttcacattcctttttaatccttacttcccacttcctcttgcttctgccacctcctatttttcagacaaccactgatctactttctttcactttggatttatttgaattttctataaattttataaatggaaycacataatatatggtcatttttgtctagtttatttcattagcataattattttgctaattaggaaggaaaaaataaataaaagacatccagattagaagtgaagaagtaaagtggtctttattcacagtctccatagtggtgtatgacaaaatctgttagaatctattttaaaagctactagaactaacaagcaaatttagcaatgtggtcatgccattttattgctaaatagtattctattgtatgactatatgataatttatttttacatctgttaatggatattttgttgttcttgtttttttaatattttattttattt

SEQ ID NO: 581879 - DNA, 575 bp, Homo sapiens
aaggaaaaagtgaatagcatagaaaaaaaattaaaataatgctgaaaatgttctyagtttgatggaagatataaatttacaaattcaagaatctcaaaaaccgcaagcaggctaagtgcaaagaaaattaggtctaagaatgtcaagctgatgaaattaaagataaagacagatagagaaaaatgactcactacataaacagggaaatgacacaaatgatagctaattcttcatcaaaaactatgcaagataacacaataacatctttaaaatgctgggggaaaatcctcagccaaaaattctataaccactaaaaataaaataaagataaaaacagagaaaaatgactcactacataaagagggaaatgacacaaatgacagctaattcttcatcaaaaactatgcaagataatacagtaatatctttaaaatgctgggggacaatcctcagccaaaaattctataaccactaaaaatactgaataaaggtaaaataaagacacttaaaagacaattgagattattcattgccagtagaacggcaatatgagaaatgctagggaagtttttcag

SEQ ID NO: 581880 - DNA, 574 bp, Homo sapiens
ttgattaaatctgctgttgaagctctttattgaatttttcagttcagtcattgtgttcttcatctccagaatttctgtttgtttctttttaatgatgtctatcattttgatgaacttctaattttgttcaggcatttttttaatttcattttgttgtctatctttatttccttgcagctcaatgagcttccttaaggtgactattttgaattacttgttgggtagtttgtagatctctatttctttagggctgttttcagaactttattttgtttctttcrtcatgtcatttttctctcattcttcataatccatgtggacttgcattgggatctgtttatttgaagaagtcatcatccttcccagtctttacagactaacttatttatggaaagctcttcaccagtcatcttagttaagggttttggacaagactgcctgctgccaagtggacctgataccaggattggtggctagcaggccaggtgccagtgtccacaattgaaagttgaatactcaattcactctcactttcctggctttgtgcctaggattgaagcaaagctgaacacta

SEQ ID NO: 581881 - DNA, 587 bp, Homo sapiens
taaatctctcataataaaagaaaagcatatttgtgagagttagtttaggaggtcaggttttatttcttgggttttctgtaagtcttcctgaacaaaggtttgtgatatttattataaattatgtatcttgaaaaggtgtcatctactcccaatttcattaattcctgctacatcatgttcttgttatgtaaaaatattgggatgaaggtacattttgacaccaaccaggtgtttggttttagtgtagggtctaggcttcagtttcttcatcgatgtattatatggaggagatgaactaattcagaattcttcaaattgggctccacagagaattccatggaagggccctgtggtttgacttgaggaacaaggataacatgtcagcttctaccagagaagctctatttctgtctattttatacatctggcctctaagaaaattcatcttaaaaaggaatgaggctggatgtcagcaaaayggcagagcaggcaactccaaatatttgttgcacaagagcactattcacaatagccaaaaagtggaaatagcccaagtatccatcaatagatgaaagcataaacaaatt

SEQ ID NO: 581882 - DNA, 656 bp, Homo sapiens
tttttctcattacctccacatctaatgcatcataaaagtcttgtccattttgcctctgaaatatattttaaatccattcacttttttttcgtctctgtagtcccagcctggttttagtcactgtcttctggggcatagcaacagcctacttactgatattccacatctgctctgttctctctccaatccactcatgacttagaggaatgcacaagataaagtgcaaagtcctccattttgcatacaggtcctttcatcatctgctaactgcctacgtctccaacctcatcattttcctgccacactggcctcttcatttcctcaaacttgacatgtgctctgctgccacaggtattatctatgctgtcctaatctgacccactcatctcttagtcaactccagttcattctcaggatctcggctcaagtatcacttccttggagaaatcctccctcactcattggccagatcagacctccctgttaaggatttttgttagcattgtgctaaccaataagcaatcattttcttaaacttattcacgcataagtactcaacaataaaaaatatgrcataacattaatacagtgaaaaaataatattttcagggtaactaaatagcacagtagcatcatcagaatacctgtatctgatg

SEQ ID NO: 581883 - DNA, 597 bp, Homo sapiens
tgccccaaattgcaggattcaaaatggctgagccagcgttcaaacccagacgggtctgattgcaaggcccagacttctcatcataaaaccctctaggtcctttcctccaccatatggaaaactcacgtgcatctggacagcctctcccaaaaatagctyggagcccaggccctaacactgacgtgacattagcatttttcttttcattcatccccagatctcctttcagcttggcttattctgacaccatatttcctatagcataggaaatgctgtggaatatggaagctttcagatgtggacttgattgaaataggtgaagtttgttttcttttatgttctatttctcatgccttcataagctagtggatccagatggttggaatcgccaattaaaaacaaagagaacattaggaaactgtaagagagagagagagagagagagagagagagataccaagtggcaattagggatgagacagctaaaatagcttcatgatggtaaagattctttcattcaagaagaatgtgtgtgcaaattatttttttccttctggattaatttagcattaataaattgccaccagaaatctttat

SEQ ID NO: 581884 - DNA, 597 bp, Homo sapiens
tgccccaaattgcaggattcaaaatggctgagccagcgttcaaacccagacgggtctgattgcaaggcccagacttctcatcataaaaccctctaggtcctttcctccaccatatggaaaactcacgtgcatctggacagcctctcccaaaaatagctcggagcccaggccctaacactgacgtgacattagcatttttcttttcattcatccccagatctcctttcagcttggcttattctgacaccatatttcctatagcataggaaatgctgtggaatatggaagctttcagatgtggacttgattgaaataggtgaagtttgttttcttttatgttctatttctcatgccttcataagctagtggatccagatggttggaatcgccaattaaaaacaaagagaacattaggaarctgtaagagagagagagagagagagagagagagagataccaagtggcaattagggatgagacagctaaaatagcttcatgatggtaaagattctttcattcaagaagaatgtgtgtgcaaattatttttttccttctggattaatttagcattaataaattgccaccagaaatctttat

SEQ ID NO: 581885 - DNA, 334 bp, Homo sapiens
tttactgtctcaactgtgggtcaatctgacattacaaattttctgatgtagtacaacatsaggtacaaaatttcacctgtgatttattctagtcaagcgtgtttaactggcagccattaaggcattaggtgtaaatttagacacagaaagcaatcaagcaaagcctcaaggtatgccattttgtaggtcaattgtcctctttccttcaacaagtcagtaccatttaaaaaggggggtaattctagatttaaaaaaaaattaaggggtggacaattagatataatgtgcaggactgcactgagactggtttaaagaaatcagccataaagaaaaa

SEQ ID NO: 581886 - DNA, 610 bp, Homo sapiens
aagttttttagaaactcagtggaaaggtggcatcttcatacattttcagcaccttataaattaggtacttttgcctggcactaaaatatccttcttgaacttaaaaatcaaaatcaataaatcaatctacttctcaggcaacaaagaagtagatgaaaggcaacaatggggcagattaaacttctagcaatcaatcccaaatatacaggaaccttagtttgattaagatgacaaaaaaacacctggaggaagggcactcaagtttggctcatggtctctttgttcttcttaaaatctacatcccttgcatcaactacagtactatagccgatgatttgaagttgaagcataatatcttattttttctgacattgcaaatatataacagatcactaagttttttttttttttttgagacggagctcgctctgtcacccaggctggagtgcagtggcatgatcgtcactgcaagctccacctcccrgcttcatgccattctcctgcctcagcctccctagtagctaggactacaggcacccgccaccacgcccggctaattttttctatttttcagtagagacagggtttcaccgtgttagccagggtggtc

SEQ ID NO: 581887 - DNA, 309 bp, Homo sapiens
gaaataaatgaaagattagaaaccaaaccacacacaatcttgcatactgcagtcaccaaggaggtaactttccaccattacttsagacaaatgcgtgtgtgcgtttttaatctagtctgacctcagagcctctaaatagatgaagaaatacttgtgtaattgaaaaaaaactgttctctcagccattattcaaaggacactaactcaaataacaaatcttaaagctctttaaaatgtaaaaacattttcttggtggaacatcaaatgacagctgattcacattaaaatccataattacaaccagcccca

SEQ ID NO: 581888 - DNA, 387 bp, Homo sapiens
gcctgcgtctaatggtaaaagaataatttaaactgtgagtctgcactcttgtaccactcacttgcaccttactgtccataaccaatgaattagcttagctctactctattttgtctttgtgaaacttactttgacaagtattttatgaaaaatattattgttgrttatacatgacttatcacaacttgttataaaacaatttacatgaaacaataaaaagcgtatactttagatgtaaactataattttgcttccaaggaacatgatcttgtagttattgacaatatgttaaaatccaatgtgttgattctttcttagccaggttttcctccatgacttgagtatttccttcatcacttcttgttttgttgttgctttaaaaagtgc

SEQ ID NO: 581889 - DNA, 387 bp, Homo sapiens
gcctgcgtctaatggtaaaagaataatttaaactgtgagtctgcactcttgtaccactcacttgcaccttactgtccataaccaatgaattagcttagctctactctattttgtctttgtgaaacttactttgacaagtattttatgaaaaatattattgttgattatacatgacttatcacaacttgttataaaacaatttacatgaaacaataaaaagcrtatactttagatgtaaactataattttgcttccaaggaacatgatcttgtagttattgacaatatgttaaaatccaatgtgttgattctttcttagccaggttttcctccatgacttgagtatttccttcatcacttcttgttttgttgttgctttaaaaagtgc

SEQ ID NO: 581890 - DNA, 429 bp, Homo sapiens
aggatggtctcgatctcctgacctcgtgatctgcctgccgcctcggcctcccagagtgctgggattacaggcatgagcccccgcaacgggcccaggaagaccatttttwaaaaacatgtaacatttctgcctataatccaaggaagtttgacctattgttcctagtttttattgggtatcatgaaattaattattcatgcatttcatagatacgtaattactttctagaactacagtcacattcccttgacatgggtattttggaacagtaatcagtcaaatttaaaatgaaagtttaaatttgtattcttgggattttgtaattttagacccacccaagacttatacccaggatggtgtgtgtttgactgaatcagggatgactcagttacagagcctcacagttacagttccaagaagaaaactgtc

SEQ ID NO: 581891 - DNA, 429 bp, Homo sapiens
aggatggtctcgatctcctgacctcgtgatctgcctgccgcctcggcctcccagagtgctgggattacaggcatgagcccccgcaacgggcccaggaagaccattttttaaaaacatgtaacwtttctgcctataatccaaggaagtttgacctattgttcctagtttttattgggtatcatgaaattaattattcatgcatttcatagatacgtaattactttctagaactacagtcacattcccttgacatgggtattttggaacagtaatcagtcaaatttaaaatgaaagtttaaatttgtattcttgggattttgtaattttagacccacccaagacttatacccaggatggtgtgtgtttgactgaatcagggatgactcagttacagagcctcacagttacagttccaagaagaaaactgtc

SEQ ID NO: 581892 - DNA, 462 bp, Homo sapiens
ttttttttttcatttggaatcttttttgaagtaacrtaagacaactctccttattcctagacagatgcgatcagttcattgaaaagatcatgtagaataatatcttgaatctttctccatctgaaatctgtagcatgttttagaatcacatggcttttgagaaatcctgttttctgaagggctttgaaatgtgtgaatcaagatgctttaaaaaagaaatccatttttaaataggcattttccttagtggacaatagcaaatagagaaatgctttttaactaaaatgtagaagccagagatgaaatgtgaatgaacttgaaattggaaaatctgtaggtccaggtgctcaatagaaaagcccagctgactccaatcattttgtttttcctctctgcagtgtgcacagtcaaggggagtgttttattccagacccacaccagttgagagcatagtattaccat

SEQ ID NO: 581893 - DNA, 462 bp, Homo sapiens
ttttttttttcatttggaatcttttttgaagtaacgtragacaactctccttattcctagacagatgcgatcagttcattgaaaagatcatgtagaataatatcttgaatctttctccatctgaaatctgtagcatgttttagaatcacatggcttttgagaaatcctgttttctgaagggctttgaaatgtgtgaatcaagatgctttaaaaaagaaatccatttttaaataggcattttccttagtggacaatagcaaatagagaaatgctttttaactaaaatgtagaagccagagatgaaatgtgaatgaacttgaaattggaaaatctgtaggtccaggtgctcaatagaaaagcccagctgactccaatcattttgtttttcctctctgcagtgtgcacagtcaaggggagtgttttattccagacccacaccagttgagagcatagtattaccat

SEQ ID NO: 581894 - DNA, 618 bp, Homo sapiens
ctcatcttgtgtattccctgtccaagccttggaatcatccatttttccaaggagaccagggttccttctagcagaaaatgatatggagaaatcaagatgtgggcactagggtgtttattgttactggggtgatattgtttctatatcctcttaaaagacagagttgggaaatggatacatgtatatacatgcacacatattcatatgtgcayatacacatatccttgagcatctctatctatttctatgcctacctgtgtacatatatcaaatcccatgcactcattttgatatctagcagacatattttaaaaaccatcacctctggttcaaatcttgattctctaatgttctagttcatgagaactggaagtcaaagagattaagttaccttcctaggtttaaaaaatattaaaaagggaataattagttgcttaccttgtagtttattgtcagagttatgtgctatgatgcatgtggaatgtgtaagggtgttacacaatgagaatttaaaaatggtcttcttgtgactgtgcccttaagagctgagagtacagggcagaaccttcctgtttctatgtagtggttccatgctccatttcacagactgtgagaagc

SEQ ID NO: 581895 - DNA, 603 bp, Homo sapiens
tcttattaacaatgaatatatctaattattctctagatcttttattagcttgaattattcttagatattctgccacataaaagtatttgaatgtatagtctttgtggttgatggtctaatcagctaaactcaaacctcactgcagctgtgactagaaagtcctcattgatggagaatcctagaggtcctttcagagaagaaaaaataattcagtgggccaagctgtaatattttgcctctgattctcagattccttgttggcaaaatgggaatgcaaaataaataaagagtctatagtcagtacctaataagtatttgttgaatgaataaattagtggaatacaaaattaaaatacttgtctcatcaaacatctagagaaaaaggagacagatatagagctaacccatgcctgttataccatttaatgctaggcgtatggaagcagatactgtgtctctctagtttcacaggctctcggagagagaggaactgtactctaggagctgcatgtgactagtcattctcaagaagtccccaccccaatacctgatttgatgagattctgaactttrgttgatgctgaagggggaggagatttttag

SEQ ID NO: 581896 - DNA, 576 bp, Homo sapiens
ttttttttttttttaatttttattagagactaggtcgcactacgtcacccaggttggtctcaaactcctgagctcaagggcttcttctgcctcagcccctacaaagtgctaggattacaggtaggagccatkgtgtccggccacattttctctgttcgtaaagtcagcagtagaatagctaacattgttgctaaacagtttgtataaaatgagtaattattagtgcccctgcatgcagccacctgctgttgctgaccttctgtgcctctgcagccaaacatacatcaggtacttatgtatacacactccacaggcacacagatgcctccacaatacacatgtgcccaagatgcaattgcaagcacacaagtgcacaaataagtacacacatgtgtcttcacaaagaactatctccaccttcattttctcccatccaagtactaatcaggtctgaccctttttagcttccaagatcagatgagattgggcatgttcagggtatatggctgtagcctacatcctctttttttttttttttttttttttttgagatggaatttcgctcttgttgcccag

SEQ ID NO: 581897 - DNA, 536 bp, Homo sapiens
tttgtggattaaatacagatgtgcagggattttagggccctgattgattttctgttgaaagaagcgaaaggaatgttaatttacaactggcaaatgttagctcttaggaggaggcaaaacagcatttsgaaggcctgttttttgtttggttttggtatttcatgaaagagatttttctgtgcaaagtggcaggaagccattttcaacaagagctaaagggaatgaagatttaaaaaatggaccaaaaacaaactcaaaggtgccaggcctttgttactgcaagcccctcttgcaggatgagaggctgctaaaacaaaatcaataatttaagcaactttctgtccctctctcccctgctattctggtaaaatgatttgacatttcagacaacaaggaatgaacatcagaccaggaagaaaagggcttggttatgagtcccagttgtgtgattttaagtacatgattaaacgtttattaatttggttctctcatctctaataatgaaaccatcactcttacatcttgagtgtaaaaaa

SEQ ID NO: 581898 - DNA, 629 bp, Homo sapiens
ttccaaagctgtttgccaattcattcccatcttcacagccctgtctttctccagcaggcttggtctgtggttctaatgaacacaggaggcttggttcattcggatgcaggaagtgaggaggaataacatgaaggggattgaccagatgcctcaattctaatcagctgaatggagatacttatgatacctccttatgcagtgctgtaaggattagatgggattctttatataaaggacttagaacaatacctggcatgttgttagtactcaattaactttatacaatatattagtcaggctttgttgtgatgatgycacataaaaagtaatccccaaatctcaatgctaacaacaacaaacatttacttctcatttccataggtcagctgtggttctacagggctcttctgggctggctagattcagatgggcctggatctgggtggtgaattgggttcctatttgcttcacttggctctcagaagaggatccaggagagtagcagcagctatctgaagcatgttcatctcatgctggaggacaggatcaccagaggccatgcaggaatatttaacgcctctgcttggatgtggcattcactgagtcactcacattccattagctgaagc

SEQ ID NO: 581899 - DNA, 629 bp, Homo sapiens
ttccaaagctgtttgccaattcattcccatcttcacagccctgtctttctccagcaggcttggtctgtggttctaatgaacacaggaggcttggttcattcggatgcaggaagtgaggaggaataacatgaaggggattgaccagatgcctcaattctaatcagctgaatggagatacttatgatacctccttatgcagtgctgtaaggattagatgggattctttatataaaggacttagaacaatacctggcatgttgttagtactcaattaactttatacaatatattagtcaggctttgttgtgatgatgtcacataaaaagtaatccccaaatctcaatgctaacaacaacaaacatttacttctcatttccataggtcagctgtggttctacagggctcttctgggctggctagattcagatgggcctggatctgggtggtgaattgggttcctatttgcttcacttggctctcagaagaggatccaggrgagtagcagcagctatctgaagcatgttcatctcatgctggaggacaggatcaccagaggccatgcaggaatatttaacgcctctgcttggatgtggcattcactgagtcactcacattccattagctgaagc

SEQ ID NO: 581900 - DNA, 451 bp, Homo sapiens
ttttcttttgtccccatggctagaaaatggctaagcctagtaccaaatccttgtgtgattgttccagggttctgttctttgcatgacaactctggactgaagtatgtaggcagagacattagaattgagacagagactgaccaaaactctcatatcttggcaggagcccaagtctgcatatgtatgaacctcatccatatatatgcaagctgtggctgagacatctgtaacctagactttcatagctgggctactaacttcaatcatctgaaggaagattcaagttataaactgccaccaattcagtkaattatccataaacttgtttctatattgccctatgatgctcagttcaagcccaagtcaaatgctccctcctgaaaacttctctgattccctagccaccagtttctgcctgtgttgcctgtccacagcaccaaacacttaagac

SEQ ID NO: 581901 - DNA, 335 bp, Homo sapiens
cccagtgggtcctcagacataggggtctggggctcagagactgagcctgagagtgatcagggccctggaagagcccatggggtmaaaatgggaaagggcctgggagaacagcagcagtaagaggtgaccagggaagcaggtgagagagtggaacagagtgggcaggccagcaagaagcagagcaggagagaagggatcatagagcaggctcagaggcctcaacctgcttgaggaaagcctttggttaggatgggggtaggggtaggggtagggtggatcattcttgacatttgctaagtcagtgaagcctaatttcagtgagatgaagtggaagg

SEQ ID NO: 581902 - DNA, 507 bp, Homo sapiens
tttcttcagcctcctcaaacaaaacaattatcagccaagaattttgtatccagcaaaactaaacatcatatatgaaggaaagatacagtcatattcagacaaacaaatgcygacagaatttgccattaccaaaccagcactgtaagaactgctaaaaggagctctaaatcatgaaacaaattctggaaacacatcaaaacagaacttcactaaagcataaatcacacaagagctataaaacaaaaatacaagttaaaaagcaaaaacaaaaaaaaaacaaagtatagaggcaacaaagagcatgatgaaagcaatggtacctcactttttaatactaatgttggttgtaaatggcttaaatgctccactgacaagatacagaaccacagaatggataagaactcaccaactaactatctgctgccttcaggagactcacctaacacataatgacttacataaacttaaggaaagtggtagaaacaggcatttcatgcaaatggacac

SEQ ID NO: 581903 - DNA, 507 bp, Homo sapiens
tttcttcagcctcctcaaacaaaacaattatcagccaagaattttgtatccagcaaaactaaacatcatatatgaaggaaagatacagtcatattcagacaaacaaatgctgacagaatttgccrttaccaaaccagcactgtaagaactgctaaaaggagctctaaatcatgaaacaaattctggaaacacatcaaaacagaacttcactaaagcataaatcacacaagagctataaaacaaaaatacaagttaaaaagcaaaaacaaaaaaaaaacaaagtatagaggcaacaaagagcatgatgaaagcaatggtacctcactttttaatactaatgttggttgtaaatggcttaaatgctccactgacaagatacagaaccacagaatggataagaactcaccaactaactatctgctgccttcaggagactcacctaacacataatgacttacataaacttaaggaaagtggtagaaacaggcatttcatgcaaatggacac

SEQ ID NO: 581904 - DNA, 507 bp, Homo sapiens
tttcttcagcctcctcaaacaaaacaattatcagccaagaattttgtatccagcaaaactaaacatcatatatgaaggaaagatacagtcatattcagacaaacaaatgctgacagaatttgccattaccaaaccagcactgtaagaactgctaaaaggagctctaaatcatgaaacaaattctggaaacacatcaaaacagaacttcaytaaagcataaatcacacaagagctataaaacaaaaatacaagttaaaaagcaaaaacaaaaaaaaaacaaagtatagaggcaacaaagagcatgatgaaagcaatggtacctcactttttaatactaatgttggttgtaaatggcttaaatgctccactgacaagatacagaaccacagaatggataagaactcaccaactaactatctgctgccttcaggagactcacctaacacataatgacttacataaacttaaggaaagtggtagaaacaggcatttcatgcaaatggacac

SEQ ID NO: 581905 - DNA, 566 bp, Homo sapiens
aagagcacaaacagacaatctaagttcacatctcagggaactagagaagcaggaacaagccaaacccaatcccagcaaacaaaggaaataaccaagatcagagcagaactaaatgaaattgacacaacaacaacaacaacaaatacaaaacataaataaaacaaaaagttggttatttgaaaagataaataaaactgatagaccattagcaagattaaccaagaaaagaagagagaaaatccaaataacctcactaagaaatgaaacagsggatattacaactgacactactgaaatattaaagattattcaagggtactatgaacaccttttggcacataaactagaaaacctaggagagttggataaattcctggaaaaatacaaccctcctagcttaatcaggaagaagtagatacctcaagcagaccaataaagcaagcagcaagatcgaaattgtaattttaaaattaccaacaaaaaaaaccgaggaccagacagattcacagcagaattctaccagacattcaaagaatgtcttctttcattcaaagaagaaatgacac

SEQ ID NO: 581906 - DNA, 585 bp, Homo sapiens
tgaaatattaaagattattcaagggtactatgaacaccttttggcacataaactagaaaacctaggagagttggataaattcctggaaaaatacaaccctcctagcttaatcaggaagaagtagatacctcaagcagaccaataaagcaagcagcaagatcgaaattgtaattttaaaattaccaacaaaaaaaaccgaggaccagacagattcacagcagaattctaccagacattcaaagaatgtcttctttcattcaaagaagaaatgacaccaatcctttcacactattccacaagacagagaaacaagaaagcctccctgattcattctatgaagccagcatcaccctaataccaaaaccatgaaaggacataaccaaaaaagaaawctacagaccaatatccttgatgatcacagatgccaaaatccttaacaaaatactatctaactgaatccaacaacatatcaaaaagataatccaccatgatcaagtgggtttcataccagtgatacaggaatggtttaacatatgcaagtcaataaatgtgatataccaaataaacagaattaaaaaaaactca

SEQ ID NO: 581907 - DNA, 585 bp, Homo sapiens
tgaaatattaaagattattcaagggtactatgaacaccttttggcacataaactagaaaacctaggagagttggataaattcctggaaaaatacaaccctcctagcttaatcaggaagaagtagatacctcaagcagaccaataaagcaagcagcaagatcgaaattgtaattttaaaattaccaacaaaaaaaaccgaggaccagacagattcacagcagaattctaccagacattcaaagaatgtcttctttcattcaaagaagaaatgacaccaatcctttcacactattccacaagacagagaaacaagaaagcctccctgattcattctatgaagccagcatcaccctaataccaaaaccatgaaaggacataaccaaaaaagaaatctacagaccaatatccttgatgatcacagatgccaaaatccttaacraaatactatctaactgaatccaacaacatatcaaaaagataatccaccatgatcaagtgggtttcataccagtgatacaggaatggtttaacatatgcaagtcaataaatgtgatataccaaataaacagaattaaaaaaaactca

SEQ ID NO: 581908 - DNA, 537 bp, Homo sapiens
tttattgtctgatgcaatgtttcttaatctttttgggtcttggattcccttgagaatcttttgaagtttatggactcttttcccagaagaacacactcatgtgtatgtaacacaattttgcattcaatcttagggactgcaggtgtctacattagttatatattggtgtaaaaaaaaaaagccccaaacttaaggcttaaaggaacaatagatgcttattatctcacagtttctgtggttcagaaagtcagtaacatcttaactggatacttctgactcagagtctcccaggaggttgcagtcaagatgttgttggggggaaaggggcaggttcagtggctcatgcctgtaatctctacactctgggaagcaaagccaggaggattacttgagcccaggagtttgagaccagcctgggcaacacagtgagaccctatgtattagtcagttctcacattgctataaatacatgagactggagaatttataaagaaaaggggtttaattgtctcrcagttccacaggctgttcagggag

SEQ ID NO: 581909 - DNA, 563 bp, Homo sapiens
taccatcagccttccactgctgtgatatcatttatcacagcaagcttctctgtggtctgtgccccagactcgtccctgctgatcctgcccccatatcagtattcatcagaatctctggttggatggcacagttgacttgtggatctgttatttgaccatgccctgtgtgtgcttcctgttgcgtatgcacatccccaacagaatcttcaaggaatgccatcactgtcatgttgccattgatctagcttagtctgatcctcattgatcacatagtgtgacccctcaaggggtgcttaggcaagactttcagccagttcacatatttgattgttagctcttaatcagttttctcttttaattgtaaagcataattgccttgcttccttctgattttctttagctcaaaacgccctccaattacacatacctaaatacagaagcagtaagggaaatgtcagcactcattttccaaatgtttacgacaatatcttggtttggctattaaaattgacaaagccataaacaagyttccatgaggacagcctccagtggtggaaagctga

SEQ ID NO: 581910 - DNA, 567 bp, Homo sapiens
ctcactaccttatgtgcccaggacaagagctgtggggtctggagaagacttctaggccagcccctgcagtctttcctcaggtgacatggcttccccagacccacttccccctaggtgccctctctgcattcagggggtagagggctgactgggacagaatgtgacacactcagcawgtgaggaaaagcctccttcattctgtaggccctacctctattaacatgtcctttgataaagtgcctcccctcctgtctcccctctctggaatcctcagctgctgccaggcttcagctgtgccccattgaaggcagctctgcctccctactttccccagcccagggttttccttttggggtcagctgcagggatctgggccatcctttacccactcagactttcttcctgcccacctgctgctgtgaatcctgtatgtcatatacatatatatataaaatatattatataattattatatttatgtaatttacataatataatatataaatgtattatatatagtattatatataaaattatactttaagttctagggtacatgtgcacaac

SEQ ID NO: 581911 - DNA, 607 bp, Homo sapiens
ttcatatgggatttcattacatgggtatgactgatcaaatcactgaccaatactgattggatcaatctgcggtccccctcttgtccttggaggtctaagggtggggctgaaaactccacaactctaaccgtggccagctccttccttgaaactgcctccatgctcaccttcattcacctcattagcataaastctgggatggccaaaaggggcttcttataaataacaaaaggtactcccattgcttaggaagttccaaggggtttaggagctcagtgccaggaactggggacaaagaccaaatatgtatatatatataaatactacagtagtgaattttatatagcaaacatgcattatttttctttttggctaaaatttttttctagttataaaactggtacatactcattgcagaggactgggggaaggagtaaaatattaagaaaaaaataaaaatcacttgccatcctgtcacctagtattttctttctagttcttttcatgcagttatatataacattttgatctttctttttatgttacagaagtcatatttgcttattgcagagtaatccaaagagtacagaatgtctaaagtttaaaa

SEQ ID NO: 581912 - DNA, 567 bp, Homo sapiens
ctcactaccttatgtgcccaggacaagagctgtggggtctggagaagacttctaggccagcccctgcagtctttcctcaggtgacatggcttccccagacccacttccccctaggtgccctctctgcattcagggggtagagggctgactgggacagaatgtgacacactcagcatgtgaggaaaagcctccttcattctgtaggccctacctctattaacatgtcctttgataaagtgcctcccctcctgtctcccctctctggaatcctcagctgctgccaggcttcagctgtgccccatkgaaggcagctctgcctccctactttccccagcccagggttttccttttggggtcagctgcagggatctgggccatcctttacccactcagactttcttcctgcccacctgctgctgtgaatcctgtatgtcatatacatatatatataaaatatattatataattattatatttatgtaatttacataatataatatataaatgtattatatatagtattatatataaaattatactttaagttctagggtacatgtgcacaac

SEQ ID NO: 581913 - DNA, 567 bp, Homo sapiens
ctcactaccttatgtgcccaggacaagagctgtggggtctggagaagacttctaggccagcccctgcagtctttcctcaggtgacatggcttccccagacccacttccccctaggtgccctctctgcattcagggggtagagggctgactgggacagaatgtgacacactcagcatgtgaggaaaagcctccttcattctgtaggccctacctctattaacatgtcctttgataaagtgcctcccctcctgtctcccctctctggaatcctcagctgctgccaggcttcagctgtgccccattgaaggcagctctgyctccctactttccccagcccagggttttccttttggggtcagctgcagggatctgggccatcctttacccactcagactttcttcctgcccacctgctgctgtgaatcctgtatgtcatatacatatatatataaaatatattatataattattatatttatgtaatttacataatataatatataaatgtattatatatagtattatatataaaattatactttaagttctagggtacatgtgcacaac

SEQ ID NO: 581914 - DNA, 607 bp, Homo sapiens
ttcatatgggatttcattacatgggtatgactgatcaaatcactgaccaatactgattggatcaatctgcggtccccctcttgtccttggaggtctaagggtggggctgaaaactccacaactctaaccgtggccagctccttccttgaaactgcctccatgctcaccttcattcacctcattagcataaactctgggatggccaaaaggggcttcttataaataacaaaaggtactcccattgcttaggaagttccaaggggtttaggagctcagtgccaggaactggggacaaagaccaaatatgtatatatatataaatactacagtagtgaattttatatagcaaacatgcattatttttctttttgrctaaaatttttttctagttataaaactggtacatactcattgcagaggactgggggaaggagtaaaatattaagaaaaaaataaaaatcacttgccatcctgtcacctagtattttctttctagttcttttcatgcagttatatataacattttgatctttctttttatgttacagaagtcatatttgcttattgcagagtaatccaaagagtacagaatgtctaaagtttaaaa

SEQ ID NO: 581915 - DNA, 220 bp, Homo sapiens
tagttgtacttatattcacattttaaaagttggacacagttaagtctcagtgatttttttacacaacggaggcaagctgtgcagttataaatagtattatattatgctcttggcctgattacagaagggaaaggggcgatcataccagacaatggcagaatgaagcaacaaggagtagagttacasaacatgatgctgtaactgggactggagttactct

SEQ ID NO: 581916 - DNA, 573 bp, Homo sapiens
cgatgcgtgcagaagcttatctaccacatgaagtttacagaaagaatggggtcttggatcacagggaaaaaaaaaaaaggttatgtgagaaaacgaccctggctagcaacagtgggcttattacacaggtggaacctcactgggagcagtcctcagagagaatagagaaaaaatgtttctttcagacctttggagacctcagactctcagttaacctttcctagatccagacaagggggcagacctcagagaaagcctggctgcatcaaggcagattctctaccgatgcaaakctccccaagacagctttgcagctaagtttgcatttccagcccttctcaatagccattttgaaatatatcaaggaaatatatttaggggtaaaatatattagtttccctcatacagctataaaacatacaggaataatttttgtcaatgtctactacaaatccaatatagcagtaattataaaactcaccagatattgaagaaaaaatatatagagtacatcaattacaaatgttgatactaaaatgccaaataaaataaaaataacatccaacaatattt

SEQ ID NO: 581917 - DNA, 604 bp, Homo sapiens
tggctggcccagatattgaccctacacagttgcctccctcctggtgactaccagctatggaaccgttggatacaacctacctgactcaccccacagacctcacagcgcacatggacagcccccacacgccagagtgacctgctcggttgcagcgggagtcaagaaatgtgcctgctggcactcwccccaccgactagtgccccgtggaaaacttatttgggtaatgttctgggcccaataaaagctagagtcccacagaccccttttctctctcctgttccccactcatcttccccattttgttcagccctatgaggtgtgctactgtattagtccattttcacaccaccggtaaagacatgcccaagactgggtaatttctagaagaaagaggtttaatacatgcacagttccacatggctgggtaggcctcacaatcatggcgcaaggtgaaaggcacgtctcacatggcagcagacaagacaagagagcttgtgcagggaaactcctctttataaaaccatcagatcttgtgagacttattcactatcagaagaacagcatgggaaatacctgcccccatgattcaattacctcccacctg

SEQ ID NO: 581918 - DNA, 604 bp, Homo sapiens
tggctggcccagatattgaccctacacagttgcctccctcctggtgactaccagctatggaaccgttggatacaacctacctgactcaccccacagacctcacagcgcacatggacagcccccacacgccagagtgacctgctcggttgcagcgggagtcaagaaatgtgcctgctggcactctccccaccgactagtgccccgtggaaaacttatttgggtaatgttctgggcccaataaaagctagagtcccacagaccccttttctctctcctgytccccactcatcttccccattttgttcagccctatgaggtgtgctactgtattagtccattttcacaccaccggtaaagacatgcccaagactgggtaatttctagaagaaagaggtttaatacatgcacagttccacatggctgggtaggcctcacaatcatggcgcaaggtgaaaggcacgtctcacatggcagcagacaagacaagagagcttgtgcagggaaactcctctttataaaaccatcagatcttgtgagacttattcactatcagaagaacagcatgggaaatacctgcccccatgattcaattacctcccacctg

SEQ ID NO: 581919 - DNA, 600 bp, Homo sapiens
aactgttctaagactccaattaaaccgtactgggtttgaaaagagaaagtccaggaattaccaaatattttagatatcagataaaagagaatgccaggtatgcratgataatcagcaatggttgttcacacaatacatcaaatcagtatttgaattagcttttgaattacaaggacaaatggatcaagtctagactctttagtagataaatcttattaggctgagatgtgttttcccctgtttttccacaaggagattacaaatttgcaaacctcagctgctctcattttatgctctcaccaagccaaaagctgaagttcatcaatcagtgtgtctaagtgttcactggttatataccattttgtagtttcagctatctttccaacttcctaaatcatcaccttcatttgatcttgtttttttccactatcacttctttattgaccatataaagaatataagtgagttcttattttgttattgttcattttagtctaacttcatcaaaatatcacaatcttttaatttcattttaatttcaaagattaaatgaaacctacatagaaatgagtgtaagatttgcatttgcattattttggc

SEQ ID NO: 581920 - DNA, 526 bp, Homo sapiens
aggcacttgccaccatgcccagttaattttttgtatttttagtagggatggggtttcaccatgttacccaggatggtctcgatctcctgacctcgtgatccacccaccccagcctcccaaagtgctgggattaggcgtgagccactgcgctgggtcctcattcttgtatcttaaaagtcagtgatgttgagtaatttctcatgccaccacctacaaggttgcctttcttctgtcttcttctttcacttataaggaagtttgtgatttcattgatcccacccatttaagacaatctctctatcatttttccgcaaccttaatttcacttgaaatctaatttcacactgccgtgcaacctaacatatttgtatgttagactctgggaattaggacatgaaaatttttgrgaggccattcttttgcctacagcagacataatctatttaacctgcagattaaagcgttctttatttttctgtctccctgtcttaatttttttaaaataatatgaattgtagtaaagaga

SEQ ID NO: 581921 - DNA, 604 bp, Homo sapiens
tctcattctgtcgctcaggctggagtgcagtggcacaatcacagctcactgcagtctcgaccttccaggctcaaatgatcctcccacctcagcatcccaagtagctcacactacaggcacccacyaccacaccaagctaatttttattttttttgtagagatggagtctcactatattgcccaggctggtcttgaactactgtagtcaagtggtcctcccacctgagcctcccaaagtgctgggattacaagcataagccaccatacttggtgagatatgaatttctaggaaaaaaaatcaaaattgactcaaaaagtagaaaaaaaacttacatagattaaatatattgaatcagtaatgaaaaaacttcccataaagaaatttccaggcccaagtgccttcaccaaaaagttccatgaaacatacaagagaaacaaaccaaccaaccaaacaacaacaacaaaaaaaactctgccaccaacacagagaataaaaaaagaagactcccgagttcattttacaaggttaaaataaaaataaccttgatatcaaaacccaacaaggcaagtgcaagagaaaatatttacaggccatcattattca

SEQ ID NO: 581922 - DNA, 470 bp, Homo sapiens
aaatggcgtacttctaaatggcccataggtcaaagagagtatcttaagacaaattggaaaacagtttgaacttaataaatatgacatcatcttatcaaaatatgtgcttacagggcaatttatagcactaaattatgagaaatgaagcatcaaatcaataatgtaagcatttactttaagtaaaaaaagaaccaaataaactcaaatcaggcataagaaaaacagactaaatcagtaatatttaaacaaaaacagtaaaggaaaaaaattcaaygaaatccaaagttggttctttgcaagggtggtgggaggtggaagtcaatcaaatgaggaagcctctagcagactgacaaaggaagaagagaaaacacaaattgccaataccagaaatgaaaggaatattattacaaatcctgtagacactagaaggctagaatggacactacaaaaacaaaacaaacaactatatg

SEQ ID NO: 581923 - DNA, 543 bp, Homo sapiens
tgcagtgggtcccgagcccccagggctgtgcctgctggtcctgaccaagatcgcggctgccgaggtcagtccagcgccaagggcacagggccagggcaggcggggcagggctacccgaagcgcatagaggctgctggtgtcaacgtgaygtcttctggggcgcctggcatccctaggagtggaagccgctgatgaagtcaaagctgcctcctccttcaggaagactttgctcccatagctggcgaacaggaagcggagcagcgccaggaggatctgcgggcgctgctgagggcttctttgcagggacagtgcagcaggcagccagggacaagactgcacggcagccccccatggccaggggaagctcagaaccggagtcgcccgctgcccggcgattctccatccctggatcggtacaggggcatttggacgctgtggggaagtcgcggtctggggatattgggtccagccttcgggtagaagcaggtgataaacgcactcaggccagcccggagcgtcagccacactgcggtgcccacgatg

SEQ ID NO: 581924 - DNA, 543 bp, Homo sapiens
tgcagtgggtcccgagcccccagggctgtgcctgctggtcctgaccaagatcgcggctgccgaggtcagtccagcgccaagggcacagggccagggcaggcggggcagggctacccgaagcgcatagaggctgctggtgtcaacgtgatgtcttctggggcgcctggcatccctaggagtggaagccgctgatgaagtcaaagctgcctcctccttcaggaagactttgctcccatagctggcgaacaggaagcggagcagcgccaggaggatctgcgggcgctgctgagggcttctttgcagggacagtgcagcaggcagccagggacaagactgcacggcagcsccccatggccaggggaagctcagaaccggagtcgcccgctgcccggcgattctccatccctggatcggtacaggggcatttggacgctgtggggaagtcgcggtctggggatattgggtccagccttcgggtagaagcaggtgataaacgcactcaggccagcccggagcgtcagccacactgcggtgcccacgatg

SEQ ID NO: 581925 - DNA, 469 bp, Homo sapiens
aaattcataaaaccaagtgtttcacatatttcagttgtgatggcctttgtcctacttttgttagtgaagcaggcagactgcattttttccctctcatacatcttcaaatggtagacagaaaaatttgataaaacttctagggcattatctgatgaaacacattaaacactaaaggagaaatacaacttcattgtttataaaagacgtataagaaggaaacctgcatacatatatctatcagttttgtattttcaagaaatatttgccttaaaatgaacttcattagaatatgtgttctcccacagagccaaggaaagtaagttagacacaggatctggaagtctacctgtgtgatgtaattrcattgaaaacattccacaaataatgcagaaatgtatcattgtgacccaaaatattctctaaattttctcaaagcaatgtggccacatctattatcttttactatgac

SEQ ID NO: 581926 - DNA, 530 bp, Homo sapiens
atgcttagttttttgtttttttttttttttttgagacgtagtctcactctttcaccaggctggagtgctgtggcacaatctcggctcactgcaacctccagctcccgggttcaagygattctcctgcctcagcctcccaagtagctgggactataggtttgcgccaccacacccaggtaatttttgtatttttagtagagctggggattcaccatgttggccagcacaaagtgctcggattacaggcatgagccactgtgcctggccagtgcaagtgtctttagccagcttcatttactccctaactccttgcctcaggttctgcatccgtaaagtgaggtcactaggagtatttacctcagagggctgttgcaaggttaaagctggttatacaagcagagtacttggaacagtgtcagttacctggctggggctcagtaagtgctggctgtcctcattgaaaaggttcaagtgttgtgttttcctgtcacctgatctggaaagaggtcaaacagaggatcttttagccc

SEQ ID NO: 581927 - DNA, 587 bp, Homo sapiens
ctctccccttgcccaaactctagttgggatcctctaagccacctctcagcctcagctttcagtgttcatcctagtctggcccacatctctcaggtttaggaagaaacttgcaaagaatcccccactctcagtactgatcacctttgatatctgatcaaatttgttatctcccaccaccctccagatgatttctgatcagtctggcctgccttcagtaagaatcctgttcgatctgtttaacccaaatcccctttgcccctgatatttcctcttagtatccccagttgagccaattttcaaccattaaaaaaatcttggacaaaattaagttcagataggttccagagtgcttatgttcagttcttggctttctgaagacctggcatatcctctttaaattgcctcaatacaagaaaatacaaaatggaaagaagtagacattagaaattggaaaaatggagaaatacaggaatgaacataagtttctatttcaagtaattaggtaaattgtaagatgtttatatttaactttttctcattagctttagcccyttgaatctttgagaacatgttattactatagttat

SEQ ID NO: 581928 - DNA, 587 bp, Homo sapiens
ctctccccttgcccaaactctagttgggatcctctaagccacctctcagcctcagctttcagtgttcatcctagtctggcccacatctctcaggtttaggaagaaacttgcaaagaatcccccactctcagtactgatcacctttgatatctgatcaaatttgttatctcccaccaccctccagatgatttctgatcagtctggcctgccttcagtaagaatcctgttcgatctgtttaacccaaatcccctttgcccctgatatttcctcttagtatccccagttgagccaattttcaaccattaaaaaaatcttggacaaaattaagttcagataggttccagagtgcttatgttcagttcttggctttctgaagacctggcatatcctctttaaattgcctcaatacaagaaaatacaaaatggaaagaagtagacattagaaattggaaaaatggagaaatacaggaatgaacataagtttctatttcaagtaattaggtaaattgtaagatgtttatatttaactttttctcattagctttagccccttgaayctttgagaacatgttattactatagttat

SEQ ID NO: 581929 - DNA, 530 bp, Homo sapiens
atgcttagttttttgtttttttttttttttttgagacgtagtctcactctttcaccaggctggagtgctgtggcacaatctcggctcactgcaacctccagctcccgggttcaagtgattctcctgcctcagcctcccaagtagmtgggactataggtttgcgccaccacacccaggtaatttttgtatttttagtagagctggggattcaccatgttggccagcacaaagtgctcggattacaggcatgagccactgtgcctggccagtgcaagtgtctttagccagcttcatttactccctaactccttgcctcaggttctgcatccgtaaagtgaggtcactaggagtatttacctcagagggctgttgcaaggttaaagctggttatacaagcagagtacttggaacagtgtcagttacctggctggggctcagtaagtgctggctgtcctcattgaaaaggttcaagtgttgtgttttcctgtcacctgatctggaaagaggtcaaacagaggatcttttagccc

SEQ ID NO: 581930 - DNA, 633 bp, Homo sapiens
ttgttatacttaaatgtttaagtcactgttagtgattagcttattttgccttccttgaagcaatttgtcctaaatttccatatgtttgcatttgtttttgctgttctaaaattccttagttgctggctttgaccttttatgttgctgagttttacacatctattttctcaactgccatatcctaggaggcttggagtacccataatacagtgagcccaccttcctggtccccagacatttcaggaggtcgggaaatttttaaacccaggcagcttcctggcagtgccatttggagcatcaaartggtaaataaaattgcatttacgttcatatatcatttctgtctgatttgttttgccctactgggtgtaaagaattaaatctttcttttctagattgagcttccagaaacactttttaaatctaaaaattttaatgtaaagaaataatatgcttgcatttaaaaatcaagtatacatttttaatacctctttttatggttaattccttttgttgtgattactaccggttttatgagggagaagtccttgacatgtagaccaaaaggtaattaaggaccttttcattcatgatatcataaaactttgttgcttagaaaaaagcaaaagaaaa

SEQ ID NO: 581931 - DNA, 633 bp, Homo sapiens
ttgttatacttaaatgtttaagtcactgttagtgattagcttattttgccttccttgaagcaatttgtcctaaatttccatatgtttgcatttgtttttgctgttctaaaattccttagttgctggctttgaccttttatgttgctgagttttacacatctattttctcaactgccatatcctaggaggcttggagtacccataatacagtgagcccaccttcctggtccccagacatttcaggaggtcgggaaatttttaaacccaggcagcttcctggcagtgccatttggagcatcaaaatggtaaataaaattgcatttacrttcatatatcatttctgtctgatttgttttgccctactgggtgtaaagaattaaatctttcttttctagattgagcttccagaaacactttttaaatctaaaaattttaatgtaaagaaataatatgcttgcatttaaaaatcaagtatacatttttaatacctctttttatggttaattccttttgttgtgattactaccggttttatgagggagaagtccttgacatgtagaccaaaaggtaattaaggaccttttcattcatgatatcataaaactttgttgcttagaaaaaagcaaaagaaaa

SEQ ID NO: 581932 - DNA, 511 bp, Homo sapiens
ctttttaaatctaaaaattttaatgtaaagaaataatatgcttgcatttaaaaatcaagtatacatttttaatacctctttttatggttaattccttttgttgtgattactaccggttttatgagggagaagtccttgacatgtagaccaaaaggtaattaaggaccttttcattcatgatatcataaaactttgttgcttagaaaaaagcaaaagaaaaaactccattaatttattatgttcttatggagaagaaataccaaaattgtggcagatttcattgtctgtttaataccttaaaatgacaaggctttttcccccatgacattggttgatggctgtgccagtccttgaagtgagttaagtagtgtgatgcattttgaagagaaaaaaattaatttgaaaaagtattaactcaaaagttaaaatacttcattgactggagatgamagtttttcttcatattctatatttaatattctggaatatggctgtttaattcagactaatc

SEQ ID NO: 581933 - DNA, 658 bp, Homo sapiens
agaagtccttgacatgtagaccaaaaggtaattaaggaccttttcattcatgatatcataaaactttgttgcttagaaaaaagcaaaagaaaaaactccattaatttattatgttcttatggagaagaaataccaaaattgtggcagatttcattgtctgtttaataccttaaaatgacaaggctttttcccccatgacattggttgatggctgtgccagtccttgaagtgagttaagtagtgtgatgcattttgaagagaaaaaaattaatttgaaaaagtattaactcaaaagttaaaatacttcattgactggagatgaaagtttttcttcatattctatatttaatattctggaatatggctgtttaattcagactaatcaaggattttaaggaattctagattatactttattttctttcatgactggaagaactatttttttttaacctccctacctccccctgatatcatccaagatattgaggtataaatatacctcatttgacartttgataatatagaccaccaatttttacttaccttttttctgggtcagcatttcatgtttgagaaaataaattgagagattactgtagtcttgatttttaatcactgacttaatttttcaaaaatcttttataccaatttaata

SEQ ID NO: 581934 - DNA, 588 bp, Homo sapiens
aagaagtcagataaattatttccatttcaagtatttattattcagattatttaaagcaaagctttcacaaagccttttgtcagctttcctgtaatcctcaaataatttttcctggctggacgctttggcttactcctgtaatcctggcactttgggaggcagaagcaggaggatcacttgagcccaagagttctaggctgcagtgagctgtgatcacaccactgcactccaacctgagtgacggatcaagttcttgtctcaaaaataaaagtaataacaataataataaattttcctctaaatacaatggtgaatgaggtagaaatgttgagttcataagagaactgttgaatagtgaaggaaactgacttaattttaatgacaggaagaatactgttacacactagcaaaaatraacttttatgctgatgtagcagtacagaatatgcttccaacccagggacgctggagccaggcttgctagctaagcgaccttggacaagttacttaaccattttattcctcagcacactcatctcaaacgaggataataaaacctactatatgggattgttgagagtaaaaaat

SEQ ID NO: 581935 - DNA, 588 bp, Homo sapiens
aagaagtcagataaattatttccatttcaagtatttattattcagattatttaaagcaaagctttcacaaagccttttgtcagctttcctgtaatcctcaaataatttttcctggctggacgctttggcttactcctgtaatcctggcactttgggaggcagaagcaggaggatcacttgagcccaagagttctaggctgcagtgagctgtgatcacaccactgcactccaacctgagtgacggatcaagttcttgtctcaaaaataaaagtaataacaataataataaattttcctctaaatacaatggtgaatgaggtagaaatgttgagttcataagagaactgttgaatagtgaaggaaactgacttaattttaatgacaggaagaatactgttacacactagcaaaaatgaactttyatgctgatgtagcagtacagaatatgcttccaacccagggacgctggagccaggcttgctagctaagcgaccttggacaagttacttaaccattttattcctcagcacactcatctcaaacgaggataataaaacctactatatgggattgttgagagtaaaaaat

SEQ ID NO: 581936 - DNA, 616 bp, Homo sapiens
atagcacatattttctcaaagattacctttgccctcaagttaggttttatttttctagcagtctaaaggtcatgaaataaattataaaataaaaacagtgggtcttcaagctagakgatactgttttttttcttgcatggacaattattttaaaatattttggtttttctgcacttattatttaaatatgactccccacccccacttgaatctagggacattgtagttttctactgcagactttgtttctggtttatactgggaatatattgtttatcattttcagtgaaagcatccactggttaaatttccttttaaaaataataatggatctttacaatttctttgagctgctcagtgtgtataatgtgttgaattttctgttagtggttgggaggtagaaatagatactttatctctattttagccatttccataattatatatctcaatagccttgtcaatgcatcattagtcctatgactgaattaatgattacttttagtagtcacttagtttcttactggtgatgatgattctacttttgtgaatcatcttggatgattctctaaaatcttagaaagctaattttgttaatgctatgcatataacacat

SEQ ID NO: 581937 - DNA, 616 bp, Homo sapiens
atagcacatattttctcaaagattacctttgccctcaagttaggttttatttttctagcagtctaaaggtcatgaaataaattataaaataaaaacagtgggtcttcaagctagatgatactgttttytttcttgcatggacaattattttaaaatattttggtttttctgcacttattatttaaatatgactccccacccccacttgaatctagggacattgtagttttctactgcagactttgtttctggtttatactgggaatatattgtttatcattttcagtgaaagcatccactggttaaatttccttttaaaaataataatggatctttacaatttctttgagctgctcagtgtgtataatgtgttgaattttctgttagtggttgggaggtagaaatagatactttatctctattttagccatttccataattatatatctcaatagccttgtcaatgcatcattagtcctatgactgaattaatgattacttttagtagtcacttagtttcttactggtgatgatgattctacttttgtgaatcatcttggatgattctctaaaatcttagaaagctaattttgttaatgctatgcatataacacat

SEQ ID NO: 581938 - DNA, 613 bp, Homo sapiens
cctggtcaacaagagtgaaactcctctcgaaacaaaataaaggttatagtgaacaggcgaaattaattttaatgccttccattttgaccgatatatctaaaatattaccatttcaacatgtaatatgyaattatgtgctgtattttatgtttgcaggacatctcagttcagactaactacattgcagatcccaagtgtgtgtcattaaaatagtgatagatttgtgtgtgtacatacctataatattatcatttatagtttcttgattagaattctgcataatcaagtcttactaagacagctttattatattttctcattacttcttggtctaaaggaattctacctctaaagagagaatgagttgaataataaaatgtcatgactccattttgctgtagtatcttagcattaatatttggaattgttattctagaccttagcaaaaatatatgttttgattatgaattttctgaagctttccagttaagtgtaaaacaagtgaaaaatataacttcgtattttgtgtattttgctttttataggtgtctactgcagatatttcatcaaataaggatgatgaagaaaactctgtgctcgatatggttgtgtt

SEQ ID NO: 581939 - DNA, 530 bp, Homo sapiens
atgcttagttttttgtttttttttttttttttgagacgtagtctcactctttcaccaggctggagtgctgtggcacaatctcggctcactgcaacctccagctcccgggttcaagtgattctcctgcctcagcctcccaagtagctgggactataggtttgcgccaccacacccaggtaatttttgtatttttagtagagctggggattcaccatgttggccagcacaaagtrctcggattacaggcatgagccactgtgcctggccagtgcaagtgtctttagccagcttcatttactccctaactccttgcctcaggttctgcatccgtaaagtgaggtcactaggagtatttacctcagagggctgttgcaaggttaaagctggttatacaagcagagtacttggaacagtgtcagttacctggctggggctcagtaagtgctggctgtcctcattgaaaaggttcaagtgttgtgttttcctgtcacctgatctggaaagaggtcaaacagaggatcttttagccc

SEQ ID NO: 581940 - DNA, 478 bp, Homo sapiens
atgtttttccttttttctttctttgaatttaacttgttctttgtctgatttattgactgatgcttagttttttgtttttttttttttttttgagacgtagtctcactctttcaccaggctggagtgctgtggcacaatctcggctcactgcaacctccagctcccgggttcaagtgattctcctgcctcagcctcccaagtagctgggactataggtttgcgccaccacacccaggtaatttttgtatttttagtagagctggggattcaccatgttggccagcacaaagtgctsggattacaggcatgagccactgtgcctggccagtgcaagtgtctttagccagcttcatttactccctaactccttgcctcaggttctgcatccgtaaagtgaggtcactaggagtatttacctcagagggctgttgcaaggttaaagctggttatacaagcagagtacttggaacagtgtcag

SEQ ID NO: 581941 - DNA, 613 bp, Homo sapiens
cctggtcaacaagagtgaaactcctctcgaaacaaaataaaggttatagtgaacaggcgaaattaattttaatgccttccattttgaccgatatatctaaaatattaccatttcaacatgtaatatgtaattatgtgctgtattttatgtttgcaggacatctcagttcagactaactacattgcagatcccaagtgtgtgtcattaaaatagtgatagatttgtgtgtgtacatacctataatattatcatttatagtttcttgattagaattctgcataatcaagtcttactaagacagctttattatattttctcattacttcttggtctaaaggaattctacctctaaagagagaatgagttgaataataaaatgtcatgactccattttgctgtagtatcttagcattaatatttggaattgttattctagaccttagcaaaaatatatgttttgattatgaattttctgaagctttccagttaagtgtaaaacaagtgaaaaatataayttcgtattttgtgtattttgctttttataggtgtctactgcagatatttcatcaaataaggatgatgaagaaaactctgtgctcgatatggttgtgtt

SEQ ID NO: 581942 - DNA, 631 bp, Homo sapiens
attctgttctttcccacattctctctcctctgtgctcactcatatacaaaatgacattttctccttatagccaaaagaaagaaaacaagtgtcatatttaatgcaatcggtaataatcgagagtcagcactgctcactttcaagcatttcaggatagaggctttctggggaaccttttaagyggtatcgtgtgcttggttttaaatatggacaggtctcaatacttcactagttgtatctaaggttcttggttttttctttttaagaactcagtcttaataaaacttacatatttgaataaagtgtcatggccactggaagcaagcatggaggtatagctgtacagcagaggtcttaaactgtatactccacaaggaaatcttttctagtattgccataccatgtaatataaatactaacctcagtttcaataataggttgtgaaccatgagtgatttttataccattctcccctgcccttcagacatcactgtgttatatcattgtcagtaaaatgtcagtatagtaagcaaatcaacattatctccttcagaattctttgttgataactacactagtatttattttatagggtaatacaggtttttgtgaatttaggaatcaaaatgaa

SEQ ID NO: 581943 - DNA, 601 bp, Homo sapiens
aagtttttgtttgtttgtttgttttttaaattgtgcagaggtcagaaaaccaagggtcacggaacacattctaaccaccatgtatttttgtactgaccacaagctaagaaagattttcaatgttgaaaaaaatcaaaataaggtgttttgtcacacacactatataaaattcaaagtttaatatctaaacaaaaattcattagaaaccaaaaatttatgagaaacgagccaggttcattcctttacatattgtctatggctacttttgctctgcaatgtgtactactggttgagtagytgtgtctgagatcatatttgttgttctcattgcttcacactgctgctgggcttactacaagttacagtgatggagttacaactggaaagcatttccaatatgttacatattatagtagcactattttttcacatgctaatcatcagtgcatattcatcatgttggcataaggaaaaatggacttcaaatgacatgcttttaggcacagtggcatatggattattttgttacctaattacatggcaaaacatttcagttatcatgcagtgacacaaagaagactaagaacttatcacaatattt

SEQ ID NO: 581944 - DNA, 618 bp, Homo sapiens
agaggtaattgaatcatgggagcaggtctttcccatgctgttctcttgatagtgaataagtctcaagatatctgatggttttataaaggcgagttcccatgcacatgctctcttgcctgctgccatgccacataagacgtgcctttgctcctcccttgacttccaccatgattgtgaggcctccccagccatgtggaactgtgaatccattaaatctctttccttcacaaattacccagtcttgggtatgtctttattagctgcgtgagaacagactaatacatcactcaaccagttacaccagctgggacccaagtgccaacatctttatttcttaccccttgttatcaggccccatggaaaatctagcctaagtctcttgttttaagagaccaatataccgtgtgctggtttcccsttgaccttctcgccccaatccagacatagtctcgctccatatttttcctgctagaggagtctgctttgctcttatagttcattcactcattccacaaatatttactgagcaccagctacatgccaggcactgtctcaggcactaagaagcagtaatagaaacaaacaacgactaccctgcctccctggaacttatagtct

SEQ ID NO: 581945 - DNA, 593 bp, Homo sapiens
ataggcatgagccactgtgactataggcatgagccaccagcctggcccccaaacctgtttttggccatgctctgagcccatattatttctgcaacttcaagttagtatataagcttctgaacctcttttagggggttgggtctttattctgaacgctcccacgtatacacgttaaataaatttgtatgtcttttcttcgattaatctgccttttgtcagttatcaggaaacttcagggggcccaggccttgacccctacatataaaagtgtaggtctgatgcccagtagtcaaagaggtgacctgggccactaattaagttactctccctcagctacaaaccctgtatttggctgggtgacattggggccaggactctgcaaaccaggcttctgctctgccagctgctccttgctgggttctgccaatwagtgatgctatggggaaagctgcagggtgggagagggaacaggtacttgctccttcctggtttcttcttttacattcctgcaaaccccctgccactggcagccacagtgccttccccagcagcagtgaactccagtttgccacactgtcaatacttgcagatac

SEQ ID NO: 581946 - DNA, 593 bp, Homo sapiens
ataggcatgagccactgtgactataggcatgagccaccagcctggcccccaaacctgtttttggccatgctctgagcccatattatttctgcaacttcaagttagtatataagcttctgaacctcttttagggggttgggtctttattctgaacgctcccacgtatacacgttaaataaatttgtatgtcttttcttcgattaatctgccttttgtcagttatcaggaaacttcagggggcccaggccttgacccctacatataaaagtgtaggtctgatgcccagtagtcaaagaggtgacctgggccactaattaagttactctccctcagctacaaaccctgtatttggctgggtgacattggggccaggactctgcaaaccaggcttctgctctgccagctgctccttgctgggttctgccaattagtgatgctatggggaaagctgcagggtgggagagggaacaggtacttgctccttcctggtttcttcttttacattcctgcaaaccccctgccactggcagccacagtgccttccccagcagcagtgaactccagtttgccacaytgtcaatacttgcagatac

SEQ ID NO: 581947 - DNA, 515 bp, Homo sapiens
gtctgatgcccagtagtcaaagaggtgacctgggccactaattaagttactctccctcagctacaaaccctgtatttggctgggtgacattggggccaggactctgcaaaccaggcttctgctctgccagctgctccttgctgggttctgccaattagtgatgctatggggaaagctgcagggtgggagagggaacaggtacttgctccttcctggtttcttcttttacattcctgcaaaccccctgccactggcagccacagtgccttccccagcagcagtgaactccagtttgccacactgtcaatacttgcagatacaccctctttgcacctcattgcatscctgcctcagaagtctgcatattagacccatagggccctgcctctgagctcagaggcaccagcatcagtgcccagcatctctcctctgagggctggtttttctttgtgtgcctctaccctcccttaaactaagtttaaataattccaacctattccctttgtttcctcaac

SEQ ID NO: 581948 - DNA, 539 bp, Homo sapiens
atttgactttgatttgattcaccctgttgctcacatacgatttaatgatatctaaggaaatttggtggtatccaatggggctctatttacttcaactaccattttatttatttactttttgtgcccccaactagaatccctaatttggtctaccttttacctggctggcttcctttcttctgcccactctgcattggactttgtcatgatgatggatttgctacactgaagttgaagttatcatcactgacaaatgctagggattatttgggatggtttattcctcttgtataaggtaaataacatcagycagccatagcattactggaagtataaaaaggtgccatcaaattttatcaggtatggaaggatccagtatcaaacagcacctgataatttctgctttttcagaattcgtaggcattgtgtagactattttctgacaactttccaaatcaattaacgaatcacagcatggaaagatctctttccctctctttgttgtatcacacctggaaagcaccatatgggagaatgcc

SEQ ID NO: 581949 - DNA, 512 bp, Homo sapiens
gtaacaaaactgcatttctaccccttacatttatacaaaaaaaggattctatctccaagtaaagttatattctattaccggaagttaggacttcaacatatgaattttagagcagaggtccccaaccctctggccacggacccactaccggtccttggcctgttagaaaccgggctgcagcagtgactgagcattacctcctgagctccacctcccaacagatcagtggtgacattacattcttataggagcgcgaaccctattgwgaactgcacatgtgagggatctccattgtatgctccttatgagaatctaactaatgcctgatgatctggggtgaagcagtttcatcccaaagccatcccctgcaaccccgggtctgtgaaaacattgtcttccacaaaaccagtccgtgatcccaaaaaggttggggagcactgttttagggggacaaaattcataggactacatcaccattatatccataacactcaacacgatgcctaacacat

SEQ ID NO: 581950 - DNA, 415 bp, Homo sapiens
gggaggatgggtaagatttcaaaaggtgacaatgagagatgagggggggcggcgttctagcaggagaaaacaggaaaagcaaagtatgttygaggagatcccatggcaagttcagcagaatgattactagtttgggttggacactgggcaaagctggaaaggagtaataagcattttagctaggagaggtactgattcttctctggactagagtccaagcagctaccatgtcaaccatgtttggagtaaaggtgtgtttgactgtactgggcaatctacattttttttaatggaaatttttggcttctcattccctttctggaagatctgtcaacaatgctggagctggagctgattggcagctgcccctgttaagtgggatgttaactgtccagttggccatagtccccaccat

SEQ ID NO: 581951 - DNA, 415 bp, Homo sapiens
gggaggatgggtaagatttcaaaaggtgacaatgagagatgagggggggcggcgttctagcaggagaaaacaggaaaagcaaagtatgttcgaggagatcccatggcaagttcagcagaatgattactagtttgggttggacactgggcaaagctggaaaggagtaataagcattttagctrggagaggtactgattcttctctggactagagtccaagcagctaccatgtcaaccatgtttggagtaaaggtgtgtttgactgtactgggcaatctacattttttttaatggaaatttttggcttctcattccctttctggaagatctgtcaacaatgctggagctggagctgattggcagctgcccctgttaagtgggatgttaactgtccagttggccatagtccccaccat

SEQ ID NO: 581952 - DNA, 585 bp, Homo sapiens
gtaagatttcaaaaggtgacaatgagagatgagggggggcggcgttctagcaggagaaaacaggaaaagcaaagtatgttcgaggagatcccatggcaagttcagcagaatgattactagtttgggttggacactgggcaaagctggaaaggagtaataagcattttagctakgagaggtactgattcttctctggactagagtccaagcagctaccatgtcaaccatgtttggagtaaaggtgtgtttgactgtactgggcaatctacattttttttaatggaaatttttggcttctcattccctttctggaagatctgtcaacaatgctggagctggagctgattggcagctgcccctgttaagtgggatgttaactgtccagttggccatagtccccaccattcccaatatactgagagggagaacaaaagttgtgacttattgtcaagtttttcttatgacagagtatcataatctccaagatgatgcatggtcatattgttttgttcttatgctgtaggtcacggaaaatacagttgacttttcttatatcaagttcacttcactcgtttgtgtgaactt

SEQ ID NO: 581953 - DNA, 585 bp, Homo sapiens
gtaagatttcaaaaggtgacaatgagagatgagggggggcggcgttctagcaggagaaaacaggaaaagcaaagtatgttcgaggagatcccatggcaagttcagcagaatgattactagtttgggttggacactgggcaaagctggaaaggagtaataagcattttagctaggagaggtactgattcttctctggactagagtccaagcagctaccatgtcraccatgtttggagtaaaggtgtgtttgactgtactgggcaatctacattttttttaatggaaatttttggcttctcattccctttctggaagatctgtcaacaatgctggagctggagctgattggcagctgcccctgttaagtgggatgttaactgtccagttggccatagtccccaccattcccaatatactgagagggagaacaaaagttgtgacttattgtcaagtttttcttatgacagagtatcataatctccaagatgatgcatggtcatattgttttgttcttatgctgtaggtcacggaaaatacagttgacttttcttatatcaagttcacttcactcgtttgtgtgaactt

SEQ ID NO: 581954 - DNA, 597 bp, Homo sapiens
atgggaggatgggtaagatttcaaaaggtgacaatgagagatgagggggggcggcgttctagcaggagaaaacaggaaaagcaaagtatgttcgaggagatcccatggcaagttcagcagaatgattactagtttgggttggacactgggcaaagctggaaaggagtaataagcattttagctaggagaggtactgattcttctctggactagagtccaagcagctaccatgtcaaccatgtttggagtaaaggtgtgtttgactgtactgggcaatctacattttttttaatggaaatttttggcttctcattccctttctggaagatctgtcaacaatgctggagctggagctgattggcagctgcccctgttaagtgggatgttaactgtccagttggccatagtccccaccattcccaatatactgagagggaraacaaaagttgtgacttattgtcaagtttttcttatgacagagtatcataatctccaagatgatgcatggtcatattgttttgttcttatgctgtaggtcacggaaaatacagttgacttttcttatatcaagttcacttcactcgtttgtgtgaactt

SEQ ID NO: 581955 - DNA, 510 bp, Homo sapiens
aagttcacttcactcgtttgtgtgaactttttcagcattagagatcatgagccctgctctagatagggaaaggctaagtaactttccaaggccacagggaagtcagtgcctgacttgtcaatacaatgcagcaggtccattctcatctgtgttaagttaaaaagagaacccggactgtccctgtgtccatgcggcatggtaggaagcacactcctgcccaccaaattctgcttggtacccaccaaccttgctgggtcctggatcttaagattgctgtccagaaacctaaattaatgcttaagctggattactgyatgagtctaacagaggggtgagggagagaacccacctgcctactcacagaatttcttaaaggtccatccacctgtacacaaaggaaaacacatgtcaacaatgtttccttttactccttggtatttacccaaaggagtcaaagcttatgtccacacacaaacctgtacacagatattcatagcagctttatttgta

SEQ ID NO: 581956 - DNA, 647 bp, Homo sapiens
cgaaactgctctatatcatgtcatgatggtagagacatgtcattatgtatttgccaaaacctayagaaccctaatgtaaaccaagagcgaaccctaatgtaaaccatggactttgggggataatgatatatcagtgtaggctcatcaactgttacaaatgcatcattctgttgggggatgttggtagtaggggaggctgtgtctgtgtaggggaaggaggaatatagaagatctctactttctgctcaattttgctgtagcctaaaacttctctgaaaaataaggtttacttaaaaaaaaattctttcaacagcagtcagtaatggtgcttcctttcctggaggttcctgagttaaaatagtgaataaagagatagtaggcagccataaaaaggaactagatcatgtcatttgcagggacatggatggagttggaagccattatcctcagcaaactaaagcaggaacagaaaaccaaacattgcatgttcttactcataagcaggagctgaatgatgagaacacatggacacatagcagggcaacacacactggggcctgtcggtgtatggtcaggggaggaagagtaccagaaagaatagctaaaagatgctgggcttaataccttggtgatgggttgatgtgcag

SEQ ID NO: 581957 - DNA, 544 bp, Homo sapiens
atttgccaaaacctacagaaccctaatgtaaaccaasagcgaaccctaatgtaaaccatggactttgggggataatgatatatcagtgtaggctcatcaactgttacaaatgcatcattctgttgggggatgttggtagtaggggaggctgtgtctgtgtaggggaaggaggaatatagaagatctctactttctgctcaattttgctgtagcctaaaacttctctgaaaaataaggtttacttaaaaaaaaattctttcaacagcagtcagtaatggtgcttcctttcctggaggttcctgagttaaaatagtgaataaagagatagtaggcagccataaaaaggaactagatcatgtcatttgcagggacatggatggagttggaagccattatcctcagcaaactaaagcaggaacagaaaaccaaacattgcatgttcttactcataagcaggagctgaatgatgagaacacatggacacatagcagggcaacacacactggggcctgtcggtgtatggtcaggggaggaagagtaccag

SEQ ID NO: 581958 - DNA, 623 bp, Homo sapiens
tgtaggctcatcaactgttacaaatgcatcattctgttgggggatgttggtagtaggggaggctgtgtctgtgtaggggaaggaggaatatagaagatctctactttctgctcaattttgctgtagcctaaaacttctctgaaaaataaggtttacttaaaaaaaaattctttcaacagcagtcagtaatggtgcttcctttcctggaggttcctgagttaaaatagtgaataaagagatagtaggcagccataaaaaggaactagatcatgtcatttgcagggacatggatggagttggaagccattatcctcagcaaactaaagcaggaacagaaaaccaaacattgcatgttctyactcataagcaggagctgaatgatgagaacacatggacacatagcagggcaacacacactggggcctgtcggtgtatggtcaggggaggaagagtaccagaaagaatagctaaaagatgctgggcttaataccttggtgatgggttgatgtgcagcaaattaccatggcacacatttacctgtggaacaaacctgcacatcctgcacatgtacccctgaactaaaaataaaagttgaagaaaaaaaagataggattttttgataa

SEQ ID NO: 581959 - DNA, 602 bp, Homo sapiens
ttgttatgtaaagaaggtcatgtcatgcccatacttcaaaaccatccaggtctcttctcatctgtatctagaatgatcatggcctcttagtagatgatgtgacctctacaaagctcgctaatatcacctctcatcttgaggcactctctccttcactggttgttttttcttcaatcgtttaccaatttcttggccatcaagtttttccccatcccagagccctgcttacaatttctcgtccctctctcaggaacattcggtccctcccaatttccactcaagttcctgcccctcccttcaggcctctgcttcagtccactttcttagaggggtcctccctgaccatttcatccccagaagtgctcatcacccccacctcattgctctttgtaactccctctgttcatttccttcacagtccttctgatgagccacgattattttgygtattcactttttcacttttaaatggcctgcttctcaccctggattgtaagctacacatgacaaggacagggacagcatctgtcatgcttatcaattgtgtatacagaacccagcctcaagccagacacagagcaggttctcgatacatatttgat

SEQ ID NO: 581960 - DNA, 564 bp, Homo sapiens
tactcaaaactgtcaaggtcatcaaatgcaaagaaagtctgagaaaatgtcacagcccaaggagtctgagacctgatagcaaaatgtaatgtagtgtccttaatgggatactggaacagagaaaggatgctgggaaaaawtctaatgaggtccaaataaattaagaactttagttaataatgaagtatcaatgtttgttcatatgttttgacaaatgtgccatggtaacatgagatgttaacaagaagggttgctgggtgtgggatagacaggaacattctgtactatctttgctacttttctgtaaatctaaaatgattccaaaacagctgatttaatacaaaaaagaacctttcttacagaattgtaatcacaaacgagcctttgtatgctataaagtgcctagcctatgcatggtaggcacttggtatatttagtcggtttggccaccattggcaatagctgtattcacccttaacccttccaatccatcctctgtgtgagccagaatgatgtttatgtaatgctcatctgaacttctcatccctcctcccaatatgtctc

SEQ ID NO: 581961 - DNA, 623 bp, Homo sapiens
ctccacctttttttccttgcctactctccgtcttccactgccccaagagtaatccagaacacaaacctgattacggtgctcccttcctaagtaacctttagtggctccccatagcctgtagaggtagttttcttttttaaaagttgtgtaacagtttttttagaaggaaagtttatggaaggatctttatataaattataattaatttatcaatgattctgcatccagtggaggacaaatatgacacagctttatttttttccagtttttaccttcagcattgctgtgccagaactccctcttccatctaatgactccttgtatagacttcttagctttccagtcgctttcaaaaacccagtctcatttacaatgtcaattttatatccaacttaaagctcataacctccctgcctcttctgtgactagcttttccagggtcaatgcagggagttgaaaagtcttgggcagtgctgacggggaaaggcaaagttcattttacttagttgggctggtgagtgcaatctcctctccagttatttcactayctctccattggtcccactgtgtggtggcagctaagtgctggtgctctcatgagagacatggatgcgttacttggg

SEQ ID NO: 581962 - DNA, 546 bp, Homo sapiens
tggatgcttctgaaatgagatgacaggctgatgatcttgacaagagctactaatgattcatcacaaaagaatctcaaacgttgtatttctctaaaacttcctgcacagtggccttgaaattttgtcattcttggacttgatcagggacaagtgtgaacctcagaacttggatttcttttatgaaaaaccrtcaagatgcgaggacttggctgctgggtccccatcacttggaaaacatttactgccacaaacactgtatatggtacagagttaggcactagggggatcatgttgagaggatgtaaactgtcttccttgagcttacagctactggggagaaagatctataacagaacatcaaggtaggtactgtaatggaagtataatgtgatgcaaatccttcctgagagaacaagggtggcttcccagaggtggtgacctttgggatgagggtctgatggataaagaagagtttgccaccaggttgagttggctgagatagggccactgctcttttctccttcccatggaaaatactgtaggcaa

SEQ ID NO: 581963 - DNA, 646 bp, Homo sapiens
aaagtaccaatttgtgattttcaaggtattgtacagatacgacctttctttgcttgaattcagtgtaagaatccatcaagatgaatagcctgtggaaccttcagagtgaccaggagactcttttatgtctgtttacttggatgaagccagattctctctgctgagcctaatatagggttttaacacaaacacacacatacatatctatctatctatctgtctgtctgtctgtctatctatctatctatctatccatctatctatctattgctctctttctctctctctctctatatatatatctcatataatgcaataatagaaaaatkggtattaggattagggataaatgaagttaaagtatcctaagatccatgacttgtccactaagtggaaagggaatgaatttgaaatatactacaataaatttagaataaatgaaaagaaatagactagacttgtagattgcctgctattacccacaggtgtatactcaaggaacctgggcatgaaccaggatacattatttgttcatcctaaaagtgtagagaaacatcacatataattaagcaaatacgtacaatataatactggcaaagggtgctataatgatcatgcacaatttgctaataaaagcagttagaat

SEQ ID NO: 581964 - DNA, 534 bp, Homo sapiens
ataggtgctcaataagtatttattgaattagtgatcatatgtattttgcaggacctttcttttaaaaagattgtggcaaaacaatggaccctctctgtagaaacaacttttttagtggttatttaccatgaaaataacatggaaaataatatataaaaggtaagcatagtgtatacagacatactcttctgttttgaaaaaaggaagctgaatgacgataataacagacacaagagcctgaacagtactgaattataaaaggaaagctgaaaattgggctcacacctgtaatcccagcactttgggaggycaaggcaagtggatcacctgaggtcaggagttagagagaaaattggccctgactcatagttgggactcagtaaatgtgtaatggacttcaccgtctctaaatgtaagagttgtagagcactttacaattgccacttggtaataccagttactcaactgttctggcctttaaaaaatatgactttaaaatattgatatgaaacaacaagatttattgcaatacct

SEQ ID NO: 581965 - DNA, 534 bp, Homo sapiens
ataggtgctcaataagtatttattgaattagtgatcatatgtattttgcaggacctttcttttaaaaagattgtggcaaaacaatggaccctctctgtagaaacaacttttttagtggttatttaccatgaaaataacatggaaaataatatataaaaggtaagcatagtgtatacagacatactcttctgttttgaaaaaaggaagctgaatgacgataataacagacacaagagcctgaacagtactgaattataaaaggaaagctgaaaattgggctcacacctgtaatcccagcactttgggaggccaaggcaagtggatcacctgaggtcaggagttagagagaaaattggscctgactcatagttgggactcagtaaatgtgtaatggacttcaccgtctctaaatgtaagagttgtagagcactttacaattgccacttggtaataccagttactcaactgttctggcctttaaaaaatatgactttaaaatattgatatgaaacaacaagatttattgcaatacct

SEQ ID NO: 581966 - DNA, 493 bp, Homo sapiens
taagtatttattgaattagtgatcatatgtattttgcaggacctttcttttaaaaagattgtggcaaaacaatggaccctctctgtagaaacaacttttttagtggttatttaccatgaaaataacatggaaaataatatataaaaggtaagcatagtgtatacagacatactcttctgttttgaaaaaaggaagctgaatgacgataataacagacacaagagcctgaacagtactgaattataaaaggaaagctgaaaattgggctcacacctgtaatcccagcactttgggaggccaaggcaagtggatcacctgaggtcaggagttagagagaaaattggccctgactcatagttgggactcagtaaatgtgtaatggacttcaccgtctctaaatgtaagagttgtagagcactttacaattgccacttggtaayaccagttactcaactgttctggcctttaaaaaatatgactttaaaatattgat

SEQ ID NO: 581967 - DNA, 504 bp, Homo sapiens
tatgaaccttgtcattcttcagttgtcagtagaaatacttattttccagtacatttcaaggacagttaaatatgaaaagacggtgttcaaatctttgtctctgacctctgaaaatatgcttcaaacagtaaaaatacaatgagcaagttacaacaatcacagttatatattagttgaagatcagttatcacactgtcaaatatatgtgcaaattttacctggtttatttcatcttagaggagcagaaaatgtttccttatgaacaaaaattatttcataatagaacattcatcayttatgtaatataacctctttcagagcagacagaaagcattattacagctgaaaggcgacttttgaaaggactaaaactgaaagtcaattttgccttttcatttttaagacttccccaaatcacacacaatttctaaacattattttccactattatatatacagagaataagtcataaaactaaagatttcacctgtcatatgaattta

SEQ ID NO: 581968 - DNA, 590 bp, Homo sapiens
tcttaaataaacataattaacataaaaataaacacagaaaatgtaaattttaattagcagaaaaagtaatgtaagtaaatgaagtaaaggggaaaagaacattaaaaagaaagcggaagagatcaaatttatgaaataagatgacaaagaatttctaatatgttcaggaactaacataaatttcacgttagccataaacatcagagaatctcaatttaagttaaaataaaatctaaaaaattatttacaagaagcacactcaaaaaaataaatgagaatttataccatgcagttagggaaagggaagaaagaggaaggatgaagaaaggaaggaaggaagagagggatgaagggagggatgaaagaagggatgaaaggaagaaaaggaaggaagagaggaagaaaaaaawttagtaccattttaatatcaagcaagataaaatgcatggaaaaaatatcctgagagacaaataggaacggcagtatactgctaaataaaaaatatagcaagaagatgtaaccctccagaccatatgtaaacccaatatataccatcaaatagacagcagccagaaaagaaataaatacta

SEQ ID NO: 581969 - DNA, 590 bp, Homo sapiens
ccatcaaatagacagcagccagaaaagaaataaatactaaataatagtgtgtggatgttccagaactttcctctaaagaagtaattaagcagaaaaacagagtaaaagaaaatgtgaataatagaagtaaaaaaattaacctgataaaaagtttacacctgtgaaaacaactttaaaacaatgcaaatgaaatmtattctgaataaatgaaaacgtattccatgttcttaggtggagcaactcattataaatctttcaatgtttcccagattaatctgtaagttgagtacaactgtggaaataaatacggaccaacaaaataaaaacaagaaaagaccattgactcagagcttgccccacttagggagtcagccaccatcacttttgttttggtagagactaaacgacagcagaggagtgggaaaactttatagtggaagaaacggaaggcttcagttgcaccctgattgaaagctattggtatgaggaagctgtatgcagctaactaaaaggagggcttcttatgtgattgttagggtgcgcatatttagctttttctggttggttctatgctggaagtaggaacaaca

SEQ ID NO: 581970 - DNA, 632 bp, Homo sapiens
tgtgtttaagtatcccatctgtttgtttctttttttctccttttctgtatatgtttgaatgaattgagtactgtttagtatttaattttatctaatctattgcttttttagctatgtatctttgtattatttttatgtttgtgcttgctctaaaaatataatatgcattcttagctcaccatggcctacttcgaatcaattcaatgaaatttgcccaataaaaagaagtcttaccatagtgtaatgtcatttaaccctggttttgcccttttttctattgttgtcatatatttgatttttacctaagttacaatttcttgtttctaaatgttggaggggccttagataaatcattgcatcttttcagtttttgatctatacttgttctcttaatggtcacttgcaatctcatggctttaaaaatactgatgatcctccaaattatatctgcagccctgacctctcctatgaaytttagactcatgtattggaactactgcttgatgtattaattagacgcctaataggaatccaaatatctccttctaaaagtgctgttcttgcaatattctttatctcatttaattgtctttcattattgtcatttctcggaaccaaagttgttgtcctca

SEQ ID NO: 581971 - DNA, 594 bp, Homo sapiens
tgatgttgataaaggatagcgatagacagaacaccttctaaggagcttggattactatatgacagaggggctgaaagagtgaagcaaaatggtcctgattgcacttgaagaaaagaaaatgatgagttatgttctgcatatactgagttagatgcaagctttaggaatctagcacttttttttcatcagagtgaagaatgtgtgaagatggtacacatagatgtttagatatctactatgcaactgcctctgttcttcaaagatagccatataaccaagttacaatcaccttgattataggaaactcagactttccaaaatgttctcattcttaccatgtctgcatgccaatacacatttcaactttcctcagacaatgaagcctgtgstaccatcatatcgcttaacccaaagtgtctcaggctgtgcccagctccaacaccgtcctgagtttccctcactctggtcactgtcattgctgctaaggttgaatctcaggtgggctgtttttcataagagccagatgcacatagcagagttgggggtgaggtcttttgcaaattgatatccacatccatgctgtgggttttgtag

SEQ ID NO: 581972 - DNA, 594 bp, Homo sapiens
tgatgttgataaaggatagcgatagacagaacaccttctaaggagcttggattactatatgacagaggggctgaaagagtgaagcaaaatggtcctgattgcacttgaagaaaagaaaatgatgagttatgttctgcatatactgagttagatgcaagctttaggaatctagcacttttttttcatcagagtgaagaatgtgtgaagatggtacacatagatgtttagatatctactatgcaactgcctctgttcttcaaagatagccatataaccaagttacaatcaccttgattataggaaactcagactttccaaaatgttctcattcttaccatgtctgcatgccaatacacatttcaactttcctcagacaatgaagcctgtggtaccatcatatcgcttaacccaaagtgtctcaggctgtgcccagctccaacaccgtcctgagtttccctcactctggtcactgtcattgctgcyaaggttgaatctcaggtgggctgtttttcataagagccagatgcacatagcagagttgggggtgaggtcttttgcaaattgatatccacatccatgctgtgggttttgtag

SEQ ID NO: 581973 - DNA, 604 bp, Homo sapiens
ctggtcagcatcttatatgccattggctttggcattctgacttacttttggcaacagagttgtttcattactaactctgtagaaggttttagaaatggatactatagaaaatgacaccaaatttcaatcaaataaaatttccaggggaattttgatcagtttgctgctggcaagatgattataatcttttgagaatgaaattcacatggaaaggtgatcatgaccacattctcacagtgagctccatctggacataagcagctccctttcagaaaaacaggtctgataacccctactgagagggctttccacatcaaggcaaatttcatgtgagccaacataaactatgacatcaaaaaacaccaacttccaaaaggtggtaacctcttactataatgcagagaacagaacacaatatttcagcttcacttttgataygcctatgatatcattactgttctaggtctgctccaataaattgttcattttttttttaaattactgtaagctataggaattgtttttgtttcaaaacgttttaaaacaggatccttgtagcgggagctcttaaatcatcagaattttcttccttgttattctataa

SEQ ID NO: 581974 - DNA, 604 bp, Homo sapiens
ctggtcagcatcttatatgccattggctttggcattctgacttacttttggcaacagagttgtttcattactaactctgtagaaggttttagaaatggatactatagaaaatgacaccaaatttcaatcaaataaaatttccaggggaattttgatcagtttgctgctggcaagatgattataatcttttgagaatgaaattcacatggaaaggtgatcatgaccacattctcacagtgagctccatctggacataagcagctccctttcagaaaaacaggtctgataacccctactgagagggctttccacatcaaggcaaatttcatgtgagccaacataaactatgacatcaaaaaacaccaacttccaaaaggtggtaacctcttactataatgcagagaacagaacacaatatttcagcttcacttttgatatgcctatgatatcattactgttctaggtctgctccrataaattgttcattttttttttaaattactgtaagctataggaattgtttttgtttcaaaacgttttaaaacaggatccttgtagcgggagctcttaaatcatcagaattttcttccttgttattctataa

SEQ ID NO: 581975 - DNA, 527 bp, Homo sapiens
aaaaaaaaaaaaaaaaaagtcttttttgtaatgcaatacctggcagtgaccactttaacaatgtcaccaaaattagtttcactgataattaaacaacctgacaggtcacattctccaacattatgtgacttraaggtcacagcatctcctgtaaattatttttgccaagtatgtgtagtccagatttcttcaagcctgaggctgaatctctatcatttaagaaatataaaacatagagaaacaagttaaataacacaggtaagtaataggcaaatccagaatgtaggcacacggtaaggcaactggcctggttttcccaaataaacaataatatgcatactatggtgggctgcagaatggcccaccacgatgtccatatcctaatccttggaatcagtgaatgtcacattttatggcaaaaaaagactttaaatatgtgtttagggtttttttgttttgttttgtttttgagacagagtcttgctttgtcacacaggctgaagtgcattggcacgatctcagcttac

SEQ ID NO: 581976 - DNA, 527 bp, Homo sapiens
aaaaaaaaaaaaaaaaaagtcttttttgtaatgcaatacctggcagtgaccactttaacaatgtcaccaaaattagtttcactgataattaaacaacctgacaggtcacattctccaacattatgtgacttaaaggtcacagcatctcctgtaaattatttttgccaagtatgtgtagtccagatttcttcaagcctgaggctgaatctctatcatttaagaaatataaaacatagagaaacaagttaaataacacaggtaagtaataggcaaatccagaatgtaggcacacggtaargcaactggcctggttttcccaaataaacaataatatgcatactatggtgggctgcagaatggcccaccacgatgtccatatcctaatccttggaatcagtgaatgtcacattttatggcaaaaaaagactttaaatatgtgtttagggtttttttgttttgttttgtttttgagacagagtcttgctttgtcacacaggctgaagtgcattggcacgatctcagcttac

SEQ ID NO: 581977 - DNA, 587 bp, Homo sapiens
gtgataaggagttaatatccaaaggggttaaagaactcacataactcaagagtagaaaaataaataacttggttgaaaaatgggccaaggacctacgtagatatttctctaaagaagacataaatgtcacaaacaggtatatgttggtgctcmacatatgaaaaagtgctcaacgtcgttaatctttagaaaattgcaaattagaaccactatgagataccatttcacacccattaagatagctattatcaaaaaatcaaaatataacaaatgttggtgaatgtatggagaaaatggaactctaaaagataacaaatcttgatgaggatgtagagaaaagggaactcttttacactgttggaggaaaagtagatccagccattaagaaaaatggtatggagatctctaaagaaattaaaaacagaactacagtatgatccagcaatcccccttctgggcatatacccaaagaaaataaaatcaatacctaacaaagatatctggatgtctgtgctcattgcagcattatttacaatagccaaaatgcaaaccatctaaatgtctgctgacagatgactagacaaaga

SEQ ID NO: 581978 - DNA, 598 bp, Homo sapiens
gaactcttttacactgttggaggaaaagtagatccagccattaagaaaaatggtatggagatctctaaagaaattaaaaacagaactacagtatgatccagcaatcccccttctgggcatatacccaaagaaaataaaatcaatacctaacaaagatatytggatgtctgtgctcattgcagcattatttacaatagccaaaatgcaaaccatctaaatgtctgctgacagatgactagacaaagacattgatacacacacacacacacacacacacacacacacacacacacacacacacagaggaatattagtcatccctaaaaaagaatgagatagaaaatggctgattagaagctactttggttcatgacacttatggagagaaatgaaaatgggcaagtgaattcagcaccttcagttgaaatatccaggttcttgtattgggattgactaggcaaacagcccagcccgcagagaaagaagaaaagcaggaagggataatggcccagctggaagcagcacagagccaaagaactcccactcccagttaaaggaagtggtgagtgattgtgcgacccgtcccaagaaactgtgc

SEQ ID NO: 581979 - DNA, 549 bp, Homo sapiens
tgtgataattggtgtacacatgctgtcaaattgagccttgaaataatttcattaatatttccttttcacagataaaaaaaaatgcttatgagaaaaaggaagccactcactatgatgtagttacaaggagacatagttgggatttaaggcaattagttgattccacagcaccaggactttaatgaattaggatattttcagtaatcagtatctttgggttgagtcaagctaaccaaatccacaagagattatgaaataaactagagtttcatagtattgtcaaatttgtcaaattctgccgtatatgtcaaaagcaacataatattttactgattgaccagcatactttcctctgagaaaactattaactaatactaattagttaataaacaatgaaataattgtttactgaacagagagttagttaaataatcttgatggctaaattccaaaagccagatacatccatctctaccmttatttttctgggactactgtaaaaaattaccacatattaggtggcttaaaacaacagaaacgtattctctc

SEQ ID NO: 581980 - DNA, 643 bp, Homo sapiens
aacagcactagcggttgctggaaaaatgcctataaagtatatatttatttgtttttattgatgacttttttctttatccaaaattactctcaatcttaatcatgatctcaatcttaataacaggctagctagagctaaaatgaagaagatggagtgagggcatacacaaaaggaaaaggaagttatacattctttctaaaagaaaaaataaatataaaatatctggcaaaatttacttgtaacaaagaaaatttgtccagggcttttagacaaaaattagcctatttaaggaaataacatatctcaattttgctacttcaatacacgtcatcagattgtacaggtttaagatttgtttgttaaagtcgagccattgatctctttgctgtttcttttgtaccttcctctcctctcctctcctctccsctcctctccaggctcctctgctttcctttcctttcctttcttttctctgtttctcttttttttttttttttttgtctgagatggagtctcactctgttgcctaggctggagtgcagtggcttgatctcggctcactgaagcttccacctcctgggtttaagtgattctcctgcctcagcctcccaagtagctgggattataggtgcccaccagcacg

SEQ ID NO: 581981 - DNA, 560 bp, Homo sapiens
ctgtactctattcacatctacctgttttatgtcagaaagatagtctccaagctctgagatcgttttctccacttggtttattcagctattaagacttgcaattgcattgtgaagttcttgtgttgtgtttgttagctccatcaggttggttatgttcctctctaagccagttattctggttatcagcttctgtattgttttatcatgtttcttagcttctttgcattgggttataacatgctcctttagctctgggaagttcattattaaccaccttctgaagcttacttctgtcaattcggacatctcagcctcagtccagtttgtgtccttgctggagaggtgytgcaaccatttggagaagagacactctgtttttttgagttttcagtgtttttgcatttattttttttcatctttggggcttatctacctctgatctttgaggttgctgatgtttggatggggtttttgtggattcttttttgctgagttgttttctgttggtttatttttcttttaacaattaggccactctgtcatagggttgctgcagtttg

SEQ ID NO: 581982 - DNA, 518 bp, Homo sapiens
gtgtttttgcatttattttttttcatctttggggcttatctacctctgatctttgaggttgctgatgtttggatggggtttttgtggattcttttttgctgagttgttttctgttggtttatttttcttttaacaattaggccactctgtcatagggttgctgcagtttgctggggatctgctacagaccctagttgccttggtttttcccattcctggaggtatcaccaatgaaggctgcaaccagcaaaaatggcagccaactccatcctctggaatctccatctcagggggttacagacctgttgccagcttgaacacacctgtagggggtagctagagacccttgttggggagtctcaaccgatcaagaggaacgagatcaggaacccacttaaagaagcagtctggctgtgttttggaagagcatgtatgctgcattgaggggaacmcttccttttcctgaccattttggattgccaaagcagcaggctggaatggctgagttgaccaaactg

SEQ ID NO: 581983 - DNA, 611 bp, Homo sapiens
aaaaaaacaagaaacaaaaaaaggtttgaaaaggaaatataggygtttcatttcgcttaaaacatttcaaattaaattttctaattttccactatatattgtggcatttacaactacaacataaaatgacatgctgattagtttatctgggtttcagcaagtgattgattgattaaaataaaatataaaataaaaagtgaaagaggctttctatcaatcctaaaaagaaggtcatttatttggaggcagaattcaacaggaattttgggaattattaggcctataacatggctgagacagagtaatataatcagggtttcaaatcaggaaaattctagatttcattttcttccacttggaaaacagcgctcaaatcattgagaaagagagaggcagcaaatatatgagcagtcgtaaagaaagtttttctgttccaacaatacctagggtggcttggccaccaagtttatataaggtgttatttccagaaaaacagaagacatacctggacaaagagagtagaaagcccaacagaaatccaattcatctgactgtttttgctaaatattctgcacattcattttctctagtgcaggtagaactaatgtata

SEQ ID NO: 581984 - DNA, 648 bp, Homo sapiens
ggaaaattagtacatttacactattgcctttcactgaagtctgatatttgtcatttataatgttctacacatcagcaacattacaacctagacttatcttcttttttactgtctttcagctttccaaccataagtcaagatgccttatttttgaattgaaacrgtaaatatcccctaaaatactattaaaaaacaaatttgtaaataaataaacaaatacaaagattgtactaaacaactagcaagaaaagtacacacggcgggtttgattattttataaagtgattggaggaaaagaattttggtttgattctttttggggtttttttgacctatgagtttatattatattggaatcaactgccttatataaaaactctataattactgtcttttactctctcctccactgggaggaagactttactacttcactagaaaaataaaaacacagatgttataagtgagatgttctttagaattggacaaatatttataataaatttgcaaagagattatgaataaattgtatgctatgacttatcacatatgggtttggcatgttgaagagaggaatgaatactctatgtggctggtgtttcccacccaatttcccctgttagcatcagtgttccttgtccagtttat

SEQ ID NO: 581985 - DNA, 591 bp, Homo sapiens
gaaaaaaagctcaacatcactgatctttcccgttcttgtctcacttccttgctccccaccaggctcgtttacctcctatatcctgaggccaacattatgctattaattaaaaattaattacttttaattgcaaagccacaattacttttcgccaagctaatagtaagcccattttgcggggcaggaaaacgaaggttcgccattataagcaataactgcctatgaacacagatattcctctctgtggaacccttgctattggacattttatctttcaaaatctttttgtgaagtttactcttaagaagcaacaaaacatggaggccagcaatattaaaaatgaatttttattgtgctaatcctatgccaggtaattttcaagtgtcacctcgtttagccttcccaataattctatgaagtaagtgctattattaaacatgtttaactaaaaaactaagacccaaagaagttaaataatttggagtggtggtatcagcacttgaaccagcttgaattgaaaagggcaagsctttaaacccttcactgtgctacctccacttccccagaagagcagtgctttagaattagctt

SEQ ID NO: 581986 - DNA, 587 bp, Homo sapiens
aaactggccagttgtggttttcttttacatgcagattaacactttaacaaaagtttactgttacaaagcccgtaacatgaattttccaccaaaatattctcttaattaagcactttctaggcaattagagaaaaaatggaataggcaaatttaagagagaaaataattaggaagatataaaaagaaatgctagacactcttttaatagtgcctgatctgtgagctttcaacttgtataagcaaaccactgctgtcattttctatggctcacacagaaggccccagctgtccttcagtggagcctttggtattaccccaagggacatagagagctactaaagtgaagttgcctgcccaaggaagccartgactttgagcctgggtaccaatacttactatgttgcttcttctgccaggagccacaaccatcatttccatactaggtaccaaccatcaccaaattctcctaagacttgttaggagcttcggcctcactaaccaatccttctcatttcataacaagtagtccctactgctccagacctcactgatacagtgctattatttttcttaatataatgcatcac

SEQ ID NO: 581987 - DNA, 507 bp, Homo sapiens
actatgttgcttcttctgccaggagccacaaccatcatttccatactaggtaccaaccatcaccaaattctcctaagacttgttaggagcttcggcctcactaaccaatccttctcatttcataacaagtagtccctactgctccagacctcactgatacagtgctattatttttcttaatataatgcatcacttcataactcctctaaagctccattgtaaatagaaaccatagaatttcaaatattctatttatcctgccatggggaatgccatgtatcctaattttttattcagaaactctgtttactccatttctagaatcctgtcaacatggatgaggagagaaatatattcatattctgtagtggaaagattttagcttttcttgttagtgctaacaacaggagataagggtttatgagagttgttcctgacatcccctgttggaacctgggmtatattttgctacagaaatcataatgaaattgcttttgtttacatagg

SEQ ID NO: 581988 - DNA, 459 bp, Homo sapiens
acatagaaatgtttgccacttcatattgcaatgcacagaaccaggtctttagctgttgaaagatcttacatattctataattttcttgttgatgaagttttgcaatttgattgtgttctatttagttttgattacaaataactttctaattccactgatccagaaaactgttttttttttttaaataaaacaattagtttctgcaaagaccatgtctgtatttgtttgyactaatagacatggtgggcattgaaaaacgtgctgatattgaaattattattaaatatcagtgatatggttggctgttttcacaacccaaatctcatcttgaactatagttcccagaatccccatgtattgtgggtgggagggacccagtgggaggtaattgaatcatggaggcagttacccccatgttgctgttctcatgatagtgaatgagttcttatgagttccgat

SEQ ID NO: 581989 - DNA, 617 bp, Homo sapiens
tttagttttgattacaaataactttctaattccactgatccagaaaactgttttttttttttaaataaaacaattagtttctgcaaagaccatgtctgtatttgtttgtactaatagacatggtgggcattgaaaaacgtgctgatattgaaattattattaaatatcagtgatatggttggctgttttcacaacccaaatctcatcttgaactatagttcccagaatccccatgtattgtgggtgggagggacccagtgggaggtaattgaatcatggaggcagttacccccatgttgctgttctcatgatagtgaatgagttcttatgagttccgatggttttataagaggcttttcccccttttgcttgtcatttctttttgttgccaccatgtgaagaaagacttgtttgcttccctttctgccgtgattgtaagtttcctgaggcctccccagccatgcggaactgtgagtcaattaaatgtctytcctttccaaattacccggtctcaggtatgtctttattagcatcgtgatagcaggctaatacaatcagcataatcatcattacatcctttgttactaggtttcctcagctatgcaatagctatatga

SEQ ID NO: 581990 - DNA, 576 bp, Homo sapiens
atttttcaaaatgaacaaggtccttgagaaataaaggattatgtaaagcaaccaaatttataaattattgatactcatgagagggaaggaaaaaaagtaagcaacctggaaaacatattcaaagaaataaatcaagaaaacttccttaatcttgctagagaggtagacatccagatacaggaaacctagaggacacctatgagatacaaaacgaacatcatcaaggtatatagtcaccagatggttcaaggtcaatgccaaagaaaaaagtcttaaaggcagctagaagaaaatatcagattacatacaaaggaaaccccatcaggctaacaacagatttctcatcagatactttataagccagaagagattgggggtctattttgagcatttttaaagaaaagacattccaaccaagaaatttcatagcccaccaaactaagattcrtaagtgaaaaagaaataaatattttctagtcaagcaagtgctaagggaatttgttaccactagatcagccttacaagagattcttaaaggaattctaaacatgaaaatgaaagaacatatcaatatta

SEQ ID NO: 581991 - DNA, 576 bp, Homo sapiens
tgagctgagagctcaaaaatcaactagaatttaccagtcttttcctggtaaaacagacattattatctgaaaatgttcactggtgtgaaactttaaggaagtaagtaataaaggcagtaaatgaagagttagatctttccagaaacatgactctgaaatcttcagaagattggtgaatacactcctctacttaattttttaaatcttggtctgaagggttgagataagttagagacaaataacttttagtagaacaccggtttttcaggggctgaagaataaataccctatagcaattactgtaccatatgcttaaaatttactaagaaagtagatcttatgttaagtgttcttaccttcaaaaataagaatataaataaaggggctgggaggaaactttggaagatgatgaatatgtttacggctttgatggtggtgatggtttcacaggcatgtacttatcaarttgtatacattaaataggtacagctttttatatgttagtcatctcaacaaagtggtttttaaaaataaatactaaaatcaaatgaacaaattctcatattacaatattta

SEQ ID NO: 581992 - DNA, 613 bp, Homo sapiens
catatgccaaaagcaattaccatattcctgattgctaattagactggcacaggtttcaacttatctacagatggcaacttaaataatagctaatttttaagctacgttttgaattttgtaggtttcaatttaaatatttaaagctatgagatcatctgttaatgtattcactataacaatgagcacaattctgtcatataccaggcttggacatatggaagaacaagactggtttcccaagccacatgaaaaaatcattcacatttctggaaagcctaccctacactgagactcacattgagttgagagaagtatgcatctgagaaatatttcactcacccaccccccagagaacccctgccacatacgtgttccagtaataagaacaagaaccccagactagaagtcagatatctttcattttggccttctactttttattagttgggtgataatgatcagtcccagagtcactgatgcctcagtttatccatctgtagaatgaatggtttaaaaccrttttgtacctttattcaccagggccccctctgagaatgttatcaaagcttgtactcgcctcccccaaaatgaacatattcattgcatacatttt

SEQ ID NO: 581993 - DNA, 486 bp, Homo sapiens
tccctagtctcagaataaagcatttgggaactttagggatttgtatgtgattttttaaaatactacattggaaagaatacaaaatgaaatagatatcatagatgaatatcttctaattgttttaacagggtacatatacctttattagagtaacaagggaaaagttacmccgggcagttttgtgttataattatgaaagagttactcttgagtaatataagaaagagataacaaaaagatctgattcaataagaattattctgatgttaagaatacaaagcagacttctcatgtggccgcagttgcaacagaaagtcaactcaacaggcttcaatttctatgatttcatttctctctacagtctgagctaaaaaaaaaaaaaaaaaaagaaagaaaaaagaaaagaaaagcctatttcacagacaatgtagagacaggtagaaacttccttgatgtatcaaatttttaaacttaagcacaggtgcg

SEQ ID NO: 581994 - DNA, 486 bp, Homo sapiens
tccctagtctcagaataaagcatttgggaactttagggatttgtatgtgattttttaaaatactacattggaaagaatacaaaatgaaatagatatcatagatgaatatcttctaattgttttaacagggtacatatacctttattagagtaacaagggaaaagttacaccgggcagttttgtgttataattatgaaagagttactcttgagtaatataagaaagagataacaaaaagatctgattcaataagaattattctgatgttaagaatacaaagcagacttytcatgtggccgcagttgcaacagaaagtcaactcaacaggcttcaatttctatgatttcatttctctctacagtctgagctaaaaaaaaaaaaaaaaaaagaaagaaaaaagaaaagaaaagcctatttcacagacaatgtagagacaggtagaaacttccttgatgtatcaaatttttaaacttaagcacaggtgcg

SEQ ID NO: 581995 - DNA, 640 bp, Homo sapiens
tagtcaacaaacaagaaaggttgtgcaatcccatcaacactatccccaggtgctgcttattccattttgctctacagtctcttttgttattttttttcttcctattgaatgtcactggcaagaagtcaaagagtccattccaggtttcggttgctgaagcagtgaagcagatggtgtcagaaaccaatacaggagggaaatacagatcacacacagcttagtttatttgagacttacaaaagatctcattaggtctaaagtggttagagcagggtgatagagaaggagttgttagaaaccccatgtcttattctgaggagaccatttcaagacttagttatgataatttctttttttttttttctttttgagatggagttttgctcttgtcacccaggctggagtgcaatggcctgatctcagctcactgcaacctctgccgcctgggttcaagcaattcttcctcaccctcctgagtagctggaattacttacaggcatgcatcaccacacttggctaagttttgtactattagtagagacagggtttcaccatgttggctaggctggtctygaactcctgacctcaggtgatccgctcaccccagtctcccaaagtgcttggattgtaggcatgagcc

SEQ ID NO: 581996 - DNA, 576 bp, Homo sapiens
gggtataaaatggaggcttataaaaaacaaaaaagtaggtcaaagcattttataaagcggttggcttttaaaatgcaaaataaacatgtcaggatttaagtacaagattaggagaggccaagtgccaaactctaaagcactggtggtatttgaagaataaagacttggatttctgtttgggttccagctgaacagtgtgtactcaaatgaattacttgggttctttgactttagttagctatctttagtttaaaatgcacagcattgcttcattgattgtacatttatttatagtgcctactatgtgccaaaacctgaatagaagatgcaaggatgaataaaatamctttcatcaatgaccttagaaggcatggtaatataatatttatattatagaggcatgcaatgattgaacaaatcaaaagacaagacaaatcaaaagacaagtgatatggagacacacattgctattgtgtagttgaagactgcgggtggtaaaaagaagtgtgtacatggggtttccttcttagatagagcttttgtgtttctgttttacaaatctgtggcagaaatcca

SEQ ID NO: 581997 - DNA, 509 bp, Homo sapiens
gattaattactcacagcattttgtcagtggaatgttcatttactgcagagccaagctcamaaaggaaaaaaataaataaaacagtccacattgtacacattgtagcaggcatcagaacatcaaacaaggaagatatcaaaagctcctctgaggaggatgatggctgaaaaacataaacagactcccttcaaagactaacctactcaacaaggtagcgccttataccagatagtgggtagagaacactcatttctttgattcaacttttatgctgttggtttcttcttttgtttttaggttaccttaatattttgatgacacacagctaacagatttgccaggagcattctaaaggtttcatcaaaatatgaaatgataaagaatagctgcaattgttactctgggttggtactgagagcaatgacttctgtgttgaactgaggggaaagaaaatctttatctcctcaaaatcatttcctttcacctcctggaactcctgcatttgcatc

SEQ ID NO: 581998 - DNA, 594 bp, Homo sapiens
acaataatgtgtaaacactttaagccagagatctggtttcctgactatacgagaagtcttttagatcytaggcaatacattttggatatttatagttttcacaaggtttaaggtgaaatgatgattcacagaattgaataaattgctaacctgctgacacagaaaactgtcctgggtaacaaccagtcagtttgtgagtaaacctagctgactgtccattatccagatgtcaattcagttttgagctgtccccttatttgtgtttatgcatagagaagtcttttaattttttttcatgaaaagtgacctgaaatgaatgtctgtgactaatgcaacttgcctccatttgctgcataatttatttcatcaccatctttgccttataaggcaagccacatgtttattatcactgctttgttgatttttgtagatactagaaatatagatcagtttatggttaatgttggcacagtgatgaaataatgataatgtgggttagaaattatttggtggtagaatttattgtaaaagctttataaattatttttaaaataaaatcattaaggatttgagtcacttacattgttcagttat

SEQ ID NO: 581999 - DNA, 594 bp, Homo sapiens
acaataatgtgtaaacactttaagccagagatctggtttcctgactatacgagaagtcttttagatcctaggcaatacattttggatatttatagttttcacaaggtttaaggtgaaatgatgattcacagaattgaataaattgctaacctgctgacacagaaaactgtcctgggtaacaaccagtcagtttgtgagtaaacytagctgactgtccattatccagatgtcaattcagttttgagctgtccccttatttgtgtttatgcatagagaagtcttttaattttttttcatgaaaagtgacctgaaatgaatgtctgtgactaatgcaacttgcctccatttgctgcataatttatttcatcaccatctttgccttataaggcaagccacatgtttattatcactgctttgttgatttttgtagatactagaaatatagatcagtttatggttaatgttggcacagtgatgaaataatgataatgtgggttagaaattatttggtggtagaatttattgtaaaagctttataaattatttttaaaataaaatcattaaggatttgagtcacttacattgttcagttat

SEQ ID NO: 582000 - DNA, 594 bp, Homo sapiens
acaataatgtgtaaacactttaagccagagatctggtttcctgactatacgagaagtcttttagatcctaggcaatacattttggatatttatagttttcacaaggtttaaggtgaaatgatgattcacagaattgaataaattgctaacctgctgacacagaaaactgtcctgggtaacaaccagtcagtttgtgagtaaacctagctgactgtccattatccagatgtcaattcagttttgagctgtccccttatttgtgtttatgcatagagaagtcttttaattttttttcatgaaaagtgacytgaaatgaatgtctgtgactaatgcaacttgcctccatttgctgcataatttatttcatcaccatctttgccttataaggcaagccacatgtttattatcactgctttgttgatttttgtagatactagaaatatagatcagtttatggttaatgttggcacagtgatgaaataatgataatgtgggttagaaattatttggtggtagaatttattgtaaaagctttataaattatttttaaaataaaatcattaaggatttgagtcacttacattgttcagttat

SEQ ID NO: 582001 - DNA, 553 bp, Homo sapiens
ttgcacgaaaataaaaccacaaaacacacctataaaatgagttctatttttgtaatcattttcagatgaggaaaccaaggaacagggagattaaatgacttgcccaaggtcacacagccaataagtagagaagccaagggtctgggggaaggaggactagggaatcagcgctcaatgagtacagaaattcagatggaaaagaaaaagtttaagagatggatggtggtgatggctgcacaaaaatgtggatgtatttcatgtcatagaagtgtgcatttaaaaaatagtcacagtgggaaatttatgttatgtgtattttaccacaataagaaaatggttaaaaaaawtttttttttctctttttgagactgagtcttctctgtcgcccaggctggagtgcagtggtgtaatctcagctcactgcaacctccacctcctgagttctagcgattctcctgcctcagccacccaaatagctgagattgcaggcacccgccaccatacccagctaatttttgtatttttggtagagatggggtttcgccatgttggc

SEQ ID NO: 582002 - DNA, 323 bp, Homo sapiens
ccgaggagtgaggggtggagtcatgggacagggagaggaagaaactacattcttgtgttgagttgyctctttggaaggaggctttagactgacaggtgttggtggacccactgaaatgcaggatttggggccgggtgcagtggctcacgcctataatcccagcactttgggaggctgagatgggcagatggcttgagctcaggagctccagaccagcctgggcaacaaaaaattagctgggtggcacgtgcctgtggtcccagcaactctggaggctgaggtgggaggatcactggagcctgggaggtggaggctgcagtgag

SEQ ID NO: 582003 - DNA, 323 bp, Homo sapiens
ccgaggagtgaggggtggagtcatgggacagggagaggaagaaactacattcttgtgttgagttgcctctttggaaggaggctttagactgacaggtgttggtggacccactgaaatgcaggatttggggccgggtgcagtggctcacgcctataatcccagcactttgggaggctgagatgggcagatggcttgagctcaggagctccagaccagcctkggcaacaaaaaattagctgggtggcacgtgcctgtggtcccagcaactctggaggctgaggtgggaggatcactggagcctgggaggtggaggctgcagtgag

SEQ ID NO: 582004 - DNA, 323 bp, Homo sapiens
ccgaggagtgaggggtggagtcatgggacagggagaggaagaaactacattcttgtgttgagttgcctctttggaaggaggctttagactgacaggtgttggtggacccactgaaatgcaggatttggggccgggtgcagtggctcacgcctataatcccagcactttgggaggctgagatgggcagatggcttgagctcaggagctccagaccagcctgggcaacaaaaaattagctgggtggcacrtgcctgtggtcccagcaactctggaggctgaggtgggaggatcactggagcctgggaggtggaggctgcagtgag

SEQ ID NO: 582005 - DNA, 606 bp, Homo sapiens
gaaaattgcctaacaaaacaccgtttagtaaaagagagaagttttgagatcaaaatgtttccaaaattttatatgtagtgacaaagacactcttgtacaatcctggggaaatacaaatgagagcaactgtttttttgaaaaaatatggttgtacttgtcaagagccttagaaatgtctataasaggcaatctacagaactgtaaatggctagtaagcacatgaaaagacgttcaacatcactaatgattaggaaattaaaattaagaaattgctaaaagttagacaaataatatctagtattagaaaagatatggaaaaggggtactctcagggtaaattagaaagcaaattagcatgtattttgtacatatactttgacacaacaattttcttctggaaaattatcaaaaatacttgaacaaatgtgcagggataaatgtaaaagcatgttaactacagcattactttaattgtgaaaagctggagataactcaaatatcctcaatttggtaatgattacatgaattatggtaaatccatactattgaatactatgcagccattaaaaagaatgagatagatcctcatgtaagaaacacggtagg

SEQ ID NO: 582006 - DNA, 497 bp, Homo sapiens
ttttagttcatggcaagccaaggggccaggggtggactctgagtcctagtttgccaaatcgtgctttagcctaatgaataatcagaattatyagaaaaatattatgactttatttatttttgcattatttataaaaaccaaaaaacagtctatatactcaacaatagcagactaataaagcaaacagtataaatagtggcatgtccatatgatgcaactttagctattgaaataacattcagaaatgatttttaatgacggtgaaattgtttgttataaaattaagtgaaaaaactgaatatcaaactggaagaacagcaggatctcaaccatggaaaaaaatgcacatgaaagggatccaaggacttttagttaaaggaggcagattgaacacatacatttaactcaatccccactctctctcccataaagacaaagaaaatgagaagaacacagaacacattgtgaaagctggaaaacaaaggaacaagtaactg

SEQ ID NO: 582007 - DNA, 497 bp, Homo sapiens
ttttagttcatggcaagccaaggggccaggggtggactctgagtcctagtttgccaaatcgtgctttagcctaatgaataatcagaattatcagaaaaatattatgactttatttatttttgcattatttataaaaaccaaaaaacagtctatatactcaacaatagcagactaataaagcaaacagtataaatagtggcatgtccatatgatgcaactttagctattgaaataacattcagaaatgatttttaatgacggtgaaattgtttgttataaaattaagtgaaaaaactgaatatcaaactggaagaacagcaggatctcaaccatggaaaaaaatgcacatgaaagkgatccaaggacttttagttaaaggaggcagattgaacacatacatttaactcaatccccactctctctcccataaagacaaagaaaatgagaagaacacagaacacattgtgaaagctggaaaacaaaggaacaagtaactg

SEQ ID NO: 582008 - DNA, 564 bp, Homo sapiens
accatatgaccttggacctctgtgtatttcagggtgacaagggctttgaaatcaggtggtctgtgatgaggcaactgagacccatagcgagaaaatattggcccaaggtcaggagctaggatgcctgcctgtccttgtgcactcaaatccttgatctttttcctactccaccctaactcctgttccaggcacagataagtgcgtggagcagggcaggaatgagggtggggcaggccggggcacagcagtgtcatctagatcttttgataagaaaagcaagactctacggctatctttctaaagaaaatccttttgatgatgagcaatagctcagctaattaagatgattggagactagatactaatagaaacttcactgggcaccatttacaaaatgataatggaatcttcccrtcttcctgttcccccaggtcaggatgtccttagatacactgcataacctgttgtcagacaagctgcctagaagtcagcctcatccgactcagtccccacacttgactgtgacttcacattagtgagcagctgatgggctctcctgaattc

SEQ ID NO: 582009 - DNA, 562 bp, Homo sapiens
aaaccacaatgagataccacattactcctgcaagaaaggccataatttttttaaaaaatcaaaaaataatagatgttgatgtggctgtggtgaaaagggaacactttcacactgctggtgtgaatgtaaactagcacaactactatgaaaaaacagtatggagatcccttaagaactaaaagtagatttaccttttgatccagcaatcccactactgggtatctacccaaaggaaaagaagtcactatatggagaaaagaaaaaaaaaaaaaaacacttgcacacatgtttatagcagcacmattcacaattgcagcaatatggaaccagtccaaacgtccattaatcaatgagtggaaaaagaaaatacagtatatgtgtataccatagaatactactcagccataaaaaggaataaaataatggcatttgcagcaacctagatggagctggagaacattattctaagtgaagtaactcaggaatgggaaaccaaacatcacatattatcacttataagtgggagctaaactattaggatgtaaagacataagaatgatac

SEQ ID NO: 582010 - DNA, 187 bp, Homo sapiens
atgatgacgccactgtgacccggggcagcagacaggtgggagaagtggtctgactctgggtgtattttaaagatacaaccaacaggatttcctggtggattaartgtgccgtgtgagagaaagaggagtcaaggatgttcagcctaggaagctagaccaatggagccaccaacacctggaatggggg

SEQ ID NO: 582011 - DNA, 187 bp, Homo sapiens
atgatgacgccactgtgacccggggcagcagacaggtgggagaagtggtctgactctgggtgtattttaaagatacaaccaacaggatttcctggtggattaagtgtgcsgtgtgagagaaagaggagtcaaggatgttcagcctaggaagctagaccaatggagccaccaacacctggaatggggg

SEQ ID NO: 582012 - DNA, 353 bp, Homo sapiens
tcctgggcttaagccatccttccacctcagcctcccaagtagctagaacgacagscatgcacaaccacacccagctaatttttgtattttttggtagagatggagttttcccatgttgcccaggctggtctcaaattcctgagatcaagtgatcctcctacctcagcctcccaaagtgctgggattacagttgtgggccacctgcccagccaaaatattcttaaatactggaaatattggtgacacatcccagatccttgggaggctgaagtgggaggatcacttgagcctaggaggttgaggatgcagtgagctgtggttgtgccactgcactccagcctgggtgaccgagc

SEQ ID NO: 582013 - DNA, 353 bp, Homo sapiens
tcctgggcttaagccatccttccacctcagcctcccaagtagctagaacgacaggcatgcacaaccacacccagctaatttttgtattttttggtagagatggagttttcccatgttgcccaggctggtctcaaaytcctgagatcaagtgatcctcctacctcagcctcccaaagtgctgggattacagttgtgggccacctgcccagccaaaatattcttaaatactggaaatattggtgacacatcccagatccttgggaggctgaagtgggaggatcacttgagcctaggaggttgaggatgcagtgagctgtggttgtgccactgcactccagcctgggtgaccgagc

SEQ ID NO: 582014 - DNA, 353 bp, Homo sapiens
tcctgggcttaagccatccttccacctcagcctcccaagtagctagaacgacaggcatgcacaaccacacccagctaatttttgtattttttggtagagatggagttttcccatgttgcccaggctggtctcaaattcctgagwtcaagtgatcctcctacctcagcctcccaaagtgctgggattacagttgtgggccacctgcccagccaaaatattcttaaatactggaaatattggtgacacatcccagatccttgggaggctgaagtgggaggatcacttgagcctaggaggttgaggatgcagtgagctgtggttgtgccactgcactccagcctgggtgaccgagc

SEQ ID NO: 582015 - DNA, 507 bp, Homo sapiens
tggcttcctctcaccccagcctagccctggatcctggaaggggctccagcagaggcagcccacgagcagaatgcactttgaccccacttcaatggcctcctgaaagtagggggagtgttcctggcagagggtgaagagctaatttctgatcatcctgagagaaggcttgggaggtgacagaatgtccctgcctttcctacctgcccacccaccccttccaccctgtcccaaccttctcactggtgggaagttctcagtaggaaagagatgagggtttggtcaaaaattccctttcaagggtaggcgttattggttaattttactaatcacaaattgagaatcagagaagtaaaactgtcagaggtgtgtgaccagagcaactccatcttgaatagaagctggggaaaakaaggctgaaacctactgggctgcattcccagacgcttaaggcattctaagtcacagaatgagataggaggtcagcacaagatacgagtcataaagacc

SEQ ID NO: 582016 - DNA, 419 bp, Homo sapiens
ccttcctgtgtccaaggcattcatattccagtcaattgttggggtgagagaagtgaattgctgaatgctgattaagaaaaccatcagaaagtgtaaagcagagaattaaaacagggcagggagactgggagtaaccaagggtgggaggtagttgctttcggttgggagggcagggacatttttttggagggagaagcagttcagctgagctctgggtgaagaaggagcccgtcttgccaagacccaggggaggcttcccccagcagaggccccaaggtgaayggggcttggccaggaaccaaaaactgaaagggaccagagaggaatcctcatcctgccttctctgaccttgctttgagcttttacaaactgctttaaaaatctcttcattttaaattaaaaaaaaaaaaaaatagggg

SEQ ID NO: 582017 - DNA, 613 bp, Homo sapiens
agtaatgaaaaaacatccaaacaaagaaaagtcctggacatgatggctttactgttgagtttcatcaaacacttaaaaacctgaagaagaggaaacacttccaaattcattttatgaggccgtcattaccayagtagcaaagccagacaaagacactaaaagcaaaggaaattatataccaatacccctgatgagcatagaagaaaaatcctcgaaaaatactactaaaccaaattcagtagcacattaaagagattgtttaccatgatcaagtgggatttacaccagggatacaatgatactttaacatacacaaatctataaatttgatacaccacataaacaaaatgaaggagaaaccccatatgatcatcacaggaaatacagaaagagcatttgacaaaatttagcaccctttcatgaaaatactctccacaaattcgctatacagggaatgtacttcagcacaataaaggtcatatatgacaaacccacagctagcatcatactcaacagtgaaaagttgcaaactttccccctaagatcaggaacaagacaaggtgctcactcttgccactggaagttctagccagaacaattaggcaagagaaga

SEQ ID NO: 582018 - DNA, 622 bp, Homo sapiens
aatgatatggaaggggagaagggacgtgctgggtagaggaaggcatggtccccggtaggctccactcccataaagctaggtgaggacaggcatttgctgcccaaatgttgcatttcccaagaccaccctcgcctgccatgcccccatcttgtgcctataaaaacccgggacgctagcaggcagacacacagcggctgcacgtcaagaggagcagatcagyggaagaacacacaggcagctggaccttgagaggagcatatcagcggaggaacatatcagcggaggaacatgtcagcggaggaacatgtcagcggaggaacgtatcaggggaggaacacacgggtggctggacgttgagaggaatgcaccaacaggcaatagcatgctggcaggccaccaaaacagcagaactacatggagtttggtgggggcagtcagaggagagcgcagggtgccaagcggcctgaaccaggggaaaaccatctcccttctggtttccacatctgctgagagctacttccactcagtaaaaccttgcattcattttccaagcccatgtgtgatccaaggatcacaggatacagaaagccctctgtccttgcaacaaggtaaagagtctaat

SEQ ID NO: 582019 - DNA, 651 bp, Homo sapiens
caccatgccagctaattttttgtatttttagtagagacgaggtttcactatgttgaccaggctggtcttgaactcctgacctcaggtgatccacccatctcggcctctgaaagtgctgggattacaggggcgtgagccactgtgcccagtgcctagttttacctacttctgtgcacgagtgtcccttccccatcaatgttagccagcttgtggtccgaggaacttgaaawgggaagggaaactccttccttcactcctagttagagctcttcacagataaatatggtggagtctccttcagcacaggtataatgaactatagactatgaacttcattatttgtttatgggaagtcaatgaagccattaagacttttatctaccattatcaaccaaggctttcagtgatgtatgtcttgtgcgaactcagaatataacatttcacaattcgtaggatgtggtagccgctttataaccatacaatactgttcattcaagaaagatttattactttgtgtcagacactgtgtgatgtaagtcaaatgatagcacacacacacacacacacaaatagatttcatttggatgtatcacattttaaaaaggtgaaaacatggtgctagttagtgaaaacaaaatattttatttttat

SEQ ID NO: 582020 - DNA, 564 bp, Homo sapiens
gtgccacctttccctcagcctaatattgtgtaagcactcaataaacacccattgattgatgtctaggatttatttatttatttattttttattgtttttattttttgagacggagtctcactctgttgcccaggctggagtgcaatggcgtgatctcggctcactgcaagctctgcctcccggattcacgccattctcctgcctcagcctcccgagtagctgggactacaggcgcctgccaccacgactggataattttttgtatttttagtagatacggggtttcatcttgttagccaggatggtctcgatttcctgacctcgtgatccgccygccttggcctcccaaagtgctgggattacagcagtgagccaccgcacccggccaatgcctaggtttttatatgcttctagtcctgggagttgatggtacattctgcataaaaaacccttgtcagcttaacattgttcatcctgaagctgacctattatagatgtccatttgtttgtctttacatctcagatgaagcaagcacccacaaaaaggttcgtgtgtgtgtgttt

SEQ ID NO: 582021 - DNA, 576 bp, Homo sapiens
tataattctttgtaaccttaggctatgcaaaaacttctttgtagatacactgccaataatacaattcataaaaataataatttaataaataagacttcatcagaagtaaaatcttctacccttcaaaagacattgtgtagggaataagacaagccacagactggaaaaatatttgcaaagcatatatctaataaataacttgtrtcttaaatatataaaggactcatgatactcaatgatatgaaaacaaaccaattaaaaaaatagaaaaatgattgaacagaatcattactaaagaagacatttgaatagcagatgagcatatggaaaaacgtacaacatcatttacccccatggaattgcaaataaaccattatgacttaccattatacacctatcaaagtttctaaaattaaaaagtttgatgatcaaaagtgttgaccaggatatggagcaaatagaacttgcatacactactggagggaatgtaaagtgcgcagactcgttggaaattgtttggcaatttcttaaaaacttaaacttatactatcatgtgaccgagccataccactatta

SEQ ID NO: 582022 - DNA, 419 bp, Homo sapiens
gtggggtgattaggaaactttcatacttgttcaaggaagccatggcagggtagggggatttaatcctatttttattacaagaccttttataaaatgagtgttcaagttgattttaaaacatctgattagtttgtatttaaaacgttaatatctcttaaagtcttcttgaaaacagtaagatgatttgtgcagggatccaatttacatttctccctgaagttctcatattttcctgttttcctttcacttagcagagaacattccactcatttgtaatgcaaaagcagaccgggagcttaggttttttgaatagaatgatttaraactcatgttctgctctctgggcagaggggataggccagcatcagctgggcaaactgctaatctctctggtttgtctgtttcctgcagtgggggat

SEQ ID NO: 582023 - DNA, 592 bp, Homo sapiens
gactgcaggtgcccaccaccacacccagttaatcattatttatttttgtagagatgggggtcttactcagttgcttaggctggtctcaaactcctggcctccagcaaaatcttccaggcttggcttcccaaaatgtcaggattacaggcatgagccaccacacctggcctatttttaaattgttatatacactatttttttagacatcatgctattgcacacctaatagactacagcatagtgtaaacataatttttttgagacaggttctcactctgttgcccaagttggagtgcagtggcatgaccatggttcactgtagcctcaacctctcaggctcaagtgatccctctgtctctgctttccaaagtgctgagattacaggcatgagcaactgtacctggcctataacttttatatgcagtgggaaaccaaaaaaaattgtgtgattaagtttattgcaatatttgctttgttgtgttggtctggaactaaacccgcaatatctctgaggtatgcctgtaytgtattaaacttagaagtgaaaatgaagacaatgttagtaactttaatttaattctaaaaattttta

SEQ ID NO: 582024 - DNA, 563 bp, Homo sapiens
gtattcctctgtcttccttttttcttttcttcttttatctgtattccttctttcagtgttcaaacaatgtagcaattcaatgtgataaaatgttatttcatgtatgctgttgatatttctgccaacatattgaattcgtgttatgtcactgagggaaaatgaagggctctgatrtagtgggacatgttgaaaattaagcagtcacaactatctgagaattggctgaaatctgatgaatttattgatctaaggtttagttctgtgattaaagtgattaacaacagactgaagcatcattagtcattatgttatagttgacatctgtctttctcatgaccaagtataaatggtcaatactttaagatatctaaaaatggaaactggtgattgtatctgcaccttcttttaggtgtttgcccaactattgtgaacacggtggggagtgttcccagtcctggagcacctttcattgtaactgtaccaacactggttacagaggagctacttgccataactgtaagcggaacacatctgctttttcttgcccctgtgatggtttcttt

SEQ ID NO: 582025 - DNA, 578 bp, Homo sapiens
aagggtagtggagtttggggagaagtaggagattgttaatgggtacaaaatacagttagaatgaataagacctactataggatagcacaagagggtaactatagtcattaataattgtacattttaaaataactaaaatagtttaaatggattgtttgtaaaatgaaggataaatgctttagaagatgaataccccattcttcatggtgtgattatttcactttgcatgcctgtttcaaaatatctyatatacccacatatacacctaccatgtatccatacaaattaaaaattgaaaaaatgtaatatatgtattcatactcgataaacttatttattccacttggatagagaaacatttagaatgtcattagaccacagacaataatggttaatattatatttattatttaaataattataaaccagccttatataaatgttagaaaaaaatcaatatagatgaaacatccttttatgaggcaaagaataaaatcaaactgtgaaatatttttgatattaagccatcaagacttactaaaatccttgtgtatgtggttcctttatgtataggaaaa

SEQ ID NO: 582026 - DNA, 433 bp, Homo sapiens
aatacccccatggcacgctctcttgcctgccaccatgtaagatatgccttcgcttctcctatgcctgctgccatgattgtgaggtctccccagccatgtggaacagtgagtcccttaaactgctttcctttataaattacccattctctagtatggctctattagcagcatgaaaatagactaatacactttgctaactgtgtagtcttggataattcacttctttctgagtttcagttctctcatcagtaaaatgaagaaaaattaagtacctctgatagaaaagccatgaaatgagatgatgtgtgaaaagtaattcacatgagctctgcaaagcaataagctaccaaaatagttatttgtttttattctgggatttgattaaaaatattrtttctcaaaaggcaaatttttctaaagtacttagggaact

SEQ ID NO: 582027 - DNA, 419 bp, Homo sapiens
cttcgcttctcctatgcctgctgccatgattgtgaggtctccccagccatgtggaacagtgagtcccttaaactgctttcctttataaattacccattctctagtatggctctattagcagcatgaaaatagactaatacactttgctaactgtgtagtcttggataattcacttctttctgagtttcagttctctcatcagtaaaatgaagaaaaattaagtacctctgatagaaaagccatgaaatgagatgatgtgtgaaaagtaattcacatgagctctgcaaagcaataagctaccaaaatagttatttgtttttattctgggatttgattaaaaatattatttctcaaaaggcaaatttttytaaagtacttagggaactgaattataagaaaattgtcaattatcagaattc

SEQ ID NO: 582028 - DNA, 475 bp, Homo sapiens
tcatgaactgagctctatggtccagttatattggaaccaatggaaaagaatcccttgggatctccataaacattcaacattctacttcctgggcttggcctaatgttcaccaaattagratctctggaattctaacctggaacaggaatacaggtccctaaatgattctgaggcagatggcagcatgagggttgtttgataggaagaacaagtaggttccataaacctattctctgaaaataaataaccccattgcatattgaattgtacctggaaatgaattgtaccatggaaatgaatgttttatttatttatactgtgggtggtacttgccgataattgtggaggtggtagagatttgtcccttgaagatgttttcgggataaattgattctgtgagtgaaactatgaatcatggaatttttgctgaggtcagatgactaaaaacttaaaagagaaaaattggaatagaaaa

SEQ ID NO: 582029 - DNA, 597 bp, Homo sapiens
actttaaatacatgacacagaaaataatttcctaattttcactaattcctagagtgatgggattatgagtaggcttttttcccccttctcctttcccccaaaattctataacgtatttaagtgaggtttataatgaaagttttcacttatttaaacataaattacaatttgaaagaaaatagttttattgaaattcaacttaaatattttgatacctacttaaatgtttaattcaattaaaatgttaatcattaccaaagaagccctaggcaatgtcagtaaatgaacgtgtagaacttagaaggactctgatttctgtgatgagtgatacatcattcccatcttcctttcttgaaaagtgctcaagttgaaatcatccttttatgtcttctcccccagtctaaactaacaggtcataggtcctgtttacttagggctctgtgactcctcttttaccaccgtgataccaggatgaatacctttctcctgatggagaattaatagaacaactaggcaattcggtgggaccagagcccttaaacattcctctttttcagacaaaattgyatgtttgaaacggtttacttctgatggtaa

SEQ ID NO: 582030 - DNA, 349 bp, Homo sapiens
agaagaaacacaaaagcactgaaaactcaaaaagccagagtgcctcttctccaaatgatcacaacacctctccagcaagggcacaraactgacctgaggctgagatggctgaattgacagaagtaggtttgagaaggtgattaacaatgaactttgctgagctaaaggagcacgttgtaatctaatgcaaagaagctaagaataatgataaaacattataggagctgataaccagaatagccagtttagagaggaatataaatgacctgatggagctgaaaaacacaacttgagaacttcacaatgcaattacaagtatcaatagtcaaacagaccaaatggaggacag

SEQ ID NO: 582031 - DNA, 428 bp, Homo sapiens
aggctgagatggctgaattgacagaagtaggtttgagaaggtgattaacaatgaactttgctgagctaaaggagcacgttgtaatctaatgcaaagaagctaagaataatgataaaacattataggagctgataaccagaatagccagtttagagaggaatataaatgacctgatggagctgaaaaacacaacttgagaacttcacaatgcaattacaagtatcaatagtcaaacagaccaartggaggacagaatctcagagcatgaagattatctttctgaaataagacaggcagaaaagcttagagaaaaaagaattgaaaggaatgaacaaaaacttcaagaaatatgggattatgtaagaagactgaacctacgactgattggggtatctgaaagatacagggagaatggaaccaagttgtaa

SEQ ID NO: 582032 - DNA, 519 bp, Homo sapiens
tatcaggctgcttaccccagtaaagttcaaaaaaactcccggtttcccccttttgttttttttatcatttccctccttccttctgtaatgtttcttttattcctcatcctcatatcaytttattcttttttctttagtttttgatgaaaatgaaaaacataaaaattttatatatgctttagaaccacatcataaggagaaacaatacctccatcagtgaatttaaacaattgttgtgtagtaaagaaaccatttcccttttgagaaacagactgcacttattctattaaaatgtctttggattttgtattttagtgtttttgaatgctgaacaggaattcagaatatgggtcttcgaccacttgtgtattggttttctgctgtggctgtaaaaattaccacaaatcttagtggcataaaacaacacaaacttattacctaaataattctgtggggtagaagtacaacacaggtctcaccgggctgaaatcaatgtgtcagcaaggctatgttcctttc

SEQ ID NO: 582033 - DNA, 587 bp, Homo sapiens
gtgttttaaaatgggagtacatgagatttgggaattgccaggggttgaatgatatggttttgctgtgtccccacccaaatctcatcttgaattttagttctcataatccccacatgtcataggagggaccaggtggggataattgaatcatgaatgaagttaccctcatgctgttctcatggtagtgagttctcatgaaatctggtggttttataaagggctctcccacccttaacttggcacttctctttcctgccaccatgtaaagaaggacatgtttgcttccacttctgtcatgattataagtttcctgaggcttctccagccatgctgwactgtgaatcaattaaacctctttccttattaattacccagtctcaggtatgtgtttattagcagcatgagaacagactaatatatagcatgagaatggactaatacagggggtcagcaaaggagcaaacaagcctctccaggacttctttataatggcactaattttactcacaggactctgcccttgtgatcttgaaagaaataataatattttatcccaaaatatactactttgacatatttcaagatgg

SEQ ID NO: 582034 - DNA, 460 bp, Homo sapiens
aggtctcgctctgtcatccaggctgaaatgcagtggtgtaatcacagctccctgcagccttgacctcccaggctcaggcaatcctgcctcagcctcctgaggaggtgggattacaggtgtgcaccatcacgcccagctaatgtttttattttttcttagatatggggtctcactatcttgcccaggctcaagaccagtgatctttgaatcagcgtcgactcccctgtctgccttgcccttctcccgacaccaaagaagcaaacactgaatgctgttacttctgtctctccttctgttacttttccttcttctgctcagtccagcctgtgagctttcagttgggcatagatgccactgttggcttacattgtctacacttcttctttcatcatgcatctcctgccttccagaacctccagtgaacattccragtctttgaaacctctgcctgccatgcgag

SEQ ID NO: 582035 - DNA, 317 bp, Homo sapiens
gttaaaaggtgcacagtctttatagccttsttttgtgttgatggtggggtttttctccccctttcattatacctgagaagtatgagaaaggaagccacaaatttgaagggccttataaatacctttcacaaaatggcaccatgggcatgtgggaactttctggggtgctgaaaacagtgtatgtctctatcttagaggcacggatgtgggcaaatagctatgtgaaaattacccatctgcacggctaagatttgtgcacttaactatacatgagttccatctaaattttaaaataaattagccagtgacctaggggc

SEQ ID NO: 582036 - DNA, 505 bp, Homo sapiens
cttgaacctgggaggcagagggtgcggtgagccaagatcatgccgttgcactccagcctgggcgacaagagcaagactccatctcaaaagtaaagtattctttccaataatatgtgtgactgttgttgcaatactgctatttattgagtagaatataacaaagagcaagaagctaaaagcaacaaagcccagctttatctggattacattcagattttggcatccttgaaaagcaaaacaaaacaaaggcccttcctatagctattttcatgtactactctccttctcacaacttctattatayaaaggttgtccccactcactgtttataattccttccttctcactcacatttcacccctctgccatcaaccttctacccccattaacccttgtttttgaaatcgtcaatcatcttgactaactacagtgggtgttttagacccttcgttgtcacagaactgaaccatttggtggttcacttggacaggagctataaaaactc

SEQ ID NO: 582037 - DNA, 549 bp, Homo sapiens
actgctctcaagagtcatgctgccacttagactccatagaaagggcctgatcccatgtgcttgacacaaatttttcagctctgcttgatttagccatagacaaggtctctgttgaatattcttgtctccatgtttaccctgccagattcttattttcttaaataacatggttttaagaactcttgccgggcttgcttgtactgctgtgaatacaacttgcaacagtttacctacatctttctaaaaaaattccagatagtgtactaccaattatgtttcctaagtttgggttaactttgtttcaagctgtttgattatgtgaacttattacgaacttacacacaaataaattccctgttgattgttacaaaagctggagttaagcttcatgttcctcatcttctattttacagttatttcaggatttggtggcatggctttttatttttctcccttgaatatcaacttggcaagaccagctcataattctagcttctygagatattcttgcatcctgcttttaatcttccaatttatttactatttcac

SEQ ID NO: 582038 - DNA, 596 bp, Homo sapiens
ggtctctgaagcttgcagatgttcactgtctggggtccaatcagcagtcagtggtctttggttagagttctaagaaagatgctggygtgaggttgggaggaagtacacatagcgatggaaaatactggacaaggttctgggaccatcagagttacagctgtggcgccaggccggctggactagttaacattttaagccctgttttccttttatacttacgaaaagggataataatgattaacaatatctattactaaatattgcaagggctaaaaaagagaataaatattgcaatactttgtaaaatttattagtatgtcttattcagtgtgccagatagtaagtgctaatccttatttccccaaggtcccagtactgaggaatatataacatattgattgccattatattgtaagtacttaataaatatttgtgaaattcatcttaaatgaataattatcgagtagttataaggactctaagaaaataataagtgttcaatacagcttagctataattgtaagttgtcttatgtctcagcagacctaagccttgggtttagatggtggcatagcatactggatccgggtcaatga

SEQ ID NO: 582039 - DNA, 580 bp, Homo sapiens
ccccacacattgtgctatggctgggggcatggaggtggaggtggtcagaattcttagagaaggatgagcatggcctggaagggcccactgtgggtgtttctactggatttaacacacgtgcaataaagggacaaccaaagaacgcacgtccattgcattcactgcgtcgtggccttaccgtgatcaaaagccaaacasggaggcgaacttgtcttccatgatcacccatgatgtctgcagcaatctgtgtcttaagaaaaacaaaaaagctgagggaaacaaggtgacaaacacgagggttccaggctgtcgaaaggaagttttaaacaacctcacacagtactatcaggaaagaaaacagccatggtagaaggagatggaaaaagaaaaaagtgatgaagcaaggccagcatgtggcggggagtagaagactgcagggagaatcagacgcagcgggaagcactggagctgagggggtcaggcaaggaaaacttcttaaatcaagccgagtgcaggaagggactggctggaagacaggagggacaaggtgtggggaggagatagccgagattaatgagct

SEQ ID NO: 582040 - DNA, 500 bp, Homo sapiens
aattctattttaattccaaggtattaataaatctcagattttagtattcaactataagcataaattcaattatattatcaaaaccacaatattaagttcctctgacacagatccaaatcatgtaagatgtgtgatatatgcctccattctgaggctgagtcacgaattatcactttccaaacacaaacttgaaagaaggaacataaacagaaggtaaacagattcaaggcatccaagtaggctaaacagcatcaataaaagagcayggggttgtttctaccaaaaaaaaaaaaaaaaaaatttagcatggtggtgtgcacttgtagtcctagctctagggaggctgggagagaaggattaagcccagaagttgcagcaagctatgatcatgctactgcactccagcctgggagacagactgaaactctatcttaaaaaaaaaacagtggtggggcggcggggggaagaaaaaaagaaaaaaatgagaatgggttttggtg

SEQ ID NO: 582041 - DNA, 500 bp, Homo sapiens
aattctattttaattccaaggtattaataaatctcagattttagtattcaactataagcataaattcaattatattatcaaaaccacaatattaagttcctctgacacagatccaaatcatgtaagatgtgtgatatatgcctccattctgaggctgagtcacgaattatcactttccaaacacaaacttgaaagaaggaacataaacagaaggtaaacagattcaaggcatccaagtaggctaaacagcatcaataaaagagcatggggttgtttctaccaaaaaaaaaaaaaaaaaaatttagcatggtggtgtgcacttgtagtcctagctctagggaggctgggagagaaggattaagcccaraagttgcagcaagctatgatcatgctactgcactccagcctgggagacagactgaaactctatcttaaaaaaaaaacagtggtggggcggcggggggaagaaaaaaagaaaaaaatgagaatgggttttggtg

SEQ ID NO: 582042 - DNA, 595 bp, Homo sapiens
gatcatactactgcactccagcctgggaaacagtgagacactgtctcaaaaaaaaaatttttttaataatcaaaaaaagaaagaaaaatacttgtcaacacagaattttatrtgaggaaaaatatttttcaaaaatgaaggcaatcgaaagatcaatatcattaatataaataatgttctccgtatcaaagtaaacatattgttagatatttttattcaaaactcaataaacatagccaaagtgatatttgtccttgaaatgaggtttaaaaactgagagattcaaacattttccttaacattcaaataaaaatttatcattttctaaacaccattctaaaaaaatcctccctgttaattcagatactgcttgtccatctatagcttggaatgctctggaggagcattttgttgctttaattaaagcaacaaaaagaaaattaaataagcctaggaaaaaatgctgaattaaaaaaagaaaaggttctttctgaatagtgaaattagggtttgtctcttcatagcttttatttgtttttgaaacagagtcttgctctgtcacccaggctagagtgcagtggtgctcaccagagcc

SEQ ID NO: 582043 - DNA, 490 bp, Homo sapiens
ggcaagtagaagcaagtcctgcagcgggtagtgggggtgcagaatgatgatggggaaagccctgttaggggccctragtggcctgggtgttttattgagctgggtctccatattacattttggcgtcatttatagcacttgggagacccatcatttttagttcatttactatatatgaatatattaaggacatttaatgtaaataaataccatttattgagcctctactgtatgccaagcattatgctaagtggttttcatgcttatctcaacctttttctgtttagggccagatagtaaatattttaggttttgcgggccataaagtctctattgcagctgctcacctctgctgttgtagtgtgaaagtggccacagacaatgcaaaaatgaatgactgtagctgggtttcaatatcattttatttatggattcagatttgaatttgttataatttttatacatcatgaaatactgtttttcttctgat

SEQ ID NO: 582044 - DNA, 490 bp, Homo sapiens
ggcaagtagaagcaagtcctgcagcgggtagtgggggtgcagaatgatgatggggaaagccctgttaggggccctgagtggcctgggtgttttattgagctgggtctccatattacattttggsgtcatttatagcacttgggagacccatcatttttagttcatttactatatatgaatatattaaggacatttaatgtaaataaataccatttattgagcctctactgtatgccaagcattatgctaagtggttttcatgcttatctcaacctttttctgtttagggccagatagtaaatattttaggttttgcgggccataaagtctctattgcagctgctcacctctgctgttgtagtgtgaaagtggccacagacaatgcaaaaatgaatgactgtagctgggtttcaatatcattttatttatggattcagatttgaatttgttataatttttatacatcatgaaatactgtttttcttctgat

SEQ ID NO: 582045 - DNA, 438 bp, Homo sapiens
agtgcatttacatcctgatagactaaaggcatttaggcaaatcagatcaagaaatgcaaatgatgtaacctctgctgatgttgtattagacacaatatatgaagttctgggtgccttctctagatttattgtcaccatcagtagttttagaatgaatagttgatacayttagacacaggtaaagaagggctcagtaatacagagatgagggaatctgaagtcaatttatgtgacaaaaaagcatgttacttactgttttgctatccagagagcatcttcattctatgaagaataaattttacagattaatggagaagtgctccacaagcctcatttcttttttttttttttaattttactagggtagttctagggaacatgtgcacaacatgcaggtctattacataggtatacatgtgccatgctggtttgctgcac

SEQ ID NO: 582046 - DNA, 438 bp, Homo sapiens
agtgcatttacatcctgatagactaaaggcatttaggcaaatcagatcaagaaatgcaaatgatgtaacctctgctgatgttgtattagacacaatatatgaagttctgggtgccttctctagatttattgtcaccatcagtagttttagaatgaatagttgatacatttagacacaggtaaagaagggctcagtaatacagagatgagggaatctgaagtcaatttatgtgacaaaaaagcatgttacttactgttttgctatccagagagcatcttcattctatgaagaataaattttacagattaatggagaagtgctccacaarcctcatttcttttttttttttttaattttactagggtagttctagggaacatgtgcacaacatgcaggtctattacataggtatacatgtgccatgctggtttgctgcac

SEQ ID NO: 582047 - DNA, 438 bp, Homo sapiens
agtgcatttacatcctgatagactaaaggcatttaggcaaatcagatcaagaaatgcaaatgatgtaacctctgctgatgttgtattagacacaatatatgaagttctgggtgccttctctagatttattgtcaccatcagtagttttagaatgaatagttgatacatttagacacaggtaaagaagggctcagtaatacagagatgagggaatctgaagtcaatttatgtgacaaaaaagcatgttacttactgttttgctatccagagagcatcttcattctatgaagaataaattttacagattaatggagaagtgctccacaagcctcatttcttttttttttttttaattttactagggtagttctagggaacatgtgcacaacatgcaggtctrttacataggtatacatgtgccatgctggtttgctgcac

SEQ ID NO: 582048 - DNA, 620 bp, Homo sapiens
gcttaatttttatttatttattttgaaacagtctccctctgttgcccaggatggagtgcagtggtgccatctcagctcactgtaacgtccgcctcccaggttcaagtgattctcctgcctcagcctcccgagtacctaggactacaggcgcccaccaccatgctyggctaatttctgtattggggggggagatggagtttcgtcatgttggccaggctgagatgtgtattaataataaagataaaatactactttcctggcataaataactttagtcaagtaaagttaatcaccaataatgtgacaaatagatcttgtatgactcttgataatatgcactgggaaggacacaacatcactctgtgttccttccaaaaatatataacctaagttgaataaaaagaaacatcaggcaaatctaaactcaaggacatttaaaacaaacaaatggtctataggttttttactttttatttttacttttttgagacagaatctcactctgtcacccaggctggagtgcaggggcacgatcttggctcactgcagcctccacctcctgggttcaagtgattctcatgcctcagcctcccgagtagctggaactacaggcatgcacc

SEQ ID NO: 582049 - DNA, 623 bp, Homo sapiens
tgcttaatttttatttatttattttgaaacagtctcgctctgttgcccaggctggagtgcagtggtgccatctcagctcactgtaacgtccgcctcccaggttcaagtgattctcctgcctcagcctcccgagtacctaggactacaggcgcccaccaccatgctcggctaatttctgtatttttggtagagatggagtttcgtcatgttggccaggctgagatgtgtattaataataaagataaaatactactttcctggcataaataactttagtcaagtaaagttaatcaccaataatgtgacaaatagatcttgtatgactcttgataatatgcactgggaaggacacaacatcactctgtgttccttccaaaaatatataacctaagttgaataaaaagaaacatcaggcaaatcyaaactcaaggacatttaaaacaaacaaatggtctataggttttttactttttatttttacttttttgagacagaatctcactctgtcacccaggctggagtgcaggggcacgatcttggctcactgcagcctccacctcctgggttcaagtgattctcatgcctcagcctcccgagtagctggaactacaggcatgcaccac

SEQ ID NO: 582050 - DNA, 657 bp, Homo sapiens
tgcttaatttttatttatttattttgaaacagtctccctctgttgcccaggatggagtgcagtggtgccatctcagctcactgtaacgtccgcctcccaggttcaagtgattctcctgcctcagcctcccgagtacctaggactacaggcgcccaccaccatgctcggctaatttctgtattggggggggagatggagtttcgtcatgttggccaggctgagatgtgtattaataataaagataaaatactactttcctggcataaataactttagtcaagtaaagttaatcaccaataatgtgacaaatagatcttgtatgactcttgataatatgcactgggaaggacacaacatcactctgtgttccttccaaaaatatataacctaagttgaataaaaagaaacatcaggcaaatctaaactcaaggacatttaaaacaaacaaatggtctataggytttttactttttatttttacttttttgagacagaatctcactctgtcacccaggctggagtgcaggggcacgatcttggctcactgcagcctccacctcctgggttcaagtgattctcatgcctcagcctcccgagtagctggaactacaggcatgcaccaccaaacccagctaattattttattttttgtagaga

SEQ ID NO: 582051 - DNA, 508 bp, Homo sapiens
aaggccctctgtggctgtccagcycggccatcccatatatcagccccacctgccatttaggctcccagctgtcagtcatcaccaggatgctgaccccaaagagatcccctgcccctggctctggctctcttccaaacctcttcaaaactgcttgtttacagcagtggcgtagtgctggagtgactagagcggccccagccccacaggccacaaagggccagtgaccccaagctgcttgcaagggttcagttcccactggggccatgcaagccacccaccagcgtggagacccctcttccagtctggcccccaacatgaaagcgacgccagcaattggaggcaatttgccgcctttgatggcatgtcagggcggcaccatggctagggcttgggaaacagttgtgcttcccgcattcttacctgattaccccagcccaagccaggacccggcagcctgcagcccattgtgcctttgtgtggactggcgcttggtgagaaagggccagcc

SEQ ID NO: 582052 - DNA, 508 bp, Homo sapiens
aaggccctctgtggctgtccagctyggccatcccatatatcagccccacctgccatttaggctcccagctgtcagtcatcaccaggatgctgaccccaaagagatcccctgcccctggctctggctctcttccaaacctcttcaaaactgcttgtttacagcagtggcgtagtgctggagtgactagagcggccccagccccacaggccacaaagggccagtgaccccaagctgcttgcaagggttcagttcccactggggccatgcaagccacccaccagcgtggagacccctcttccagtctggcccccaacatgaaagcgacgccagcaattggaggcaatttgccgcctttgatggcatgtcagggcggcaccatggctagggcttgggaaacagttgtgcttcccgcattcttacctgattaccccagcccaagccaggacccggcagcctgcagcccattgtgcctttgtgtggactggcgcttggtgagaaagggccagcc

SEQ ID NO: 582053 - DNA, 508 bp, Homo sapiens
aaggccctctgtggctgtccagctcggccatcccatatatcagccccacctgccatttaggctcccagctgtcagtcatcaccaggatgctgaccccaaagagatcccctgcccctggctctggctctcttccaaacctcttcaaaactgcttgtttacagcagtggcgtagtgctggagtgactagagcggccccagccccacaggccacaaagggccagtgaccccaagctgcttgcaagggttcagttcccactggggccatgcaagccacccaccagcgtggagacccctcttccagtctggcccccaacatgaaagcracgccagcaattggaggcaatttgccgcctttgatggcatgtcagggcggcaccatggctagggcttgggaaacagttgtgcttcccgcattcttacctgattaccccagcccaagccaggacccggcagcctgcagcccattgtgcctttgtgtggactggcgcttggtgagaaagggccagcc

SEQ ID NO: 582054 - DNA, 591 bp, Homo sapiens
ttattatatgaatgagtaaagttagccaaaaggggtaagatgtacgtaaatagtccagggaggccaaaaccacaaaagggagtaacagccaaaaatgagcttttcccctggagatgctttttcaaggtcacagcccagaagaggaagcctattgaatctctaggtttccattggaagaacaggcagtgcttacctgcactgcacaatccattctaactaggatgatgactatggattaaagatgaaagtgtggcaatgcacagactctatctgaggagaatacagaaacactaagacaatgacagagggtgagacaaaggcagtasagcaatgtgaagcctctgacatcatgatttttaagaccaacatcttgtaaatgccatcatagatctcagcttcttttattatggggactttgctggtttcccagctgagaaagtgaaaataacaacctgcatgcacttcccaagtctccacctgtatcctgtttgctttaaatctctaggagaagaaagtcagataactgggcctagtgtcagtgtaggaggcacttcctaaaagctacatattaggaagaagggaaaatgtgtg

SEQ ID NO: 582055 - DNA, 591 bp, Homo sapiens
ttattatatgaatgagtaaagttagccaaaaggggtaagatgtacgtaaatagtccagggaggccaaaaccacaaaagggagtaacagccaaaaatgagcttttcccctggagatgctttttcaaggtcacagcccagaagaggaagcctattgaatctctaggtttccattggaagaacaggcagtgcttacctgcactgcacaatccattctaactaggatgatgactatggattaaagatgaaagtgtggcaatgcacagactctatctgaggagaatacagaaacactaagacaatgacagagggtgagacaaaggcagtagagcaatgtgaagcctctgacatcatgatttttaagaccaacatcttgtaaatgccatcatagatctcagcttcttttattatggggactttgctggtttccyagctgagaaagtgaaaataacaacctgcatgcacttcccaagtctccacctgtatcctgtttgctttaaatctctaggagaagaaagtcagataactgggcctagtgtcagtgtaggaggcacttcctaaaagctacatattaggaagaagggaaaatgtgtg

SEQ ID NO: 582056 - DNA, 575 bp, Homo sapiens
atcatcttaattctaagttcttgaggaaggrgaccacttttgtcttctctggtggtccctcgcctaatgcttagctttctttacggcctgcaataatccccgagcacccccactggtacagggagaagtctagctcctgaccaggctctgatttccccggccctgccctattcaagttcctcaaattccttgaccccaacccttgccccataagaaacctccccatgaccctgaccctgacagagaactggccgtgaaaatttttgcattgacaacagatattggaatgcagggattccctatctacttcaggccccttcaagaatcagagaaggccaagcatggtggctcatgcctgtaatcccagcactttgggaggccagggtggggagatcacttgaggccaggaatttgagaccagcctggccaatatggtgaaaccccgtctctactaaatatacaaaattagctgggggtggtggtgcatgcctgtaatcccagctactcgggtggctgaggcaggagaattgcttgaactggggaggcggaggttgcagtgagccaagatggcacca

SEQ ID NO: 582057 - DNA, 575 bp, Homo sapiens
atcatcttaattctaagttcttgaggaaggagaccacttttgtcttctctggtggtccctcgcctaatgcttagctttctttacggcctgcaataatccccgagcacccccactggtacagggagaagtctagctcctgaccaggctctgatttccycggccctgccctattcaagttcctcaaattccttgaccccaacccttgccccataagaaacctccccatgaccctgaccctgacagagaactggccgtgaaaatttttgcattgacaacagatattggaatgcagggattccctatctacttcaggccccttcaagaatcagagaaggccaagcatggtggctcatgcctgtaatcccagcactttgggaggccagggtggggagatcacttgaggccaggaatttgagaccagcctggccaatatggtgaaaccccgtctctactaaatatacaaaattagctgggggtggtggtgcatgcctgtaatcccagctactcgggtggctgaggcaggagaattgcttgaactggggaggcggaggttgcagtgagccaagatggcacca

SEQ ID NO: 582058 - DNA, 575 bp, Homo sapiens
atcatcttaattctaagttcttgaggaaggagaccacttttgtcttctctggtggtccctcgcctaatgcttagctttctttacggcctgcaataatccccgagcacccccactggtacagggagaagtctagctcctgaccaggctctgatttccccggccctgccctattcaagttcctcaaattccttgaccccaacccttgccccataagaaacctccccatgaccctgaccctgacagagaactggccgtgaaaatttttgcattgacaacagatattggaatgcagggwttccctatctacttcaggccccttcaagaatcagagaaggccaagcatggtggctcatgcctgtaatcccagcactttgggaggccagggtggggagatcacttgaggccaggaatttgagaccagcctggccaatatggtgaaaccccgtctctactaaatatacaaaattagctgggggtggtggtgcatgcctgtaatcccagctactcgggtggctgaggcaggagaattgcttgaactggggaggcggaggttgcagtgagccaagatggcacca

SEQ ID NO: 582059 - DNA, 539 bp, Homo sapiens
tagcttattagtgatacattgaatgtaaatgaatttaacaccccaatcaaaaggcagaaattggcagaatggattattatttttttctttttataagactgggwcttgctcaattgcccaggctggaatgcagtggtgtgatctagatcactgcagccttgacatcctgggctcaagcaatcctcccatctcagcctcccaaatagctgggactaccgggaccacgccaccacgctggctaatttttaaaacaaaatttttgtagagacgaggtcatgctatcttaaccaggttgtctcaacctcctgggctcaagtgatgctcccacctgggcctcccaaaggctgggattacaggtgtgagccaccgggcccagcccagaatggataaaataaaataaaatgatctgtgagagatttactttagagtcaaagacacaagagttgaaagtagaaagatgcaaaaagaaaccatgtgaggagttattaaaagagagctagggtggctacacaagcgtgagacaaattagactttaagac

SEQ ID NO: 582060 - DNA, 539 bp, Homo sapiens
tagcttattagtgatacattgaatgtaaatgaatttaacaccccaatcaaaaggcagaaattggcagaatggattattatttttttctttttataagactgggtcttgctcaattgcccaggctggaatgcagtggtgtgatctagatcactgcagccttgacatcctgggctcaagcaatcctcccayctcagcctcccaaatagctgggactaccgggaccacgccaccacgctggctaatttttaaaacaaaatttttgtagagacgaggtcatgctatcttaaccaggttgtctcaacctcctgggctcaagtgatgctcccacctgggcctcccaaaggctgggattacaggtgtgagccaccgggcccagcccagaatggataaaataaaataaaatgatctgtgagagatttactttagagtcaaagacacaagagttgaaagtagaaagatgcaaaaagaaaccatgtgaggagttattaaaagagagctagggtggctacacaagcgtgagacaaattagactttaagac

SEQ ID NO: 582061 - DNA, 534 bp, Homo sapiens
ttgaaataagtgtaattcagatgctggtaaaattttctcctcagactcytttgcaccagctcagggctgacgtctgtgttgagtgggttctgggcctgccctgcagctctgccctcaccctgctggggaggatgctgtttgggctcacagagcatattctcccaatgttgctctcccagaatgaaagggctgtcccctggttcacaatcctctttcagcagcatctgatgcttttgaaattgtctcttgaaacagtgatttgtcattactatacccagtaaactgcagggagagcccaagcacagattcatgaaaccaccagagagtcacttccctgggactgtcagatgcaatgacacagtcaagatccatggtgagtccagaaactttcagataattcataggagcctcttatttctcttacaattctctattcaaagttcatgccaaaaagtatcttcacagagagaactacatggcttaaagcccacagaaatgaaaacatgcatgtacacacacatatacaccaaccac

SEQ ID NO: 582062 - DNA, 534 bp, Homo sapiens
ttgaaataagtgtaattcagatgctggtaaaattttctcctcagactcctttgcaccagctcagggctgacgtctgtgttgagtgggttctgggcctgccctgcagctctgccctcaccctgctggggaggatgctgtttgggctcacagagcatattctcccaatgttgctctcccagaatgaaagggctgtyccctggttcacaatcctctttcagcagcatctgatgcttttgaaattgtctcttgaaacagtgatttgtcattactatacccagtaaactgcagggagagcccaagcacagattcatgaaaccaccagagagtcacttccctgggactgtcagatgcaatgacacagtcaagatccatggtgagtccagaaactttcagataattcataggagcctcttatttctcttacaattctctattcaaagttcatgccaaaaagtatcttcacagagagaactacatggcttaaagcccacagaaatgaaaacatgcatgtacacacacatatacaccaaccac

SEQ ID NO: 582063 - DNA, 534 bp, Homo sapiens
ttgaaataagtgtaattcagatgctggtaaaattttctcctcagactcctttgcaccagctcagggctgacgtctgtgttgagtgggttctgggcctgccctgcagctctgccctcaccctgctggggaggatgctgtttgggctcacagagcatattctcccaatgttgctctcccagaatgaaagggctgtcccctggttcacaatcctctttcagcagcatctgatgcttttgaaattgtctcttgaaacagtgatttgtcattactatacccagtaaactgcagggagagcccaagcacagattcatgaaaccaccagagagtcacttccctgggactgtcagatgcaatgacacagtcaagatccatggtgagtccagaaactttcagataattcataggagcctcttatttctcttacaattctctattcaaagktcatgccaaaaagtatcttcacagagagaactacatggcttaaagcccacagaaatgaaaacatgcatgtacacacacatatacaccaaccac

SEQ ID NO: 582064 - DNA, 598 bp, Homo sapiens
tcaatcaaattaaaattaattttcycaaagttaggacagcctggaagaaaaataaaagtaaccacagaaactgtgtgtggttagtgccattccttaaagacgatttttagggctttcaatatacacagaggaaaagctgggtagaggggaagtttggatggtaagaaaatttacatgtgtaatgaaaaagaagcacatagggaaatataaaattacgtagttctcctgcagtaagtcagcactttcccatgctgttctcatgatagtgaataagtcccattagatctgatagttttatcaaggggagttcccctgcacaaactctctcttgtctgccaccatgtaagatgtcccttgctttcctgacatgattgtgaagcatccccagccatgtggaaccataagtccattaaacctcattcctttacaaattacccaggcttggttatgtttttattagtagcaggagaacagactaatacatttattttgccaaagttaagaacccacccatggcaagcctcaggaagtcctgagacatgtgcccaaggtgatagaagtacagcttgcttttatacattttagagagacatgagac

SEQ ID NO: 582065 - DNA, 417 bp, Homo sapiens
tacaacatagaagtataacatattgagaggtctacagttaattgaagagccacagaattgagcagagtcattgcaactaaaatgggagaacttgagaaaactgagaacgcattacctgcaacagtaacaatgatagcatyattacttaatgatataaatattttattgtatttacagctagttcatttcccgtgtcaatcaggtctttgttcatcattgttttcccttcttttctcagcagtaaatggaagttattcttattttctaatgaaaacatttggggagaggggacataacttagattactattctcagcatctcctctcctacctcaaaatatgtatggaagcattctttccaaaaaaggcatttttctttttaagaggatttttggttcttccctacattatgtcattg

SEQ ID NO: 582066 - DNA, 534 bp, Homo sapiens
cattgtgcacatgtaccataaagcttaaagtataataataataataaaaaatttaatatattcctaagaattgaaatcatatgaatcatgtattttcaccaataaaaatagaatcaatctataaaatcggtaacagaccaataataccaaagacctgaaaattaaacatcacatttgaaaacaatctgtaagttaaaaaggaaatatcacagaaaattaaaatatatatttagctgagttaaatacaaattaaaaatatctgccaattgtagctaaagcagtgctttgagaaaaaatgatagagatagatgcttttattgaaaaataaaacgtactcaaattaatgatctaatttctcaatataacaaaccactaaaggagaagcaaactaaacccagaatgagcagaagtaaaaggaaaaaagaatagtamctattagaacagaactcaataaaattgaaaacagaaaaataacaaagttaattaaacaaaaagagtctctttgaaaagaccaataaaatcagtaaaagacca

SEQ ID NO: 582067 - DNA, 577 bp, Homo sapiens
agtaaccattctaactgggataagataatatctcattgtggttttgatttggatttccctgatgattagtgaagttgaacattttttcatacacttgttggccatgtgtatgtcttcttttgatgaatttctgttcagaaacttagctcactttttaatgtgattatttgtttttctgctgttgagttgtttgtgttccttttacactgtggatattagtcccttgtcagatgcatggtttgcaaatatttccsccattgaacacattgtcacttaactctattgattacttcctttgctctgcaaaagatttttagtttagtaaagtctcggttgtttaatatttttgttgttgcctgtgcttttgaggtcttaggcaaaaaatcattgcctagatcaatgtcctgcactgttttcctggtttacttctagtagttttatagttttgggtcttacatgtaagtcttcaatccatttggagttattttttgtggatggtgagagatagaaatctatttttattcttctgcatatggacatctagttttcccagcatcattttttttaaagagggtgt

SEQ ID NO: 582068 - DNA, 478 bp, Homo sapiens
acatataagtcaactttgacagacttccaggagatttatcagcagaaaacttagggtgaggagagaattagacaaaaattccaagcactaaaaggaaaaaaaaataaaaaaaatactgtcagctaagaatactatgcccagcagagttatcctttgttactgaaggagaaataaattcccagatgagcaaatgttgaagaattaataaccactagactggatctacaagaaattcttaaggamtactacacctgaaagcaaaagaatgatatatatcattataaaaacacacaaaactatacaactcactggtagagcaaacacacaaatgaggaagacaaagtattcaaatgttatcactccaaaaaccccaccaaacatcaatgattaacaatacaaaagaaaaagaaaatattcaagtaaacaacaatatgacaggaacaaaatcttacatattaataataattttgaatataaa

SEQ ID NO: 582069 - DNA, 632 bp, Homo sapiens
cacttccccttcctttttggcctctgaagaagtttttaaagaataaagtaatggtgctaagaagcagaatattatcttgtccatatccaagaaaagccttgctctacccctactccataagcctctttaacaaatttgctaattatttacccctactccaacccctccacctacaccgttgccatctcagtacagggcatcaccacacacccagctcagggggaatatcttggaatcayccttctgtcttcattttcattcactctcacattcaattactccagcccttcctcaacgacctaatgcctatcctattccaggcatcagacttgtgagcgaaacaataatccttgcattcatggagattaaaatctgatggggagaacaaacaatatatttaaatactaaagaaataaactacagcatattctggaagataattagtggtctgggaaaagagaaactatgcagaaattatgggaagatggggagagtagaagtgggttgcaatattaaataggtggtcagagtgggagaatatggacatttagtacacacatgagggaggagtcaaacttgtggatatctggagaaatgtattttgtttattttctttctttccatcttgaata

SEQ ID NO: 582070 - DNA, 632 bp, Homo sapiens
cacttccccttcctttttggcctctgaagaagtttttaaagaataaagtaatggtgctaagaagcagaatattatcttgtccatatccaagaaaagccttgctctacccctactccataagcctctttaacaaatttgctaattatttacccctactccaacccctccacctacaccgttgccatctcagtacagggcatcaccacacacccagctcagggggaatatcttggaatcacccttctgtcttcattttcattcactctcacattcaattactccagcccttcctcaacgacctaatgcctatcctattccaggcatcagacttgtgagcgaaacaataatccttgcattcatggagattaaaatctgatggggagaacaaacaatatatttaaatactaaagaaataaactacagcatattctggaagataattagtggtctgggaaaagagaaactatgcagaaattatgggaagatggggagagtagaagtgggttgcaatattaaataggtggtcagagtgggagaatatggacatttagtacacacatgagggaggagtcaaacttgtggatatctggagaaatrtattttgtttattttctttctttccatcttgaata

SEQ ID NO: 582071 - DNA, 423 bp, Homo sapiens
ctattgtctacaattgagttgtattccccctggaggataaatatckggccattccagatagcttctgtgcaatatctagtcctacactctaaatggaagaagcccttgagaaatacttgatggcaaggacaacacagatgcaaaaagtgttgagctataagcctcctgaaggcaggctctgagactttttctcattgtcctctcctcatctagcctagcgtcttgcatacagaagctccataaaagcttactgaataaagaagtttgtcctgagcctatttttttttttacaaaacaaacaaacaaaaatctctctcctttttctcctacagataccatcacgcagactaagaccattaagattatcaaatatattaaaaccctattttattggaataagaatataattgggatggaggatag

SEQ ID NO: 582072 - DNA, 594 bp, Homo sapiens
tctctactacaaatacaaaaattagccgggtgtggtggtgcacgcctgcagtcccagttactcaggaggctggggcaggagaatcacttgaacccaggaggcagaggttgcagtgagccaagatggtgccactgcacttcagcctgggygacagagtgagaccctgtctcaaaataaataaataaataaataaaaataaaaataaaaaaatttaaaaagtgggcatcgtatttgaatatgtatttctccaaggaaaatatatgaatggcaatcagcatatcagaaaaactgcaacaatattagtcaccagggatatgcaaatcaaaactgcaacgatctattactccacacccagcaagatagctataaacaaaaagacagaaaagaatgtgtattggaaaggatagggggaaattggaattattatatatttcttattggaatgtaaactggtggaactgctttagaaaatgtttgccagttcttcaaaagctatatattaagttatcataggaccaagcaattctactcatatatatatttatgagtatatatatatgagtatatatatgagtatatatatatgagtatata

SEQ ID NO: 582073 - DNA, 594 bp, Homo sapiens
tctctactacaaatacaaaaattagccgggtgtggtggtgcacgcctgcagtcccagttactcaggaggctggggcaggagaatcacttgaacccaggaggcagaggttgcagtgagccaagatggtgccactgcacttcagcctgggcgacagagtgagaccctgtctcaaaataaataaataaataaataaaaataaaaataaaaaaatttaaaaagtgggcatcgtatttgaatatgtatttctccaaggaaaatatatgaatggcaatcagcatatcagaaaaactgcaacaatattagtcaccagggatatgcaaatcaaaactgcaacgatctattactccacacccagcaagatagctataaacaaaaagacagaaaagaatgtgtattggaaaggataggggkaaattggaattattatatatttcttattggaatgtaaactggtggaactgctttagaaaatgtttgccagttcttcaaaagctatatattaagttatcataggaccaagcaattctactcatatatatatttatgagtatatatatatgagtatatatatgagtatatatatatgagtatata

SEQ ID NO: 582074 - DNA, 594 bp, Homo sapiens
tctctactacaaatacaaaaattagccgggtgtggtggtgcacgcctgcagtcccagttactcaggaggctggggcaggagaatcacttgaacccaggaggcagaggttgcagtgagccaagatggtgccactgcacttcagcctgggcgacagagtgagaccctgtctcaaaataaataaataaataaataaaaataaaaataaaaaaatttaaaaagtgggcatcgtatttgaatatgtatttctccaaggaaaatatatgaatggcaatcagcatatcagaaaaactgcaacaatattagtcaccagggatatgcaaatcaaaactgcaacgatctattactccacacccagcaagatagctataaacaaaaagacagaaaagaatgtgtattggaaaggatagggggaaattggaattattatatatttctyattggaatgtaaactggtggaactgctttagaaaatgtttgccagttcttcaaaagctatatattaagttatcataggaccaagcaattctactcatatatatatttatgagtatatatatatgagtatatatatgagtatatatatatgagtatata

SEQ ID NO: 582075 - DNA, 594 bp, Homo sapiens
tctctactacaaatacaaaaattagccgggtgtggtggtgcacgcctgcagtcccagttactcaggaggctggggcaggagaatcacttgaacccaggaggcagaggttgcagtgagccaagatggtgccactgcacttcagcctgggcgacagagtgagaccctgtctcaaaataaataaataaataaataaaaataaaaataaaaaaatttaaaaagtgggcatcgtatttgaatatgtatttctccaaggaaaatatatgaatggcaatcagcatatcagaaaaactgcaacaatattagtcaccagggatatgcaaatcaaaactgcaacgatctattactccacacccagcaagatagctataaacaaaaagacagaaaagaatgtgtattggaaaggatagggggaaattggaattattatatatttcttattggaatgtaaactggtggaactgctttagaaaawgtttgccagttcttcaaaagctatatattaagttatcataggaccaagcaattctactcatatatatatttatgagtatatatatatgagtatatatatgagtatatatatatgagtatata

SEQ ID NO: 582076 - DNA, 456 bp, Homo sapiens
atcctgctttgtcttttttaacttctgttttgctttaaagtttttttgtctgatattacgaagctactccttttcacctttggtgttcatttgcatgaaatgtctttttctaccctttaagtttatgtgagttcttatgttaggtgagtctcttgaaggcagcagatggttggtgaattcttttttttttttttttttttgtattttagtagagatggagtttcactatgttgcccaggctggtctcaaacttctgagctcaggcaacctgcccgtcttggcctcccaaagtgctaggattatgggagtgagctgccgcacctggctggttggtgaattcttattcattctgcagttttgtatcttttaagtggagcatttaggccatttacattcaaygttatgattgagatgtgaggcaccattccattcattgtgttatctttttttactgtg

SEQ ID NO: 582077 - DNA, 528 bp, Homo sapiens
cattgcactccagcctgggcaacaagaaagaaactccgtctcaaaaaaatatatatatatcctggtgaaaacatcttagtgaaatttttcaactgcaaagacaattgaaaactacaagaattgctcccaaagaaacaaaacatgaatggtaattgtaatttctgtaatttattgtaaatttctttaattgtgaagtgtgatttgtataaatctgtcaatgtatttatatgttcatgacttttcctatttgcatatttgttccttcatattaaagaaacttttcaaaattaaaattagcaaagaagtgttctttggtcacctataagctgacaaagtgacaaatctatacgtctactgaatatgtacatgtaaagaggagtgaattcatttcctaagactgctgtaacaaactatcacaaactgtggaacttaaaacracagaaatttattgttttgtggctctggaggctagaagtaagaaagcgatgtgttagcagcagggtcatgctctctgacagatctgaaaaa

SEQ ID NO: 582078 - DNA, 558 bp, Homo sapiens
aatgtgcacatcagaaagccttttctcagaatgcttctttctagtttttatctgaagttattttctttttcacaataggcctcaatgcrcttcaaatatcccctcacagattctgccaaaacagtgtttccagactgctgtatacaaagaaactgttaactctgcaaggtgaacgcacacatcacaaagtggtttctcagatagactctttctagttgttatcctgggatttttactttttggccattggcctcaatgaactccaaaatgtccattcacagaatggaaaaaaaaaagtgtttccaaactgctgaatggaaagaaaattttaactctgagagatgaatgcacgcattagaaattagtttctcagaaatcttctttctagtttttatctgaaggtatttcctttttcaccataggcctctatgcattcccaaatatccctttgctgattgtgccaaaacagtgtttccagactgctgaatgaaagaaaggcttatctctgtgaggtgaatgcacacatcacaaagcattttgtcatataacttccttcta

SEQ ID NO: 582079 - DNA, 558 bp, Homo sapiens
aatgtgcacatcagaaagccttttctcagaatgcttctttctagtttttatctgaagttattttctttttcacaataggcctcaatgcacttcaaatatcccctcacagattctgccaaaacagtgtttccagactgctgtatacaaagaaactgttaactctgcaaggtgaaygcacacatcacaaagtggtttctcagatagactctttctagttgttatcctgggatttttactttttggccattggcctcaatgaactccaaaatgtccattcacagaatggaaaaaaaaaagtgtttccaaactgctgaatggaaagaaaattttaactctgagagatgaatgcacgcattagaaattagtttctcagaaatcttctttctagtttttatctgaaggtatttcctttttcaccataggcctctatgcattcccaaatatccctttgctgattgtgccaaaacagtgtttccagactgctgaatgaaagaaaggcttatctctgtgaggtgaatgcacacatcacaaagcattttgtcatataacttccttcta

SEQ ID NO: 582080 - DNA, 443 bp, Homo sapiens
ttctcagaaatcttctttctagtttttatctgaaggtatttcctttttcaccataggcctctatgcattcccaaatatccctttgctgattgtgccaaaacagtgtttccagactgctgaatgaaagaaaggcttatctctgtgaggtgaatgcacacatcacaaagcattttgtcatataacttccttctagtttttatcctgtgatattcacttttgtgccattggcctcaaagaactcccaaatgtmcactcacagaatggacgaaacagttttgcaagtggctgaatccatggaaagttttaatcctgtgaggtgaatgcacacatcacaaagcagtttgtcagaaagcttctttctagtttttatctgaagatgttcctttttcaacataggcctcaatgtgctcccagatatcccattgcagaatctatgaaaacag

SEQ ID NO: 582081 - DNA, 443 bp, Homo sapiens
ttctcagaaatcttctttctagtttttatctgaaggtatttcctttttcaccataggcctctatgcattcccaaatatccctttgctgattgtgccaaaacagtgtttccagactgctgaatgaaagaaaggcttatctctgtgaggtgaatgcacacatcacaaagcattttgtcatataacttccttctagtttttatcctgtgatattcacttttgtgccattggcctcaaagaactcccaaatgtccactcacagaatggacraaacagttttgcaagtggctgaatccatggaaagttttaatcctgtgaggtgaatgcacacatcacaaagcagtttgtcagaaagcttctttctagtttttatctgaagatgttcctttttcaacataggcctcaatgtgctcccagatatcccattgcagaatctatgaaaacag

SEQ ID NO: 582082 - DNA, 494 bp, Homo sapiens
aaaacagtgtttgcaagctgctgaatctgcagaaagtttaactccatgagatgaatgcacacatgaaaaagcagtttctcatttgctgaatggacatttgctgaaaagcatttgctgaatggacaacagtgttttcaaaatgttgtttaaaacgaaaggtttaaatctgtgagatgaatgcacacatctcaaagcagtttttcagcaagtttctttctagttttaagctgaggttattacctttttcacctcaatgaaatggtaggcctcaatgtgctaccagatatcacttcacagattttattaaaacagygtgtccaaactgttgaattataagaaaggttgaattccaccagatgaatgcacacatcacaaatcagtttctctgaaagcttcttttttgtctttatctgaagatatttcctttttcaccataggcctcaatgtgctcccaaatatcccatcgtggtttctgccaaaagagtgtttccaaa

SEQ ID NO: 582083 - DNA, 494 bp, Homo sapiens
aaaacagtgtttgcaagctgctgaatctgcagaaagtttaactccatgagatgaatgcacacatgaaaaagcagtttctcatttgctgaatggacatttgctgaaaagcatttgctgaatggacaacagtgttttcaaaatgttgtttaaaacgaaaggtttaaatctgtgagatgaatgcacacatctcaaagcagtttttcagcaagtttctttctagttttaagctgaggttattacctttttcacctcaatgaaatggtaggcctcaatgtgctaccagatatcacttcacagattttattaaaacagcgtgtccaaactgttgaattataagaaaggttgaaytccaccagatgaatgcacacatcacaaatcagtttctctgaaagcttcttttttgtctttatctgaagatatttcctttttcaccataggcctcaatgtgctcccaaatatcccatcgtggtttctgccaaaagagtgtttccaaa

SEQ ID NO: 582084 - DNA, 418 bp, Homo sapiens
ctgagaaactgctttgtgatgtgtgcattcacttcacagagttcaacatttctgtggattcagtcatttgcaaatactgtttttgtccattttgcgaatgaacctttgggagttcattgaggcaaaggccaaaaagctaatatcccagcataaaaactggataaaaagttatctgagaatctggtttgtgatgtgtacattcagctcgcagtaataaacatttcttttcattcagcagtctggaaacactcttttggcacrtatctgacaaactgccttgtgaggtctaccttcatctatcagagttaaacctttattttcattcagcagtttcaaaacactgttttggtataacctgtgctcccaaatatatgggagtaccttgagtcctatgatgaaaaaggaaatatcttcagat

SEQ ID NO: 582085 - DNA, 478 bp, Homo sapiens
gaacagcctgggataaaaactagaaggaagctatatgtgaaaccacttagttatgtgtgcattcatctcacagttaaacctttcttttcattcagyagtttggaaacactgttttggtggaatctgcgatgggatattttggagtgcattgaggcctacggtgaaaaaggatctatctttagatgaaaactagaaaaaagcattcagacaaacttctttgtaatgtgtgcattcatctcacagagttaaacctttcttttgagtcatcattttggaaacagtgtttttgtccctttcacagaatggacaattgggagaccattgaaaccaatggtgaaaaagtgaacatcacaggataaaaagtagaagaaagatatctgacaaaccactttgggatgtgtgcattcatctctcagagttaacttgtttttcattcagcagttttgaaacactgtttttgtagaatctgtgaagggat

SEQ ID NO: 582086 - DNA, 510 bp, Homo sapiens
ttgggagctcattgaggccaaatgcaaaaaagggaacagcctgggataaaaactagaaggaagctatatgtgaaaccacttagttatgtgtgcattcatctcacagttaaacctttcttttcattcagcagtttggaaacactgttttggtggaatctgcgatgggatattttggagtgcattgaggcctacggtgaaaaaggatctatctttagatgaaaactagaaaaaagcattcagasaaacttctttgtaatgtgtgcattcatctcacagagttaaacctttcttttgagtcatcattttggaaacagtgtttttgtccctttcacagaatggacaattgggagaccattgaaaccaatggtgaaaaagtgaacatcacaggataaaaagtagaagaaagatatctgacaaaccactttgggatgtgtgcattcatctctcagagttaacttgtttttcattcagcagttttgaaacactgtttttgtagaatctgtgaaggga

SEQ ID NO: 582087 - DNA, 510 bp, Homo sapiens
ttgggagctcattgaggccaaatgcaaaaaagggaacagcctgggataaaaactagaaggaagctatatgtgaaaccacttagttatgtgtgcattcatctcacagttaaacctttcttttcattcagcagtttggaaacactgttttggtggaatctgcgatgggatattttggagtgcattgaggcctacggtgaaaaaggatctatctttagatgaaaactagaaaaaagcattcagacaaacttctttgtaatgtgtgcattcatctcacagagttaaacctttcttttgagtcatcattttggaaacagtgtttttgtccctttcacagaatggacaattgggagaccattgaaaccaatggtgaaaaagtgaacatcacaggataaaaagtagaagaaagatatctgacaaaccactttgggatgtgtgcattcatctctcagagttaacttgtttttcattcagcagtttkgaaacactgtttttgtagaatctgtgaaggga

SEQ ID NO: 582088 - DNA, 589 bp, Homo sapiens
ggtttgcaaatactgtttttgtgcattgtgtgaagggacatttgggatctcattgaggccaatggtgaaaaagcaaatatcccaggataaaaaataaaagaaggttccaagatcactgcataagaacagctccagtctacagctctcagtgtgagtgatgcagagggtggaagatttctgcacttccagttgagatactgggttcatctcactggagattgttggacactgggtgcaggacagtggttgcagttcactgagcattagctgaagcagggggaggcatagcctcacctcggaagcacaagggggcagggaattccctttcctatccaaggaaaggrgtgataggcagctcctgaaaaatcaggtcactcctgccctaatgccgtgcttttctgatggtcttagcaaacggcacacccggagtttatattctgcacctgacttggagggttctacacccatggagtctcactctctgctagcacagcagtctgagatcaaactgcaaagtggtagtgaggctgagggaggggtgcctgccattgctgaggcttgagcgggtaaacaaaatgactgggaagct

SEQ ID NO: 582089 - DNA, 589 bp, Homo sapiens
ggtttgcaaatactgtttttgtgcattgtgtgaagggacatttgggatctcattgaggccaatggtgaaaaagcaaatatcccaggataaaaaataaaagaaggttccaagatcactgcataagaacagctccagtctacagctctcagtgtgagtgatgcagagggtggaagatttctgcacttccagttgagatactgggttcatctcactggagattgttggacactgggtgcaggacagtggttgcagttcactgagcattagctgaagcagggggaggcatagcctcacctcggaagcacaagggggcagggaattccctttcctatccaaggaaaggggtgataggcagctcctgaaaaatcaggtcactcctgccctaatgcygtgcttttctgatggtcttagcaaacggcacacccggagtttatattctgcacctgacttggagggttctacacccatggagtctcactctctgctagcacagcagtctgagatcaaactgcaaagtggtagtgaggctgagggaggggtgcctgccattgctgaggcttgagcgggtaaacaaaatgactgggaagct

SEQ ID NO: 582090 - DNA, 589 bp, Homo sapiens
ggtttgcaaatactgtttttgtgcattgtgtgaagggacatttgggatctcattgaggccaatggtgaaaaagcaaatatcccaggataaaaaataaaagaaggttccaagatcactgcataagaacagctccagtctacagctctcagtgtgagtgatgcagagggtggaagatttctgcacttccagttgagatactgggttcatctcactggagattgttggacactgggtgcaggacagtggttgcagttcactgagcattagctgaagcagggggaggcatagcctcacctcggaagcacaagggggcagggaattccctttcctatccaaggaaaggggtgataggcagctcctgaaaaatcaggtcactcctgccctaatgccgtgcttttctgatggtcttagcaaacggcacacccggagtttatatyctgcacctgacttggagggttctacacccatggagtctcactctctgctagcacagcagtctgagatcaaactgcaaagtggtagtgaggctgagggaggggtgcctgccattgctgaggcttgagcgggtaaacaaaatgactgggaagct

SEQ ID NO: 582091 - DNA, 589 bp, Homo sapiens
ggtttgcaaatactgtttttgtgcattgtgtgaagggacatttgggatctcattgaggccaatggtgaaaaagcaaatatcccaggataaaaaataaaagaaggttccaagatcactgcataagaacagctccagtctacagctctcagtgtgagtgatgcagagggtggaagatttctgcacttccagttgagatactgggttcatctcactggagattgttggacactgggtgcaggacagtggttgcagttcactgagcattagctgaagcagggggaggcatagcctcacctcggaagcacaagggggcagggaattccctttcctatccaaggaaaggggtgataggcagctcctgaaaaatcaggtcactcctgccctaatgccgtgcttttctgatggtcttagcaaacggcacacccggagtttatattctgcacctgacttggagggttctacacccatggagtctcactctctgctagcacagcagtctgagatcaaactgcaaagtggtagtgaggctgagggaggggtgcctgycattgctgaggcttgagcgggtaaacaaaatgactgggaagct

SEQ ID NO: 582092 - DNA, 564 bp, Homo sapiens
ctggctaagtttttgtatttttagtagagacggagtttctccatattggccaggctggtcttgaactcctggcctcaagtgatccacctgcctcggcctctcaaagtgctgggattacaggcgtgagccaccgcgcccggcctaaaaatcaatcttttgaaaattacagtaaggtaggaaaatattcatgatgtaatatttgaaaaaggagcrtacaaaatagcattatgtaggatattaccgatttatagataggtgcagaaatacctggaaaatacatagaaacattaagttgatttctttgtgttacatgtaatatttatttatttatgagatagagtctcgctctgtcatccgggctgtagtgcagtggcgcaatcttggctcactgcaacctctgcctcctgggttcaaactattctcatgcctcaccctcctgagtagctgggattacaggcgtgcgccaccatgcccggctaatttttgtatttttagtagagatgggttttcgccatgttggcctggctggtggtctgcagctcctggtctcaggtgatccgcccg

SEQ ID NO: 582093 - DNA, 370 bp, Homo sapiens
agaatcatatacagaaacaaagcaaatatagtcaaatayacataaaacttacaacaaaggttttcacattatctcacaaagcaaagacagactcaatttatgctacacagggaagacaaacaaaaacagattcagaaaggtgaaaaatagaatgatggcagcagcatggcaggcaaatgccatttccatatggaaactaaggaagacatttaaagcaaggataagaagcaaattcatggcctcaaaagctttatcaataaaaatgaaagagtgaaaataaatgaattaaatccttgacttaaaaatctaaataaagaataacaaaataaagcaaaaaaagtacacgaaaggaaatacacatgggaagaat

SEQ ID NO: 582094 - DNA, 370 bp, Homo sapiens
agaatcatatacagaaacaaagcaaatatagtcaaatatacataaaacttacaacaaaggttttcacattatctcacaaagcaaagacagactcmatttatgctacacagggaagacaaacaaaaacagattcagaaaggtgaaaaatagaatgatggcagcagcatggcaggcaaatgccatttccatatggaaactaaggaagacatttaaagcaaggataagaagcaaattcatggcctcaaaagctttatcaataaaaatgaaagagtgaaaataaatgaattaaatccttgacttaaaaatctaaataaagaataacaaaataaagcaaaaaaagtacacgaaaggaaatacacatgggaagaat

SEQ ID NO: 582095 - DNA, 370 bp, Homo sapiens
agaatcatatacagaaacaaagcaaatatagtcaaatatacataaaacttacaacaaaggttttcacattatctcacaaagcaaagacagactcaatttatgctacacagggaagacaaacaaaaacagattcagaaaggtgaaaaatagaatgatggcagcagcatggcaggcaaatgccatttccatatggaaactaaggaagacatttaaagcaaggataagaagcaaattcatggcctcaaaagctttakcaataaaaatgaaagagtgaaaataaatgaattaaatccttgacttaaaaatctaaataaagaataacaaaataaagcaaaaaaagtacacgaaaggaaatacacatgggaagaat

SEQ ID NO: 582096 - DNA, 490 bp, Homo sapiens
ttattaatactagttcacgtctccatttgctatygtaggaccacagtcttttttttttttttttttttttttttttggagatggagtctcgctctgtcacccaggctggagtacattgccacagtctcagctcactgcaacctccgcctcctgggctcaagcgattctcccacctcagcctccttagtagctgggactacaggtgcaagccaccacacgtggctaattttttgtatgtttggtagagacagggcttcaccatgtttctcaggctgctctcaaactcctgagctcaagtgatccacccacctcagcatcctaaagtactgggattactggcgtgagtcaccgtgcccagccagaccacagtccttttaattgtgcccatatatatctcacatgagaagagacacaagccctgctgactaccatttggcatctgccaatttcttctttctcctgacctggcttccttcaaagatatctgcag

SEQ ID NO: 582097 - DNA, 618 bp, Homo sapiens
gatgttgagcaccttttcatgtrcctgtttgccacttgtatgttttctttcgagaaatgtctattcagatcttttgaccatttttaaagtagatttttagatttgttgtttgagctccttatatattctggttattaattccttgtcagattggtagtttgcaaatatttttgcttattctttgggttgtctcttcactttgctgattgtttcctttgctgtgcagaagcttttacacttgatgtgaacccatttgttcatttttgctttggttgcctgtgcttcccaggtatttactcaagaaatctttttccaaaccaaagtcctggagagtttccccaaagttttcttgtagtaatttcagagtttgaggtcttagatttaaggctttaatccatttggatttgagttttgtatatggcaagagataggggtgtagattcattcttctgcatatggatattcagttttcccaacaccatttattgaagagattgccctttccccagtgtatgtttttgggactgctgtaaaaaatgagtttactgtagatgtatggatttctttctgggttctccattctgttccactggtctgtgtgtctgtttttatggcagt

SEQ ID NO: 582098 - DNA, 485 bp, Homo sapiens
ctccaaacccatgtgagtaaacttctgcatcattttctctgcttagcactctattttctcaccaaactgatgccctgtcaggagttccagttcatttggctagagtgagaacatctgtttaagttatctgttgttgcctaacaaatgtcaaagaaaaaaattattcgtgacactcggtgaagcacagtaaggcagacatttttcagaacatcttggtaggtgaagggatggcacagtggggtcctgcagtaggggagagagattgtgctcaacctcaaacaacaaaaargtggacatttctatctagaagaagcagggtgggctcagtgggtggaaaattactaactggaaacatcaggggtaagggaagattctggctgaactgacctaacaggattcttgctaaaggcaggcagtgctgatcagacatcacctgggtgccggtggagggggcggaaaatgatcaggtatcgaaggtgatcaga

SEQ ID NO: 582099 - DNA, 485 bp, Homo sapiens
ctccaaacccatgtgagtaaacttctgcatcattttctctgcttagcactctattttctcaccaaactgatgccctgtcaggagttccagttcatttggctagagtgagaacatctgtttaagttatctgttgttgcctaacaaatgtcaaagaaaaaaattattcgtgacactcggtgaagcacagtaaggcagacatttttcagaacatcttggtaggtgaagggatggcacagtggggtcctgcagtaggggagagagattgtgctcaacctcaaacaacaaaaaggtggacatttctatctagaagaagcagggtgggctcagtgggtggaaaattactaactggaaacatcaggggtaagggaagattctggctgaactgacctaacaggattcttgctaaaggcaggcagtgctgatcagacatcacctgggtgccggtggagggggmggaaaatgatcaggtatcgaaggtgatcaga

SEQ ID NO: 582100 - DNA, 562 bp, Homo sapiens
ctcatttaaaagattaggttaatcattagtgctgtctatccaatattttattttctcctcttggttgaggtgatgagtggtcgtgtgacgtgttttgttaatgaaatgtgaaagtgacatttgtgactcctggctagaagatttaagagccaattaataattcaccacactctatctacttccttctgctaaggtaattagcaatatgtgcaagagagtagctgttcaatcagtgtgggctccagaattagragaaatcaagtatattctccagacaacccaaaatggacaactagagagagcaagaaaaacaaaacaaaaagctctgttgttataagtcactgcaatttaaaattctttgttattgcagtataatctactctgacagaaacaaagtgtaacatggaaggaattactccatgggacatatcaaatctgataaaaataaagtaattaagaccatgactatggtttggctgtgtccccacccaaaatctcatgttgaattgtaatccccatgatccccataatttccacgtgtcaagagtgggaccaggtagag

SEQ ID NO: 582101 - DNA, 563 bp, Homo sapiens
gtggggacaaaaagtgaaaccatatcaatccccaagaacgtggattatttctcatgtgactttctcaaacaacactttttctccaactccctagcaatggtgctaaaagaaggaaagtacacaccatggcaatagcatcaaacaatagttttaagaaggtgaagcctagaatagaacaaatttgtgagaaaagagcaccactattaatatatgaatattgagcactatgtctgttttaaccatatattccatgttcaatatatacctacaacagtgccatcagtagaaactcactgtccttgctctaatacactcaatattttcacccaaataatagaagtcctttcccccaattagtatgagtgtagaasaaatgacaatgatctacagtgcaacttctcatgtaatcagaaattggtagagcatgcaaatccaaggctgatgtattcacatcatgtccgaatatcaggctttgcattagtagtggggatggggtaggataatatcagtgtctgatttctgcccacgtggtcagccaccattagtatgttttgcaggaaagt

SEQ ID NO: 582102 - DNA, 606 bp, Homo sapiens
atgctgaatttacagaatttacastacttggatactaaaaattatcaggctttctgtctcactaaaatttactaggaaaagaggcaagttcttcctagaacagcaattctcaagctatggtctagaaacaagcactttcctgaacatttggcttggtagaatagaatgaacacactatagagggaaatatcccaagaggacattgagagaacactgatatattaggttatttctctttttcagtgagtcttcagagtagaacatttggagtgccactaaccattaaaattgtattccaagatcttagaagggtactccaagatcttagaaggatatcccaagtacctgtcttatgcccctatcagcaatgtgccccaaaatccccattcctgacctacttagcttgtagtctatgaaaaggaaccacagtaagataaagaaaagtgaaaaattgtcaatgttcaatatacaacctatatttttcaatcagatttatttatatgaccacacttaggacaatctcactatttgcaattttctgaatcaccaaaaagaaataaatagggaagcaaaaaggttgtataaaatgaccacagaagaatcaca

SEQ ID NO: 582103 - DNA, 476 bp, Homo sapiens
ttattattattttgttgttcctctattcccacttctttgttttctttttgattatttgaatatttttattatctcattgtaatttctgtctactggctgacttttttttaatctgttgattttctgcttataaatctctgatttttttttcagyttgttctagagattacaatatgcatatctaagctgtcatggtttactaagagttaatattgtattagttaatataaaacgtagaaatgctgctactttataaatccttttgccccattgaattttaggttatactttattgcttttatatacattgaaaaccccaccagataattattttttctttattaagtgaatttaaagagaaaaataactgttttctgcaattactctaatatttaccctttccaattgttctcaagacatgacggaaggtccagatatcactttggcatcattccctttcctttagccttttgtta

SEQ ID NO: 582104 - DNA, 357 bp, Homo sapiens
acttttagctttgagaaatctccatactcttttccatagaggttgtactaatgtgtatttccaccagcagcatataagtgttcctctttcaccacgtccacccgagcatcttttggggatttttttttttgactttttaataatggttattctggctcgggtaaggtggtatacattgtggttttaatttgcatttccttgacaattagtgatgttgagcatttattcatatgtttttgaccatttgtatattttttgagaaatatctattcatgtsttttgtccacatttcagtttttaagttgtctgtttactgtaatgattatttattttgctgtgaagaagctttttagtttg

SEQ ID NO: 582105 - DNA, 263 bp, Homo sapiens
tcagagaaaatagacttcatgcataaaaacatattaatgtcaaagaaaattgattttagtgcaaaaaaatcactcagcatatttttaaaatacttatcaactatcagagaaaatagatttttgaacagaattttktttaacaaatatcaaagaaaataggctaaacggaaaaaaaggaaaatgtgcccagagaagctatattaatatcagagaagatagacttcaaggaaaaaaataatgaggctagaaatagtcacttcata

SEQ ID NO: 582106 - DNA, 559 bp, Homo sapiens
gcctcctttgttctctggcttctggttgggcaaggctaatgagaggcactaggaggtgattagaggccaggagcaaaatgatgtctagcttttattctctagcttcttcctgacaaagccacagtttatcagagggcatgttcctttccaaggccacagctcctgcagatcctttgctatagtcagagtactttctggatttcagttacttctctcttcctcctcctcattcctttaggatgtagagataggaagcaaaggctttctctgctgccagccctggcagacttcgcttcccaggttggtttcctttgtcattctgccccatgtatgtaaattgtcctgttatcagtttctctttgtttactattcctaggattccatgcgtttctgctaacatctgatttggtacaagcagaagaatgcaaagaagataycagagttgcagccagcattgctggatttgaactttggttctattgctccctagctttgtgacagcaggcaaaccccttacccttcttggactgcagtctctttaactgtgcaatggaaggtg

SEQ ID NO: 582107 - DNA, 610 bp, Homo sapiens
cacatggttgaaaggtctcagaaaactataatcatggcagaaggcaaaggggcagcaaggaccttcttcacatgtcggcaggagagagaagcatgaggagcaaagcaggaagaacctcttataaaaccatcagatctcatgataactcactcactatcacaagaacagcatgggagaactgcccccatgatccagttacctcccatcaggtctctccctagacatgtggggattatggggattagaattcaagatgagatttgactggggacacaaagcctaagcatataaaatgttctcaccacaaagaaatgataaatgtataaagtgttggataggctaatactctcattttattattacactatatatgtgtatcaaagcagctcactgtactccataaatatctacaatttgtatgttaattaaataaataaataccaaaaacatggagaaagtttgcaaagtgggaggcaagtgtcagatctcttttctaccaatgtcattttatraaacttttttttatctcttaggctatatgaatgattgcataacatattgagatagtgttgaagttggtttgactttaaacagctgaggtaaaattaca

SEQ ID NO: 582108 - DNA, 487 bp, Homo sapiens
tatgaatgattgcataacatattgagatagtgttgaagttggtttgactttaaacagctgaggtaaaattacatgagttactaccacactatatttttgtgttttgaaagaattactgtagatttctaaaacaacttactaacctactaccagcaggaacttgcatactggaataattagattatttcatgtaagtatttcaaaatgttttataacatctctgaaacgctagactttttgagtttttatagttaattttaataattcagaggtatccaaattataacaaattgtgagactttatctcaattttgttattgtagagaactttaaaaatatttttataagaaaacttaatacataaatataactttaaaaatatattggcatatgccaagaagtgctactcaataaaaaatctctaaaayaaaatgagaaaaccagccacagtccccaaatttggctttaacctttgttttctcattca

SEQ ID NO: 582109 - DNA, 616 bp, Homo sapiens
ccacagtccccaaatttggctttaacctttgttttctcattcatgcatctactagtacagcagattcttatatccctgattttcctcccccttcaccatatggctgatcatctgttataggataatacagaatgttccagagtctacaggggagatgtctttgctgtagaacacactgcccaaatctcaacaaacctggacgaaatggctcttcctgtgtaaatcacacttttctctcctaaaaaaaaaaatctaaattcattctactttgttctgttcactagaataaaagcacccttctttctgccaaggtacttggccaatttcaagcttctatgatgtgtatataggctagcatcttattctttctttagcttttctcatgtgattgagagattagttaaaagcccakggaggatgctttcaaaatacaaaacaatctgctgttttgcccataatgaactaaatagcaaatgcttataatacttttacacacgtcagtgtgaaattgagcaagaaacaaaagtctaacccataaaagatttggaatattttcaaattgagtgtatgagcattttcagcaaccaatatatatttgtaagttttggggggtttt

SEQ ID NO: 582110 - DNA, 619 bp, Homo sapiens
caaaaaatgctacttttttcaatgacagttttcaaggaacagagaaccatggacaataaacaatgggggatgttgcatatttccaacgccatttcctctccagaatttatcattattagcagtttgatgatgaccgttttttctccttccattttatctggatccttaaattttcagatggaagaataacaaacaatccattttaagctggtaaaagttaagttgatggcaagcttctctcacttttttcttccagtacaagtttcttgaaattgtcttgctcagaytttagtccttcagatatacatatttttttacctcatgcagtctattcttttcaagagaattaatgacattttaattactaaatgttcagtgctggtttccacctccctttcacatcgacacggctgactagtgacctttcttgctttctctccttcattctgcatgataataggctctcttggctttcttcctacttctacctacttatctgtctcttttgctggcttgtccaactctaatatattcttcctttttctttattagtctacccattctccttgagtaatacaatgaatgcctcaggtttccaccaaaatccatgtttataact

SEQ ID NO: 582111 - DNA, 619 bp, Homo sapiens
caaaaaatgctacttttttcaatgacagttttcaaggaacagagaaccatggacaataaacaatgggggatgttgcatatttccaacgccatttcctctccagaatttatcattattagcagtttgatgatgaccgttttttctccttccattttatctggatccttaaattttcagatggaagaataacaaacaatccattttaagctggtaaaagttaagttgatggcaagcttctctcacttttttcttccagtacaagtttcttgaaattgtcttgctcagattttagtccttcagatatacatatttttttacctcatgcagtctattcttttcaagagaattaatgacattttaattactaaatgttcagtgctggtttccacctccctttcacatcracacggctgactagtgacctttcttgctttctctccttcattctgcatgataataggctctcttggctttcttcctacttctacctacttatctgtctcttttgctggcttgtccaactctaatatattcttcctttttctttattagtctacccattctccttgagtaatacaatgaatgcctcaggtttccaccaaaatccatgtttataact

SEQ ID NO: 582112 - DNA, 619 bp, Homo sapiens
caaaaaatgctacttttttcaatgacagttttcaaggaacagagaaccatggacaataaacaatgggggatgttgcatatttccaacgccatttcctctccagaatttatcattattagcagtttgatgatgaccgttttttctccttccattttatctggatccttaaattttcagatggaagaataacaaacaatccattttaagctggtaaaagttaagttgatggcaagcttctctcacttttttcttccagtacaagtttcttgaaattgtcttgctcagattttagtccttcagatatacatatttttttacctcatgcagtctattcttttcaagagaattaatgacattttaattactaaatgttcagtgctggtttccacctccctttcacatcgacacggctgactagtgacctttcttgctttctctccttcattctgcatgataataggctytcttggctttcttcctacttctacctacttatctgtctcttttgctggcttgtccaactctaatatattcttcctttttctttattagtctacccattctccttgagtaatacaatgaatgcctcaggtttccaccaaaatccatgtttataact

SEQ ID NO: 582113 - DNA, 643 bp, Homo sapiens
aacacaatgagaaagaagattctgccaagcctgacatttatttcttcagttagtaaaaatatctattgcatgcctaytgtgtgctaggtcagattccagtcttgagattagaatccctgccatttaggatttacagtgagagaaacagtcaatcaacaggtaaataaaaaataatataatgtcaattagtaatgaatgccatgaagaagaagcaggcaaagagccaaagagcaatgggaggtgacactttacatctattcttttcaagcattgacatgcacatgaatcacctggcatattactaatatgtagattttgattcagtaggtctaggataagatctgtgataaattctttatttttaataagctcctgggccatgtcaatgctactagctcataaatcccacttgtgttgtgaggatttagagtgagagttgaacagagacctcagtgaaatgaaagagtgtgctcttgctggggaaggaaattccacaggagagggttacatgcaaaagctcaacatagaaactgacccagaaggtcagtgttgctggacacaatgagtgaggggggaaatggtagtaaactaagtcagaggggtctccagcagtcagatcatgaggaatttataggtcacgtta

SEQ ID NO: 582114 - DNA, 619 bp, Homo sapiens
taggatttacagtgagagaaacagtcaatcaacaggtaaataaaaaataatataatgtcaattagtaatgaatgccatgaagaagaagcaggcaaagagccaaagagcaatgggaggtgacactttacatctattcttttcaagcattgacatgcacatgaatcacctggcatattactaatatgtagattttgattcagtaggtctaggataagatctgtgataaattctttatttttaataagctcctgggccatgtcaatgctactagctcataaatcccacttgtgttgtgaggatttagagtgagagttgaacagagacctcagtgaaatgaaagagtgtgctcttgctggggaaggaaattccacaggagagggttayatgcaaaagctcaacatagaaactgacccagaaggtcagtgttgctggacacaatgagtgaggggggaaatggtagtaaactaagtcagaggggtctccagcagtcagatcatgaggaatttataggtcacgttatggattttcaatgacttactgtgatgagaggtccttgcaggggtgaaagtatattggtcggagttctccggggaaacagaaccaatagattgtgtgtgtg

SEQ ID NO: 582115 - DNA, 619 bp, Homo sapiens
taggatttacagtgagagaaacagtcaatcaacaggtaaataaaaaataatataatgtcaattagtaatgaatgccatgaagaagaagcaggcaaagagccaaagagcaatgggaggtgacactttacatctattcttttcaagcattgacatgcacatgaatcacctggcatattactaatatgtagattttgattcagtaggtctaggataagatctgtgataaattctttatttttaataagctcctgggccatgtcaatgctactagctcataaatcccacttgtgttgtgaggatttagagtgagagttgaacagagacctcagtgaaatgaaagagtgtgctcttgctggggaaggaaattccacaggagagggttacatgcaaaagctcaacatagaaactgacccagaaggtcagtgttgctggacacaatgagtgaggggggaaatggtagtaaactaagtcagaggggtctccagcagtcagatcatgaggaatttataggtcacgttatggattttcaatgacttactgtgatgagaggtccttgcagggrtgaaagtatattggtcggagttctccggggaaacagaaccaatagattgtgtgtgtg

SEQ ID NO: 582116 - DNA, 550 bp, Homo sapiens
ggtaacttatttgctcaaatggtacgactagatggtcatacaagtttaaggcacagaataatcaagagatttattaatttgaacctaggatatattactaaaaacacagaaatttcttatattttctgttaaagcaatctcagtccacatttattaaaatactcatctagcttggtttttgggctatatcctcatcaaacgatggtaataggaaatgaaccaaagtgacatctgtagtctcagcaacttaaagtttgcttgcaatgattagttttcctttcccaaccctctgaaataaggtcttctcaagctttaggatgygttcaacattaagtcttcagttaagacatcttgcctatattggaagagaagggattttataggttaataggctgcatggtataaggtgggaaagggtaatttactaggaggctaatacatttactgggaaattggccatcctgtatctgtcatagttagcagattaaaatatttaatgccaaaggggacataatagccaatgaagccttgagtcacattactgtgtgaa

SEQ ID NO: 582117 - DNA, 624 bp, Homo sapiens
gctaatcaggactttacttgacagaaaaaaaattgttgagtttctaatacacgaatattcttgcaaatgatccagaagagaaagtgcagaatgaaaacaccagggagatgccaaattgatgtaattaaatttgaggaagtatttagagctctggaagactgagcagaaatgaaacaagtcagattcctttggtataaatacaatgttggcttaagagaaaataattgaagccacacctatacaatgatgagatttgaacaggggataacaatarggaggcacctgagcatccctgtagattctccattgaaatcaccaaattgatgcagacaaatgggctaaaatagttgattattattaacaggtttttttctttttgagagaaaaaaactcaaagcaggttatcagattccgcaaatattccatgtagatctgattgctatactttgactttttttatagtggatatggaaaagacttacgtaaagttaaggaatataatgagttggaagaattcacacatgaagaccatcccttttaaaagataaagcctgagagggaataacatctaatttcatacagtcttgaaagctctgtaaaaggtagatacaggcttatcaattc

SEQ ID NO: 582118 - DNA, 624 bp, Homo sapiens
gctaatcaggactttacttgacagaaaaaaaattgttgagtttctaatacacgaatattcttgcaaatgatccagaagagaaagtgcagaatgaaaacaccagggagatgccaaattgatgtaattaaatttgaggaagtatttagagctctggaagactgagcagaaatgaaacaagtcagattcctttggtataaatacaatgttggcttaagagaaaataattgaagccacacctatacaatgatgagatttgaacaggggataacaataaggaggcacctgagcatccctgtagattctccattgaaatcaccaaattgatgcagacaaatgggctaaaatagttgattattattaacaggtttttttctttttgagagaaaaaaactcaaagcaggttatcagattccgcaaatattccatgtagatctgattgctatactttgactttttttawagtggatatggaaaagacttacgtaaagttaaggaatataatgagttggaagaattcacacatgaagaccatcccttttaaaagataaagcctgagagggaataacatctaatttcatacagtcttgaaagctctgtaaaaggtagatacaggcttatcaattc

SEQ ID NO: 582119 - DNA, 616 bp, Homo sapiens
agtgtcttagaaaacccttaagcagacagtccctgagaaacagtgtgttatccaatgttaagaaaatatctatgattgattctttactacttcatgatagggaagttatgccatgtagtgatggtgtggagggtgtttttggaagataactttgtgatatgctctgaggaatgacagatcttttatcctttcaatatagtaaaagttcttaaagaaaaacctgggaactatggagatctttttttttctgctttgaggagaatattaacccatttttgctgattttagtaacttcacagagaagttttttaaaaaaattcatatggatgggggtctcactatattgcccaggctggtctcaaatcctggtctcaagtgatcctccagccttggcttcccaaagtattaaggctgtaggggtgagcactgcacctggctaagactccattcttaaagcattgtgaatgttttcattgttataatttatttataacaatataaaatataaattaaaaataaaattataacaatttatttataattattataaatamatttataatttaataaataaataattccctttccttgagtgacaagggaaatggttgaggtc

SEQ ID NO: 582120 - DNA, 492 bp, Homo sapiens
  misc_feature 1, 2, 3, 4, 5, 6, 7, 8, 9, 10, 11, 12, 13, 14: n = A,T,C or G
nnnnnnnnnnnnnntccttccgcccgtggtgaagactacgttagccttgtagtaaaatttcaagttaggtaatgtgatgcctccagatttgttcttttygtttaggttgctttgactatttgggctattttttggttccatgtgaattttaggattgatttttctaattctgtaaaaaatagtgttggtaatttgatagaaattgcattgaatctgtagattgctttggagtgtatggtcattttcatgatattgattgttctaacccatgagcaaagaatgtatttccatttgcttttgtcatctacaatttctttcagccgtgttttatttttcttgtagagatactacacctccttggttaagtatgttctagcatattttatctttttgtagctactgtaaaagggattgagttttttatttgattttcagcttggttgttgttgatgtatagcagtgatactgatttatgcacactggttttgtaat

SEQ ID NO: 582121 - DNA, 492 bp, Homo sapiens
  misc_feature 1, 2, 3, 4, 5, 6, 7, 8, 9, 10, 11, 12, 13, 14: n = A,T,C or G
nnnnnnnnnnnnnntccttccgcccgtggtgaagactacgttagccttgtagtaaaatttcaagttaggtaatgtgatgcctccagatttgttcttttcgtttaggttgctttgactatttgggctattttttggttccatgtgaattttaggattgatttttctaattctgtaaaaaatagtgttggtaatttgatagaaattgcattgaatctgtagattgctttggagtgtatggtcattttcatgatattgattsttctaacccatgagcaaagaatgtatttccatttgcttttgtcatctacaatttctttcagccgtgttttatttttcttgtagagatactacacctccttggttaagtatgttctagcatattttatctttttgtagctactgtaaaagggattgagttttttatttgattttcagcttggttgttgttgatgtatagcagtgatactgatttatgcacactggttttgtaat

SEQ ID NO: 582122 - DNA, 533 bp, Homo sapiens
atccttagggctttctagatataagattatatcattggcaaacaaagataatttgactccatgttttacaaatcgaatgccctttatttatttctcttgtctgattgctctggctaggattycctgtactatgttgaatagaagggataaaagtcagcatccttgtcttatttcagttaataggggaaatactttgaactttttctcattcagtatgatgttggctatgggtttggaatatacagctttaattatttagaggtatgtttcttctatgtctagtttgttgagggtttttatcataaagtcatgctggattttattgaatgctttttctgcatctatagaaatgatcatatatttatttaaaaaaattctgtttatctgatgaatcacatttattcccttgaatttgttaaaccatctctgcatccctaaagtgaaatccatgtgaatatagtggattatttttttgatgcgctgttggatttggtttgctactattttgttgagcatttttgcatctatattca

SEQ ID NO: 582123 - DNA, 573 bp, Homo sapiens
cttctgctagctttaggtatgtttttttcttatttctctggttccttcagatgtattgttaggctgtcaatttgtgatctttcagaattattgatgttggcattttgcactrtaaactttcctcttagctttgcttttgctgtatcccagaggttttgataacttgtgtcactgttgttattcatttcaaaaattttttaaatttccaccttaatgtcattgttaacccaaaaatcattcaggagtagattgtttaatttctatgtatttgcatagttttgagggttccttttggaatcgattcctagttttattttaccgtggtctgacaagaaacttaatatgattttgatttttaaaaatttattgaacttatttagtgacctatcatataatctatcttggagaatcttccatgtgctgatgagaagaatgtatattctgtagttcttgggtagaatgttctgtaaatatctgttaggctcattttttctagactgaaatttaagtctagtgtttctttgttgactttctgctttgatgatctctctagtgctgttagaggagtgttga

SEQ ID NO: 582124 - DNA, 671 bp, Homo sapiens
gtcaaaaacattttcattcaactcaaaaataaatacgcccactcaattcatgaaaattgcttttgcgtttgattttgaattgtttgaatacttcagacgtgattatttcaattatgtaagctaagctgcatttcaatctgggcacagacttaycatcaaaatgttcctgttgagaagaaccagtttctcttctttaaatttcaagcagttttatatttattgtcatgatctaggacactagtgataatcatccctgattcctctctttgccactcccccatcagtcaccaaatcctgggcatttgaatatgtgcaactcgtgtctttcttcatttctccaagtcctatcactgttccattttgggacttcattatctcttggagagaatactgaaacattcatttaatgcctgcaggctctactcttagttaccagtcctccacattgcagccaaagctaacttttaaaaacagccccgattatgttttcctcccactgaaagtcaataaataaaatttagtgtttcccactctccacagaacaatgtctatgaatccgttagcgttctggtttcaacctactcgtcctgacctcaggatttctttcaacatttatttacctcatttcctttttttcttttcagtggctgctaatatgtcagatacaatac

SEQ ID NO: 582125 - DNA, 671 bp, Homo sapiens
gtcaaaaacattttcattcaactcaaaaataaatacgcccactcaattcatgaaaattgcttttgcgtttgattttgaattgtttgaatacttcagacgtgattatttcaattatgtaagctaagctgcatttcaatctgggcacagacttaccatcaaaatgttcctgttgagaagaaccagtttctcttctttaaatttcaagcagttttatatttattgtcatgatctaggacactagtgataatcatccctgattcctctctttgccactcccccatcagtcaccaaatcctgggcatttgaatatgtrcaactcgtgtctttcttcatttctccaagtcctatcactgttccattttgggacttcattatctcttggagagaatactgaaacattcatttaatgcctgcaggctctactcttagttaccagtcctccacattgcagccaaagctaacttttaaaaacagccccgattatgttttcctcccactgaaagtcaataaataaaatttagtgtttcccactctccacagaacaatgtctatgaatccgttagcgttctggtttcaacctactcgtcctgacctcaggatttctttcaacatttatttacctcatttcctttttttcttttcagtggctgctaatatgtcagatacaatac

SEQ ID NO: 582126 - DNA, 671 bp, Homo sapiens
gtcaaaaacattttcattcaactcaaaaataaatacgcccactcaattcatgaaaattgcttttgcgtttgattttgaattgtttgaatacttcagacgtgattatttcaattatgtaagctaagctgcatttcaatctgggcacagacttaccatcaaaatgttcctgttgagaagaaccagtttctcttctttaaatttcaagcagttttatatttattgtcatgatctaggacactagtgataatcatccctgattcctctctttgccactcccccatcagtcaccaaatcctgggcatttgaatatgtgcaactcgtgtctttcttcatttctccaagtmctatcactgttccattttgggacttcattatctcttggagagaatactgaaacattcatttaatgcctgcaggctctactcttagttaccagtcctccacattgcagccaaagctaacttttaaaaacagccccgattatgttttcctcccactgaaagtcaataaataaaatttagtgtttcccactctccacagaacaatgtctatgaatccgttagcgttctggtttcaacctactcgtcctgacctcaggatttctttcaacatttatttacctcatttcctttttttcttttcagtggctgctaatatgtcagatacaatac

SEQ ID NO: 582127 - DNA, 555 bp, Homo sapiens
cttacacttatttaaggtttatcttaagtgtaaacgtaactgggcattctgtttttttaacatttagcaaccttaatctaatggcatttgcagttctggaagaagcagttgagaggatgaacagaacttttggcaacatctcaagaatttgaagcaaaagtctaaacaaggaactgccaaagggaagatcaccacaactttgttttgttttgttttttggctgggaccttgaagaactacatgtaagaataaaagtgaagcaaaatgaaaccagactacgctgactagaaccccttttcaagtcatttgagaaatcatgaaaatttccacaccctgaacttggactaagacagtcatgtgttaataatgcccagracaccatgaaaatcccttaaatggaattatcatcccagatctgaaattatttctacaattgttatttaactaatatccaacatataatcagagagccaagtatgcagtaaaactaaattcataggaacaaaaaatagcagagaaaaaataaccaaaaagtagaagaacagggacaccaga

SEQ ID NO: 582128 - DNA, 557 bp, Homo sapiens
tgtaatttaaatttattttctcatttgatattttgcagttatgtttaagtcacatgctagaagagttttggtattttttccagaaaataaaaacactttgtttggagtactaacataaatatagctkggagaaataacctgtaaactgaaagcaaatctaatctatataaatatcagtttgttgttctgtttcccttgtataatatagtaaggctttagacctcactttactatactgatgttaaggggtcaccatacagcaaaacactaagcattttacatttcagctttttcagaaataacgttgtattcatttcacagtgaataagaagataaggatgatatcaaagaacatcacagaatataacaagaaattgcattttacaataggtaagaaaatgttccctagaatatttacacttaaaagaaaaatcttgctccattgatataacatctcaaggaagaactagcaatagaagaaaattgtgctaaactttagaccctgttgtagcaatatttaaaatgctgcctcatttcctcacaagctagagatgtta

SEQ ID NO: 582129 - DNA, 557 bp, Homo sapiens
tgtaatttaaatttattttctcatttgatattttgcagttatgtttaagtcacatgctagaagagttttggtattttttccagaaaataaaaacactttgtttggagtactaacataaatatagctgggagaaataacctgtaaactgaaagcaaatctaatctatataaatatcagtttgttgttctgtttcccttgtataatatagtaaggctttagacctcactttactatactgatgttaaggggtcaccatacagcaaaacactaagcattttacatttcagctttttcagaaataacgttgtattcatttcacagtgaataagaagataaggatgatatcaaagaacatcacagaatataacaagaaattgcattttacaataggtaagaaaatgttccctagaatatttacacttaaaagaaaaatcttgctccattgatataacatctcaargaagaactagcaatagaagaaaattgtgctaaactttagaccctgttgtagcaatatttaaaatgctgcctcatttcctcacaagctagagatgtta

SEQ ID NO: 582130 - DNA, 595 bp, Homo sapiens
tggagtactaacataaatatagctgggagaaataacctgtaaactgaaagcaaatctaatctatataaatatcagtttgttgttctgtttcccttgtataatatagtaaggctttagacctcactttactatactgatgttaaggggtcaccatacagcaaaacactaagcattttacatttcagctttttcagaaataacgttgtattcatttcacagtgaataagaagataaggatgatatcaaagaacatcacagaatataacaagaaattgcattttacaataggtaagaaaatgttccctagaatatttacacttaaaagaaaaatcttgctccattgatataacatctcaaggaagaactagcaatagaagaaaattgtgctaaactttagaccctgttgtagcaatatttaaaatgctgcctcatttcctcacaagctagagatgttactttgctccaacttattatttcttctttttcaagtaaatgttgctgaaatagatttgtaaagatttctgattaayccaattactttaaccccaactcactcttcaagacacaagtctaacttttttgaagataaagtaac

SEQ ID NO: 582131 - DNA, 595 bp, Homo sapiens
tggagtactaacataaatatagctgggagaaataacctgtaaactgaaagcaaatctaatctatataaatatcagtttgttgttctgtttcccttgtataatatagtaaggctttagacctcactttactatactgatgttaaggggtcaccatacagcaaaacactaagcattttacatttcagctttttcagaaataacgttgtattcatttcacagtgaataagaagataaggatgatatcaaagaacatcacagaatataacaagaaattgcattttacaataggtaagaaaatgttccctagaatatttacacttaaaagaaaaatcttgctccattgatataacatctcaaggaagaactagcaatagaagaaaattgtgctaaactttagaccctgttgtagcaatatttaaaatgctgcctcatttcctcacaagctagagatgttactttgctccaacttattatttcttctttttcaagtaaatgttgctgaaatagatttgtaaagatttctgattaacccaattactttaaccccaactcactcttcawgacacaagtctaacttttttgaagataaagtaac

SEQ ID NO: 582132 - DNA, 611 bp, Homo sapiens
tgttcctgtgaataacattattattgtaaaacttaaggttgatttttgaggtattttttaggccctgccttctgatggaccaggtggtgccacccagactggtaaaccaacttacctgatctcacggcccccaggaactgactccatgcaagaagataagctttgactgcctataatttcatccctgacccaactaatcagcattccccatcccctagccctgtgtctgccaaactactcttaaaaatccgagcctctggctgggtgcagtggctcatgcctgtaatcccaacactttcagaggctgaggcaggcggatcacgggttcaggagattgagaccatcctggctaacacggctgaaaccttgtctctactaaaaatacacaaaaaaaattgtcaggtgtggcggcatgcacctgtagtcccagctgcttgggaagtataggcaggagaatcacttgaacctgggaggcaaggttgcagtgagccgagatcrtgccactgtactgcagcctgggcgacagaaggagactctgtctcaaaaaagaaaaaaaaaaaaactgagcctccaaattttcagggaggctgacttgagtaataaaactctgg

SEQ ID NO: 582133 - DNA, 550 bp, Homo sapiens
ttctcttaagattgggaacaaggcaaggatgttcactctaacttctcccattcaatcttgtgctagaaattctaactactacaataacaattttaaaatataagaaataaaaacttaaaatgaagaaatataactgtccctatttacaagtgatatgatcatctacatagaaatcccaagaaatccacaaaagactcgtcaacccaatggagtgyagcaaggttatagtgaggtaggagaccagcaggacttattcctggtctcaacaggatgaagtgaagaaaccagcaagaatcagtagatgacaacagaaccaacctctaggtgtccccactgctcatcagcataagacactcccaccagtgccctgacagtttacaaatgcccagcaacacccagaagttactggccgttttctagagagttctgagtaacccactccttaacatgcatgtaattaaaagtgggtataaatactactagccaatagtccacatgctgctactgtggatgctcaggctctgggttagtgctgctccacaaggagctg

SEQ ID NO: 582134 - DNA, 550 bp, Homo sapiens
ttctcttaagattgggaacaaggcaaggatgttcactctaacttctcccattcaatcttgtgctagaaattctaactactacaataacaattttaaaatataagaaataaaaacttaaaatgaagaaatataactgtccctatttacaagtgatatgatcatctacatagaaatcccaagaaatccacaaaagactcgtcaacccaatggagtgcagcaaggttatagtgaggtaggagaccagcaggacttattcctggtctcaacaggatgaagtgaagaaaccagcaagaatcagtagatgacaacagaaccaacctctaggtgtccccactgctcatcagcataagacactcccaccagtgccctgacagtttacaaatgcccarcaacacccagaagttactggccgttttctagagagttctgagtaacccactccttaacatgcatgtaattaaaagtgggtataaatactactagccaatagtccacatgctgctactgtggatgctcaggctctgggttagtgctgctccacaaggagctg

SEQ ID NO: 582135 - DNA, 550 bp, Homo sapiens
ttctcttaagattgggaacaaggcaaggatgttcactctaacttctcccattcaatcttgtgctagaaattctaactactacaataacaattttaaaatataagaaataaaaacttaaaatgaagaaatataactgtccctatttacaagtgatatgatcatctacatagaaatcccaagaaatccacaaaagactcgtcaacccaatggagtgcagcaaggttatagtgaggtaggagaccagcaggacttattcctggtctcaacaggatgaagtgaagaaaccagcaagaatcagtagatgacaacagaaccaacctctaggtgtccccactgctcatcagcataagacactcccaccagtgccctgacagtttacaaatgcccagcaacacccagaagttactggccrttttctagagagttctgagtaacccactccttaacatgcatgtaattaaaagtgggtataaatactactagccaatagtccacatgctgctactgtggatgctcaggctctgggttagtgctgctccacaaggagctg

SEQ ID NO: 582136 - DNA, 550 bp, Homo sapiens
ttctcttaagattgggaacaaggcaaggatgttcactctaacttctcccattcaatcttgtgctagaaattctaactactacaataacaattttaaaatataagaaataaaaacttaaaatgaagaaatataactgtccctatttacaagtgatatgatcatctacatagaaatcccaagaaatccacaaaagactcgtcaacccaatggagtgcagcaaggttatagtgaggtaggagaccagcaggacttattcctggtctcaacaggatgaagtgaagaaaccagcaagaatcagtagatgacaacagaaccaacctctaggtgtccccactgctcatcagcataagacactcccaccagtgccctgacagtttacaaatgcccagcaacacccagaagttactggccgttttctagagagttctgagtaacccactccttaacatgcatgtaattaaaagtgggtataaatactrctagccaatagtccacatgctgctactgtggatgctcaggctctgggttagtgctgctccacaaggagctg

SEQ ID NO: 582137 - DNA, 565 bp, Homo sapiens
cacagaaagatatgtacatgaatataaacacagctccattcataattgctgaaaaacgaaaacaagccaaagttctagcaatcaaagcctgacacatttgactggttaaaaaaaaaagtttatgttatatttagacagtttattacttagcaaaataaaatgagcaaaaatgccagatacccaagccccttatctcaaaggatgacactgaaacaaaaatagcgagtaatgtgatgatgtatcatcagtagtgggagcaacctgctgctgcagatccaattgcatcttgcagataagcagctttatactttgcagttgtgcccaaataacagagaggcagagagcctcaggcctcttcaaaacccatgaagtgatgagtaactgtctcatggcrgcctccttggaagataggtagagggggtaggctcttcaaagcctcccacactctcatgttccaggaatatctcatagcattttaccaaaacttagatcagctgtagtaagccttggccaaatagcctctctagagacatgcagggaaagaagttatcataagcccagaaac

SEQ ID NO: 582138 - DNA, 565 bp, Homo sapiens
cacagaaagatatgtacatgaatataaacacagctccattcataattgctgaaaaacgaaaacaagccaaagttctagcaatcaaagcctgacacatttgactggttaaaaaaaaaagtttatgttatatttagacagtttattacttagcaaaataaaatgagcaaaaatgccagatacccaagccccttatctcaaaggatgacactgaaacaaaaatagcgagtaatgtgatgatgtatcatcagtagtgggagcaacctgctgctgcagatccaattgcatcttgcagataagcagctttatactttgcagttgtgcccaaataacagagaggcagagagcctcaggcctcttcaaaacccatgaagtgatgagtaactgtctcatggcggcctccttggaagataggtagagggggtaggctcttcaaagcctcccacactctcatgttccaggaatatctcakagcattttaccaaaacttagatcagctgtagtaagccttggccaaatagcctctctagagacatgcagggaaagaagttatcataagcccagaaac

SEQ ID NO: 582139 - DNA, 594 bp, Homo sapiens
atgtacatgaatataaacacagctccattcataattgctgaaaaacgaaaacaagccaaagttctagcaatcaaagcctgacacatttgactggttaaaaaaaaaagtttatgttatatttagacagtttattacttagcaaaataaaatgagcaaaaatgccagatacccaagccccttatctcaaaggatgacactgaaacaaaaatagcgagtaatgtgatgatgtatcatcagtagtgggagcaacctgctgctgcagatccaattgcatcttgcagataagcagctttatactttgcagttgtgcccaaataacagagaggcagagagcctcaggcctcttcaaaacccatgaagtgatgagtaactgtctcatggcggcctccttggaagataggtagagggggtaggctcttcaaagcctcccacactctcatgttccaggaatatctcatagcattttaccaaaacttagatcagctgtagtaagccttggccaaatagcctctctagagayatgcagggaaagaagttatcataagcccagaaacccctctcctgggatagagagacctagggaggaaaaatgtg

SEQ ID NO: 582140 - DNA, 415 bp, Homo sapiens
gctacctaaaattcctattccaaatggatctgattataygttctgtactgttttccatagatctatttgattatttttgtgtcagtactatactgttttaatcatgatggcttttatgcttagtttaatagctggtacagcaagccttcactcacactcttctgtccaattgttttaaacagtttaatttaatgctgccctcaggctgagaaacttgtgccagaatgtaaattaagtacagcacttactataccatctactttacctgatagcaagacttttttcacaaattaactggtgcattgacctatattctgacacattctgataatgaactagttaaaaaataaaacagttcatgtaagttgcgatgggtggactgcacttgagttatattggtttagacttcttggct

SEQ ID NO: 582141 - DNA, 415 bp, Homo sapiens
gctacctaaaattcctattccaaatggatctgattatacgttctgtactgttttccatagatctatttgattatttttgtgtcagtactatactgttttaatcatgatggcttttatgcttagtttaatagctggtacagcaagccttcactcacrctcttctgtccaattgttttaaacagtttaatttaatgctgccctcaggctgagaaacttgtgccagaatgtaaattaagtacagcacttactataccatctactttacctgatagcaagacttttttcacaaattaactggtgcattgacctatattctgacacattctgataatgaactagttaaaaaataaaacagttcatgtaagttgcgatgggtggactgcacttgagttatattggtttagacttcttggct

SEQ ID NO: 582142 - DNA, 560 bp, Homo sapiens
agaagcatgtgaaatataaaaagaacaaagtatttgggctagggcatgcactggagatcacttgtattcatattttagcatggaaagccataaactccatgaggataggaatttttrttccgctgatatatcctaagaataatgcttgacacatagtaggtactcagtacatttttgctgagtgaatgattatacctcaatgacctttttcagattatattcattggcaggtaaatgctggaagccattactattccccttccttctttgttttctgggagtgtagaaactcccaatttctaatcaaaatgataaaaagtcccagtatgacactttgtctgttgaagtacaagtcatgtgaagtgactggcattatctctctctgcatagacaggactattttgtaaaaacagcaacttgttctgattaagttatgatgtatttagcacacacttcagtaagagcattagactatctctttcaaatggaaagctatgtgcttatttgtatgggttttttatttgtttttctggtagagaagttgtcatatctgcgaactg

SEQ ID NO: 582143 - DNA, 568 bp, Homo sapiens
ctctctctgcatagacaggactattttgtaaaaacagcaacttgttctgattaagttatgatgtatttagcacacacttcagtaagagcattagactatctctttmaaatggaaagctatgtgcttatttgtatgggttttttatttgtttttctggtagagaagttgtcatatctgcgaactgaaagcacttaattttctaagtatcaagctttgggaagcaaacatattctctttcatctactgttgatgatgatgatggatgttttgtttgcaactaaacaatataggacccaaatattcaatgtaaaatgaccatattctttaagaatcatgtaaaagccatatcaggccttttataatttatgcctaatttatttcttttcacttcagggaatggcacaaaatgctcttaagactttggaaacaaacagtcgcgtcataatgtaaaaaagacttaaatgaggtgattttatttttaaaaagcttataataattgagtggtgtatcctcaagactgactagggtgatttcaaatgtaagtttactaccagtttctttctagtga

SEQ ID NO: 582144 - DNA, 576 bp, Homo sapiens
aaagcacttaattttctaagtatcaagctttgggaagcaaacatattctctttcatctactgttgatgatgatgatggatgttttgtttgcaactaaacaatataggacccaaatattcaatgtaaaatgaccatattctttaagaatcatgtaaaagccatatcaggccttttataatttatgcctaatttatttcttttcacttcagggaatggcacaaaatgctcttaagactttggaaacaaacagtcgcgtcataatgtaaaaaagacttaaatgaggtgattttatttttaaaaagcttataataattgagtggtgtatcctcaagactgactagggtgatttcaaatgtaagtttastaccagtttctttctagtgatggtgtggtatctatgtggggagagagtgcgtgggtgcagctatgagcacagctactaagactggaaataaatgtctgtgcctttgtcctatcactgccctgtatcttgttccaattacacagccactttcttccacctactccaaggaactcttcattcaacaaatacttacggaccacctactgggagca

SEQ ID NO: 582145 - DNA, 484 bp, Homo sapiens
atacgaaaagggcattctaggcaacggagatggaaaaacatgtaatagaaattgaaaaaagtaaacaattgagtctgtctaagccacgttgtttctttacaggaggcacccttggattttgggtggaacaattatttgttgtgtgatacagtcacagtggtggggatcaaccttttctggggaggccagaaagctcagaatcagcactaagacacaacttccacctcccccagtccagtctttytaataaccaaaagtgccttcacacatttccataaacctcccagtaaagtgatgttgccccagttaagaaccagtgggagggcatagtctgtggaaaggtaagttgtagcccttagtgccaagtgaaggggtttagatcagtttcatagatttggtttagttactacaggtactacaggttttgagtaggagagtgacatcatcacagctgtgctttcggaagattgatttgaaaattctg

SEQ ID NO: 582146 - DNA, 635 bp, Homo sapiens
ttttaatggggttgctttttcttttcttgtaagcttgtataagtttcttatacatactagataatagacctttggctgggtgcgatggctgacaactgtaatcccagcactttgggaggctgaggagggcagatcrcttgaggtcaggagttcaagatcagcctggccaaatggtgaaacttcatctctactaaaaatacaaaaaaaatttagcctggcatggtggcacatacctgtggtcccagcttcttgggaggctgaggtgggaggatcacttgaacctgagaggtggaggttacagtgagctgagatcacaccactgcagtccagcctgggcgacacagtgagactctgtctcaaaaaaagaaaaaaaaagataatagacctttgtcagatgcatagtttgcagaatgtatctcccattctgtaagttttctgttacactctgttgaatgtttcttctgttgtgcggaagctctttagtttaattatatcccaattgtcaattttttcttttgttgtaattgcttttagtgtctttgtcatgaaatctttgcccattcctgtgtccaacatggtattgcctaggttgtcttccagggtttttattggttagggttttacatttaaatgtt

SEQ ID NO: 582147 - DNA, 633 bp, Homo sapiens
ttcattaaatttattcttacgtgtgatatatatttttagctattgtaaatgttactgctttcttgttttttattttcagattgatcactgttagtttgcagacacactattaatttttgtgtcttggttttgtatcctgmagctttgctaaatttattgatctattccaagaattttttggtataataggcctttctaaatataaaatcacgctatatacaaacgaggataattagactttcttcctttttaatttggatgccctttctttgtttcttttgcctagttgccgtgactagaacttccagtactatgttggataaaattggcaaaagtgggcatcgtagacttgttccaggtcttagtgaaaaggcttagagttttccccattcactatgattgctataggtttgtcacatatggcctttattgtgttgaggtatatttcttctatgcaaaatttgttgaagatttttatcataaagggatatggaattttatcaaaagctttttcagtatctattgaaaggatcatagggtttttgtccttgattctgttgatatgctgtatcacattttttgatttgcacatgttaaaagattcttgcatccctgggatgaatcctacttggt

SEQ ID NO: 582148 - DNA, 593 bp, Homo sapiens
tttttcagtatctattgaaaggatcatagggtttttgtccttgattctgttgatatgctgtatcacattttttgatttgcacatgttaaaagattcttgcatccctgggatgaatcctacttggtcatggtgaatgatctttttaatgtattattgatttttgtttgctaatattttgttgaaaatttttgcatctatgtgtgtcagatatattggtctgcrgtttcctttttttgttgagtctctctggtgttggtatcagggtaatttttcaatattgccttttgtcttcagaatctacatagtgcagtaggcttttaagcaattctagcagcattttctaaagtatgtttttatatagtgaactcaagcttgtggagctaaatattagtatgagctttcactgattattaatcagtaagtaaataagatatcctggacttgtaggtggttcacacttagattaaccttaaatacataaacagtttttttaaaaaaagctttaaaacttaagatacttttatgtaattcagaaggtaatgttagtgctgaaaaatattttgttcataacattatttttaaatgtcatttta

SEQ ID NO: 582149 - DNA, 596 bp, Homo sapiens
aagagaatgtacacttactctgtctcacatataggtgctattgaatatttttggtggtgatgttgaagatatttgaattaygttggtggtaagtggaggccagagagttacttaatatgtggactggcatggtgtaagtctggaaggaactgtggtgaacagtttctttgcttatggtgcagtttcttttgaaggacttaaagcaaacactggaactcatttcctaagacactttgaggtcactcattcccacccaattaaaaaaaaagtagaagaagaaaagaaaaacacctgtaatgagttttcagaggcttatatggtgttactgtattttttcagaatgtattgttgtgtaacaagaaatatttcatgggtaatccaaagtataggagttctgggatagaaaagcaaactctagcatgggggcagcctaggagaaatgggccaaaaattgaagggaatagtacagccatgactgcaaaactgtctgtcagcattccagaaataattcatggtttttcttttaagcgaatacttaagtttatggcctgtgcctatgaaccaagctttgtggatgttaataaagagttgacagc

SEQ ID NO: 582150 - DNA, 596 bp, Homo sapiens
aagagaatgtacacttactctgtctcacatataggtgctattgaatatttttggtggtgatgttgaagatatttgaattatgttggtggtaagtggaggccagagagttacttaatatgtggactggcatggtgtaagtctggaaggaactgtggtgaacagtttctttgcttatggtgcagtttcttttgaaggacttaaagcaaacactggaactcatttcctaagacactttgaggtcactcattcccacccaattaaaaaaaaagtagaagaagaaaagaaaaacacctgtratgagttttcagaggcttatatggtgttactgtattttttcagaatgtattgttgtgtaacaagaaatatttcatgggtaatccaaagtataggagttctgggatagaaaagcaaactctagcatgggggcagcctaggagaaatgggccaaaaattgaagggaatagtacagccatgactgcaaaactgtctgtcagcattccagaaataattcatggtttttcttttaagcgaatacttaagtttatggcctgtgcctatgaaccaagctttgtggatgttaataaagagttgacagc

SEQ ID NO: 582151 - DNA, 494 bp, Homo sapiens
tctttttcctttatttctgtgactggagaattttaaatggtctgtctttgaattcactggttcttttttctgcttgagtctgctattgaagcttactattatattttttcatttcattaattttattcttctgctgaatttgtcttgttcttttttattaatatgtttccatctttttgttgaacttctcattttgttcatgtattgttttcttgattttatttaggtatctatctgtgttctctggtggttcactgtgcttttttaaaacaattattttgaattctttgttagacaattgttagatgtctatttccttgggattagtcactggaactttattttgttcctttggtggtgttgcgtttctttgactctttgtgtttcttgaagctgtttgatggtgtcttcacatttgaagaaggagtcatctccttcagtgtttactgtctgayattaggaaagaaaaaccttgaccagtcagccccgttgga

SEQ ID NO: 582152 - DNA, 565 bp, Homo sapiens
gctaagtacagtggtgcactcctgtagtcccatcttgtcaagaggctaaggtgggaggatcatttgagcccaggagtttgaggctgcagtgacacatgatcctactacttccctctggcctgggcaacagattaagactgtctcttttaaaaaataaatcaacaggctgggtgcggtggctgacgcctataatcycagcactttgggaggctgaggcaggcagatcacctgaggtcaggagtttgagaccagcctggccaacatggtgaaaccccgtttctactaaaaatacaaaaattagctggatgtggtggcatgcgcctgtaatacccaggaggctgaggcaggagaattgctggaacccgggaggtagaggctgcagtgagccaagaacgcgccactgcactccagcctgggtgacagagcaggactctgtctcaaataataataataataataataataaataagatcaatcaatcaacaaggaatatttaacagcaataactataaagtctacattcaaactaaatgcatcttttatgggtctctcttggcacttggt

SEQ ID NO: 582153 - DNA, 555 bp, Homo sapiens
ttttggaaagagtggtaataggaattagtggatgtagaatgtgctaaaagggcaagatgaggtgtagactctctggggttccaggtcagagcatcacagtggatagtgttgccatttactgagctgggaaagatttgaggagatgtcatgaggtgcaggggagaaacaaattccgtttggtcagtattgtttcagatacccaaatggaagtgtcaggtggaagagatatttctactttgaagttcagagaagaactttaggcaggaaaacttggagtygttaacattttgatatttaaaaccattggatgggatagggataatataacatagagggaggattcagccatcagaaaaggaaagcaatgaggcctagttcaaaattcagctatcagggaaggagtaatctacagaaaacaactgagaatgaatagccaaagaaggaaaaagagaatcacgagattgtggatagtggaacactaaggaaatagtttcaagaaggatatgtttaacctatggcaattcctgcttgagaccttaagtatgatgagaactt

SEQ ID NO: 582154 - DNA, 576 bp, Homo sapiens
atcactaattaaggaaaggcagatcaaagccacgataagatattaccttacacmtattaggatggctgttaccaaaaagacaagagataagaagtatgggcaaggccatggaaaaacgggaagctttgtacactgttcgtgggaacgtaaagtgctacagccattatggaaaacagtatagaagtcaaaaaaactaaaaatagaactaatatatgatcccacaatcccacttctgggtatatagccaaaggaattaaaatcagtattttaaagagaaatctgaactcccatgctcattgcagtgttactcgcagaagccaagatatggatacaaccactcatcaacagacgcatggatgaacaaatacacacacacacacacacacacacacacaaaatgaaatatcagtcagtcttaaaaaaagaaaatcctgccatatatgacaacatacacggacccgaaatacattatgctaagtgacataagctaggcacagaagggcaaatcttgtatgatctcacttatacatggaatctaaaaaagtctaattcatagaagcagagagtagaacagcg

SEQ ID NO: 582155 - DNA, 391 bp, Homo sapiens
tatttcagaatccttttgcctgctcttttggtaaayagacatccttaaatggattagggaaaaatttgtctttttgtatctgaaggaggcaaaaggaattaaaataggatttcaaaaggtagccaatttcaaaatcaggcaggctaattttgttataaatagagtaattaaaaggattagaaaaagtgcttccctttgttagactgacactcttacaataagatgtgaacacacataagggcaaggaagtgtgtcataagtaccattagtggccatgatatcagtctctttgttttggatatcctttttcttcatccccattttagtcttctgagtagaatctatccatcatttcaaattctctctttttttaatgtttcctaatcaatcc

SEQ ID NO: 582156 - DNA, 201 bp, Homo sapiens
ctcaatagaaatccagcattttaaaaatccagaaaagaaaacttggtccgattaaycagttgaagattaaagtaatgtgtagcagatactgccaggtggtattccagggtattagaccctgttcattccatactttcacagagacagtagaaaacatagtaaaatttccaatatcataaatttcccttgtagaagctatgg

SEQ ID NO: 582157 - DNA, 510 bp, Homo sapiens
taagaaaggtttaatggagaaagtagttttctaggatgagatttcagcatattgagataaatataatgaaaaagataggaaacaacaaattaaaagaaaacactgtatagggctaatttttcatttaattataattcatttcaccatattgagataactrtagtggaaaggataggaacaaacatgattagaaaagagcactgtatagggctaatgtttcatttaattataatcaaactgtactctgattgacatggcatattttgtatttaagacaataaagatcatttgactgctgatagaaaagcagaaatagaaaatcatgttttcttcagttttcaatgtaaaatacaccacaggccaataaccagacaaataaaataattctccaccatcttccaacatatcatttgtatttatggacatttttcagaagaaataaaatagggagaaaattagaattgtaccagtcataagccagaagaagacatagataataaaagtccacta

SEQ ID NO: 582158 - DNA, 613 bp, Homo sapiens
agttttctaggatgagatttcagcatattgagataaatataatgaaaaagataggaaacaacaaattaaaagaaaacactgtatagggctaatttttcatttaattataattcatttcaccatattgagataactatagtggaaaggataggaacaaacatgattagaaaagagcactgtatagggctaatgtttcatttaattataatcaaactgtactctgattgacatggcatattttgtatttaagacaataaagatcatttgactgctgatagaaaagcagaaatagaaaatcatgttttcttcagttttcaatgtaaaatacaccacaggccaataaccagacaaataaaataattctccaccatcttccaacatatcatttgtatttatggacatttttcagaagaaataaaatagggagaaaattagaattgtaccartcataagccagaagaagacatagataataaaagtccactagcgattggattgtccttttaggaaatctatctatcaaaaatctatgcttatagctctttgttcagagggtcagttcccaaatttatgtgctacaacagtattttaaattctttcctgtaataaaatg

SEQ ID NO: 582159 - DNA, 589 bp, Homo sapiens
tgatcatacttgtaccgggttttccttatgaatrtgtgcacaagtttcttcaataaacctagagggggatttctggcaacataacccaggtgccacatattgttattttgttcttcactgagattgtaacaatttacattcccagaagtattgtatgagcatactcttttaagtatatcacatctaataattgaaattatcagattttttttacttttaatatctgatagtcatgcaccctagctcttaagataattcttcagttattttggttaactatatagtctattattgggacaggttgaacaaaagtgctccttaaagagatttatctttctcatactggtttaaattttaacactggcctgccaataatgttagtaataacagttatcttttactaggccactcaatatgtcctagacactattcaaaacatttaaaatatgtaatttattcaattcttccaattgtaaaagaatgtgagctctaaggatgcagagagttttgtctgttctactggttgttctatctttaaaacagtcctatcacctagtaggtgctcaccaaatatttgttaataaatgag

SEQ ID NO: 582160 - DNA, 589 bp, Homo sapiens
tgatcatacttgtaccgggttttccttatgaatatgtgcacaagtttcttcaataaacctagagggggatttctggcaacataacccaggtgccacatattgttattttgttcttcactgagattgtaacaatttacattcccagaagtattgtatgagcatactcttttaagtatatcacatctaataattgaaattatcagattttttttacttttaatatctgatagtcatgcaccctagctcttaagataattcttcagttattttggttaactatatagtctattattgggacaggttgaacaaaagtgctccttaaagagatttatctttctcatactggtttaaattttaacactggcctgccaataatgttagtaataacagttatcttttactaggccactcaatatgtcctagacactattcaaaacatttaaaatatgtaatttattcaattcttccaattgtaaaagaatgtgagctctaaggatgcagagagttttgtctgttctactggytgttctatctttaaaacagtcctatcacctagtaggtgctcaccaaatatttgttaataaatgag

SEQ ID NO: 582161 - DNA, 562 bp, Homo sapiens
catttaactgaaattttgtatcctttaaccaacatctccccagtcctctccctttaccagcagtccttrgtaaccactattctactccctgcttctatgagttagactttttaggacaatgtaactcctagatgcattttaaaaacacgtagaacttgttcacagcacaggctctggagccattctccaagcaaaggtttttaccggtttgttaaaattccccaggatgctttctaagtccctaagtctattgcaacaacaactcgtaaaatcagatacatgattcctgttttcaaatttcctatctagacccacttggatagcaagattgatgctgttctcaccagcctaaagccccttcagctctagctgaaatctttgttctctcacaatgcccaggaacatgtcttgggctcattggtaggtaggaacgtgctgtgtggcaaggagaaaatttccctgtaatccttcatctaatctataaaatatcctaaaggattcaccatattaacgatttttcctcatccaatttatactgattataggtggttagagttgagat

SEQ ID NO: 582162 - DNA, 562 bp, Homo sapiens
catttaactgaaattttgtatcctttaaccaacatctccccagtcctctccctttaccagcagtccttggtaaccactattctactccctgcttctatgagttagactttttaggacaatgtaactcctagatgcattttaaaaacacgtagaacttgttcacagcacaggctctggagccattctccaagcaaaggtttttaccggtttgttaaaattccccaggatgctttctaagtccctaagtctattgcaacaacaactcrtaaaatcagatacatgattcctgttttcaaatttcctatctagacccacttggatagcaagattgatgctgttctcaccagcctaaagccccttcagctctagctgaaatctttgttctctcacaatgcccaggaacatgtcttgggctcattggtaggtaggaacgtgctgtgtggcaaggagaaaatttccctgtaatccttcatctaatctataaaatatcctaaaggattcaccatattaacgatttttcctcatccaatttatactgattataggtggttagagttgagat

SEQ ID NO: 582163 - DNA, 562 bp, Homo sapiens
catttaactgaaattttgtatcctttaaccaacatctccccagtcctctccctttaccagcagtccttggtaaccactattctactccctgcttctatgagttagactttttaggacaatgtaactcctagatgcattttaaaaacacgtagaacttgttcacagcacaggctctggagccattctccaagcaaaggtttttaccggtttgttaaaattccccaggatgctttctaagtccctaagtctattgcaacaacaactcgtaaaatcagatacatgattcctgttttcaaatttcctatctagacccacttggatagcaagattgatgctgttctcaccagcctaaagccccttcagctctagctgaaatctttgttctctcacawtgcccaggaacatgtcttgggctcattggtaggtaggaacgtgctgtgtggcaaggagaaaatttccctgtaatccttcatctaatctataaaatatcctaaaggattcaccatattaacgatttttcctcatccaatttatactgattataggtggttagagttgagat

SEQ ID NO: 582164 - DNA, 580 bp, Homo sapiens
gtgacaaatacaattcttttgaaatctgattcatatacaccagattgtgagttctctcaaagcaaattctgtgtatttttcttcwttgtattttctttcattccccagcatactgtcttgcacataatagatactcagtttaattttatcaaaatcattttttcaggaaatgattaacaatctccaatttaaaagatatatttgtattgaaccacttcatggcttgatgcttttaatcaaactaaattttgactaggtataggttgaagaataatgtataagtgcaatgtatggtaataggaaattggttataattatattgtataattaatatttgcatagatacatactatattggtcatcttttatcccaactcctattaaataaatatcatattgagatttaatagtgcttagttttgatgcagttaattttaacattttgctcttgctaacattattatgtgttttttggcatcagcttatgaaagaacatggaaaatcaatttattttccattttctttgtcaaatttagattaaaactttgtagaagccaaaggtcatgctcactatgatgtc

SEQ ID NO: 582165 - DNA, 580 bp, Homo sapiens
gtgacaaatacaattcttttgaaatctgattcatatacaccagattgtgagttctctcaaagcaaattctgtgtatttttcttcattgtattttctttcattccccagcatactgtcttgcacataatagatactcagtttaattttatcaaaatcattttttcaggaaatgattaacaatctccaatttaaaagatatatttgtattgaaccacttcatggcttgatgcttttaatcaaactaaattttgactaggtataggttgaagaataatgtataagtgcaatgtatggtaataggaaattggttataattatattgtataattaatatttgcatagatacatactatattggtcatcttttatcccaactcctattaaataaatatcatattgagatttaatagtgcttagttttgatgcagttaattttaacattttgctcttgctaacattattatgtgttttttggcatcagcttatgaaagaacatggaaaatmaatttattttccattttctttgtcaaatttagattaaaactttgtagaagccaaaggtcatgctcactatgatgtc

SEQ ID NO: 582166 - DNA, 520 bp, Homo sapiens
tttgatttgcatttccctgatgattagtgattttgagcatttttccatatatttattggctatttgtatgccttcctttgagaaacgatgtccagataaatcactcatttttaaattagattattgtttctgtgctgttgtttgagttcattatatatcatggatagtagtcccttaccagatgaatagtttttaaatatcttccctcattctataggctgtaacttaactctgttgactgtttcatttgctgtgtagaagctttgtagttttatatagtctgatttgtctatttttgtttttgtggtcttaaccataaagtctttgcctggatcagtgtcctgcaacatttcctttatctttttttactagttttatagtttcagtctgatatttaattctctaatccattttgagttgattttttaatrtagtgagagatggtcttctagtttcaatcttctgcatatgaatatccagttttcagagcaccatttgttgaagagggtgtcattttttt

SEQ ID NO: 582167 - DNA, 576 bp, Homo sapiens
taatgctagcttcacagaattaattaggaagaatttcttaatcctcaattttttggaatagtttgagaaaaaatggtgttagttatttaaaagtttgctagaattcattagtgaatccatctggtcttggacttttcttttttgagagactttttgttactgatttaatcttcttatttgttattggtctgtttgattctgttcatttttggttcaatcttggtattttatacttgtgtctaggaatgtatccatttcctttatgttttttaatttgttggtgtatagttgttcctaacagtctctaatgatcctctgtatttttgtggtgtcagttgtaatatctcattgttcatttctgatattatttatttaggtctttttcttaatctatataatagtttgttgatttggtttacttttcaaaaactaacttttttcaygaatcttttgtttgcttttttgcctctaatttgtttcattctgtgctgatctttattatttattttcctctattaactttgggtttggcgtgttcttgcttttctattttttgaggtgtatcactaggttatt

SEQ ID NO: 582168 - DNA, 583 bp, Homo sapiens
tgttttttaatttgttggtgtatagttgttcctaacagtctctaatgatcctctgtatttttgtggtgtcagttgtaatatctcattgttcatttctgatattatttatttaggtctttttcttaatctatataatagtttgttgatttggtttacttttcaaaaactaacttttttcatgaatcttttgtttgcttttttgcctctaatttgtttcattctgtgctgatctttattatttattttcctctattaactttgggtttggcgtgttcttgcttttctattttttgaggtgtatcactaggttatttgaatctttttttttttatataggtgcttattcctttaaacttccctcttgtactattttttctgygttccataggttttttggtatgtcttgtttctgttttcatttctttcaagaagtatttaaaatttccttcttaatttcttcattaactcatttgtcattcaggagaatgttgtttaatttttatgtatttttacagtttccagtgttctcttgttattgatttctaattataatccactgaaacctgagaatacatggtataat

SEQ ID NO: 582169 - DNA, 572 bp, Homo sapiens
aaaactatggaagtaagaggtcctattaagattctacagcaacttagggaaaagaaagttacttgaactggcgtagtagcagtgaatatgggggaaaagtgaacatatttaagaaaaatttaaaatatagaataaaacacatcttcaactatccttcaatactacagttcactaaaggtcaatgtgatattataatcagaacactccacaataagggaataacattgctaattctaatttagaagtggtcaatctctttttcagaaaatycaaaaaccattgtcaatcgcttccaccaatcctcatttgatctccaccaccacagttcttttgcaagtaatctcttccactaccttttactcattgttcaatttccagtacctttcatgggatttagcactcataattatggaatattaaataaataaacgaaggaataaataaaagaaaggttgtatttttacaaacccttatatttaatcagttcttagtaattgttgaatagttcttatggtccaaatcattcatcccttctatcaaagtttgtagctcatgatgagtcagtttatgca

SEQ ID NO: 582170 - DNA, 421 bp, Homo sapiens
atccagaatatcggtatatcaggttaatctagcactaaagggaaaaactattaattcctgctttaaggacctacaatatccctggatcccaggcctcccccagctctaatcatgcaaagattggtaaattatggttccccttgttgcatgtccagagtattctccctatgtgctgtcagtattactatgctaaactacctctacattgatgaatgtaagtaggttcctttgccttttaaccaaaagaaccgagaaacagaacctactattcaacagtcaaattacaaaaggcttttccaatataaggtgttgactgaatttactttgtgaagtctatatgaaggagatagcaaatagacaaaaatatgcttaaygttgttcataataattaaaattactgtttaaatgttaccaaaagagc

SEQ ID NO: 582171 - DNA, 498 bp, Homo sapiens
gttcaatcctgtcagttcacataagatagggagatggcacctgttctctgtctcatagtctgatttcaagggggtgaaaaaagaaaacataagctatggaatgttgtctcttccatgtacctcaagacttatcagtcacccttctccaagcaagttttgcacttgcttccttttctgtccaggctgcatgcttgcaaactgaaagaggaagcaaattttatctctggttttgaggaaattttttttgggggttggtcgtagggacactgggcttttcccatttctttgaatgccaatgaattgactgtatcctaatcccatcattgtctatacaccaattcrtaatgatgtcatgataatcacatcgatctaaaaggcgtaggagagcagcatagcttttattctatttatttttttacttttatttttgacacagggtctcactctgtcacccagactggagcacagtggtacaatcacggctcactgcagcctcaa

SEQ ID NO: 582172 - DNA, 546 bp, Homo sapiens
cttgaggagggcagctttgaaaccatctttctattgcatgagagtattatagctggtattttgagttgggcgattaaggctgaaaatggttttgttgttagactggagaatgagagtaacagaattactttaaaaaaataaaattctgtgtaaaaacagggtccttttataaatagaatgcaacatttttcagatatcaaaagttactgcttataatgacaccacatgcataagactttattattcttaaatgatgcaaaatgtcacgtgaatctttccagcttgaaagctaaaatgcttgccatggcacttgagcacgaacgcaagcgctaattctcaattacccatctatggttatcgagcacgacagcaacaaacacaggcaattgccttcataaagcactctaaaaatcttttaggtatttgttactatttctcccccattaaacttttctcccccgaagcytctaagaaggaagaatactgaatgatctgtactttctttttcttttttttttttcttacctacagttttgaagaggatga

SEQ ID NO: 582173 - DNA, 577 bp, Homo sapiens
ctattctgcttttaatacttccagttatattacaaaattcttttggtgagtctttcagctctatcagatcagtttggttctttcttaaaatggctattttatctttcagctcttgaatcatttgactggattccttagattccttggattgggtttcaactttctcccaaatcttgataatctttcttgccatccaaattctgaattctatgctgtctttcagccatttcagttgggttaaaaaccactgctggtgagctagtgcagtcatttggaagtaagaatacattgacttttagagtggccagagttcttacactggttctttctcatctgtgtgggttgatgttcccttaaatctttgagcttgttctcctttggatcgagctttttgcttttatattctttgatgcccttggtggtttgactgtggtataagttggatttggtcaactggcttcatttctggatgatttcagaaggtcaagrctcagctcatcacttctgtgctgcatgctctaaccctgtgggggctgggaccaagcccacagctttgttctctggccctgctacactg

SEQ ID NO: 582174 - DNA, 671 bp, Homo sapiens
  misc_feature 251, 285, 286, 293, 325, 341: n = A,T,C or G
actgctttccacagtggctgaactaacttatattcctaccascagtgtataagcgttcccttttctctgcagcttaaacagcatctgttgttcttaactttttaataatagctattctgactgcatgtgagatagtatctcatagtttgaaatttaatttctctagtgattagtcataatgaacattttttcacgcgatttgttggcccacatgtatgtcttttttttgagaagtgtctcttctgtccctntgccacttttaatgcaattaaatatattttgctnnactgatntagttccttacagattttggataataggcctntgtcagatgcacagtntgctaatattttctcccattcagaaggttgtctgtttattctattgatagtttcttttattgtgcaaaagctctttaagttaattaggtccttcttgtcaatttttgtttttgttgcaattacttttgggaacttagtcataaattctttgcaaaggcccatgtccagaatggtatttcctaagttttcttctagggtttttattgttttagttctacttttaagtttttaacccatcttgagttaatttgggtatatggtgaaaggaaggggttcagtttcaatcttttgcatatggctagccagtgatcccagcaccatttattgact

SEQ ID NO: 582175 - DNA, 557 bp, Homo sapiens
tttatgaattgtgtgaattagaggtcatattttttttgaaatacagaaatttaattgctccagtaccatttataagcatttagatgtttagtttttccagtaccacttattgaataaactgtttttttcttttgaattactctttcacctttgttgaaaaccagttgaccatatatgtatgggtctacttaggtgctcttacatgaatatgaatctttgatttatatatctattcttacaccaatgccacaatagtcctaattactgtgacctcatagtaattgaaatacaaattatttttattaggttattctaggtgccttgaacctcatagaaattttagaattagcttgttaatttttcacaaaaaagtccactggagattttggttaggcstagattagatctatggatcaatttgtgctgaactgacattttaacagtgatgagtcttctgattaaaaacatggtatatatctctacatttattgtggatacaaatcttgcacatattttattaaatttgtccccaagtatttcatatcttctgatatttt

SEQ ID NO: 582176 - DNA, 562 bp, Homo sapiens
ctcatttaaaagattaggttaatcattagtgctgtctatccaatattttattttctcctcttggttgaggtgatgagtggtcgtgtgacgtgttttgttaatgaaatgtgaaagtgacatttgtgactcctggctagaagatttaagagccaatwaataattcaccacactctatctacttccttctgctaaggtaattagcaatatgtgcaagagagtagctgttcaatcagtgtgggctccagaattagaagaaatcaagtatattctccagacaacccaaaatggacaactagagagagcaagaaaaacaaaacaaaaagctctgttgttataagtcactgcaatttaaaattctttgttattgcagtataatctactctgacagaaacaaagtgtaacatggaaggaattactccatgggacatatcaaatctgataaaaataaagtaattaagaccatgactatggtttggctgtgtccccacccaaaatctcatgttgaattgtaatccccatgatccccataatttccacgtgtcaagagtgggaccaggtagag

SEQ ID NO: 582177 - DNA, 646 bp, Homo sapiens
tgataagaaataaattaaaacagacaaataattggtcaacattatatcagtaatttatagattaataaaataaggagatactaataaagtaaatgtggcaaaatataaaaaaagatgaatctgagtagagtagatgacagttctttgtgctgttcttgcaaacttttataaatatgaaatcatttcaaaataggaagttaagaacatttagatcattaacatgaagtcctagtaacraagacttttaaagggaggaagtcgcattcttgacttccagtaattatgctatggttttgcagctgagcttaaaactcaccgtatctttcattcatcatggaacatactcatgtcagctctctcctcaacaggcagtccctggtcctgacagtgctggtattgaatggggggcctgggtgtgtgtgatctgatcttttggaagagggatttgactcagagttcacagagtaagagcctcctgcgcagcattaaaatgtgcaagtcatgttaaactgatacatccgtagaaatccaccacgatctctaaaatgtttatgagagggtgtgcagcatgtttctgtgacaaacgaatttttaaaatcttaaatggcataactggttctttgtaagggcatcttactattgaagt

SEQ ID NO: 582178 - DNA, 488 bp, Homo sapiens
taactctgtttcataaatatttaatattttagctatgttttcttaaaccaaaagttgacccttattcaaagtaatcatataaggatcagtatttgcactggctgaggacacaggaaatttgcatctggcttctctgagccaaaattaaacatttatacattttattcacactggttgkcattagggccaacttactagggctctctgcattcggtccatactagaaaaatacttcctctttgaaaaaaaattacccccccaacggaaaaaattacacttgttctaggaatggtaatgtgcccctctaaacttctctaaaaggtcttttcaaggaagtaaacatttcttgggaaaatacgctggatctttctcagagaattctacacctaagagggctcacatgtcactaatcataccccagcactgtttgcttgcttttgcttttttttttttttttgaaatgattcaatttttaataccaactttgc

SEQ ID NO: 582179 - DNA, 539 bp, Homo sapiens
attagatacaagtatataatgtatgatgattaaaccagggtgattggaatatttatcaccacaaacatttaccagttgtttgtgttagaagsattccaattccactcttttagttatttcaaaatatatgataaattatttttaactatagttgccctgttgtgctgccatacactatcaggggtagctaagggagaaaatacagtcatgggttcttagtttcagtttatgattgggcaagtaaagcctctttctcattcctcttttctgcatatcactagagacagaaactaaaaatcatggcttcaggctgctaaaagcccacaacaaaacaaaacagaaaaacaacaacaacaaaacaaggcagttggacaagctcgcactcgatcttgctctttctgtttaactgtattattttacccattaacactcccttctttatccctccctccacacgactcttcccagcctctggtaaccatcattctactctctgtctccaggagttccatttttatgttttagctcccacatatgag

SEQ ID NO: 582180 - DNA, 589 bp, Homo sapiens
ctctcccatgcctcaaagcatgaaacagcagttcctgattttaccccttaacacaawttccgtcctggagcacacatatttcccagttcatcaactgagagatgtgggttcattcaaacactatcaaagaacagctcttcagccagaggcagctttgttctggggacacactcactcctgtccccacacgcatggccttagtgagtgtattagtcaggattctccagagaaacagaaccggtagggtgtacgtgtggccgttccaaatcctgcaggccgagagggcagtcccgagacccagggaacaggaacatcgcaattggcatctgaaggctgtctgcttagacatctcctcttcgttccagggagctcgggcttttttctcttaaagcttccactcactggccgaggcctagccacattatgatggacaatgtgcattactcaaagtccaccaatttggattaaattctcatccaaaaacaccctcacagaaatgtccagaataaagtttgaccaaaaatctgggcactgtggcccactcaagctgacgcatcaactgaaccatcttagtgagtcaatttcacag

SEQ ID NO: 582181 - DNA, 589 bp, Homo sapiens
ctctcccatgcctcaaagcatgaaacagcagttcctgattttaccccttaacacaatttccgtcctggagcacacatatttcccagttcatcaactgagagatgtgggttcattcaaacactatcaaagaacagctcttcagccagaggcagctttgttctggggacacactcactcctgtccccacacgcatggccttagtgagtgtattagtcaggattctccagagaaacagaaccggtagggtgtacgtgtggccgttccaaatcctgcaggccgagagggcagtcccgagacccagggaacagsaacatcgcaattggcatctgaaggctgtctgcttagacatctcctcttcgttccagggagctcgggcttttttctcttaaagcttccactcactggccgaggcctagccacattatgatggacaatgtgcattactcaaagtccaccaatttggattaaattctcatccaaaaacaccctcacagaaatgtccagaataaagtttgaccaaaaatctgggcactgtggcccactcaagctgacgcatcaactgaaccatcttagtgagtcaatttcacag

SEQ ID NO: 582182 - DNA, 589 bp, Homo sapiens
ctctcccatgcctcaaagcatgaaacagcagttcctgattttaccccttaacacaatttccgtcctggagcacacatatttcccagttcatcaactgagagatgtgggttcattcaaacactatcaaagaacagctcttcagccagaggcagctttgttctggggacacactcactcctgtccccacacgcatggccttagtgagtgtattagtcaggattctccagagaaacagaaccggtagggtgtacgtgtggccgttccaaatcctgcaggccgagagggcagtcccgagacccagggaacaggaacatcgcaattggcatctgaaggctgtctgcttagacatctcctcttcgttccagggagctcgggcttttttctcttaaagcttccactcactggccgaggcctagccacattatgatggacaatgtgcattactcaaagtccaccaatttggattaaattctcatccaaaaacaccctcacagaaatgtccagaataawgtttgaccaaaaatctgggcactgtggcccactcaagctgacgcatcaactgaaccatcttagtgagtcaatttcacag

SEQ ID NO: 582183 - DNA, 555 bp, Homo sapiens
tgcaagggcagcgagctgcagaggatacccagtgagaggggcatgttgataaactagaggtaggacttggctgatgatagaccagaagtaacgccatccactcctcctcttccaattctgcccatctgccctggagcaaagggctaggtaaacactccttgtcttcccatggagggtggttgcatccaagagagtttttctcagaaaaatgatggcatgaacatgagaaggagtaaatgatcagagatcagaccaggcctttaactgttgaaattagtttgactaaaaactgtattgattactcgtggaacttaaaaccatctgcaaaaacaaacccaaaacagtccaccctggattgtgttaaagaaaagtaaaaacggaggccacagtttggatgaatacttctagcccaaccgcctgtggccgtgtaaccaaaacttacrccatcctgatttctctgaaaaggctcgatttgaccatgagactgacgctttgctttcttgtcgcgtgctgacgtcacatacgtgcttatgcataggcgagggccacatgcat

SEQ ID NO: 582184 - DNA, 543 bp, Homo sapiens
ggccattctgacgctgcccagaaatcttcaatattttatgtttggtatattattctcccaccctctaatgcctccttcaaaactcctcctacctcctgaaacttgcaacagcccctttgccatggtacacctgctctccttgccatggtacacctgctgaccttgcttcctgtttcaccaagaaaatagaaagaatcagaacacaattttctgtgcctcccacctctgcctgcccatctggatctgtgtccatgtactttacttctctccagcgtcacatcccaacccctcccctggtgcctgtgggcccagcctctctcctgctcaaggacattgctatagcaattctcccctctctccccagcatcatcaaacctctcaccgctggatccctccaatctgcacataaacatgctgtggcttctccccttgaaaactaagagtaaaacatctctccatccctcttttttctgcagctactgytccaccttctccctccttcctttaacagcacaactccaaaattaaaaaaaaaaaaagaaa

SEQ ID NO: 582185 - DNA, 588 bp, Homo sapiens
taagaactttgactatgagccggacacagtcctgtaatcccagcactttgggaggctgaggtgggtggatcatttgaggtcaagagttcgaaaccagcctggccaacatggtaaaacctcrtctctactgaaaatacaaaaattagccaggcatggtggcatgcacctgtaatcccagctacctgggagactgaggcaggagaatcgcttgaatccaggaggcggaggttgcagtgagctgagattgctccactgcactcaagcctgggtgacaaagcaagactccatctcaaaaaaaaaaaactttcaccatcacttgaaaataagttcccacctcctagcctccccagatttgatgttccaaggccaggaagacccaagaatggcttactcaactgatttcacccaggagcccatcagacacatgagttcagtctcacactctgagagtgtgtctgccaggcctgctcacaacaagtgtataaatccaggtacacggtgtggtgacacgggcaacctcctgggaagtgttgacaggctcttccatcttaaatggatggccactctctttccggtcatcaccctcac

SEQ ID NO: 582186 - DNA, 588 bp, Homo sapiens
taagaactttgactatgagccggacacagtcctgtaatcccagcactttgggaggctgaggtgggtggatcatttgaggtcaagagttcgaaaccagcctggccaacatggtaaaacctcatctctactgaaaatacaaaaattagccaggcatggtggcatgcacctgtaatcccagctacctgggagactgaggcaggagaatcgcttgaatccaggaggcggaggttgcagtgagctgagattgctccactgcactcaagcctgggtgacaaagcaagactccatctcaaaaaaaaaaaactttcaccatcacttgaaaataagttcccacctcctagcctccccagatttgatgttccaaggccaggaagacccaagaatggcttactcaactgatttcacccaggagcccatcagacacatgagttcagtctcacactctgagagtgtgtctgccaggcctgctcacaacaagtgtataaatccaggtacacggtgtggtgacacgggcracctcctgggaagtgttgacaggctcttccatcttaaatggatggccactctctttccggtcatcaccctcac

SEQ ID NO: 582187 - DNA, 588 bp, Homo sapiens
aaatatgctgggcacctagcaaggtggtaagataaagaggcagtctgggcgtggtggctcatgcctgtaatgtcaacactttgggaggctgaggagggaggatcacctgaggtcaggggttcaaaaccagcctagccaacacggtgaaaccccgtctgttcyaaaaacacaaaaattagctgggtgtgatggtgcacacctgtagtcccagctgcttgggaggctgaaggaggagaatcacttgaacccaggagatggaggttgaagtgagccgagattgcaccactgcactccagcctgggcaacaaagtgagactctgtaaaaaaaaaaaaaaaaaagcaacatcagctgtatctctagccctgagtgaagtttccgtgggactctggtaggtcatctgctctctctgggatgacccaggagggctctgcatgtctgtcagtccacacgtgggaggaccctgggaggccaaagctgcaagccagggacacgggaagatctctaggggaaggagtgggcagcacaggctcttctgaatagatggccaacgatgggtgctggcgagggaggaaggcacccacaccagg

SEQ ID NO: 582188 - DNA, 588 bp, Homo sapiens
aaatatgctgggcacctagcaaggtggtaagataaagaggcagtctgggcgtggtggctcatgcctgtaatgtcaacactttgggaggctgaggagggaggatcacctgaggtcaggggttcaaaaccagcctagccaacacggtgaaaccccgtctgttctaaaaacacaaaaattagctgggtgtgatggtgcacacctgtagtcccagctgcttgggaggctgaaggaggagaatcacttgaacccaggagatggaggttgaagtgagccgagattgcaccactgcactccagcctgggcaacaaagtgagactctgtaaaaaaaaaaaaaaaaaagcaacatcagctgtatctctagccctgagtgaagtttccgtgggactctggtaggtcatctgctctctctgggatgacccaggagggctctgcatgtctgtcagtccacacgtgggaggaccctgggaggccaaagctgcaagccagggacacgggaagatctctaggggaaggagtgggcagcacaggctctyctgaatagatggccaacgatgggtgctggcgagggaggaaggcacccacaccagg

SEQ ID NO: 582189 - DNA, 527 bp, Homo sapiens
taggaaagtagcagccagcatggtggctcacacctgtaatcccagaactttgggaggccgaggggcatggatcgcctgagatcaggagttcaaggccagcctggccaatatggtcaaatcctgtgtctactaaaatacaaaagattagctgggcgtggtggcgcatgcccgtaatcccagctactcgggaggctgaggcacgagaatcacttgaacccaggaggtggaggttgcrgtgagcctagattgtgccgcggcactccagcctgcacagcagagtgagaccccgtctcaaatacatacatacatacatacatacatacatacatacatgaaataaaaagattaaaaattttttaaatgaaagtagaagtgatcatttaaaattcctaatataaatattagttgccttaaaaaataagcctacctcagcctttctacctggtggtggtgtgtggggtgtctgtttgtggggtgtctgtgtgtagggggtgcaggggtatctgcgtgggggctgttggtgtggg

SEQ ID NO: 582190 - DNA, 642 bp, Homo sapiens
atcctgttcccatccccagccccagggaactcctaactacttctggctctgtagatctgcctgttctgaacacttcctataaatggactcatgtgatacgtggtcctgtatgtctggcttcctctgcagggcgtaatgcttccgaggttcatccacgctgcagcgtgtcrgcgttctgctccttggaatgcacatcctgacttctcacctggttccctggtagatgaggacctccacccagcagacatcatgcatgaattcagattcaaaaagagtggacagccgtccttcttccttgctaagccatggctcagacagttcatttattttcaaagttttatatctgtgtctttgccatcttcagtgtaatgtgttcccatctctggctatttcagccctttgcacacacaaacttggatttttagagaacacctaattgctcctcatgcttgtttcaagttgatagtaatagctgtgcttcccgctgaggcgcacagggctcagtaatgagctccctccctccgtgctgtgcctggaggatcaactgcagttttaagtaggggctggctctgtggcatcaaatgctgttacataaagcagaactagggaaatggacgacaaggccaaagaggggatatacac

SEQ ID NO: 582191 - DNA, 642 bp, Homo sapiens
atcctgttcccatccccagccccagggaactcctaactacttctggctctgtagatctgcctgttctgaacacttcctataaatggactcatgtgatacgtggtcctgtatgtctggcttcctctgcagggcgtaatgcttccgaggttcatccacgctgcagcgtgtcggcgttctgctccttggaatgcacatcctgacttctcacctggttccctggtagatgaggacctccacccagcagacaycatgcatgaattcagattcaaaaagagtggacagccgtccttcttccttgctaagccatggctcagacagttcatttattttcaaagttttatatctgtgtctttgccatcttcagtgtaatgtgttcccatctctggctatttcagccctttgcacacacaaacttggatttttagagaacacctaattgctcctcatgcttgtttcaagttgatagtaatagctgtgcttcccgctgaggcgcacagggctcagtaatgagctccctccctccgtgctgtgcctggaggatcaactgcagttttaagtaggggctggctctgtggcatcaaatgctgttacataaagcagaactagggaaatggacgacaaggccaaagaggggatatacac

SEQ ID NO: 582192 - DNA, 627 bp, Homo sapiens
taactttgcaagaaacttgcactgcgattcccaagtcacctgagtagatggcggtgggtgttcattctcaccctttatggctgaagtcaaaagagagatgaaaatgaaatgatgggtgcagacaagactcgtcctgcccccaggtcagaggtcccaagtttcttggaatgagacattgttaacatcatgtttgcattccattttctcccacatgacagtgatcttgccatcttgcagagggaccaagggagctrcagaccactgaaggcatgaatccctattcagagtcatgtttccactggtggaagcaggtaggaacccaggtctctgtcccctcctgagaaagctgagctgctcaccttctcatggagcctcctcagcctgatggccaaggtgtcctgacctgaccacactcatgtttccagactcaggttctgttgcttcttctcacaggctacttgcttctgccaagctaatctctcgcaattccccatgcacagagtccactgcttgggctgactctatgtctgcaatcctggaagatgttgagagcccttgacctgtgtttggactccatgctctgacccatctcaagtctgttcaacccattcccttagctagggagcc

SEQ ID NO: 582193 - DNA, 553 bp, Homo sapiens
tcttggctcaatgcaacctccacctcctgggttcaagcgattctcctgcctcagcctcctgggtaactgggactacaggcacccaccaccacacctggctactttttgtatttttagtagagacagggtttcaccatcttggcaaggcaggtctcaaactcctgacccccagtgatcttcccttcttggccrcacaaagtgctgggattacaggcatgagcacctctgaggtaggccctttggggactggagccatgcctcactctctgcccctgggggaccaggtccccaggtccctgtctcagtcctctctctgctcctgggggaacagggacctgtctcagtgccttctctgcccctctcagggtgtgcatgatggaggagttcaagaattgctgaaccaagaggtagaacccaaatggcttatgtggctcaatccttaggtgtttggaatggaaacttacctgtacctaccacctctctcttgctgtgttcccccaagggtccccactgagtgtccggggagcctcagtagactgagcaggtccctgag

SEQ ID NO: 582194 - DNA, 600 bp, Homo sapiens
cttgggcctctagttacaaggtctttcattacattctaatttgcagaaggcttatctaaaggcaaagtggcacttaaaaactgaaaacctcaacagaatattttaggcttagtttctgatttttagcttcccacattttcacagagcagcagcacaaaccattttgcactttgccaatttagctactcttggctcagcaaggttccaaaatgtgaggtgtaatgcacacttcccacatcaggtactagaaaaagttgcactccagagccagtgtgacagctcccaggtgaacaacatggtgctttcagtgagcctaagctgggtcycatcactggattttgtgagagttttgttcataacttgattacgaatgctacccaaggtgcagaataaggtcacatgatgtattatgaaaccatttcaggaacacagagaaagggctgggggacacatgggtttatggacgtggacacagtcctgcctgtgaatatgcacagatgcttggcagagcccacgttgggggagtgaagacttcaggtttgagctctttgggatgggctctgctggagaatctccagtaaatgagatcttggtattaac

SEQ ID NO: 582195 - DNA, 588 bp, Homo sapiens
caatttaaaggcaaaattgtccacacactaaattgaarcaacaatgaaagatcaaccctttcacattggtagaatgtcactaaaaatctgagtttaattaattaatccccactgtcattagaaatatgtttgagaaataatgtctcaactgtattgatcatggcttccccacctggggtttggaggactaacttcctccttacctgccccgcagggctcttccagttttcagtgttcatgatacatcttactcaagatgcccaagaggcttccaaaaaattaagacactgatgaggtgtcaagagaaagaggcactcaccttgtgtaagatctaactttttaaaatgtattaaaactcagaattattgtcagatgcatactgtttatgcatacataaatttgtctataattttgccaaggaagctaaataaaatgtaaactataaattggtgatgtgtggccttctgtaagcaaagtaaacagtagtagatgggatcataaaattagacccagattcttattggccatcataaaacatggatgaagcactaaagccagcaacttactttacaaaatagcaaaactcct

SEQ ID NO: 582196 - DNA, 582 bp, Homo sapiens
acacaagtgtgggttactatccagagaggcaaggattggatggaacacatgaagaggttcatagaccacgaccttcaaagatgaagatgctcacagcttcatcctccacacacagcagatatttgagatcatcaaagcagatggaggttccatgcagcccagtggactgttgactccaatctccctatcagaaaaccatgtctctttcaaagagcaggaggaggcagaaaaggaagagaaaaagtgcaagatggtgctaacattgccacttttgaggaagtgacacagaaatgtactgatatggtttggctgtgtccccgccaaaatctcaactkgaattgtatctccctgaatccccccatgttgtgggagggatccagggggaggtaattgaatcttgggggccagtctttcctgtgctattctcatgatagtgaataagtctcaagagatctgatgggtttatcaggcgtttccacttttgcttcttcctcatttttatcttgtcaccaccatgtaaaaagtgcctttcacctcccaccatgattatgaggcatccccagccatgtggaactgtaagtc

SEQ ID NO: 582197 - DNA, 582 bp, Homo sapiens
acacaagtgtgggttactatccagagaggcaaggattggatggaacacatgaagaggttcatagaccacgaccttcaaagatgaagatgctcacagcttcatcctccacacacagcagatatttgagatcatcaaagcagatggaggttccatgcagcccagtggactgttgactccaatctccctatcagaaaaccatgtctctttcaaagagcaggaggaggcagaaaaggaagagaaaaagtgcaagatggtgctaacattgccacttttgaggaagtgacacagaaatgtactgatatggtttggctgtgtccccgccaaaatctcaactggaattgtatctccctgaatccccccatgttgtgggagggatccagggggaggtaattgaatcttgggggccagtctttcctgtgctattctcatgatagtgaataagtctcaagagatctgatgggtttatcaggcgtttccacttttgcttcttcctcatttttatcttgtcaccaccatgtaaaaagtgcctttcacctcccaccatgattatgaggcmtccccagccatgtggaactgtaagtc

SEQ ID NO: 582198 - DNA, 472 bp, Homo sapiens
cttttgctttttcctcatttttctcttgctgccaccatgtaagaagtgcatttcrcctcccaccatgattctgaggcctccccagccatgtggaactgtaagtccaattaaacctctttttgttcccagtttcaggtatgtctttatcagcagtgtgaaaacgaactaatacatgtacttgtaaaaacatgaaataccagaggggccatacagaagcctgtgtttttcatctcttaattttctggcttgactccttagtctatggttaactgggtagtggctgcctctggaggggaagtgtattagtcagctcagacaaccttaccaaaataccatgtcttaaacaacagaaatgtatttctcacagttctggagactggaaagtctacaatccaggtgcctgcaaatttagttcttggtgagggctttctttctggcttgtagatggctaccttcttgctgtatcctcata

SEQ ID NO: 582199 - DNA, 588 bp, Homo sapiens
cggctaattttttgtatttttagtacagacggggtttcaccatgttagccaggatggtctcgatctcctgacctcgtgatctgcctgcctcgggctcccaaagtgctgggattacaggtgtgagcaaccacacttggcctaattccttttaagttacatattttcttgtttttcatgttttgaagcatataattccagagatttgcttgtttgaatatggacagccttaatgtgatgccacacgtaccacatggtgggtgttattgctgaaggagaaaactcttttatcacagcaagttctttactgcccgaagggatcaaggctgcatgaaccaaccaggttgtagcatcagatacttcaggagagcagtcagggccacagagwcactggggagtctctggcttagatgtgatcagtgaaaccctaaaggcactcctgcaatacaggactgagtccagagggctgtcactcacaaagcaggtgagtaaaggaatcgactgcagggatactgaacagtgggtggaaggagcaaggaccacagcagggagatcatagagggtttggtacattttacataaaagaggggt

SEQ ID NO: 582200 - DNA, 614 bp, Homo sapiens
ctaattttctgataatttttttataaatggatattgaattttgtcaaaggtttttctgtatctattgagatgattatatggttttcatttctactcttattacagtgaattcccttgattgatttttcaatgttaaaccatccttayattcatagaataaaagtcacttgatcaggctaaagtaatcttttgacatagtacttcattcaacttgctattatttggttgagaatttttgcgaatgtattcatgagaaatattgtttgtgttttctttataatatattctgatttgggcatcaggctaatgccagcctcataaattgagttgggatgtattccttcttctaattttttcttatttctcttgtgattttttcttcgacatacacacacgcaaagaatgtttaatttctaaaattttgaaaattgtattgatttcttatatcatttacttgtgttcagaaaatatgctctttactttttcaacactctcagatttattgaggccttaggacccagcacgtggtgcagcttcagtgctgtgttggagcctgctcgcccaggctggcgggtgccaactgtgcccattgctccccaactcctcactgagcg

SEQ ID NO: 582201 - DNA, 574 bp, Homo sapiens
gatcctcccccatgacccaaacacctctcacgtagccccgcctccaaagttggggattacatttcaacagcacgtttagagaagacccacattcagaccacagcaccatccttsaccctccgtgatgtttattttccatttgcccctccatatacccttctcggaaggcacagaccccataaccaaagctctcgtgcctctggcttctggttgggctcaatggaaggcagcagctatgagacaaggagggagtgaggagaagagggggtcagggccttaccccttggctcccttgctacctctctttgactctggcaataaatgcatctctctacctatgactgcagcccccagtaggcagcccctttttccatactcacagctcttaccagttctgggaacactgctcttttcttttgcctcctcaggtttaaagacgttcatggctcgatgctgtttccactcctgacggctccaccattgcttctgggctcctttaactcttcatgcagctctataaatgatcctcctgctagctctctgtagttaaactctgtgaggttgccctctgtgt

SEQ ID NO: 582202 - DNA, 559 bp, Homo sapiens
acagcaccatccttcaccctccgtgatgtttattttccatttgcccctccatatacccttctcggaaggcacagaccccataaccaaagctctcgtgcctctggcttctggttgggctcaatggaaggcagcagctatgagacaaggagggagtgaggagaagagggggtcagggccttaccccttggctcccttgctacctctctttgactctggcaataaatgcatctctctacctatgactgcagcccccagtaggcagcccctttttccatactcacagctcttaccagttctgggaacactgctcttttcttttgcctcctcaggtttaaagacgttcatggctcgatgctgtttccactcctgacggctccaccattgcttctgggctcctttaactcytcatgcagctctataaatgatcctcctgctagctctctgtagttaaactctgtgaggttgccctctgtgtcctgctggggtcttgattgatacagcatcctacttaaaacagctcttccttccatgtctgcctgcctttgcattatttttcatt

SEQ ID NO: 582203 - DNA, 655 bp, Homo sapiens
ggtcataggcaacttttctacaattctcatattatagggactacaaataagattttcttttatttgaaatgatggaagaagaaatcatcacttttcttaggttgyagtatgattgttatcctgctaaatagctagccatatgctagtggttttcttagacaacaaagtaatgatgtgaaaaaagatttcaccaatacataattagtataactgtatttttccagtaggttaatgttcttgaccataaaattttggggtatggattttatttttttaagataattcttcagtcacagtgaaacacggaagtattccactaccttttctttttttagtgtcttattttacattttcatattttattttagattcaggcattacatgttcacatttgttacataagtgtattgcatgatgctgaggtttgggatatgaatgaccttgtcaactagatagtgaatatagtacccaataattagtttctcaacccccgcttcttcacttcctaccccacccaatttctgtctattaattttcagtggctatttttatgtccaggagtacccaatatttagttaccatttagaggtgagaacatgcagtatttggttttatgctcctgaattaatttgtttaggataatggcctcaagctg

SEQ ID NO: 582204 - DNA, 655 bp, Homo sapiens
ggtcataggcaacttttctacaattctcatattatagggactacaaataagattttcttttatttgaaatgatggaagaagaaatcatcacttttcttaggttgcagtatgattgttatcctgctaaatagctagccatatgctagtggttttcttagacaacaaagtaatgatgtgaaaaaagatttcaccaatacataawtagtataactgtatttttccagtaggttaatgttcttgaccataaaattttggggtatggattttatttttttaagataattcttcagtcacagtgaaacacggaagtattccactaccttttctttttttagtgtcttattttacattttcatattttattttagattcaggcattacatgttcacatttgttacataagtgtattgcatgatgctgaggtttgggatatgaatgaccttgtcaactagatagtgaatatagtacccaataattagtttctcaacccccgcttcttcacttcctaccccacccaatttctgtctattaattttcagtggctatttttatgtccaggagtacccaatatttagttaccatttagaggtgagaacatgcagtatttggttttatgctcctgaattaatttgtttaggataatggcctcaagctg

SEQ ID NO: 582205 - DNA, 611 bp, Homo sapiens
tatttttccagtaggttaatgttcttgaccataaaattttggggtatggattttatttttttaagataattcttcagtcacagtgaaacacggaagtattccactaccttttctttttttagtgtcttattttacattttcatattttattttagattcaggcattacatgttcacatttgttacataagtgtattgcatgatgctgaggtttgggatatgaatgaccttgtcaactagatagtgaatatagtacccaataattagtttctcaacccccgcttcttcacttcctaccccacccaatttctgtctattaattttcagtggctatttttatgtccaggagtacccaatatttagttaccatttagaggtgagaacatgcagtatttggttttatgctcctgaattaatttgtttaggataatggcctcaagctgttatctatgttactgcaaaggacatgrttttattcttttttatggctgcatagtgttccatggtgtatatgtacccccttgtatttatctaattcactgttgatgagcatctaggtcgattcccatgtctttgttattgtaactcataaaactttgataaatacatatt

SEQ ID NO: 582206 - DNA, 549 bp, Homo sapiens
atctgctagcacacaaattgatgccatttcttctatggatactgtttccacctctaaactaccttggaatggagatcgtaagctccttccatcctcggacaccctaaacctgttgggagagttttatccaggatctgggttctttatttctcgggggtccacatgtctatatacttaattattccgttcttgtgtctctctgtcctaagcatatttatttcaggaggtamgaaatgtgtctattttcaggaaatctaaaactttattcagtactaaattttctttggcaactaggaactcaaactgtcaaaaccttttctggggtaacctgatttttcttttcatacctctctttcccgagacaataattatcagtgctctagtggtctggaaaaaggatcaagggacaagacaaaattatggattgcctgaagggagggctttgattgtattgtattttgaaatatgattttgtcacactattgtgttataacatttagaaatctgttacaaaaatatttagggaatataatattggtggttatgaag

SEQ ID NO: 582207 - DNA, 598 bp, Homo sapiens
taattaagttatattacagttgtcagtttaaaatgccacattgctgaaaactgaaaaacttcacttagccatatatatattaactattcagttaaaaacaaacaagcattgaaattatttacaaaaatgatctttcccattttcttaatttatttagcttggagagataaagcccagatggaatatataactaaaaacacacaagtagacatcaacawgatgattagtttttagttaaatttcttttcctttttttcttattttttttttcccgcttttcctagtgattctttgttcttgaattattgtgttaaccttgttgttgtctcctggttcttaaatttgataagaaatggcctctataatttatttcagtttttaaaattgaaatatggaccttagcctggtctttaggcaataacttgttttcataaaaactaaaacgatgttgaaagcaaaaaggaagaggaagacatccaaggcaggctgcatctaactgattctgcacagtgtaatgtttataggatggaattttgatgctcataatggttgctacctaatgataattatatcatatattaatttcactaaattactc

SEQ ID NO: 582208 - DNA, 589 bp, Homo sapiens
ttcaaacttcacctgcttcagcctcctgagtcgctgggattacaggcracctccaccatgcccagcaaatttttgtacttttagtagagacaggtttgtgccatgttggccaggctgatcttgaacttctgacctcaggtgatctgcccgccttggcctcccaaagtgctgggattacaggcctgagccaccacacccggcctcatttagtttttaaaggtagtgttgtagtaacaaataataactaaggaatacttttgaagcaaatttatggattatacatagcaaaaagttttatccagcatattaaaaaataacctaccaatcaacaatttttaatgtttatctttttattcacaaggtatcatattataccttgtgcatttagaattgaaaactgtaacaatatgtatgaaaagatatactcaaaacctagtaaatacagtaagtatatactctgtgtcaagtgtcaaatgggtgctataaattctttactgcaaggaaaaagagacattataatagactgaggtggccaggttagggttcatgagaaaagcagattattcttggttcttttcaatgtattagt

SEQ ID NO: 582209 - DNA, 538 bp, Homo sapiens
cttaaaataagtccagctagtgggatatgtggagcytgcattgaaagaagcatattggatagactgacagctctagtaaaaaatcagtaataatgactatcaatttttgaattcttacaatgtgccacgaactattctaaatgctttccattgtacatatttgaattactttcaaatgtttggtcttaaccactctactatacaggattctccaatgaccatgcttcctgtgacttgctcatgcgtatctgaactgaaaaaatacaaacatgcgttaggtggctatcaaagtgttgttcctggaaaagcagcatcagcatcagcatcagcaccaatagaaacaccttagaaatgcagactgctatactctataccacagagattgaatcagaaaccctagtgttggggccagaaatctgtgttttagtgagctctgccattgattctggtttatactaacctgtgccatgcacaagcgcatgtgtatatgtaagaaagagagaaaaaggaaaagggagataaagaaatattatgtgtt

SEQ ID NO: 582210 - DNA, 538 bp, Homo sapiens
cttaaaataagtccagctagtgggatatgtggagcttgcattgaaagaagcatattggatagackgacagctctagtaaaaaatcagtaataatgactatcaatttttgaattcttacaatgtgccacgaactattctaaatgctttccattgtacatatttgaattactttcaaatgtttggtcttaaccactctactatacaggattctccaatgaccatgcttcctgtgacttgctcatgcgtatctgaactgaaaaaatacaaacatgcgttaggtggctatcaaagtgttgttcctggaaaagcagcatcagcatcagcatcagcaccaatagaaacaccttagaaatgcagactgctatactctataccacagagattgaatcagaaaccctagtgttggggccagaaatctgtgttttagtgagctctgccattgattctggtttatactaacctgtgccatgcacaagcgcatgtgtatatgtaagaaagagagaaaaaggaaaagggagataaagaaatattatgtgtt

SEQ ID NO: 582211 - DNA, 538 bp, Homo sapiens
cttaaaataagtccagctagtgggatatgtggagcttgcattgaaagaagcatattggatagactgacagctctagtaaaaaatcagtaataatgactatcaatttttgaattcttacaatgtgccacgaactattctaaatgctttccattgtacatatttgaattactttcaaatgtttggtcttaaccactctactatacaggattctccaatgaccatgcttcctgtgacttgctcatgcgtatctgaactgaaaaaatacaaacatgcgttaggtggctatcaaagtgttgttcctggaaaagcagcatcagcatcagcatcagcaccaatagaaacaycttagaaatgcagactgctatactctataccacagagattgaatcagaaaccctagtgttggggccagaaatctgtgttttagtgagctctgccattgattctggtttatactaacctgtgccatgcacaagcgcatgtgtatatgtaagaaagagagaaaaaggaaaagggagataaagaaatattatgtgtt

SEQ ID NO: 582212 - DNA, 483 bp, Homo sapiens
gtttcctgggctgggtccaggacccctctgctgtgtgtatcctcakgacttagtgccctgtatcccagccactctagccatggctaaaaggggccaaggtatagctcaggccagggcttcagaggttacaagccccaagtcttggcggcttccacatggtgttgatcgtgcaggtgcacagaagtcaataattaaggtttgggaacctctgcctagatttcagaggatgtatggaaatgcctggatgtccaggcagagttatgctgcaggggcagagccctcatggagaacctctgccagggtagtgcagaagggaaatgtgggtgggagcccccacacagagtccccactgggacactgcctagtggagctgtgaaaagagggtcactgtcctccagccccaagaatagtaatccactgacagcttgcactttgggcctggcaagtcgcagacactcaacaccagcccatgagcccatgaaa

SEQ ID NO: 582213 - DNA, 584 bp, Homo sapiens
gtaatactgtgtacaaattttgatagtaattgctagagtatatttatgttgtctatttatctaaacatcttgaaagtagagattgatgttagaaatttcactacatagcccaacgcttggcttagcccttgcataatgtatgtacatacatgaaatgaaactaaatttaatgacataaaattatctaaaagtaaagttttgtaatgaagattcctaaatgtaaaaagagaacyggtaaagtatatgtcagcatctaaacatacatatttgtcttacctcacaagcatacaaacacataaataagttctcttgacaaataaataaaaagctttgatattggatatatgtccacttttagaatttcagtatgtgtaagagtatacttacatgtactagtctgttctcacactgctaataaagacacaccttagactggggaatttataaaggaaagaggtttaattaactcacagttccacatagtttggaaggcctcaagaatcttgcaattatggtggaagaggaagcaaatgtgtccttcttcacatgggggcaggagaggttcagagcgaagcggggaaaag

SEQ ID NO: 582214 - DNA, 584 bp, Homo sapiens
gtaatactgtgtacaaattttgatagtaattgctagagtatatttatgttgtctatttatctaaacatcttgaaagtagagattgatgttagaaatttcactacatagcccaacgcttggcttagcccttgcataatgtatgtacatacatgaaatgaaactaaatttaatgacataaaattatctaaaagtaaagttttgtaatgaagattcctaaatgtaaaaagagaaccggtaaagtatatgtcagcatctaaacatacatatttgtcttacctcacaagcatacaaacacataaataagttctcttgacaaataaataaaaagctttgatattggatatatgtccacttttagaatttcagtatgtgtaagagtatacttacatgtactagtctgttctcacactgctaataaagacacaccttagactgggkaatttataaaggaaagaggtttaattaactcacagttccacatagtttggaaggcctcaagaatcttgcaattatggtggaagaggaagcaaatgtgtccttcttcacatgggggcaggagaggttcagagcgaagcggggaaaag

SEQ ID NO: 582215 - DNA, 608 bp, Homo sapiens
ccaccattctggagtctggaggatggtggccctcttctaacagcttcactaggcagtgccccagtggggactctgtgtgggggctctgaccacatgtttcctttctgcactaccgtagcagaggttctccatgagggcaccacttctatagcaaactcctgcctggacatccaggcatttccatatttcctctgaaatctaggcagaggtttccaaacctcaattcttgacttctgtgcacccacaggaccaacaccacatgtaagcggccaaggcttagggcttgtgccctctgaagcaacacctggacctatacattggccccttttagccacggctggagctgragcaggcagaacatggggaactatgtactgaggctgcatagtgggccctggacctgacccataaaaccatttctctcctagtcctctgggcctatgatgggaaaggatgctgtgcaggtctctgatatgccctggagacattttccccaatgtcttggtgattagcatttggttccttgttatctatgcaaatttctgcagcaggcttgaatttctccccagaaaatgagtttttattttctatcacatcatcaggctgca

SEQ ID NO: 582216 - DNA, 586 bp, Homo sapiens
aagtctatagtgctaaatacatacatcaaaaatatagaaataactcacattaatactctatcatcatgcctggaagatctagggaaaaacaaacaaacaaamaaacaaaaccccttatgtctagcaaaagagaacaaataactagaatcagaaagaactgaattaaattgaggccccaaaatctatataaaggatcaatgaaaccaaaagttggttcttcgaaaagatgaacaagatttatagacctatagctagattaacaaataaaaagagaggaaatccaattaagaacaagcagaaatgacaaaagatgacattacaattaacctcacagaaatacaaaagatcctcagatgctattatgaacacatctatgcacacaaactagaaaatgtagatgaaatggataaattcctggaaacacacaagctcccatgattgaatcaagaagaaatcaaaagcttgaacagaaaaataatgagttttgaaattaaattagtaatgaaaaatctaccgatcaaaaaatgcccttgaaaggatggattcacagccaaattctaccagacatacagagaagagctggcac

SEQ ID NO: 582217 - DNA, 586 bp, Homo sapiens
aagtctatagtgctaaatacatacatcaaaaatatagaaataactcacattaatactctatcatcatgcctggaagatctagggaaaaacaaacaaacaaacaaamaaaaccccttatgtctagcaaaagagaacaaataactagaatcagaaagaactgaattaaattgaggccccaaaatctatataaaggatcaatgaaaccaaaagttggttcttcgaaaagatgaacaagatttatagacctatagctagattaacaaataaaaagagaggaaatccaattaagaacaagcagaaatgacaaaagatgacattacaattaacctcacagaaatacaaaagatcctcagatgctattatgaacacatctatgcacacaaactagaaaatgtagatgaaatggataaattcctggaaacacacaagctcccatgattgaatcaagaagaaatcaaaagcttgaacagaaaaataatgagttttgaaattaaattagtaatgaaaaatctaccgatcaaaaaatgcccttgaaaggatggattcacagccaaattctaccagacatacagagaagagctggcac

SEQ ID NO: 582218 - DNA, 626 bp, Homo sapiens
tatatattaaattatatttagttttccaacctcttcttacttctatttctccaacttcttcattctcatctttttctctgtgggcgaacatattcttaccactaaatctaagtgcattttgccatactaaccatgctatttcatgtctgctttatccagtcataaaatcttccccttatttccaaaactgattattcttcagcccyagtatcacctctcagaagcatctgagtaagctaaatgcctcatcttcatgctcctgaagctcattgtatgtttctttaccacatgccctattgctttttttctgtcattttttaatagcccacatgaaattaagaattcataaggacaggatggcttatttatatcatacaatgcctgctttatttttctttttgcaatgacataggttagatatgcaataatttctgccaaaatttcttctgaagctatttccatttttcaattacatatcattcccaccccaaccacccaaacacatgaagaaataaaaattgccaattagtattgtataattttgtcttaaaagaaggtatgttttctgtttattagaagaaatataagaaaataagacacattttgttctttaaataaaacttaag

SEQ ID NO: 582219 - DNA, 604 bp, Homo sapiens
cacatgaaattaagaattcataaggacaggatggcttatttatatcatacaatgcctgctttatttttctttttgcaatgacataggttagatatgcaataatttctgccaaaatttcttctgaagctatttccatttttcaattacatatcattcccaccccaaccacccaaacacatgaagaaataaaaattgccaattagtattgtataattttgtcttaaaagaaggtatgttttctgtttattagaagaaatataagaaaataagacacattttgttctttaaataaaacttaagtgatcacataactacttattaaactttgtccttttgttacattttattgctttcttgttttcaattttgtcactatattagtcagttttcacaatgctataaataacttcccagaaactgggggatttataaatgaaagaggtttaattgactcagtttcacatggctggggaggtctcaggaaacttacaatcatggtggatggtgaaggggaagcaggcamcttctttacctggtgacagaaaagagtgaagaaggaactcccaatcacttataaaaccatcagatctagtaagaactcact

SEQ ID NO: 582220 - DNA, 623 bp, Homo sapiens
tgctataaataacttcccagaaactgggggatttataaatgaaagaggtttaattgactcagtttcacatggctggggaggtctcaggaaacttacaatcatggtggatggtgaaggggaagcaggcaacttctttacctggtgacagaaaagagtgaagaaggaactcccaatcacttataaaaccatcagatctagtaagaactcactcactgtcataagaagagcatgggggaagcctcccccatgatccagtcaccccgctccttggacaagtggggattataggtccctccctcaacacatggggattacaaatcgagatgagatttgggttggtacacacagccaaaccatatcagtcacctagaattctttaaggaaatctatttctaggtcagttttaaagtaagtacaatatatatacctatttttgtataattaaatatattagtttaacttttaacagtctattctagcattgcttaacctttttcattatcaactcctgtcaaaagaggattttaagatttttttctttctaatagaacccttataaatttgtacttccacagatatatttatgtatrtatattatccatgctttatacataagaaaagta

SEQ ID NO: 582221 - DNA, 494 bp, Homo sapiens
tagccacattgtgaacgcaatggaaaagatatttcataaattaaaagttctactccagtgcaaacacaaatcataggaaagtaaaacaacctgatgtgaagctgatgtgaagaaagtttgagtggtctggatagaagatcaaactagcyacaacattcccgtaagccaaagcctaatctggagcaagaccttaactctcttcctttctctggagcttgagagagggaaggaagctgcagaagaaaagtctgaagctagtagaggtgggttcatgaaatttaagggaaaaataaaaagccatctccataacataaaagtgcaaggtgaagcagcaagtgcagatgcagaaggtgttgcagctagttatccagaaaatccagctaagatatttgtagagggtggctacgctaaaaaaacagatttccaatgtagataaaacagttttctattagaatatgccatctagaacttccgtaacttaaaacagagaggtc

SEQ ID NO: 582222 - DNA, 537 bp, Homo sapiens
tttcataaattaaaagttctactccagtgcaaacacaaatcataggaaagtaaaacaacctgatgtgaagctgatgtgaagaaagtttgagtggtctggatagaagatcaaactagccacaacattcccgtaagccaaagcctaatctggagcaagrccttaactctcttcctttctctggagcttgagagagggaaggaagctgcagaagaaaagtctgaagctagtagaggtgggttcatgaaatttaagggaaaaataaaaagccatctccataacataaaagtgcaaggtgaagcagcaagtgcagatgcagaaggtgttgcagctagttatccagaaaatccagctaagatatttgtagagggtggctacgctaaaaaaacagatttccaatgtagataaaacagttttctattagaatatgccatctagaacttccgtaacttaaaacagagaggtcaatgcctagattcaaggtttcaaaggatgggctgactttcttgttaggtgctaagagctggtgactttaagttg

SEQ ID NO: 582223 - DNA, 537 bp, Homo sapiens
tttcataaattaaaagttctactccagtgcaaacacaaatcataggaaagtaaaacaacctgatgtgaagctgatgtgaagaaagtttgagtggtctggatagaagatcaaactagccacaacattcccgtaagccaaagcctaatctggagcaagaccttaactctcttcctttctctggagcttgagagagggraggaagctgcagaagaaaagtctgaagctagtagaggtgggttcatgaaatttaagggaaaaataaaaagccatctccataacataaaagtgcaaggtgaagcagcaagtgcagatgcagaaggtgttgcagctagttatccagaaaatccagctaagatatttgtagagggtggctacgctaaaaaaacagatttccaatgtagataaaacagttttctattagaatatgccatctagaacttccgtaacttaaaacagagaggtcaatgcctagattcaaggtttcaaaggatgggctgactttcttgttaggtgctaagagctggtgactttaagttg

SEQ ID NO: 582224 - DNA, 570 bp, Homo sapiens
attcccgtaagccaaagcctaatctggagcaagaccttaactctcttcctttctctggagcttgagagagggaaggaagctgcagaagaaaagtctgaagctagtagaggtgggttcatgaaatttaagggaaaaataaaaagccatctccataacataaaagtgcaaggtgaagcagcaagtgcagatgcagaaggtgttgcagctagttatccagaaaatccagctaagatatttgtagagggtggctacgctaaaaaaacagatttccaatgtagataaaacagttttctattagaatatgccatctagaacttccgtaacttaaaacagagaggtcaatgcctagattcaaggtttcaaaggatgggctgactttcttgttaggtgctaagagctggtgactttaagttgaagccaatatttattgaccattctgaaaatcctagtgcacttaagaattctgttaaatttactctgtctgtgatcaataaatrgaataacaatgcctaataaaagcatatatttatggaagcataaactatgtttacagcatagtttagcaagtat

SEQ ID NO: 582225 - DNA, 557 bp, Homo sapiens
ctaattcttctgagatatcataaactaaatagtgggaaagcaagccaaagaaatactgtctgatttatttattttgcagactgcacttagattttttaaaaaagagcctctcactttgattcttgtatgacttgaagaaaaagctatactgtataaaggtgtttgcaggtgggttctctggcaagcagacaatgaggcagagattagttgcaagagttttgttggggtatgctttgggggtcaacatttttggagggcaaaggacaagaccagaattggattcagggagaaagtcaaactactgtgcagggtcaactacagccttggccaacccaaggaaggagctgcagaattgcaattgcatgtcacagtttttctgagctggggtaaaatgtccagcattttacactcaggcatcagtcaggatatgggctacactgaaatgggtgtgactatgggcaagggaaccttctgtagataaggtcatctctraagtggctagcagctgtacatccctctttactccttcatccctacatcactccaaaaagccaaga

SEQ ID NO: 582226 - DNA, 711 bp, Homo sapiens
accttctgtagataaggtcatctctgaagtggctagcagctgtacatccctctttactccttcatccctacatcactccaaaaagccaagacattcagctctaccttcaagggagatctgcttggcacacagtcttcataacaagcctctatcttggattggtttttttcttagagtataaaatccttgcttaacagaatatagcaaattttatacacatacacacatatattaaattattacaatatcattcattgttttcaaatgaaacagccagctacattattacctcaaaggtgaaaaagtctagggtttgatttttttgatccaaactaatatttgtcattttccacccctgtgcccagagacgtaactcatattttcctgttgaatttgtttcccaagtagaaacagaagtcttaaatatgatgaactttaggttttttcttttagttcttataaacacccagtatggcagttattattgtccatattttacagccaakaatatttcagaaaaacaaaaaataagttcattttcctttagctagcaaataagagtatttggatttgaatttagagtatgaatgtgccatctgtttgtaatttttgtgcaggtaggggatgctgctataactagtgtagcattattaattattctagctgcatgatagattggagtccagagatagaaagatgagctggacataa

SEQ ID NO: 582227 - DNA, 537 bp, Homo sapiens
gctagcaaataagagtatttggatttgaatttagagtatgaatgtgccatctgtttgtaatttttgtgcaggtaggggatgctgctataactagtgtagcattattaattattctagctgcatgatagattggagtccagagatagaaagatgagctggacataatttagaattcactctgaattattttcatgatggggattaagggccatatcacacaaatacacacttgaaggttatcattacatagcccctcagactttacatatatttcattagaaaaataaaaatctaagttacagagaattgtcagtgggttccctcaatgtctcccttactctgtggcaagctagtctgacatgatatctaacagaaggaaaaacatacttcagataagtcatggaagtcataccatgaagtcatgagaattacagtatatagygtgcccagagctgtgaattccactaattattttgaaacattgaaatattcatttcaaaataaatctataaaccatccaacatctgtacttatctt

SEQ ID NO: 582228 - DNA, 651 bp, Homo sapiens
tctctttctggcatttctacatccctctttactccatctattgccatcagttttcaaacctgctgaagaatttatcattacaaaataaagagaaatgagaaagaaaatataattgcttcctactatgtctgttttcctacaatctcttcacatcccaagattctatgtgagggcagtgggtgggggaagaaaaggacaacatatatatccattgcactcatttattaatgagttattttgttatttagtcatgcaaatcatgcactatacaaaacatacactatgtttcctaatactgtttacttaattactcttaaaaagtcataattagttctttaaaatgtaaaactaaaatatgacaaatgatgccatctttgctattgagatgktttggctgtgttctcacccaaatctcatcttgaattgtagctcccctaattcccatgtgttgtgggtgggacctggtgggagataactgaatcatgggggcggtttcctccatactgttctcttggtagtgaataagtctcatgaggtctggtctgatggttttataagaggtttcccctttgcttggctctcattctctcttgcctgctgccatgtaagacgtgccttttactttctgccatgattgtgaggcctccccag

SEQ ID NO: 582229 - DNA, 583 bp, Homo sapiens
tgagcatgccaatatacgaagatttggatgcaattatttactctaaaacttcatcaatattatgtggttgcaggtaacttttaaataggcccttttggatctcacatgaattgaaataggaaaaaaatctatttaaagaagtcctgaagtagacgtatatgcttaatattaaacattgtttgaaattgaagagtctggcttaacacactaaattaagaaagaagaaagaaagcaagaaagttggatgttgaatgcagatgccaatgcagtgccacataccagttagatagcatgtggcaagttctaatgggcacaaaatgtgccttgttcacattaatgctttagtgtagcactgaatttgcctctcagtaaatgttaactaaatttaaaaaatagtattattttccccaaatacatcaattcataacattacaaaataattatgctataagtttgatttgacttaaccatacatgytttcatccatcaattcattcatttattcacccacatttattgttgactttaagctgaacaacattttcagggctggggctctaactaaggacaagagtaatgtgtt

SEQ ID NO: 582230 - DNA, 551 bp, Homo sapiens
aaataattgccttttaaaaattattacagtgataaacctaagtaataaagtaaatatgcattgcataataagagcatacagcaggacttttaacccggcctcctgaaaattacattctaatgggaaagacaaatgtcaaccaaaatattaagttaygaaaataaacaacttcatattttaatggacattatgaaaaagtaaagtgaactatgagagcacataaatataggtacttaaatccaatattgtgggttcaaaaaggaaatgacattcaacagcatccagaactcttaaactttagttttcacactgtcaggaagtttggaatcccaacggtgactttcacattacttgtattaaataaaagtcatgacaaaatgattacatttttcccattagtttacaatatttgtaaatacaggaaatgacaatagatacagtacctcttgatgttagtaacattcttgagattatttgatattagtaacattcttgagattatttttagtaattaagatagaaaaaaaatgttttctatataatggcataat

SEQ ID NO: 582231 - DNA, 551 bp, Homo sapiens
aaataattgccttttaaaaattattacagtgataaacctaagtaataaagtaaatatgcattgcataataagagcatacagcaggacttttaacccggcctcctgaaaattacattctaatgggaaagacaaatgtcaaccaaaatattaagttacgaaaataaacaacttcatattttaatggacattatgaaaaagtaaagtgaactatgagagcacataaatataggtacttaaatccaatattgtgggttcaaaaaggaaatgacattcaacagcatccagaactcttaaactttagytttcacactgtcaggaagtttggaatcccaacggtgactttcacattacttgtattaaataaaagtcatgacaaaatgattacatttttcccattagtttacaatatttgtaaatacaggaaatgacaatagatacagtacctcttgatgttagtaacattcttgagattatttgatattagtaacattcttgagattatttttagtaattaagatagaaaaaaaatgttttctatataatggcataat

SEQ ID NO: 582232 - DNA, 587 bp, Homo sapiens
tatgaccagagaaaccatctattagttttgttcctcaggagagcctaggtagcactcccaattctgaagcaatatagaaaggtgcaacaagaggtgctctggtatcattgaaaagttcagtgatggctctcctcaccaggccagagtagagggtagtgaatgttgctatgaaacttgtgttccttagtgtcaatgtgagtggaagaattctggattcagaatccaggtggaaatactccaatatcagaggcagatggatgaaatgtatcatagcaatcagcaaaaaacaacgtcaaataagctgctacgaagtgcaaagatctatraggatggctatccaaccacggtgttcccaaagcaaatacagaaaggcagccaagaaggctattgctggatttatataatctaaaaacatcaaaatcaggtaaactaaagccgcatcattgtgttctttcctgtgattaatacacatttgaagtatgagttgcttttttattgctgcagtgatttggccaatattaatagctgaggacactgactattctgactttgtccagaaaattgcacataacatcaattccaaccaa

SEQ ID NO: 582233 - DNA, 587 bp, Homo sapiens
tatgaccagagaaaccatctattagttttgttcctcaggagagcctaggtagcactcccaattctgaagcaatatagaaaggtgcaacaagaggtgctctggtatcattgaaaagttcagtgatggctctcctcaccaggccagagtagagggtagtgaatgttgctatgaaacttgtgttccttagtgtcaatgtgagtggaagaattctggattcagaatccaggtggaaatactccaatatcagaggcagatggatgaaatgtatcatagcaatcagcaaaaaacaacgtcaaataagctgctacgaagtgcaaagatctataaggatggctatccaaccacggtgttcccaaagcaaatacagaaaggcagccaagaaggctattgctggatttatataatctaaaaacatcaaaatcaggtaaactaaagccgcatcattgtgttctttcctgtgattaatacacatttgwagtatgagttgcttttttattgctgcagtgatttggccaatattaatagctgaggacactgactattctgactttgtccagaaaattgcacataacatcaattccaaccaa

SEQ ID NO: 582234 - DNA, 454 bp, Homo sapiens
gatggatgaaatgtatcatagcaatcagcaaaaaacaacgtcaaataagctgctacgaagtgcaaagatctataaggatggctatccaaccacggtgttcccaaagcaaatacagaaaggcagccaagaaggctattgctggatttatataatctaaaaacatcaaaatcaggtaaactaaagccgcatcattgtgttctttcctgtgattaatacacatttgaagtatgagttgcttttttattgctgcagtgatttggccaatattaatagctgaggacactgactattctgactttgtccagaaaattgcacataacatcaattccaaccaagaagttcatctcatggcaaagttaggtgcaatcatatgcataggaccactggatctgttggcactaatatacagtaccacccagcaktgctgacctagtagaatactggaaaagcctct

SEQ ID NO: 582235 - DNA, 533 bp, Homo sapiens
ctcactccacacacaaaaatcatttcagatgataaacctattacraataacaagacaataaatctttaaaaagcaggtccttcatgacctgaggaagtaggctattttttaagcaaggtcaaaagaatagtaacacttacaaaatgatggataaatttgataatcttaaaatttaaatctgtgtgtcaaaagatatcttgcaggaagtgaaatggaagctcgagaatgggagaaatgtttgaaacatatataacaaaggaggggctcatttctataataatcaaagaactcccacagataaaaaagaacattcaagaagaaaacacatttactccaacagataaataagaaactcaaataggcatttcggaaaagacgaaattcaaaatagtaagtaaatatatgaaaagattctcaatgccattagcaaaatgctaatcacgatcataatgcgatatcactgaaaccgtaacaaggtggctcaaattagaaagactgacataccaagcacacagacaggaaccatgaccaac

SEQ ID NO: 582236 - DNA, 533 bp, Homo sapiens
ctcactccacacacaaaaatcatttcagatgataaacctattacgaataacaagacaataaatctttaaaaagcaggtccttcatgacctgaggaagtaggctattttttaagcaaggtcaaaagaatagtaacacttacaaaatgatggataaatttgataatcttaaaatttaaatctgtgtgtcaaaagatatcttgcaggaagtgaaatggaagctcgagaatgggagaaatgtttgaaacatatataacaaaggaggggctcatttctataataatcaaagaactcccacagataaaaaagaacattcaagaagaaaacacatttactccaayagataaataagaaactcaaataggcatttcggaaaagacgaaattcaaaatagtaagtaaatatatgaaaagattctcaatgccattagcaaaatgctaatcacgatcataatgcgatatcactgaaaccgtaacaaggtggctcaaattagaaagactgacataccaagcacacagacaggaaccatgaccaac

SEQ ID NO: 582237 - DNA, 533 bp, Homo sapiens
ctcactccacacacaaaaatcatttcagatgataaacctattacgaataacaagacaataaatctttaaaaagcaggtccttcatgacctgaggaagtaggctattttttaagcaaggtcaaaagaatagtaacacttacaaaatgatggataaatttgataatcttaaaatttaaatctgtgtgtcaaaagatatcttgcaggaagtgaaatggaagctcgagaatgggagaaatgtttgaaacatatataacaaaggaggggctcatttctataataatcaaagaactcccacagataaaaaagaacattcaagaagaaaacacatttactccaacagataaataagaaactcaaataggcatttyggaaaagacgaaattcaaaatagtaagtaaatatatgaaaagattctcaatgccattagcaaaatgctaatcacgatcataatgcgatatcactgaaaccgtaacaaggtggctcaaattagaaagactgacataccaagcacacagacaggaaccatgaccaac

SEQ ID NO: 582238 - DNA, 631 bp, Homo sapiens
ctcatcaacatgagaatgtgaaaataaattgtggcatagccacaaacagcaaataaatgaatgaacaggtagaaatgtggctgaatagtaaaaagttaaatatgaatgaaagaagacagatactaatgcacacacactctaaaattctgtttacaggcttcraaaaaagacaaaactaaactataatgtttataaatgcttacttagatggtaaatgtgcaacaaaaaaacccaggaaattaacatagtggttaactctaggtggaggaaagcaattgcgcctgagaaggagcatgaagaaagattttctggtgatgcattctatacctgatttggacttacatttatgtttactgtataataatatactaaactgtacatttatctttaaatcacttttgtgtattacattttttttcttaaagtttaaaggacaagagttggtcttaataaaaatctccggatatagctggaattctttctgtaaaaccaagttggttgccaagcttattcctcaggtaggcaataaagtccacgtaagtaattgtagtgagttataatatttgtagagaaggaaaactgaactgaactaaagtgaataggtcatgaattttcatcagtctataaaaca

SEQ ID NO: 582239 - DNA, 609 bp, Homo sapiens
gagtccttaatttactgcacaagagaacatttgcmcagaagccgatttatatacatttttgttcagatgtccctgagcataaatacagtgaactattgattatgcttgttggaattgcatttcaatacatttctcctcttgaaataatgcattgtggaaaaactatatgcaactagctgcttttgtaaccacaatgaaagcattataaccccaaagtatgtacaacgtgccataaaaagaaatactactacaataactacattaatttattcttcatcctgtcaatagaaaataaagggggaagagaaccaatcttttcataggcttcagtcatttacagtcttaggtgtgtgtctaatcagtttgtgaatcactgtacattcaagttagaaggtgaatccaatgaatacttcccaagcaaataaaaagttcatcatattcaacactgtgaacagctgtgttgacataattggaaaagtatatacattttttttgtttctgaagaatcaaattttccaaaaagtaccttgtgacattaaggttttaaatttcccctgagaataaaatagagaataaaatttttaagaacataatgagctcattggaaac

SEQ ID NO: 582240 - DNA, 609 bp, Homo sapiens
gagtccttaatttactgcacaagagaacatttgcacagaagccgatttatatacatttttgttcagatgtccctgagcataaatacagtgaactattgattatgcttgttggaattgcatttcaatamatttctcctcttgaaataatgcattgtggaaaaactatatgcaactagctgcttttgtaaccacaatgaaagcattataaccccaaagtatgtacaacgtgccataaaaagaaatactactacaataactacattaatttattcttcatcctgtcaatagaaaataaagggggaagagaaccaatcttttcataggcttcagtcatttacagtcttaggtgtgtgtctaatcagtttgtgaatcactgtacattcaagttagaaggtgaatccaatgaatacttcccaagcaaataaaaagttcatcatattcaacactgtgaacagctgtgttgacataattggaaaagtatatacattttttttgtttctgaagaatcaaattttccaaaaagtaccttgtgacattaaggttttaaatttcccctgagaataaaatagagaataaaatttttaagaacataatgagctcattggaaac

SEQ ID NO: 582241 - DNA, 609 bp, Homo sapiens
gagtccttaatttactgcacaagagaacatttgcacagaagccgatttatatacatttttgttcagatgtccctgagcataaatacagtgaactattgattatgcttgttggaattgcatttcaatacatttctcctcttgaaataatgcattgtggaaaaactatatgcaactagctgcwtttgtaaccacaatgaaagcattataaccccaaagtatgtacaacgtgccataaaaagaaatactactacaataactacattaatttattcttcatcctgtcaatagaaaataaagggggaagagaaccaatcttttcataggcttcagtcatttacagtcttaggtgtgtgtctaatcagtttgtgaatcactgtacattcaagttagaaggtgaatccaatgaatacttcccaagcaaataaaaagttcatcatattcaacactgtgaacagctgtgttgacataattggaaaagtatatacattttttttgtttctgaagaatcaaattttccaaaaagtaccttgtgacattaaggttttaaatttcccctgagaataaaatagagaataaaatttttaagaacataatgagctcattggaaac

SEQ ID NO: 582242 - DNA, 547 bp, Homo sapiens
ttttgtaaccacaatgaaagcattataaccccaaagtatgtacaacgtgccataaaaagaaatactactacaataactacattaatttattcttcatcctgtcaatagaaaataaagggggaagagaaccaatcttttcataggcttcagtcatttacagtcttaggtgtgtgtctaatcagtytgtgaatcactgtacattcaagttagaaggtgaatccaatgaatacttcccaagcaaataaaaagttcatcatattcaacactgtgaacagctgtgttgacataattggaaaagtatatacattttttttgtttctgaagaatcaaattttccaaaaagtaccttgtgacattaaggttttaaatttcccctgagaataaaatagagaataaaatttttaagaacataatgagctcattggaaactcatgcatggaaacattgcagtgttgggctccttcctttcgaaccttcagaagttacaatttaggggtgctaaaggatttccacacccttagttaccacatccacttattaagttaat

SEQ ID NO: 582243 - DNA, 547 bp, Homo sapiens
ttttgtaaccacaatgaaagcattataaccccaaagtatgtacaacgtgccataaaaagaaatactactacaataactacattaatttattcttcatcctgtcaatagaaaataaagggggaagagaaccaatcttttcataggcttcagtcatttacagtcttaggtgtgtgtctaatcagtttgtgaatcactgtacattcaagttagaaggtgaatccaatgaatacttcccaagcaaataaaaagttcatcatattcaacactgtgaacagctgtgttgacataattggaaaagtatatacattttttttgtttctgaagaatcaaattttccaaaaagtaccttgtgacattaaggttttaaatttcccctgagaataaaatagagaataaaatttttaagaacataatgagctcattggaaactcatgcatggaaacattgcagtgttgggctccttcctttckaaccttcagaagttacaatttaggggtgctaaaggatttccacacccttagttaccacatccacttattaagttaat

SEQ ID NO: 582244 - DNA, 593 bp, Homo sapiens
tatacaccaccacagttacagtgttataatactctgtgtttcctgtgtacatactattaccagtgagttttgtatcttcagatgatttcttattactcacgaactttctttttttattgaagaactttctttagaatttcttataggacaggtctggtgttgatgaaatccctcagcttttatttgtctgggaaagtctttatttctccttcctgtttgaaggatattttaaccagatatactcttctaggaattttttttgtccttcagcactttaagtatgacatgccactctctcttggcctgtaaggtttctgctraatgtctgctgccagatgtattagagctccattgtatgttatttgtttcttttctcttactcctttaggatcctttatttatccttgacctttgggagtttgattattaaataacttgagctagtgttctttgggttaaatctgctggtagttctataatcttttgtacttggatattgatatccttttctgggtttgggaagttcttcattattattccttttaataaactttctacccttatctctttgtctgtctcctctttaatgccaa

SEQ ID NO: 582245 - DNA, 593 bp, Homo sapiens
tatacaccaccacagttacagtgttataatactctgtgtttcctgtgtacatactattaccagtgagttttgtatcttcagatgatttcttattactcacgaactttctttttttattgaagaactttctttagaatttcttataggacaggtctggtgttgatgaaatccctcagcttttatttgtctgggaaagtctttatttctccttcctgtttgaaggatattttaaccagatatactcttctaggaattttttttgtccttcagcactttaagtatgacatgccactctctcttggcctgtaaggtttctgctaaawgtctgctgccagatgtattagagctccattgtatgttatttgtttcttttctcttactcctttaggatcctttatttatccttgacctttgggagtttgattattaaataacttgagctagtgttctttgggttaaatctgctggtagttctataatcttttgtacttggatattgatatccttttctgggtttgggaagttcttcattattattccttttaataaactttctacccttatctctttgtctgtctcctctttaatgccaa

SEQ ID NO: 582246 - DNA, 606 bp, Homo sapiens
acatgcaatttattagtcaccaagtcctgttaatttgaccttgtaaatgcgccttgtattatacagttttgagcaatggataacactaatacaattttcatttcctgagtaaatagctggaagtcagataactggrttttctgattagcatatgtttagctatgtaagaaaaccagaaatgtgttttgctcaataatttaatgaataatttttaatacattttcttgttaatcaacttaatgaacacttttaagggcagtgtgtaatactacgaatttaataagcaattttggctttaatcctagagaggataagagaagggatgtttgttttttatttaatcacaaaaaaatgcatttttttatcatttaatttttacatcttttgacacaaaatttgttaaacatttcatggctagaaaactatttctttatattttgtgtgcatctcatagcacagccatttgttttgtgctattacatttatattagatgattgaaattcaatgacattcaatacatggtttaagaaacatgtatgcttagaatttatctgagcagagactcatggtatgtataggaatcagtcaggaatatttcaatttgt

SEQ ID NO: 582247 - DNA, 621 bp, Homo sapiens
gtatcttatttattctcttctagtatttcctatctcaggaaatgacatggcaaaataattaactaattttctaagtcactttatctcatacatgcaatttattagtcaccaagtcctgttaatttgaccttgtaaatgcgccttgtattatacagttttgagcaatggataacactaatacaattttcatttcctgagtaaatagctggaagtcagataactgggttttctgattagcatatgtttagctatgtaagaaaaccagaaatgtgttttgctcaataatttaatgaataatttttaatacattttcttgttaatcaacttaatgaacacttttaagggcagtgtgtaatactacgaatttaataagcaattttggctttaatcctagagaggataagagaagggatgtttgttttttatttaatcacaaaaaaatgcatttttttatcatttaatttttacatcttttgacacaaaatttgttaaacatttcatggctagaaaactatttctttatattttgtgtgcatctcatagcacagccatttgttttgtgctaytacatttatattagatgattgaaattcaatgacattcaatacatggtttaagaaa

SEQ ID NO: 582248 - DNA, 570 bp, Homo sapiens
ttaaatgagacaagacatgcaaaattttaatatagtttctgacacattataagcaattattttgagatggctggttagatttatatatagaaaacatttaaatattgctgatagaaatatgtttagggcacrtatacacacataatcaaatcctaatacttgaagggtaaatgcttctgttgatatttccaatttttctttttatggattatttctcacctttggacattgacaaagaaagatgatattgtctatacaagtgctaactcatgtaatgcatagattgcagaactttgatacagattacaccatttccttttgctttcttggctgaaaaactataaatacttcctaattattataccaccctcgaccctggaacaccaataaaggattgtgtgaaaagataaaaatgaagaaaggaatcaaataagaattttcttttaaatcctaagtcttcaaagtttccaatatgggcataaccctcacataagaatgaagtaggcaaattgttgacattcacaatccttaaaagactgaggtatttgagtggtcaaataaaactgaaga

SEQ ID NO: 582249 - DNA, 597 bp, Homo sapiens
cattttattatgtggtttttcctgcttaaaatcccctggtttttaattcaattttcaatcaacgccattatccttaacatggtaagagccactacattttctagacctttagcccctcacccctcacactttcccatcttccatgattttgaccaggctttttccccccaactactttgaacaatctttcttccttttctgcttggatagctcttacttgtccctcagttcaccatttagaaataagtttctctagcaaatattctctttgccttaagattaggttaggagctccacctctattacctaggccctttgtactgaggacctacgttttaactactaattttgctgactgataacttaacccaccctgaaaactcaaaaaaagcagtaaatttgttttgttcacctttgtatccccaaagtctttgcatcccctaggacmgcatgaatttaacaacaccagcaggagacttggcatactatacatactgaagacatgtttgttaaataaataacttaactaattaattaattgacagatgaatggtggaatagatgaaggaataattgttctctccctggccagtattt

SEQ ID NO: 582250 - DNA, 612 bp, Homo sapiens
gtgaataaataaacgtttattctgtattcttcaggattgacaaaatgtgccagacttccagaaatttaattttgtattactgtagaaaaaattcttaatatctccaagacttagtttggccatgtaagggctatgagaattaaatgattgatgtatatacatgctcaaccaggcttctgcccctgcatatattaggtattactattattaagcaataataattttcatttctagaggttggccacatcgttttcaaggtatcctgtttcttttgaatgaagtgagaaccactcatgttaaactataaaatgacaacaccataactttttgaaatatcagagaaactggaaaaactctgaaagccagagagagcactattgttgaatacaaaataagaattataaaawacatgttttgcaaaactgaagtgctccagagggaggaaaaacatattccaggaacttttccctctactaaattgaagctgagaggatctcttttttctaccgtgctttcgtgacagcgttgacattatgtagttcacatgagacatgaatagtgaatgactgatcatttttgaaattaaaaatggctaaccgtttatttcttttc

SEQ ID NO: 582251 - DNA, 612 bp, Homo sapiens
gtgaataaataaacgtttattctgtattcttcaggattgacaaaatgtgccagacttccagaaatttaattttgtattactgtagaaaaaattcttaatatctccaagacttagtttggccatgtaagggctatgagaattaaatgattgatgtatatacatgctcaaccaggcttctgcccctgcatatattaggtattactattattaagcaataataattttcatttctagaggttggccacatcgttttcaaggtatcctgtttcttttgaatgaagtgagaaccactcatgttaaactataaaatgacaacaccataactttttgaaatatcagagaaactggaaaaactctgaaagccagagagagcactattgttgaatacaaaataagaattataaaatacatgttttgcaaaactgaagtgctccagagggaggaaaaacatattccaggaacttttcccyctactaaattgaagctgagaggatctcttttttctaccgtgctttcgtgacagcgttgacattatgtagttcacatgagacatgaatagtgaatgactgatcatttttgaaattaaaaatggctaaccgtttatttcttttc

SEQ ID NO: 582252 - DNA, 549 bp, Homo sapiens
ggtcttgctggcttcaacagtgaarctgcagacctttgcagtgagtgttacagctcttaaggcagcacgtctggagttgttccttcctcccgtccagagttgctcattcctcccagtgggttcatggtctcgctggcctcaggagtgaagctgcagaccttcgcagcaagtgttacagctcataaaggcagtatggacccaaacagtaagcagcagcaagatttattgcaaagagcaaaagaacaacgcttccacagggtggaaggggacccgagcgggttgcggctgctggcttgggcagcctgcttttattcccttatctgaccccacccacatcatgctgattggcccattttacagagagctgattggtccattttacagagagctgattggtctgttttgacagggtgctgattggtgcatttataatccctgagctagacacagagtgctgattggggtatttacaatcctctagctagacataaaagttctccaagtccccactagattaactagacacagagcactgattggtgcgtttac

SEQ ID NO: 582253 - DNA, 596 bp, Homo sapiens
ttcagcatccccattctgcatgctttaccattgcctgtaaaactggatataccactgcatatgtgctgttaaaatacatcatattgcattccacgctttatggacctcgagtgatttttgtgtccctggctcataaggcagccaagtgtcttgttttccttcctttccttgttgacagtttggggcataattatataatattttacagtttctaagatttatttcagtttcttttacatggaacttttcaaaacaaaatatacagtagctgatagtgagattcataattagtatcacaattgagttttagctaagattaattcttattacatttcattygatgaatatttactcaatattttctcattttatttgatgcaaagtgattttacatgacttcaaattttcagtaaatataggtatattatggtatcaaacattcttacttatgcagagatgtatattctaatgttgaaaaagagtcccttgcacatacattacagttactgtagttttaatcctatttgacttttggaacagatttagtttcaaatctgttttatttcatctaatgttcattaattccacaagcattt

SEQ ID NO: 582254 - DNA, 596 bp, Homo sapiens
ttcagcatccccattctgcatgctttaccattgcctgtaaaactggatataccactgcatatgtgctgttaaaatacatcatattgcattccacgctttatggacctcgagtgatttttgtgtccctggctcataaggcagccaagtgtcttgttttccttcctttccttgttgacagtttggggcataattatataatattttacagtttctaagatttatttcagtttcttttacatggaacttttcaaaacaaaatatacagtagctgatagtgagattcataattagtatcacaattgagttttagctaagattaattcttattacatttcattcgatgaatatttactcaatattttctcattttatttgatgcaaagtgattttacatgacttcaaattttcagtaaatataggtatattatggtatcaaacattcttacttatgcagagatgtatattctaatgttgaaaaagagtcccttgcacatacattacagttaytgtagttttaatcctatttgacttttggaacagatttagtttcaaatctgttttatttcatctaatgttcattaattccacaagcattt

SEQ ID NO: 582255 - DNA, 615 bp, Homo sapiens
catcattcacaaaaatgaactcaaagtggatcataaattgcaatatatgagataaaactgcattccacatagaagaaaatacagaagtaaatcttcattatttggattagtcagtacattttgagatatgacacaaaatgcacaaagattaacgataaaattgataaattgggtctcgtcaatttttaaaaatgtatttcaaggagcaccatcctaaagtgagaaacaacctacaatcagagaaaatattttaaaataatgtatatggtgtgaaacatgtctcaagaatacataaagaactgttacaacttaataaagagaaataatctaattaaaatgggcaaaatatttgaatagatatttctttaaaaaaggatatgtgaatggccaacaagcacatggaaatatgatcacgatcactgttcatttgtcattagagaaatgcaatttaaaactgtaaagagatttgacttcatacatactttgtgtctgtagtgataaagaaaggcaaaaccaggtatgactaagaatgtggagataytgaaatctgcgtaaatttatgtggccatgtaaaatgtgcatgtgtgagttcgtttttgcactgctataaagaag

SEQ ID NO: 582256 - DNA, 646 bp, Homo sapiens
tcatcttaatgtcagtagggttttacaaagtactgaattattattttaataaattggcttagtcacacagccaagaaagaaactgggtctttaaagaaaaagccttggttttttaaaaatcacaaacattggtaatacaaatcattcagtgtcatgtattaagtggccatatctgtatgattctaatataatgcatttttctagtatcttttcatagtgtctgtcttgatagtggcatatgatttwgcaaatattcactcagcaatcatccacaaataagtacacatttaaataagatatatggcaacttcccttataaatatgatggcctaatggtatagttatttattaagggaggttgaggaaatgccatctctcaaatatttatggattgttatcactgaagcatggggtctgtgatgccaacacttaaaatcagtgctaaataagagaatttcaaaaattatctccatctctggtccaaattctattaaaattttttttcttcacttgcattttaattttttctttggtgattaatttgttttgacattacatgtaatgctcaattatatttttcatatcagtttgaattttatgattatattgaaaattaaataatatataagaaagatatttattttat

SEQ ID NO: 582257 - DNA, 577 bp, Homo sapiens
tgagctgaaaacgttgccaacatagaataataactgaatttaatgacaattttatatttgtttatttgtttattttaccttatttttcttgagacagagtttcactctgtcgtccgggctggaaggcagtggcgtgatcttggctcactgcaacctccgcctcccaggctcaaatgattctcgttccttagcctaccaagtagctgcgattacagggacgctccatgcctggataatttttgcatttttagaagagacagggtttcaccatgttgcctaggctgctctcaaactcctgagctcaagtgatccacccaccttggcttcccagagtgttgggattacaggcatcaaccaccacatycagccagaaattaaacacaatttaaaacaaatctctaggggctttttgttttccattagataaaatatacttaactttaaagattagtatcatacaactaagtaataatatacttatttatataagatatatttgtaagagaaatttaaaaattgtctaaaatattagaaattaaaaattttataaactactaacctgtcatcatgctcatat

SEQ ID NO: 582258 - DNA, 577 bp, Homo sapiens
tgagctgaaaacgttgccaacatagaataataactgaatttaatgacaattttatatttgtttatttgtttattttaccttatttttcttgagacagagtttcactctgtcgtccgggctggaaggcagtggcgtgatcttggctcactgcaacctccgcctcccaggctcaaatgattctcgttccttagcctaccaagtagctgcgattacagggacgctccatgcctggataatttttgcatttttagaagagacagggtttcaccatgttgcctaggctgctctcaaactcctgagctcaagtgatccacccaccttggcttcccagagtgttgggattacaggcatcaaccaccacatccagccagaaattaaacacaatttaaaacaaatctctaggggctttttgttttccattagataaaatatacttaactttaaagattagtatcatacaactaagtaataatatacttatttatataagatatatttgtaagagaaatttaaaaattgtctaaaatattagaaattaaaaattttataaactactaacytgtcatcatgctcatat

SEQ ID NO: 582259 - DNA, 594 bp, Homo sapiens
aaacacacatatatccatggaacagaattgagaacccagaaataaatttacacaactacagcaaagtcaattttgacaaaagtgccaggaatgtaaccagggaaaggacagtctcttcaataaatgatgccaggaaaactggatatccatatgcaaaagaagaaattaggccccatctcatgccatatacaaaaatcaaatcaaaattgattaaagatatgaatctaagacctcaaactatgaaatgactgaaagaaaacatgcggaaactctccaggagataggactaggcaaagatttcttgagtaatacctcacaagcacaggcaaccaaagaaaaatgaacaaatgggatcacatcaacttaaaaagcttctgcacatcaaaggaaagaatcaacaaagtaaagagacaacccacagggtgagcgcaaatatttgcmaactacccatctgacaaggaattaaacagaatatataagcagttcaaacaactttgtaagaaaatatctagtaatctgattttaaaatgggcaaaagttctaaacaaaaatttctcaaaagaagacatacaagtgataaaccggtatataaaa

SEQ ID NO: 582260 - DNA, 506 bp, Homo sapiens
ttctcttaagccccatagccaaatcatcatcacatcctgccaatacctcaatgagtataggccctaatgtcttctcatatgcctctgtgtttgtctgtagtagactcttaattgactttctgcttccattgtattaaaattatctcatgactcctgcttaaacccttccaatgattttgcatcacacacaaaaaaaataaatacaaagttgttagtamgggcaatctgatcctaaaaacatttcttttttgcctactcatctgatttcatcttgttcatttccctttcacacattttccttgttcctgcctccttggctttgccaaggcaatagtcctttaccaggaaaataaggtggcaatataatacactcatctctcagatttttggctaataaatttaccttcctcttctccaggcgttctctaatactccctttaaattatctttcttcagcaaccctgtctgaaattatagcatatattttatgtatttacttgtttact

SEQ ID NO: 582261 - DNA, 506 bp, Homo sapiens
ttctcttaagccccatagccaaatcatcatcacatcctgccaatacctcaatgagtataggccctaatgtcttctcatatgcctctgtgtttgtctgtagtagactcttaattgactttctgcttccattgtattaaaattatctcatgactcctgcttaaacccttccaatgattttgcatcacacacaaaaaaaataaatacaaagttgttagtaagggcaatctgatcctaaaaacatttcttttttgcctactcatctgatttcatcttgttcatttccctttcacacattttccttgttcctgcctccttggctttgccaaggcaatagtcctttaccaggaaaataaggtggcaatayaatacactcatctctcagatttttggctaataaatttaccttcctcttctccaggcgttctctaatactccctttaaattatctttcttcagcaaccctgtctgaaattatagcatatattttatgtatttacttgtttact

SEQ ID NO: 582262 - DNA, 532 bp, Homo sapiens
  misc_feature 527: n = A,T,C or G
attggattgaaagatgcaaagtattgatcctgggtgtgtctgtgagggtgtttccaaaggtgattaacatttgagttagtgggctaggaaaggcagacccacccttaatctgggtgggcaccatctaatcagaaaataaagcaggcagaaaaatgtgaaaagactagactggcttagccttacagcctacatctttctcctgtgctggatgcttcctgcccttgaacattggactctaagttcttcagctttgggactcagactgaattccttgctcctcagcttgcagacagcctattgtgaaacctcatgattgtgtgagttaatactacttaataaactcctaaatatatcctattagttttgtgtatgtgtgtgtgtgtgtgtatatatatgtatgtgtgtgtgtrtatatatatatatatatatatatatatatatatctccatctatatgtctatatctatatctatatctcttgttagttctgtccctctagagaactctgactaatacagattttggtngccag

SEQ ID NO: 582263 - DNA, 597 bp, Homo sapiens
aaacagagagctctggtttcttcattccccataagggcactgaatgccattcatgaggactccactctcatagcctaagtatctctaactaccaaatgtcctacttctaaataccatcacgttggggattttggcttcaatatgtgaattttgggggaacacaaacattcagtccatagcagatgtcaaaaagtcttttcaaatacagtatggccaatattgaattactctttctctaacagtcttttaattttggctaatgacaaatcaatgtttccagttactcaagctgtatcttaatacctattcttaacttctayctccccttctatatccaattcattaacaaatcatgtagtttttaaccaccaaaatataaccagattgaaatgacttctcattatttctggaaagatcactccaggcctagaatgtgctgacagagcatatcaacaactctccataatttttcccaggcttcttccacagaccattttcaatgcagcatccaggattatcctttgttaaatttggttgattatgtcactgctatactcaaatttttaactgtacctaatttcgtgcagagtaattata

SEQ ID NO: 582264 - DNA, 479 bp, Homo sapiens
ataactcacatatattttgttaattttcttctctattagaatggaaccttcataaaagcagaaattttgtcttwtttatttactattatatcctagcatttttagttgtgacaccataagaagttaatatttacttgtcatttggtccttgcaaagttataagccttaatgattacattataatgagaaaaatgaatgaaagaattttggaaaaatgaaaaaggaaggtattaagtggacacaggtctctccctgctcctgttttcactgggaggcaggaaaatgcacacctcaggaggggagggcatgggacattctggcttctccctgatttattagactgcaaggataaactaagtccaggaaactcagtcagagctctgttctgtatatgcacattcttcctcagtatcataaagggccttcctttgtacttcctatgactgggagcctaactttaatatactgaaggaagtaca

SEQ ID NO: 582265 - DNA, 620 bp, Homo sapiens
gtgtaacaggttccaacataataaactgccagaacacatttcatggtgcagtgcaaatgacagacacaatggaatacctgttagaataaagtagatttcattttccctacaagttaggtgagaatgctgatctcaagtatctgttctgtcaagtcaaaggttgcagcacaatagcaaattcagagtataggtgcatgtattaatagcctgttgragaaaagagcaacacttctagtaattataagaagttgctccagatgaaaaacattaattcatgtctgtgatacattgtttaagactctctcagttgccttaatactatttttaaaaccccttcacagggagcatactcaccccatctggcctgccatctgaagctgtgatgatcagaatgtagcgatcagtgctttccctgtccagtgctttccctaaggttagaatccccgtgctagtgacaaaacaaacaaacaaataagacaaaaagagatattatgtcacaaggagagtcttcttagtatagtgaattacttttgatagctttttttcccctctcagtaatcacagcttgagtattttagatgtataatactaagattcattctgaaaattgaaaacagctt

SEQ ID NO: 582266 - DNA, 577 bp, Homo sapiens
attcctaaacatagtatattaaaacaaaaaaaattatcttacattatcaagtcaggaacctgagaacagcttatctgggtgattctgcctcagcatctctcacaatgctgcaggtaagctaytggtcagagtggcaatcatttcaaagcttaacacgcctagaaaatctcgctaaatttactcatatagttattggtagccctcagttcctcactgactcctggctggagggtgaattccttgctgacttccccagagggctgctgctgacattgctgtctattttccccagagctcccctgtctgctatatagggatagagatgaaagagaatgcaccgaagatataaatcatagtgttttataatcctaccttttacaatcatagtgttttataatcaattctgccatatgcttttggttacccaaaccaaccacgatacactgtgagtgagaactatataaggttgtgcataccaggaggtaaggatctttggggaatagagcaccacaatgactcaactttcttaacactgttattaaacaattcattgcttctctattgattcttagttatc

SEQ ID NO: 582267 - DNA, 581 bp, Homo sapiens
aattaaaatacaataattaagttcaaatatgaacattcatttggaagagaagccacaacacattccaaattttaaaagctcaaaaatatcacaaacatcacaaactccagacaagtaacatattttattagtggcttgacagcaatagaacccctttttcttccttttttggctactttgatagccactttatatgacaatgattttgtaatayagctttctatacagagaacataaagatgatttagtgtctactctagcatgggtgatagaaatttattttgttattgatggcttagaaaaatttctttaagattcataactcattactggtaatgtcatgcacatttttaggattattatcaaatttgggaagttctcttctaagtttctttcatatatgagctataaaatttcaggtcacctcaagtttttgaggatagtgactcatcttaaatactgttaatgacccctcccccattaaccagtttgttgatgacatctggtttgtagtgacgtattatcagttttatgttattttagttggtgccagtattttgcttcaaattggcaagaaattt

SEQ ID NO: 582268 - DNA, 465 bp, Homo sapiens
aagacacctctaacacaagaggttgaaccccctcttaaagcctcagcctctggaaagaggggtagacacctttaacaggagaggttgacgccccccataactcstaagatggggaatgtttcaagtaagacaggaaaactaaagagtcaagagtgatgaaactccttctgatagccccttgaggcttatgctaaagtattggaaagataatgagaaaaccaagtataaacgaaaacagcagatgataaaatatttttgttttatttgggttcaagaacccaaccttaaaccctcacttttcttgccaaaatttgggtctaatgaggagcgaattttccagctcttaattgagcatgttaatgataagagccctgtctcccaggaagaaattgattacaccctctgctggcggcagggacctgtcctcctttaccctttagattccagagggagaaagccagaagc

SEQ ID NO: 582269 - DNA, 716 bp, Homo sapiens
tgcatcatcaccgccacagcttatctagttgaggatttatttcggtccctcttgtttggctttccactcagaaaaaaaacaaaaaaccaaaccaaaacaaaaaaacctcctgtcttttttaatgctagaaaattcttggccattatttatttgtgtattgcttctccttaattccctctacttttaactttgggggtrcttgttagacatatgttggaatcttttgatctagtctccatatctcttacttcttcagactttttaatcttattttctctgggtaaagtcttcagagagcttctaatccaccaatgccaagtttaattcactagttcaattgaactgtctgcaatctggagtttattgtatctgtctccatccatttttaaaaaaatttcaatgaccaaatttttattatccagaattgcaatggacttttaaaatgttcatttcttcttcttctttttttttaatggaagacttttttttttttaattggactacaagaagcctcaaatgaaaaccctgaccagtcaccttcatcataggctgctgtttacagcctgacttgggaacatccactccatgttgtcactgcccttccatcagctgctaggtagggtatgggcactacagtataagattatattaattatgccaacaccttggaagagataatacaagctgttgtacacggctaccaaggcaactccaca

SEQ ID NO: 582270 - DNA, 449 bp, Homo sapiens
acaatcatcacaaacctccctagttactggcagcaagaaaaggtatctgtagaaggcaatgtttgagctctgagatgcccattaccttttccatgatcccactgaggtaggaggttggcaggacttgttctccagaccagaatgaagacagcctgtattagtccattttcacactactatgaagatactacctgagactgggtaatttataaagaaaggagatttaattgactcagttctgcatggcttgggtggcctcacgaaacttacaatcatggtagaaggtgaaggggaagcaggtactttcttcacaaggtggcaggagagagagagaaagaaagctcgcagaggaaactgccacttttaaatcatcagctctcctgtgaagtccctcactatcacaagaacagcatggggagactgcctmcatgatccagtcacctgccacc

SEQ ID NO: 582271 - DNA, 568 bp, Homo sapiens
catcttgaattgtagttcccataatctccatgtgtcgtgggagggacccagtgggaggtaattgaatcgggggggcggttacccccatgctattctcatggtagtgagttctcatgagatctgatggttttataaggggcctttcccgctttgctcagcacttttctctcctgccgccatgtaaagaaggrcatgtttgcttttctttctgccatgattgtgaatttcctgaggcctccagccatgcacaactgtcagtcaattaaatctcttttctttataaattacccagtctcagatatttcttcatagcagcatgggaatggactaatacagaaaccttttttttttttaaaaataactttttgggaaagggtgagagtaaataaaatcctaccaatttggattacccatgattctgtcctctggctgcataacatggtagaagaaagagggagaaaatggactagtgtcttgtcactccataaagatgctgtccatgctcagtaatagagaaaaattttgagtaactgggtgaataacattgccttgggacaatgtttaactt

SEQ ID NO: 582272 - DNA, 568 bp, Homo sapiens
catcttgaattgtagttcccataatctccatgtgtcgtgggagggacccagtgggaggtaattgaatcgggggggcggttacccccatgctattctcatggtagtgagttctcatgagatctgatggttttataaggggcctttcccgctttgctcagcacttttctctcctgccgccatgtaaagaaggacatgtttgcttttctttctgccatgattgtgaatttcctgaggcctccagccatgcacaactgtcagycaattaaatctcttttctttataaattacccagtctcagatatttcttcatagcagcatgggaatggactaatacagaaaccttttttttttttaaaaataactttttgggaaagggtgagagtaaataaaatcctaccaatttggattacccatgattctgtcctctggctgcataacatggtagaagaaagagggagaaaatggactagtgtcttgtcactccataaagatgctgtccatgctcagtaatagagaaaaattttgagtaactgggtgaataacattgccttgggacaatgtttaactt

SEQ ID NO: 582273 - DNA, 568 bp, Homo sapiens
catcttgaattgtagttcccataatctccatgtgtcgtgggagggacccagtgggaggtaattgaatcgggggggcggttacccccatgctattctcatggtagtgagttctcatgagatctgatggttttataaggggcctttcccgctttgctcagcacttttctctcctgccgccatgtaaagaaggacatgtttgcttttctttctgccatgattgtgaatttcctgaggcctccagccatgcacaactgtcagtcaattaaatctcttttctttataaattacccagtctcagatatttcttcatagcagcatgggaatggactaatacagaaacctttttttttttwaaaaataactttttgggaaagggtgagagtaaataaaatcctaccaatttggattacccatgattctgtcctctggctgcataacatggtagaagaaagagggagaaaatggactagtgtcttgtcactccataaagatgctgtccatgctcagtaatagagaaaaattttgagtaactgggtgaataacattgccttgggacaatgtttaactt

SEQ ID NO: 582274 - DNA, 568 bp, Homo sapiens
catcttgaattgtagttcccataatctccatgtgtcgtgggagggacccagtgggaggtaattgaatcgggggggcggttacccccatgctattctcatggtagtgagttctcatgagatctgatggttttataaggggcctttcccgctttgctcagcacttttctctcctgccgccatgtaaagaaggacatgtttgcttttctttctgccatgattgtgaatttcctgaggcctccagccatgcacaactgtcagtcaattaaatctcttttctttataaattacccagtctcagatatttcttcatagcagcatgggaatggactaatacagaaaccttttttttttttaaaaataactttttgggaaagggtgagagtaaataaaatcctaccaatttggattacccatgattctgtcctctggctgcataacatggtagaagaaagagggagaaaatggactagtgtcttgtcactccataaagatgctgtccaygctcagtaatagagaaaaattttgagtaactgggtgaataacattgccttgggacaatgtttaactt

SEQ ID NO: 582275 - DNA, 570 bp, Homo sapiens
tgtgggtgccactttacatgtattgttgattggatcaaatgataaaaaaccacatttttgagagagtcctataaccaaaagagacactagcatrtgttaaagaaactgagacttttgagtatttaaaatggccctagggccctccagtcttctacaagaaatagctacccaggctgtaacatgggcatattctctaatgccattttcagagacagaaaagaagagaggattttcaagaggggacagctgttaagaataatggattctcaacttcaggttaaagggctttttaaaaaaatctgtccagtaggatttcaggaatttatgtaccagtattaagtgtgacctcctagtctttccctttccacatagaaatgcctgttttgatcacactgtccctcttgcgccattgaatgcttggtgagtatgcatgtgtatgtgggagggatgtacttgtgtgtgtgtagataacttttcttcaggtgcatagatctgtatatcatgatctgtatatcaagaggagccaggtggatcagattcagaaactattaaccatcttgggctttgggt

SEQ ID NO: 582276 - DNA, 609 bp, Homo sapiens
aatttccacttgcagttgtatgttagcatcagtataatttgagatttgtgaaagtatggcttttcataccttctgagggtgtggtttgggattctatatttttatatagcttccttttcttttttcctagaatatttgaatgcagttaatctggagtttggagatcactyttaaacacattttaattttgatgtagtctaatttatctattttttcttttgttatgcttttagtgcagtatctaagaaagcttttcctaacccaaaattacaaagatttattcccatttttcttctaagagttttatggttttagctcttatgtttatgatccattttgagttaattggtatcagttaggtctccataccaattattttgcatgtggatattcagttgtcccagaataatttttcaagaactttctttccccattgaagtgtcttggtatccttgtgaaaaatcgattaccctgaaatgtgagggtttatttcttgacttcaattttattctgttgatctatatgtgctatgccgttatgccatgcaaccacatagtccttgattagtataactttgtgtagtaagtttttaaatcaggaagagtgact

SEQ ID NO: 582277 - DNA, 609 bp, Homo sapiens
aatttccacttgcagttgtatgttagcatcagtataatttgagatttgtgaaagtatggcttttcataccttctgagggtgtggtttgggattctatatttttatatagcttccttttcttttttcctagaatatttgaatgcagttaatctggagtttggagatcacttttaaacacattttaattttgatgtagtctaatttatctattttttcttttgttatgcttttagtgcagtatctaagaaagcttttcctaacccaaaattacaaagatttattcccatttttcttctaagagttttatggttttagctcttatgtttatgatccattttgagttaattggtrtcagttaggtctccataccaattattttgcatgtggatattcagttgtcccagaataatttttcaagaactttctttccccattgaagtgtcttggtatccttgtgaaaaatcgattaccctgaaatgtgagggtttatttcttgacttcaattttattctgttgatctatatgtgctatgccgttatgccatgcaaccacatagtccttgattagtataactttgtgtagtaagtttttaaatcaggaagagtgact

SEQ ID NO: 582278 - DNA, 609 bp, Homo sapiens
aatttccacttgcagttgtatgttagcatcagtataatttgagatttgtgaaagtatggcttttcataccttctgagggtgtggtttgggattctatatttttatatagcttccttttcttttttcctagaatatttgaatgcagttaatctggagtttggagatcacttttaaacacattttaattttgatgtagtctaatttatctattttttcttttgttatgcttttagtgcagtatctaagaaagcttttcctaacccaaaattacaaagatttattcccatttttcttctaagagttttatggttttagctcttatgtttatgatccattttgagttaattggtatcagttaggtctccataccaattattttgcatgtggatattcagttgtcccagaataatttttcaagaactttctttccccattgaagtgtcttsgtatccttgtgaaaaatcgattaccctgaaatgtgagggtttatttcttgacttcaattttattctgttgatctatatgtgctatgccgttatgccatgcaaccacatagtccttgattagtataactttgtgtagtaagtttttaaatcaggaagagtgact

SEQ ID NO: 582279 - DNA, 520 bp, Homo sapiens
tgaaaccatgcttctgcgtgaagtcttctggggagagaataggctttgaagagaaagggcttccagcattgaaaaggatttctctgaagttggactgggaaggataaaacctcaaagcaccctgagaaagcaccttctttctctctggaaaatctagagagaaagaaggaaaaccaggatcatgggggtgttttggatgctcagacatgagtgtggaattggctgacatgattttggagagtggcaagtccaaaatctgcaggataggcacaactggaaggctggagacccagggaaaagctagtgttgcmgctcaagtctgaaggcaatcttctggcaaaattctctctttctctagggattcagtcttttctctaagaccttcatctggttggatgagacccacccacattatgtcatgcaatctgctttactgaaagtctgattgcaaacgttaatctcatataaagaatatcttcacagcaacatccagatgtgtttgaccagatatgtagatacc

SEQ ID NO: 582280 - DNA, 487 bp, Homo sapiens
gcttgaattttaccaaatgcttttagctgcacctactgaggcaatcatatggtttttgtctttcattttgttgatgtgacatatcacatttattgatttgcatatgttgaaccattcttgcattcctaggacaaatctcatttgatcatgatctgttatctttttgatgtattgttacatttactttgctaatattttgagaatttttatgtctatgttcatcaaaaatatttgcctgtattttctttttgtgttgtgtccttgtctggttttggcatcagagttatgcttacctcatggaatgaattaggaagagttccctttgtttccatttcttggattactttgagaagacttgatattatttaaaggtttggtagtattcagtggtgaagccatccartcctggacttttcttttttgaaagactttttattactgattcaattttattacttatattgtctttcaggttttcaccttcttc

SEQ ID NO: 582281 - DNA, 570 bp, Homo sapiens
tgttcatagtagtctctaacaatcctttgtatttctgtggtatgcattgtggtgtatgctctttttatttcaacttatttgggtcttttcacttccttttttcatctagctagtggtttgtcaattttgtttatcacttcaaataatcaactttttgttttgttgatcatttgtattttttagttaaattttatttctgctctggtatttattctacaaatctggggtttggtatgttcttgcttttctagtttcttgagatgcatcattgggttgtatgtttaatttctatatatttgtatagtttcaggtgttcctcttgttatttrcatctagttttgtttcattgtccttaaacaggatacttgatattattttgaatttttaaaaagtttttgcaacttgtttcttgtcctaacctacggtgaatcccagagaatgttccatgtgctggtgaaaagaatgtgtattctacaggtgttgggtgaaatgttctgtaaatgtcttttagttccatttcatctatggtgtagtttaaatctgatgtttctttgttgattttctatgtaa

SEQ ID NO: 582282 - DNA, 638 bp, Homo sapiens
aatgctgagaatagggtgttgaagtcccagctatttttgtattggagtctatctatccctttagttcaatagaccccaataactctaaagggtgagctagaccccagtatatctctgggtgatgcaaggttggatgcacatatatttacaattgttgtattctttttctgaattgattggtttattattagaatacagtctccttatcacttacaccttttgactkgaagtgtattttgtgtgatataagtatagctactactgcttacttttggtttctatttgcatgaaataccatcccttcactttcagtctatgtgtgtctttagaggcgaggtgagtttcttgcaggtagcatatagttatgtcttgattttttatacattcactcagtttatattttttaatgaatttattttgttttaattcaaggtaattattgataggtgaggacttactcttgtcattttttggttccttttctgcttttttttggtacatcctttacttttattgtttgtttttgcaattggatggttttctatagtgaaaatgtttaattcctttctttttctccattgtgtattggctcttccagtgaattttgtagttttgcatgttttcataatggtggttat

SEQ ID NO: 582283 - DNA, 638 bp, Homo sapiens
aatgctgagaatagggtgttgaagtcccagctatttttgtattggagtctatctatccctttagttcaatagaccccaataactctaaagggtgagctagaccccagtatatctctgggtgatgcaaggttggatgcacatatatttacaattgttgtattctttttctgaattgattggtttattattagaatacagtctccttatcacttacaccttttgacttgaagtgtattttgtgtgatataagtatagctactactgcttacttktggtttctatttgcatgaaataccatcccttcactttcagtctatgtgtgtctttagaggcgaggtgagtttcttgcaggtagcatatagttatgtcttgattttttatacattcactcagtttatattttttaatgaatttattttgttttaattcaaggtaattattgataggtgaggacttactcttgtcattttttggttccttttctgcttttttttggtacatcctttacttttattgtttgtttttgcaattggatggttttctatagtgaaaatgtttaattcctttctttttctccattgtgtattggctcttccagtgaattttgtagttttgcatgttttcataatggtggttat

SEQ ID NO: 582284 - DNA, 638 bp, Homo sapiens
aatgctgagaatagggtgttgaagtcccagctatttttgtattggagtctatctatccctttagttcaatagaccccaataactctaaagggtgagctagaccccagtatatctctgggtgatgcaaggttggatgcacatatatttacaattgttgtattctttttctgaattgattggtttattattagaatacagtctccttatcacttacaccttttgacttgaagtgtattttgtgtgatataagtatagctactactgcttacttttggtttctatttgcatgaaataccatcccttcactttcagtctatgtgtgtctttagaggcgaggtgagtttcttgcaggtagcatatagttatgtcttgattttttatacattcactcagtttatattttttaatgaatttattttgttttaattcaaggtaattattgataggtgaggacttactcttgtcattttttggwtccttttctgcttttttttggtacatcctttacttttattgtttgtttttgcaattggatggttttctatagtgaaaatgtttaattcctttctttttctccattgtgtattggctcttccagtgaattttgtagttttgcatgttttcataatggtggttat

SEQ ID NO: 582285 - DNA, 511 bp, Homo sapiens
acttgtcttcaagtttagaaattccatctttgctttgtctactccattgttgaagctctcaattttatattttatttcctaattgaattattcaactctaggatttgtttagttttttgtgacttgtgacttttatctctttgttaaatttctcattcaaattaggaaacattttcctgatttcattgaattgcctatctatattctcttacataccactgagtctccttcaggttattattttgaattccttttctagcatttggtatatttccttatgataaaggtctattactggagaattattatrtagtagtagagaggtctctctctactcccccactatactcagtgctctcccttttattctccaggcatatcttagtctatttattcgttgcgttggtcttttcttgtggaggaaatgaacaccaggcatctctggtcagctccccttgactctttgtgcctccttttttgaacaggaataccttcagaggttgccctgtgc

SEQ ID NO: 582286 - DNA, 535 bp, Homo sapiens
tggcaaaattaaaagtattcataccctacaaccttagccattttacttgttcatagggaaactcacataggaacataaataaacatgtataatgatattcattgtaatattgtttatggggtactaaagtcatcaacctagaggccatcattaaaataatgaataactaaaatatagcatagacatttaatagatgacgaatatagcagtgagaaaaagctagaggtttacaaacaacaatattattaaatmttttaaaaagtagggctgagtaaccaaaaaaagtccaggaccagatggattcacagccgaattctaccagaggtacgaagaggagctggtaccgttccttctgaaactattccaatcgatagaaaaagagggaatcctccctaactcattttatgagaccagcatcatcctgataccaaagcccggcagagacacaacaaaaaagaattttagaccaatatccctgatgaacatcgacatgaaaatcctcaataaaatactggcaaaccgaatccagcagcac

SEQ ID NO: 582287 - DNA, 592 bp, Homo sapiens
tgctggttctattgtactcttcagcactagctgtgacgaccagaggtattcattttctagggctgtcctaacaagaatattttaaactgggtagctttaaacaacaatcacttactctctcacagctctaaagactagagggctgaaatcaagatgtgagcagggccatgctccctttgtgtccggaattggtgggttgttggtctcactgacttcaagaatgaagccgtgaacccctcgcggtgagtgttacaactcttaaggtggtgtgtctggagtctgccctcctgatgttcagatgtgttcagagtttcttccttctggtgggttcgcggtctygctggctcaggagtgaagttgcagaccttcgcagtgagtgttacagctcttaaggcagcgcgtctggagttgttcattcctcacggtgggctcgtggtcttgctgggctcaggagtgaagctgcagatcttcgtggtgagtgttacagcttataaaagcagcgtggacccccaaagagtgagcagtagcaagatttattgcaaagagcgaaagaacaaagcttccacggtgtggaaggggacccgagcgggtt

SEQ ID NO: 582288 - DNA, 592 bp, Homo sapiens
tgctggttctattgtactcttcagcactagctgtgacgaccagaggtattcattttctagggctgtcctaacaagaatattttaaactgggtagctttaaacaacaatcacttactctctcacagctctaaagactagagggctgaaatcaagatgtgagcagggccatgctccctttgtgtccggaattggtgggttgttggtctcactgacttcaagaatgaagccgtgaacccctcgcggtgagtgttacaactcttaaggtggtgtgtctggagtctgccctcctgatgttcagatgtgttcagagtttcttccttctggtgggttcgcggtcttgctggctcaggagtgaagttgcagaccttcgcrgtgagtgttacagctcttaaggcagcgcgtctggagttgttcattcctcacggtgggctcgtggtcttgctgggctcaggagtgaagctgcagatcttcgtggtgagtgttacagcttataaaagcagcgtggacccccaaagagtgagcagtagcaagatttattgcaaagagcgaaagaacaaagcttccacggtgtggaaggggacccgagcgggtt

SEQ ID NO: 582289 - DNA, 592 bp, Homo sapiens
tgctggttctattgtactcttcagcactagctgtgacgaccagaggtattcattttctagggctgtcctaacaagaatattttaaactgggtagctttaaacaacaatcacttactctctcacagctctaaagactagagggctgaaatcaagatgtgagcagggccatgctccctttgtgtccggaattggtgggttgttggtctcactgacttcaagaatgaagccgtgaacccctcgcggtgagtgttacaactcttaaggtggtgtgtctggagtctgccctcctgatgttcagatgtgttcagagtttcttccttctggtgggttcgcggtcttgctggctcaggagtgaagttgcagaccttcgcagtgagtgttacagctcttaaggcagcrcgtctggagttgttcattcctcacggtgggctcgtggtcttgctgggctcaggagtgaagctgcagatcttcgtggtgagtgttacagcttataaaagcagcgtggacccccaaagagtgagcagtagcaagatttattgcaaagagcgaaagaacaaagcttccacggtgtggaaggggacccgagcgggtt

SEQ ID NO: 582290 - DNA, 207 bp, Homo sapiens
taaacacgtactcctacagccttaaaccacaagccagaaatgtctattmgttccactagatcacaggtaggatcagattgagggaagggttggccagcccacagtgtaggaaggaaaaacctgcataagagataaagaaaagatgccaggagaacccatttgcttgaaggagccaaagctaatgggacagcaaggtggcggaggagg

SEQ ID NO: 582291 - DNA, 536 bp, Homo sapiens
cttgtttatccttgactcccaaacagctagtagagggcaggtttaaacatggtcaaacctgcatcatgcatcaaacctgcaggagctgggatcaatcagggggcattttgatgtccccagcaagtagcacacgaaaaaccacacctttatacccacaacaaataatcacccttgggaaaaacacaataactatttttctgcattttcaaaatgagtttcctgtgcactgagggcggttcytaagaaatcagagatgacctttaccttctctccctctgaatccctggatctaagtgattcagggcccaaacacaagttctagagctttcttcaccatttcttgggtcattgtataaaattagacccctcgcagccttccctggcaagccagagttcccaaggtcactttgcagatgaggcacaactggagttactgttggtgacttcaattagtagattaggaaaggaagaaaaaaagaaaaatatagatatcccaagatcagagatatttccaataagaattgaagtcatgtgtc

SEQ ID NO: 582292 - DNA, 647 bp, Homo sapiens
caggccaatagaaatggtccaaactggaacccagtgagaaacaagagtaaaaaaaggccaagggctctccctgaatgttagcttggaatctaaaaatgtatcatgattctatgaaatcatattgataactctgatattgtttccttgatattgtttcctggtttcttggacctgttaacatagtgaaggttcctgtcagatcactgtctggtgcgtggtgctcctaacacatgatgagaggaattataagcttccaatatgacaatgacactggaaattccttaaaaacaaagcagaacccagcgtagtgattgcgtagaggaagagtttggtaactttacctctcatctttgctgtgaacgaagtcctcagtgaagaaaggctggtttttcacaaaatgtgtctttttatrtcattccccttttaaatttgtatattcaaatggatctaccctacatggaggatatgcttacagtcattctcctttattagactgtttattccagaagctatgaccatttctgcctttgtttcccctaactgctaagccaggaggagagagaagaaattatgcattttgtgagtgaagaaactaaggctgaaggaggttgtgaatattttacgttaaggagagacaggaaaaaaat

SEQ ID NO: 582293 - DNA, 369 bp, Homo sapiens
aatctaataactggtaggctatagttttattctgaaacataatttttccttctccagtcccccttttctaccaaagagaaatcatagatcaatttttttccaaaataatttggcctgattatgggtggatccaygaggtcaggagatcgagaccattctggccaacatggtgaaaccccgtctctattaaaaattcaaaaattagctgggggtggtgggtgcctgtaatcccattactttggaggctgagggaggagaatcacttgaaccagggggtcagaggttgcagtgagccgagatcgccactgcattccagcctagcgacagagcgagactccatctcaaaaaaataataattaataataataa

SEQ ID NO: 582294 - DNA, 541 bp, Homo sapiens
ggaggctgagggaggagaatcacttgaaccagggggtcagaggttgcagtgagccgagatcgccactgcattccagcctagcgacagagcgagactccatctcaaaaaaataataattaataataataataatttggcctgattatttgcataaagtgcagcaagaatagtgattgaccatatcaaacttttttgtgttggctttgctgaaactttcttarggattttagattagactgtcaaaagccttgagactaggaagccaagccaaggttgtatcatcagaccatgcttataattgtatgaattgagtgaattcctctcttcttaaggtccagaaatatcttgaggttcctgggcctgtcagaaagtgacattctttgtttatacagatttgggggatatgaatgcagtttattgcattgatatactgtgtagtggtgaaatctaggcttttaacataatcatcatttgtatagtgtacagtgtacccattaggtaatttctcattcctcactcccctctcaccctcccagtcttc

SEQ ID NO: 582295 - DNA, 637 bp, Homo sapiens
gcagaccttggccctgcacacccaatctctgaataatattgtttgttttttttccagaaactgtaacccaaggtcctagggttttggatatgcacggtgaaaaactacccacttgtaactgtggcaccgtgaattctttgtcatctcaaaatgttctaggaagaagctcagccctggaaaaacaaaaacgagttggatccagagatagctgagttggagataaactttggtgaactctcctcagtaccctactaaaacccttgcccagggaggagcttattttccctttggtttgtacttgtgaygtgggtaaaagcatgatcagtaactgcacctgcactgcctttactcctccgctacatacgatgactcagctgaccagcccagtaaaatccctgtttttaccattgttcggggaggagctatctcgggaactatcctggatgtcttccttacttgttgcaaataataaaatctcctcgttacatcctccttggttgtggtcattggactgtcacctgccaggtgattgaacccacccattgtgtgggtaatgaaaatagtagctttcacatttcctgttttatctatattgctaaaattaaattctcctctagatatggatacctaccaataa

SEQ ID NO: 582296 - DNA, 312 bp, Homo sapiens
ctgtttgatcaggaatggtaccctttattattttgtgccagaagagggcatcttacaatgctgcatatacagytgacccttgaacaatgtggttttgaactgggcctgtctacctaacacgtggatttttttcagacaaacccagatgaaaaatactgtatttgcagaatccaaaacccctgtatacagagggctgacttttcctatacccagattcctcaggactgactgcagaacttgagtaaagtgtggattttggtatacactgggatcctgcaaccaatcccgggcaatcccgagggatggctgtgt

SEQ ID NO: 582297 - DNA, 616 bp, Homo sapiens
agtttaaaattttgcatctaacatttaagtctataatacatcttgagttaatttttgttaagaatgtaaggtcagtgtctaggttcatttttggtatgtagaagtccatttgttatagcaccgtttgttgaaaagactatctttgctctattgcattccctttgatcctttgtcaaagatcagttgactatatttatgtaggtycatttctgggctattctgtttcattgatcaacttgtctatccttttgccaatatcaccctgtcttgatttatgtagctttataataagctttgacgtccagtagtgtcaattattcaactttgttcttcttcttcaatattgtgttgatcatctgggtcttttgtctctttgtataaactttagaatcagtttgttgatatccacaaaatagctgctaaaattttgattgggattgcattaagtttatagatcatcttggtaaatatcgagtctttctattcttttttttttgagacagggtcttgctctgttgcctaggctagagtgcagtggcacaatcttggctcactgcaatctctgcctcctgggttcaagtgattctcctgcctcagcctcccaagtagctaggat

SEQ ID NO: 582298 - DNA, 615 bp, Homo sapiens
tgagacagtaaatttcataaactatcataagtattgctaaatattcctggtaatcatgggtaaggattgttttaaatgtttactctgatattaagaggtatattcactttgtggcagaatatgtcattttaaccttcttgagtctggtatttgttcctttaatataacttttattaaaatgtcatagaactcagttagtgtatatgccactcctttgaatatcccaatagctgttttctttttttatatacagttacactaaaatgtggttttaaattgctctgaggaatgccaaaaactggtaaattcatacctcaagcaaaccccagagatgccagagtggtcctaaagatctgttactgcccctacttctaccacccaccacccctggggcaaatctgctgtaatgatgcttcacaataaaacacacaatactgttatggattattaactattaagagcaagaacctaaactttgtttgcaagccttttcttkcatcgcttttattaaataataaaaccactgttattgaaagaaatagaattgacattcaaagattctttttgctttcagtagcaaagccaaggagagactgggataaataagtgaccatg

SEQ ID NO: 582299 - DNA, 602 bp, Homo sapiens
tcctattactgtaatctttgaatacttccaacttgagctactataattatcttatccttttagctctttttgtattttatattactacaaaaatgggaagtagcctaactgtaacacttaaaaacatagctgtgaaatttattgccaattttkttttcccggaagtctctaccagtgtatactgcctgtagaaaaagtagaagactactggttttcacatctgctaatggttttgtcacatctgctaagagaattgaacatcttttcttaatcttttgctaattattagaagaaaaccaggagcttgctatttacatttctttgtttctcgtaaggctgaactttttcccaacatgttagttacaggttgtattttctcttttgtaaatctcctgctgatacccatttaccttaatgtttttcatatctattggcgcacactctttgtttaataaggttatttacccttgtcacatatcctgcaaacattatttcagtttgctgtttgtgtttatattttagttactttttatgttcagaggttttaatttttttgtagtcaaatccttcaatattgtcctttgtaacacagaaaacacaag

SEQ ID NO: 582300 - DNA, 602 bp, Homo sapiens
tcctattactgtaatctttgaatacttccaacttgagctactataattatcttatccttttagctctttttgtattttatattactacaaaaatgggaagtagcctaactgtaacacttaaaaacatagctgtgaaatttattgccaattttgttttcccggaagtctctaccagtgtatactgcctgtagaaaaagtagaagactactggttttcacatctgctaatggttttgtcacatctgctaagagaattgaacatcttttcttaatcttttgctaattattagaagaaaaccaggagcttgctatttacatttctttgtttctcgtaaggctgaactttttcccaacatgttagttacaggttrtattttctcttttgtaaatctcctgctgatacccatttaccttaatgtttttcatatctattggcgcacactctttgtttaataaggttatttacccttgtcacatatcctgcaaacattatttcagtttgctgtttgtgtttatattttagttactttttatgttcagaggttttaatttttttgtagtcaaatccttcaatattgtcctttgtaacacagaaaacacaag

SEQ ID NO: 582301 - DNA, 552 bp, Homo sapiens
agctcacaaaaacatgtgttgtataaaatcaaggtttaagggatgtagggctgtgcaggacgtgccttgttaacaaaatgtttacaagcagtatacttggtaaaagtcattgccattctctagtctcaataaaccargggcacaatgcactgtggaaagccgcagggacctctgcccttggaaagcggggtatcgtccaaggtttctccccatgtgatagtctgaaatatggcctcttgggatgagaaagatctgaccgtcccccagccagacacccgtaaagggtctgtgctgaggtggattagtaaaagaggaaagcctcttgcagttgagatggaggaaggccactgtctcctgcttgcccctgggaactgaatgtctcggtataaaacctgattgtacatttgttcaattctgagataggagaaaagctgccctgtggtgggaggtgagacatgtttgcagtaatgctgccttgttattctttactccgctgagatgtttgggtggagagaaacaaatctggcctacgtgcacatccaggcgtagtac

SEQ ID NO: 582302 - DNA, 518 bp, Homo sapiens
acagaaaaaaaagtgataaaatatataaattattggtatccaagaaggcaaagagagaaagagtttaaaaacctatttaatgaattaatagakgaaaatttcccaaatctagcaagagatttaaacatccagatacagagtcccagcagtcaccaaacagacacaatacaaaaagttcttcttcatggtatactatagttaaaatttctaaaatccatgaaaaatagagaatttttttttttaaaaaaaagcaagagaaaagcatctagtcacctataagaaacctccatcagaacaagagaaaatttatcagtagaaaccttataggccaggagagaatgggataatgtattcaaaatgctgaaagaaaaactgcaagctaagatactatatctaacaaaattatccttcataaatgaaggagaaataaagtctttctcagacaagataaaactaagataattcatcaccactagactgaccatacaataaatactcaaagaactcctaaacatgga

SEQ ID NO: 582303 - DNA, 611 bp, Homo sapiens
tcagtggctcccaagttcttgtcctgcaacaggaggaaatgaggtaggcagacaagtggagggtaagcaagatgaaggggaattttattgagcaatataacagctcacagaagtcccacagagggtagctcctttctgcaggcagggtatcctgatgagtgttcagctccgagcacagaagagaccaaggagtgggaagctcctctccaggcaggtcatgccatcattttgtacctctcagcaaagagaaggccctggagtgggttgctgttctctacagctgatagtcctgacttctctgcaagtttctgaagctctcagcaaagaggaggccataaagtgggcagctcctytcaggttctggtcatactgacatctcccactctcagcagagaaggtaactactctctgcagctggtcatcccattgtctgctcacctctggctgagactttggcttttatgggcctcaaatgggaggaagtgtgcactgatttggctcatgggcaaccattggtgggcccagaaaaggcaccacaagttcccactctagtctgtgggactggcagcccaggccccagctttcaggccctctatggcccaaaggtgggg

SEQ ID NO: 582304 - DNA, 641 bp, Homo sapiens
accagtaatagtaagcacacagaaaaacacagaatattataacactgtaatttgagggtataaactcctattttatgtattaggtaatagaaaaactcaatgatgaaccaatcaaaaataataaaggattacatcttttcaagacatagtacaagaatacataaaaacataaaaagttaaaaggcagtgagataaagtgtagcatttctattagtttttttctcatttgtttgtttatgccatcaactttaagttgtcattagtttaaaataatagattataagatagtatttgcawgcttcatagtaacctcaaatcaaaatatacaacagatacacaaaacataaaaagcaataaattcatcacaccactaatgaaaattgccttcactaaaaggaagacaggaaggaagaaaagaagaaagagaaaatcataaaaaaaaaacagaaaaaaaatagcaggagtaagtccttatttatcaataataacattacatgtaaatggattaaactctccaataaaaaagacatggagtagaagaatagattttaaaaaacccacaatgatctgttgcctataaaaaacatacttcccctataaagataaacacagacagaaataagaaataaaaaaagatactt

SEQ ID NO: 582305 - DNA, 641 bp, Homo sapiens
accagtaatagtaagcacacagaaaaacacagaatattataacactgtaatttgagggtataaactcctattttatgtattaggtaatagaaaaactcaatgatgaaccaatcaaaaataataaaggattacatcttttcaagacatagtacaagaatacataaaaacataaaaagttaaaaggcagtgagataaagtgtagcatttctattagtttttttctcatttgtttgtttatgccatcaactttaagttgtcattagtttaaaataatagattataagatagtatttgcatgcttcatagtaacctcaaatcaaaatatacaacagatacacaaaacataaaaagcaataaattcatcacaccactaatgaaaattgccttcactaaaaggaagacaggaaggaagaaaagaagaaagagaaaatcataaaaaaaaaacagaaaaaaaatagcaggagtaagtccttatttatcaataataacattacatgtaaatggattaaactctccaataaaaaagacatggagtagawgaatagattttaaaaaacccacaatgatctgttgcctataaaaaacatacttcccctataaagataaacacagacagaaataagaaataaaaaaagatactt

SEQ ID NO: 582306 - DNA, 589 bp, Homo sapiens
aaagaaaactggaggactcacattatctgatttcaaattatattaacactacaaagctatagtaaccaaaatagcawggtgctggcattaaaacagacacatagaccaatggaacataatagagaacccagaaacaaatccataaaactatagtgaactcattttcaagaaagttgccaagaatatacactggggaaaagacagtctcttcaataaatggtgctgagaaaactgtatctctacatgcagaagaataaaactagacccctatctctcaccatatacaaaaatctaagactagaaactataaaactactaaaagaaaacatcggggaaactctccagaacatgagtgtgggcaaagatttcttgagtagtaccctacaagcacaagaaaccaaagcaaaaaagaacaaatgagatcagatcaagttaaaaaatcttctgcacagcaaagaaactatccacaaagtgaagagacaaccacagaatgcgataaaatatttgcaaactacccccctgagaaaggattaataaccagaatatataagtagctcaaacaactctataggaaaaaatctaatcatct

SEQ ID NO: 582307 - DNA, 589 bp, Homo sapiens
aaagaaaactggaggactcacattatctgatttcaaattatattaacactacaaagctatagtaaccaaaatagcaaggtgctggcattaaaacagacacatagaccaatggaacataatagagaacccagaaacaaatccataaaactatagtgaactcattttcaagaaagttgccaagaatatacactggggaaaagacagtctcttcaataaatggtgctgagaaaactgtatctctacatgcagaagaataaaactagacccctatctctcaccatatacaaaaatctaagactagaaactataaaactactaaaagaaaacatcggggaaactctccagaacatgagtgtgggcaaagatttcttgagtagtaccctacaagcacaagaaaccaaagcaaaaaagracaaatgagatcagatcaagttaaaaaatcttctgcacagcaaagaaactatccacaaagtgaagagacaaccacagaatgcgataaaatatttgcaaactacccccctgagaaaggattaataaccagaatatataagtagctcaaacaactctataggaaaaaatctaatcatct

SEQ ID NO: 582308 - DNA, 526 bp, Homo sapiens
atatacaaaaatctaagactagaaactataaaactactaaaagaaaacatcggggaaactctccagaacatgagtgtgggcaaagatttcttgagtagtaccctacaagcacaagaaaccaaagcaaaaaagaacaaatgagatcagatcaagttaaaaaatcttctgcacagcaaagaaactatccacaaagtgaagagacaaccacagaatgcgataaaatatttgcaaactacccccctgagaaaggattaataaccagaatatataagtagctcaaacaactctataggaaaaaatctaatcatctgatcaaaaagtgggcaaaagatctgaataaacatttctcaaaagaagacatacaaatgtcaatggcaaacaggaatatgaaaaggtgctgaacatcatcartcatcagagaactgcaaatcaaaactataatgagataacatctcaccccagttaaaatggcttttatctaaaagacaagcaataacaaatgctaatgaggatgtggagaaaaggg

SEQ ID NO: 582309 - DNA, 522 bp, Homo sapiens
gaacttttgtacactgttggtggggatgtaaattagtacaaccaccatgaaaaatagtttggagtttcctcaaacctcaaaatactaaaaataaggcggagcttgcagtgagccgagatagcaccactgcactccagcttgggggacagagcgagactccatctcaaaacaaacaaagaaasaaacaaacaaaaactaaaaatagaactaacatacaatccagcaatcccactgcaaggtatatacccaaaggaatggaaatcaggatgttaaagtgttaacttcactttatagtaggcagcattatttatagtaggcaagatttggaagcaacttcagtgtccatcatcaaatgagtggataaagaaaatgtagtacatatacacaatggagtactattcagtcataaaaatgaataagatcctgtcatttgcaacaacatggatggaactgggaggtcattatgttaagtgaaatgagtcagaaatagaaagaaatgagtcaggaatagaaagataaact

SEQ ID NO: 582310 - DNA, 590 bp, Homo sapiens
ttcagtgtccatcatcaaatgagtggataaagaaaatgtagtacatatacacaatggagtactattcagtcataaaaatgaataagatcctgtcatttgcaacaacatggatggaactgggaggtcattatgttaagtgaaatgagtcagaaatagaaagaaatgagtcaggaatagaaagataaacttcacatgttctcacttatttatgagagctaaaaattaaatcaattgarttcgtggagatagagggtagaagaatagttaccagaagctgggaagggtagttggggacttagggggaagtgaggatagttaatgggtacaaaaaatagaaagaatgagtgaataagacctagtatttgatagcatgacagagtaactataatcaataataatgtacttgtccattttaaaataactacaagagtacacaatttgtttatgacaccaaggataaatgcttgagaaggcagatatcccatttactatgatgtggttattaggcattacatgcctatatcaaagtatctcatgtgccctatatataatcacacctactatgtactctctacaattaaaaataataa

SEQ ID NO: 582311 - DNA, 586 bp, Homo sapiens
tatcaatagtaatatggctcatataataatattacagctatataataaatgtttcatggtatttcattatatcaaaatatttttagaatataagaagtgctaattactctatttaacatgatagctcagaaattagaaatatcaacattgttcaaataataagataataactattaagtatttamtttgtgccagggttccaagagcttaacttgcattggagcatttaatcctcagtgggagatttatcatccccattttgcaaatgaggaaacacttacagagagtttaagcaacttgcctaacataatacaactactaagtggtggaaccaggatttaaactccaggcagtttgatctagagaccatactcttaaccattattaagatcagtctatgaaatatgaaaaccatcaatttaatctcacagagtcacttctttgagacatatgtcaagttttaatatatattaagggcaactttgaaaagaaggcagtgttgatgagagtaaaaaagacaatgatatatatattatttacattgcccaaatgtttctatgatggttaaacaaagtatcagatacag

SEQ ID NO: 582312 - DNA, 586 bp, Homo sapiens
tatcaatagtaatatggctcatataataatattacagctatataataaatgtttcatggtatttcattatatcaaaatatttttagaatataagaagtgctaattactctatttaacatgatagctcagaaattagaaatatcaacattgttcaaataataagataataactattaagtatttaatttgtgccagggttccaagagcttaacttgcattggagcatttaatcctcagtgggagatttatcatccccattttgcaaatgaggaaacacttacagagagtttaagcaacttgcctaacataatacaactactaagtggtggaaccaggatttaaactccaggcagtttgatctagagaccatactcttaaccattattaagatcagtctatgaaatatgaaaaccatcaatttaatctcacagagtcacttctttgagacatatgtcaagttttaatatatattaagggcaactttgaaaagaaggcagtgttgatgagagtaaaaaagacaatgatatrtatattatttacattgcccaaatgtttctatgatggttaaacaaagtatcagatacag

SEQ ID NO: 582313 - DNA, 541 bp, Homo sapiens
acttcttctctacccgattctgatgtcttagatgatccttccatttgcctctcacactctcctcatcctgctcccactttacctacaccctttccatctgcttcatcccccaatcatcaccctctccccataaacagatactttatcctcctcatatacttgcacaggagttacataagccactagtacagagtcctcagaaaacctccaaaatgttttccttgtccataaggtggcaaatgaagatttgggaaaaattcgarttcatgcacatttccaatattggatcttttgcaaattccatcccagttgcgttcatttagccaggagcactctaagttaattcaagaatttcaggccttaactatttcctttgttttaacgtggcaagatatatttgtggtattaactagttgatgttcccgcgaagaaaaatcttgcctttagtttgagcttaggtggatgaaactcatgctcgtaatcctaatgataatatagccagggaagaagctgtccctgacacagaacccaactggcaaca

SEQ ID NO: 582314 - DNA, 550 bp, Homo sapiens
atatggctataagtaagtattaatcaggctgcactttgacccacttccttgtaactgaaagtcactagatcctgaatatttgtatccccattcccactgttcttatagatagaatctctgacatcagaatcataaggcttttctttaagaattgcttaaagatgttcttcggatccccaattccagtgaaacagctgatgacaaccattttgaagacccccacagaggaacagaatcaacatgagatggtttcttcctctccccatcctatgacttccccctgtactcttccaccaattaacaatctccacactttgacmcactccaaaacccttaaaaacccagccccaaactacctggggagatggatttgaggttccttcccatcttctccttcgatggcccaaccattaaacctctttctctgctgtaacctcgtgtctcagcatattgactttttgcacatattgggcaaaaaaaacctattatggttacttgattgtgataacatcaaaagtacactgaatttggagtcaggagacctgaattc

SEQ ID NO: 582315 - DNA, 613 bp, Homo sapiens
tatcctcctttagtagtaaatatattgtargagattgtttgtcatctattcgataatttcttatcccttctctcttgcttaaagaatctcaatttttaaatattaggcggcttaaggcaggtgactgaggaactgaaagggatgactatgctgccatcccaaccatacaggatgaattttgaacactctatactaagcctagtaattccgttcctctcgccatttagcaaggtcatgtttctttgacatgcatgaagactcttaaaaattttaactctgcttatgtttctactcctcctccacctgtacactggcgtccaggtacccttcacctaattgtagttctttctcctgtcttgacctccgtatccttgcaaatgtgctgagccataattccaactatccaactcttgactcattcatcaaagcccaactggaatgtcaacaaatggctacatctttgcataattttctccatggcagaatttaaagtctctgtattttaaaacatgattccatgtgcttccattatattacttatcacaatgtattcctgtcatttgcttatgtacctctttattctatgagaatgccaattacttgatagcaaaga

SEQ ID NO: 582316 - DNA, 613 bp, Homo sapiens
tatcctcctttagtagtaaatatattgtaagagattgtttgtcatctattcgataatttcttatcccttctctcttgcttaaagaatctcaatttttaaatattaggcggcttaaggcaggtgactgaggaactgaaagggatgactatgctgccatcccaaccatacaggatgaattttgaacactctatactaagcctagtaattccgttcctctcgccatttagcaaggtcatgtttctttgacatgcatgaagactcttaaaaattttaactctgcttatgtttctactcctcctccacctgtacactggcgtccaggtacccttcacctaattgtagttctttctcctgtcttgacctcygtatccttgcaaatgtgctgagccataattccaactatccaactcttgactcattcatcaaagcccaactggaatgtcaacaaatggctacatctttgcataattttctccatggcagaatttaaagtctctgtattttaaaacatgattccatgtgcttccattatattacttatcacaatgtattcctgtcatttgcttatgtacctctttattctatgagaatgccaattacttgatagcaaaga

SEQ ID NO: 582317 - DNA, 570 bp, Homo sapiens
aatgtaaaatgtaaagtcccttcttcctctttacctcctaaatcctttcttctgtctcttctttccaaagtcttaatatatgttagaaaatgtagacgatataaaagataaastacagtccctgtctgcaaaggattcacaatctagtaaccagaaaataaagcactttgtattttattgtcttttattccgcccaatacaatagtcaaaattgtagtcacttggtaattttacaaaagttttgttaaactttaacaaaatttgcccagtttctttgcactgaaagctgcttattctttcgcttttagacagctcgaatttacttgacttacttttgaaaattattgaaagaaaaataaagtccaatattgctatttacaagccaattatcaacaatacttatacaaactctgcagcacttttattcacacacaattctatagaagaacacacacacacgaaaaaaaagaaagtcattgaaggcttcatatttctctcaatatgtcttaagtaggctcttgtaacaacttgtgtagttgttaagaaatttatcaaagcttggaaacagaa

SEQ ID NO: 582318 - DNA, 483 bp, Homo sapiens
acgctctacctatacattttaccctccctaggaattttattgttcccgtagctttgccatttccagaatgacatgtaattgcaatcatacagtatgtagcctttcagattgacttctttcattagcagtatgcatttaaatttcctgcatgtcttttcttggcttgatgtatcatttttcatcgctttttgtacattccattgactgagcgttccagtttatccattcatctactgaagaacatgttggttacayctaagttttggcaattacaaataaaactgctattaagacacatgtgcaggttttgtgtgaacgtaagttttaaatttatctgggtaaataccaaggtatggttgctcgattgtatagtagaagtatgtttacttttgtaagcaactgctgaaatttcttccaaagtggcattccaaactgtcttccaaaatgtcattttacattctcttcagcgatgaacgagagttc

SEQ ID NO: 582319 - DNA, 555 bp, Homo sapiens
ataaatgccataatgtacatgggtaaacaatgctagaccatttatttttccaatgacatacttactttttccacatgtgtacatcattgcattatgtaccgtgagttgtcccactgggatcagactgatcacaatgtgtatatcttggtctttatgaaaataattttttaaaagtttattgtgtatttacaagttcctgggtgattgtgggagtaggggtggggcaattttccyatcaaaataataagtatatgtttaataggcattgctgacaacagctattaagagtttgaagacaagtaattgacttactgtgagagttattactagagtaatatttatataaaagatattttattaagagagttttatgttacataaccaatttacaaatattattttatcacatggcttattgtttatattctctttcttttctttgcacattttaagtattttcagttggctctttcacaacttgcaaagtacaattcgtggcctttgtgtacaagatttcagttttgtttagatcagatttatgaaaagagtggcatg

SEQ ID NO: 582320 - DNA, 555 bp, Homo sapiens
ataaatgccataatgtacatgggtaaacaatgctagaccatttatttttccaatgacatacttactttttccacatgtgtacatcattgcattatgtaccgtgagttgtcccactgggatcagactgatcacaatgtgtatatcttggtctttatgaaaataattttttaaaagtttattgtgtatttacaagttcctgggtgattgtgggagtaggggtggggcaattttcctatcaaaataataagtatatgtttaataggcattgctgacaacagctattaagagtttgaagacaagtaattgacttactgtgagagttattactagagtaatatttatataaaagatattttaktaagagagttttatgttacataaccaatttacaaatattattttatcacatggcttattgtttatattctctttcttttctttgcacattttaagtattttcagttggctctttcacaacttgcaaagtacaattcgtggcctttgtgtacaagatttcagttttgtttagatcagatttatgaaaagagtggcatg

SEQ ID NO: 582321 - DNA, 601 bp, Homo sapiens
atggacataaagacaaatgctgagtttcyaggatggaaattctaggaacctagttagtcctagaaataaataaggaaaataaggaacttgttaaacaagaagataatcgtagcctaaaacaacagccaaggaagttagagttccagagatgcttgctttctgcatagaaacttatggtaacatcttaatgtcactgagttgtctttcagaaactcggacccccacagggaaccccccacctaagggatccactggcatgaagacctcagataaggggaagtgaagactgaactttaatcatcatatttgttccaagttttttcccgagggccttggagaaagtcactccccctacctagttaacatttttctactcactccaattcttaaacaaacttctctgccttaaccaattgcaaatcagaaaatcgttgaatctacctatgacctgtaagcccctgcttcaagaaatcccacccttttaggcctaaaccaatgtgtaacctccatgtattatttatgattttgcctgtatcttctgctttcctgacatttacccttgcctttagacaaccttgtgtgcaagccatcaaggagatca

SEQ ID NO: 582322 - DNA, 432 bp, Homo sapiens
ggcaactgccaaacacttttaaaccatcagatctcatgagaactgactcactatcatgagagcagcatggagggaactgcccccatgatccaatcaccttccaccatgtccctccctcaacacayggggattacaattcaagacgtaatttggggggagacgagccaaaccatatcacctcgttttactgcacagggtgagcagaccccagtttggtcctaaaacggtatttgcaagacagctactgtacaatccgcttcattaataaactgcccttgcaaaatcatgacagtaagagaaatctgacatacttgactccatcttgcttctgacctctaagctgtgcttggtcattcctgggcatcagccaagctaactttgcgaggaatttatagtttaactttgaaacaaaaatgataatattccttccct

SEQ ID NO: 582323 - DNA, 339 bp, Homo sapiens
tggtcctaaaacggtatttgcaagacagctactgtacaatccgcttcattaataaactgcccttgcaaaatcatgacagtaagagaaatctgacatacttgactccatcttgcttctgacctctaagctgtgcttggtcattcctgggcatcagccaagctaactttgcgaggaatttatagtttaactttgaaacaaaaatgataatattccttccctaaaactaactcctccttgtttggagactgaaactgtctttgtaagactgagaggccacaagatagatgtaatttctaaaatcgcttactgrtcaggagttatgtggtcaggagtcaagat

SEQ ID NO: 582324 - DNA, 508 bp, Homo sapiens
ccgactttccaagaatatcaaacaccagccaacagatttatgtgatagtggaaaacacccaattascttcggtagaatgctttcttaaaagtgcatgtattctaaccttgtagggaatttaaacaactgtgcttaaaagaaaaaaaaaaaacaggaaaggaagatttgagtcaattcatcatttttattatgtactctcaactcgacccaaaacacatctaaaaaaacctatattttagtgacatttactactactttgccactccacttttaaagcagcctatgtgaatatcaagtggatgggcctgtttctgtacaatatcacatactataggagaaatatctagcaccgatgataataataataataatttaaaaactctgaacactgctgtttgttagattactccagatatttgaatattccttttctttcttagttctttaattagctgtggctttgatatgagacatatatttatttgaagctaaaagcccactttcacaa

SEQ ID NO: 582325 - DNA, 460 bp, Homo sapiens
agtaacgactgtttttctttttcttgtccactttcttttgaacattgatacttcacattttgttaattctgaacaagactatgaaaatgttacatcattttactgaattgaaaacattaatgaaatataatgtgtgagcagatagattctatgagtttatgtgtgaacttacactagaaagagaagaatggcagtagatgtggggggttggaaggaatccagtcctatacacacataagagataaaaataaatttatttattttaaattcatccttgaaataggttaatcattgaaaaagayggatctacagattccacataaccaccccctggttccatccttgcaagccgggcataaatgctgagacagaataataaataaaataacaatttaaaataatttctgggaaaattatgggactatatacatggaaagaaacttcctgaaaactggtttaa

SEQ ID NO: 582326 - DNA, 460 bp, Homo sapiens
agtaacgactgtttttctttttcttgtccactttcttttgaacattgatacttcacattttgttaattctgaacaagactatgaaaatgttacatcattttactgaattgaaaacattaatgaaatataatgtgtgagcagatagattctatgagtttatgtgtgaacttacactagaaagagaagaatggcagtagatgtggggggttggaaggaatccagtcctatacacacataagagataaaaataaatttatttattttaaattcatccttgaaataggttaatcattgaaaaagacggatctacagattccacataaccaccccctggttccatcctygcaagccgggcataaatgctgagacagaataataaataaaataacaatttaaaataatttctgggaaaattatgggactatatacatggaaagaaacttcctgaaaactggtttaa

SEQ ID NO: 582327 - DNA, 599 bp, Homo sapiens
tttctctccttcaactataaaattatagttcattaaaccatttatttattttcatagagtatatgtcatattttagtcacaaaacctcgaccacatgacagaaggggcacctaatcattctcattggcacacaaggtcttgttaaaattataaagtagacaaatattctcttcagtatccttctatctttatatcatcttttaatgttccttcttccaaacccaaaattttaatcatccttaagctgtacaaagtatcctacctaggtcagccataaaggtcttcctgatatataaatattcctccaactttccatttattctttcaataatactcttactctttagtgaatatagccttggcaatcaatgtttggattaaagaaattcacactaaaatgtcaatgactgtaattcagatgtctaatgagtacattaaacattttaaaagaacagtgtataaaacctagctgaaatgaatatataatttatacactggaatggagagatatttttcaattggagarttcttcatactaatctttttctatatgagcaggccacaaccacacatatctcattttcttgacagaatcctga

SEQ ID NO: 582328 - DNA, 562 bp, Homo sapiens
ctgattgccccccactcctgacctttccctctgcctttctgcatattaggtgtatattggttctctgtcactgggtttcccctgccttctagaataatcataaataatctttgtcaggaccctatcacagatcatcttcccatcttttgcctacttctcccattaccagacacaaggctccatctgccagagatgtactgttcgtgtttggaatgcgtgctgtgtttctaaggctctttctcatcctggtgttggtcataaagtgcctgtgtctcttaaaacttacaccattagcaagcatttaaaccagcggaactcttaaaggcaattgagccctctcaatatatagaagagtatagagatctaaagagtgaagtgaattacccaagatggcataatatgtaactggcaaagctgtgattagattaatttgaatttcaacattcaacamatatttagcttctctcaacttcaatttcttctgtcaatttgaaaataataatgtcctatttgctaacagtgtttgaaaattaagaaagacatgttaatatgcctaaaatta

SEQ ID NO: 582329 - DNA, 593 bp, Homo sapiens
taaataaaataaaatgaggaaaataactaacaacaaayatggtggagttcaattttacatgagtgtcttttagattggttctgagacacagcttcttgtatgaagaactatatgcagagttcctccaggaaacacacccaaaaggaaatgaggaaggaattgtgcaaaaagagaaggtgacccactgagccctcaaatgacattccgaggagctctgaagcctgtaaggattctaccaaattggggcaaggagatgacctatccccatctccgtcagtcgctgatgaaagccatcacttgaaagggtataactttgggcctagaagtttcctacggcaaaattgtggatccaagtacaagagtaattatcacaatagaacatgaaatctaagctgagtaagacaggaaacaaaaacgtgaggaatgaaaaacatgcattcgatattccagcaagataaaaagctaatttggcatgaaggattagagaatacataatcagaaagataataaagtggtggtcagaaaatagcatcttaaaagagagattctggaaaagaaaaatatacttggaataataagcacaggaatggctg

SEQ ID NO: 582330 - DNA, 593 bp, Homo sapiens
taaataaaataaaatgaggaaaataactaacaacaaacatggtggagttcaattttacatgagtgtcttttagattggttctgagacacagcttcttgtatgaagaactatatgcagagttcctccaggaaacacacccaaaaggaaatgaggaaggaattgtgcaaaaagagaaggtgacccactgagccctcaaatgacattccgaggagctctgaagcctgtaaggattctaccaaattggggcaaggagatgacctatccccatctccgtcagtcgctgatgaaagccatcacttgaaagggtataactttgggcctagaagtttcctayggcaaaattgtggatccaagtacaagagtaattatcacaatagaacatgaaatctaagctgagtaagacaggaaacaaaaacgtgaggaatgaaaaacatgcattcgatattccagcaagataaaaagctaatttggcatgaaggattagagaatacataatcagaaagataataaagtggtggtcagaaaatagcatcttaaaagagagattctggaaaagaaaaatatacttggaataataagcacaggaatggctg

SEQ ID NO: 582331 - DNA, 593 bp, Homo sapiens
taaataaaataaaatgaggaaaataactaacaacaaacatggtggagttcaattttacatgagtgtcttttagattggttctgagacacagcttcttgtatgaagaactatatgcagagttcctccaggaaacacacccaaaaggaaatgaggaaggaattgtgcaaaaagagaaggtgacccactgagccctcaaatgacattccgaggagctctgaagcctgtaaggattctaccaaattggggcaaggagatgacctatccccatctccgtcagtcgctgatgaaagccatcacttgaaagggtataactttgggcctagaagtttcctacggcaaaattgtggatccaagtacaagagtaattatcacaatagaacatgaaatctaagctgagtaagacaggaaacaaaaacgtgaggaatgaaaaacatgcattcgatrttccagcaagataaaaagctaatttggcatgaaggattagagaatacataatcagaaagataataaagtggtggtcagaaaatagcatcttaaaagagagattctggaaaagaaaaatatacttggaataataagcacaggaatggctg

SEQ ID NO: 582332 - DNA, 429 bp, Homo sapiens
cgctgtgaaactgagagtaggagccagaggaggagcaagctgtgattgatgggccaggccttcctggcagaaaaagtgccatctgggttggttttgggagcagtcagatgttgagggggaggtcagccaggcggcctcagccccccaccttcctcaacaccccgatcatccacacattgcacagcgcgcacaccctcgctcgtaattgaggcgtgcttggggcagatgctttgtggtgtgggacaagaacagctgctaagtttatggaggagaaaggaagcaggatggtgcagcaggtatttttgtttttttttccatttaatctttcactcaaaattgcgatttgaatgaagctgaaagcttttcttgtgttaagtccgtgctgtcggtgacacgtagcttgctscttgaatcatgcccggggaaagg

SEQ ID NO: 582333 - DNA, 586 bp, Homo sapiens
tgaaagtagagcctttgtagatataattaaattagatgaggttatactggattagggtgggccctgaattcaatgagtgttgtccttgtaagaaaaccatgtcargacgcacaaaggtaagaagtccaaggggcatcaaagacagattggactaataccagggacaccaaggattgccaggagctaccaggatctaggaaagaagcaaggacggactctccttgagagccttcagatggagcatggtttaggcaacaccttgattttgaacttctggcctctggaactgtgagagattacctttcttttattttagtcacctagctggtcataatatgttatggcagtcctaggaaagtaatagcacatgagatattttttcttgtttgttgttgttgtttttgtttttgttttttcctttatagcacttattgtaactagtaattttctttgtttgcttaccaattctggacatactggaatgtcagcaccatactgcattttgttcatcatccccgtatctgtgatgcttcactccaatagcagctcagttacgatgtgtgaacggaatgtatgaatgaatgaa

SEQ ID NO: 582334 - DNA, 634 bp, Homo sapiens
agcgtttatctttctgtgcctggcttatttcccttaacataatgtcttctacatttatctgtgttgtcacaaataacaggattgctttcttttttaaggctgaataatattctatgagtatatatgacacgttttatttatccattcatccattgatggacacttaggtggattccataccttggctattgtgaatagtgctgcaataaacatgggagagcagatctcccttcgataggctgattccatttcctttagatatatactgaatcgtaggattgctggcttacatggtagttccatttttaattttttgaagaacctccatactgttctccactgtggcagtactaatttagattctcattaacagggtgcaggggttcttttttctctgtgccctcaccaccyacttgttgtcttttgtctttttgataatagccattctaacaggtgtgacgtgatatctcattgcggttttgatttgcagttccctgataattagtgatgttcagcatttttaaatatatatgttggctatttgtatgtctttttttgagaaatatctatttaggtcctttgcccatttttaaatcagattgttttttttactattgagttgtttgaattattt

SEQ ID NO: 582335 - DNA, 566 bp, Homo sapiens
agaggaatccactcttgactcccagcatccagtgttgtttcaagctttgcattcaaaagacacagacttcaaagctgctcagagagcttaccttaaatgacttacgtgaaagcttgagraaacaacaattaaaaaaaaaatcccaaactctcagtgtgggaaattatacttgcttttggaaagaggccctggacagagcttcctgtctgggggaacatatggaactaggcgttctttatgaagagggaatgtaggtgtgacgctgccaaaggaccagacggtgttcttgaaaatcacaggcttcctccgggtttccatccctgcagcaaaatgggggttcatttgaggggtacccaagtgaaaccacaggacctagaagaaaattaccttcaggtttctgaggctcagtttgaagacacagacaactgtgggcttctctagaaattagattctaacaaattccacagcttgaagtgtggaaccaaatatccaattctgaaaagcacatttgtattagatcgacactttcaccaggaacatcaaaaaacaccttattataataaaaa

SEQ ID NO: 582336 - DNA, 566 bp, Homo sapiens
agaggaatccactcttgactcccagcatccagtgttgtttcaagctttgcattcaaaagacacagacttcaaagctgctcagagagcttaccttaaatgacttacgtgaaagcttgaggaaacaacaattaaaaaaaaaatcccaaactctcagtgtggsaaattatacttgcttttggaaagaggccctggacagagcttcctgtctgggggaacatatggaactaggcgttctttatgaagagggaatgtaggtgtgacgctgccaaaggaccagacggtgttcttgaaaatcacaggcttcctccgggtttccatccctgcagcaaaatgggggttcatttgaggggtacccaagtgaaaccacaggacctagaagaaaattaccttcaggtttctgaggctcagtttgaagacacagacaactgtgggcttctctagaaattagattctaacaaattccacagcttgaagtgtggaaccaaatatccaattctgaaaagcacatttgtattagatcgacactttcaccaggaacatcaaaaaacaccttattataataaaaa

SEQ ID NO: 582337 - DNA, 566 bp, Homo sapiens
agaggaatccactcttgactcccagcatccagtgttgtttcaagctttgcattcaaaagacacagacttcaaagctgctcagagagcttaccttaaatgacttacgtgaaagcttgaggaaacaacaattaaaaaaaaaatcccaaactctcagtgtgggaaattatacttgcttttggaaagaggccctggacagagcttcctgtctgggggaacatatggaactaggcgttctttmtgaagagggaatgtaggtgtgacgctgccaaaggaccagacggtgttcttgaaaatcacaggcttcctccgggtttccatccctgcagcaaaatgggggttcatttgaggggtacccaagtgaaaccacaggacctagaagaaaattaccttcaggtttctgaggctcagtttgaagacacagacaactgtgggcttctctagaaattagattctaacaaattccacagcttgaagtgtggaaccaaatatccaattctgaaaagcacatttgtattagatcgacactttcaccaggaacatcaaaaaacaccttattataataaaaa

SEQ ID NO: 582338 - DNA, 656 bp, Homo sapiens
gccgtttttgttacttcaaaggaaacccaactaagctgttcagtagctaaacatgtttgcatgtttacattcttaagtcctatttctgcaagtgtaaatgatacacaaggagtatttttctctcctaaaatttttaaaatacattttctcctagagttgctatatatgtaagtgcctttttctcagacctagctagcactactattggtttatcagtttttttaatatctacatgaatcataggaaactacatctaatttttcttttaaaaaaagtaatttttaattattatggacatatgatagttgtaaataattatgggcacatgtgaaattttgacacaagcatacaatgtgtaatgatcaaatcagggtaattgggataytcgtcacctcaagcatttatcatttctttgtattagcaacattccaattccactctttttgttactttgaaatatacaataaatcattgttaactatagtcaccctatcgttaccaaatactagatcatattccttctatctagctgtatttttgtatccgttaaccatcctctgtttatttccccttcctcactgccgttcccaactctggtaaccatccttctactctcttatctctgtgagttcaattttttttttttttaagctccc

SEQ ID NO: 582339 - DNA, 508 bp, Homo sapiens
ttgtcatcagtaagaacaaacctaatgatgttattacaacatccagatatggggccaattatttatatgttcattttatatggtcccgcatttagaatagaatgaaattttaatttattattttggtttttacctgcctttatcattaggaagtgatgtttattagwcagtgaattaagaggaaaatatcaaggagacatctgcactcccatatttgttgcagcactactcacaatagccaagatttggaatcaacctaaatgtcaacagacaaatggataaagaaaatgtggtacatatacacaatggagtactgtacagccatgaaaaagaatgagatcctgtcatttgcaacaatatggatggaactggaggttagtatgttaaatgaaataagccaggcacagaaagccaagcttcatattcccacttatttgtgagagctaaaaaaaaaaaaattaaaacaattgaactcatggaggtagacagtagagtgatggttaccaga

SEQ ID NO: 582340 - DNA, 505 bp, Homo sapiens
taaaggtttccaggagctggaggggtggggaaatagatcgtaactgcttgatggttactggtctccttttggagtgatgatgttctggacctagatggaggtgctggtcacacaacattgtgaacgtactaaacgccactgaattgttcactttaaaatgtttagaatggcagattctatgttatgtgtattatatcacaataaaaaattagtcaaagtggccaaaatgttgtgaaggtgccatggaaggaaacaaaacttaagaaattcttctgatcaaaaaaacagaggttgtggagtcaggagacctgagttcagggcccagctctgttacctgcctaccagcagtgtcaccaaaaataagcttctgtgattccctgggcttcactttcctcctctctacaatgagggtggtggtcctcggatccctgcctgcaacactctgcctgcacatcagggagctcaatatacatccgtccctcrtgttccttccaagcaaggaagg

SEQ ID NO: 582341 - DNA, 583 bp, Homo sapiens
  misc_feature 275, 278, 282, 289, 291: n = A,T,C or G
gtcttcacgtggggtggacacctctctcctaaagtcagggcattggtggagcmgggtaaaatgtctccaagggactgaccaaccccggtgtagatgttggaggagtcagcagaggggctttgaaaaaagacaaatttgaagcttggttctgattttctctcacctcaggcaaatcacttccactggctaacgctctgattacttctctgtgaaacagaatgtatgatgctcttttcagacatttggtaagggttaatgataagaagtaacctttnctnttcntcttttntntttttttttccttcttcttttgggagtactctcttatgttctggcccctgagctaggaattcagctcatcatctcattcgattctcagaatagatctatgcggtggatacataccatccccatttcacagatgaggaagctgagatttagagagagataaaataaagtccttaaagtcaattagatggtggaaccaggagtctaactccaaagccatttctcttaaccactcagcttggtagagtggggagtattcagttgacgagttcccccttttcctttcctcatgacc

SEQ ID NO: 582342 - DNA, 583 bp, Homo sapiens
  misc_feature 275, 278, 282, 289, 291: n = A,T,C or G
gtcttcacgtggggtggacacctctctcctaaagtcagggcattggtggagccgggtaaaatgtctccaagggactgaccaaccccrgtgtagatgttggaggagtcagcagaggggctttgaaaaaagacaaatttgaagcttggttctgattttctctcacctcaggcaaatcacttccactggctaacgctctgattacttctctgtgaaacagaatgtatgatgctcttttcagacatttggtaagggttaatgataagaagtaacctttnctnttcntcttttntntttttttttccttcttcttttgggagtactctcttatgttctggcccctgagctaggaattcagctcatcatctcattcgattctcagaatagatctatgcggtggatacataccatccccatttcacagatgaggaagctgagatttagagagagataaaataaagtccttaaagtcaattagatggtggaaccaggagtctaactccaaagccatttctcttaaccactcagcttggtagagtggggagtattcagttgacgagttcccccttttcctttcctcatgacc

SEQ ID NO: 582343 - DNA, 526 bp, Homo sapiens
cccaaaatgttgggattacaagtgtgagccaccacactggccttaattttatttttaaatcaaagtataatatacatacggaaatgggcaggtatcatacacatataacccaagggttggctttctttctggaaagagccaggtagaaaatattttctacattgcaggctatacaatctctgttgcaactcttcaactctccctttgtagcatgaaaacagygatatgccatatgtaattaataaacatggctgtgtttcaataaaactttatttgcaagaacaggcagctggtcacagttgatctcctagccatagttttccaaccttatttatctcccaaaggagatttcctttgggagataaataaggttagatttgatcttgagggtgagaaacttatgataggattaatatcctcataaaagaagaaagaggccaggtgaggtggctcatacctgtaatcccagcactttgggaggcggaggtgggcagatcacctgaggtcatgagttcgagaccagcct

SEQ ID NO: 582344 - DNA, 550 bp, Homo sapiens
acagtggccaggcatggtggtggctcgcacctgtaattccaacactttgggaggccaaggatggaggatcacttgatgataggagttcaagacgagcctgggcaacatagtgagaccacatgtctacaaaaaaaattagctgagcacggtggcacatgcccatagtcccagcccctcaggaggctgaggcaggaggatcacttgaacccaggagtttgaggctgcagtgagctataactgcacaattgcaccctatccagggcaatagagtgagaccctgtctcaaaaaaataaatagataaatwaataaaaagaaaagaaacgaatatggaacagtaactgacatttccaatagtaacatagagatttggtcaaaatctaaattaaattttgaaaaaagagcatgtttcaagaatcaaggttttttgaaaattttttctttttttttttttcgattatactttaagttctagggtacatgtgcacaatgtgcaggtttgttacataggtatacatgtgccatgcaggtttgctgcacccattaactcat

SEQ ID NO: 582345 - DNA, 599 bp, Homo sapiens
aaacacactagttatatggcyttcagaatattatttaatatttccaaatctcagtttcttcatatgtaaatattatctacttcagaatattttcattaatatcacatagtataagctaaataaagtaaactgtatatgcctggcgtgcttaaagcaggaaatacatttataattatataaatggaaagatgactaacacaggagtaacttttatgatcattttttattctacaaatatcagagttacttttgttatattgaaatgtggtggttccagtgaggatggcatgagtaagaatacaattctgtgcacaatgaacagatcttaatctaagtgctaagtttggttttggtgcacatttcctgcaggataaagagttaactctgacactctcctagtcttgacctcaaggcagtcaagaaatagaaatgtgggtaatgggttttctgttggccatcacatggtgggagacaacaagcttggaagaaaagaaacaaagaaatcacagaaaaacaaagaggccagcaaacaagaagagcaagctatatatctgtatcagtgctgtccaacagaaatgtaatgtgagtcataaatgtga

SEQ ID NO: 582346 - DNA, 599 bp, Homo sapiens
aaacacactagttatatggccttcagaatattatttaatatttccaaatctcagtttcttcatatgtaaatattatctacttcagaatattttcrttaatatcacatagtataagctaaataaagtaaactgtatatgcctggcgtgcttaaagcaggaaatacatttataattatataaatggaaagatgactaacacaggagtaacttttatgatcattttttattctacaaatatcagagttacttttgttatattgaaatgtggtggttccagtgaggatggcatgagtaagaatacaattctgtgcacaatgaacagatcttaatctaagtgctaagtttggttttggtgcacatttcctgcaggataaagagttaactctgacactctcctagtcttgacctcaaggcagtcaagaaatagaaatgtgggtaatgggttttctgttggccatcacatggtgggagacaacaagcttggaagaaaagaaacaaagaaatcacagaaaaacaaagaggccagcaaacaagaagagcaagctatatatctgtatcagtgctgtccaacagaaatgtaatgtgagtcataaatgtga

SEQ ID NO: 582347 - DNA, 599 bp, Homo sapiens
aaacacactagttatatggccttcagaatattatttaatatttccaaatctcagtttcttcatatgtaaatattatctacttcagaatattttcattaatatcacatagtataagctaaataaagtaaactgtrtatgcctggcgtgcttaaagcaggaaatacatttataattatataaatggaaagatgactaacacaggagtaacttttatgatcattttttattctacaaatatcagagttacttttgttatattgaaatgtggtggttccagtgaggatggcatgagtaagaatacaattctgtgcacaatgaacagatcttaatctaagtgctaagtttggttttggtgcacatttcctgcaggataaagagttaactctgacactctcctagtcttgacctcaaggcagtcaagaaatagaaatgtgggtaatgggttttctgttggccatcacatggtgggagacaacaagcttggaagaaaagaaacaaagaaatcacagaaaaacaaagaggccagcaaacaagaagagcaagctatatatctgtatcagtgctgtccaacagaaatgtaatgtgagtcataaatgtga

SEQ ID NO: 582348 - DNA, 481 bp, Homo sapiens
gtactccctccactttgctttttattaagagtttgagaaagatttgttttaattgttctttaaatgtttgctacaattatccagtgaagtcatctagcccttagcttttctttgctggggggttattacagagttaatctccttactgtaagtctcttgagatattctgattcttcgtgattcaatcttggccatttstgtgtttctaggaatttgtccatctcacctaagatgttcagtttgttggtatacaattgttcacagtactcttttacaatcctttttatttctgcaaaattggtagtaatgtctcttctttcacttctgattttcagttgagtcttctttcttcctaaatcattctagcaaagatttctcaattttgctaacctttttaaagaaccaattctttgtgtaaaaagtttaatatttatattaactttactattttgtttttattcaaatttattagcttgataat

SEQ ID NO: 582349 - DNA, 481 bp, Homo sapiens
gtactccctccactttgctttttattaagagtttgagaaagatttgttttaattgttctttaaatgtttgctacaattatccagtgaagtcatctagcccttagcttttctttgctggggggttattacagagttaatctccttactgtaagtctcttgagatattctgattcttcgtgattcaatcttggccatttctgtgtttctaggaatttgtccatctcacctaagatgttcagtttgttggtatacaattgttcacagtactcttttacaatcctttttatttctgcaaaattggtagtaatgtctcttctttcacttctgattttcagttgagtcttctttcttcctaaatcattctagcaaagatttctcaattttgctaacctttttaaagaaccaattctttgtgtaaaaagtttaatatttatattarctttactattttgtttttattcaaatttattagcttgataat

SEQ ID NO: 582350 - DNA, 547 bp, Homo sapiens
ctgacctttgacaaatatgacagaaacaagcaatggagaaaagacttcttatttcaataaatggtgctaggataactggctagccacatgtagaagactgaaactggattccttctttacagcatacacaaaaatcaactcaaaatggattaaygccttaaatataaaacccaaaactataaaaaccctggaaaataacctaggaaataccattctggacataggaagtggcaaagatttcataacaaaaacacaaaaagcaattgcaacaaagcacaaattaacaaatgggatctaattgaactaaagagcttcttcacagtataagaaactatcagccaggcacagtggctcacgcctgtaatcccagcactttgggaggccgaggcaggcagatcacgaggtcaagagatcaagaccatcctggccaacatagtgaaaccccgtctctactaaaaatacaaaaattagctgggtgtggtggcacatgcctgtagtcccagcttctcgggaggctgaggcaagagagtgtccagagtgacactcc

SEQ ID NO: 582351 - DNA, 589 bp, Homo sapiens
tgggaaaattcttagaggaatcaataagaggggatgggatctactycatgtgaaatcagttttgctttagagacagcataagtaggtcacctgttttaccaggaggagaggcaaagcgcccaggtccagtgcagctgaagtggtttcctcgctagtggaaatttgtagacattctcttctgattgctttcaaacttctcagtgaaataaggatcaagtcacagttaggcaaagaggtgcggggcgggcatggtggagagttgagaaggggtggtgtgaaagtcactttggtggagggagagtaaatgaacttaatgactcttgtgacactgttgggcagtcctgagtgcctgcttgagttcattcctgtatatttaacgtgaggccaaccagctggtttaatgtttttctgtattcatttccaagtccttgggtgtgagcacaaacaggcacaggccatatgtaatcattgtggtggttttactaggcagatgtggcacaggaaaaagggcaaggtaatcgagagtaaatagaagggggtggtgacaatgactgatgtaagattgacgctggaaatgaaggaactgaga

SEQ ID NO: 582352 - DNA, 566 bp, Homo sapiens
tttcatccatgtccctacaaaggacatgaactcatcattttttatgaaagctgtgttcttttaaagaacagggacaaatagattatttacatgtcaaaaaagaaaataatcctcaggctacctgcagggacggaagggccaatgtgaccaaatatcactaaaaagtatatatggtaaatacttgtctctgcttatgatattaagaatgggtacattctctccaggcttacagtacatggcatttacctcctaacagtagtagaactcttgcctttctggctgctgtatatacaaagttgcattctcagtgacaatttgttttycttcctctaggcaatgaagcccccaactatgtagctcataaaatcttcacaaggataatagtaacacttagacttgtataatagaaccaaatactttaagagatttattgatcatgaatcagtttgtttctaccacatttctacggattagatcttgtggtattatttcatttttatagctgagatatcactgatgatgaacaggttgttctggttttccaaagggaagaggagagagagcag

SEQ ID NO: 582353 - DNA, 588 bp, Homo sapiens
tctgcatatctacaagtatctttattctatccttctgcttgaagaaggattctctgagcataaaactgtaggttaatgattattatctcttaaaaataatttccctcaattttgaagacattaaatgctctttttaagtacagcaccattttggttcctgaatgtgcccagatttttctctagaagcttttaagatcctctctttgtctctggtgctctggaattttacagaaacttgccttactgtggattttttgtttctttattctctagatattccagccctagaagtacttgtatcccttcatctgattaacttttaatattatttattaaacaatttctccccttcaacatcttctattacccttgcttataattgttattacttgcttactgcatctgctgggatggatcctctaatttttatgatcttttctttcctgttttctaacttttgtcattttactttmtaggacacttctttgatatttcttcaagcccacctattgaatctttaaattttaagtatatatttaatttccaaagtttatttttgcctttttctgttgttgggttttttaagtg

SEQ ID NO: 582354 - DNA, 638 bp, Homo sapiens
gattttagaatatatggcaaaatttttgaaatacgaattgagaaattaatccatgaaagggggaagagagggacaaactttttttaaagcaaaataaaattatttgtgcagcccatgcattatttaacattgctatgtctttacttatattagaatagttgttacccacatygggagtgttgggatttcctaggccagaaaatataataatactgctatttagcttcacattctaactatcaactattttacataatttgtccaaggaacaaagagaggaggtacaaatgggatttcatcaggtcagaagcctggaaggaatggatagaaagggtgtttttgtctaaacctgagctttacatattgtatgaaatagctgacttggtgttgcaggcctggccaggtaagatgcaaatctatcacaaacagtttccaggacgaagaagatgaaattagtgtattacaacaagagagaagggatagaaaagaaaggaaaaaaatttttgaaaagaggagaatctataaataagaaagaaaatgggaacatgagacagactgcaggatccgggaggaccaggtgacatatgttaaaatatttaaaagatttaaatcaaaataataaattgtaaataaaattt

SEQ ID NO: 582355 - DNA, 542 bp, Homo sapiens
atcccagcacttagggaggccaaggcgggtggatcacttgaggttatgagtttgtgactcacttagccaacatgctgaattcccgtctctactgaaaatacaaaaagtagccagtgtggtagcgggtgcctgtagttccagctactctgaaggctgaggcagaagaatcacttgaacccaggaggtggagattgcagtgatttaagattgtgccactgcactccagcctaagtgacagaatgagactctgtttcaaaaataaatagaaataaaatagtaccatgataatcaaagcagaatgccactatcaccaaatcccaacagtcaaattaatgggactatataaaaatgtcagaaacaggcttcattgccatcagaatttggtatatgataaagtttcaaaccagtagtaaaatcacggtttaaatagraacgctgcaaacattattacctgataataaactagatctttatgttaaatcataacttacaataagccaaaacaatggtaactggtacatttgcctacataaaaatgcaaa

SEQ ID NO: 582356 - DNA, 509 bp, Homo sapiens
acattttcttttctcttttcaagttcttctctacatgactgaacaagtgatctaggtrtggttttgatgattatttctggagctcggagccaagatagagagaaacatagcattgcagtttggctttcttgcctgtctataaaggaatgcaggaaaggtgccaatttcattgagtttaagcccaaggactcttgcaaaacaacactttataaatgtctgccttttaaagaatatcatgtgtggccaggtgcggtggctcacacctgtaatcccagcactttgggaggccaaagtgggcagatcatgaggtcaggagtttaagaccagcctgactaacatggtgacaccctgtctctactaaaaatacaaaaattatccgggaatagtggcatgcatctgtaatcccaactactcaggaggctgagacaggagaatcgcttgaacccgggaggtggaagttgcagtgagccgagatctcaccactgcactccagcctgggtgacaagagc

SEQ ID NO: 582357 - DNA, 581 bp, Homo sapiens
caactctgattattcctgtgatgtttattcccagaaagggaaatgaataatatttcggattgtgatgtcaactgagtgaccataggacagagaacagggtggtttcgagcagggtttggcagtgcgcactggaggggaagggtgggggagaaacgttctctgaagagggggtacttgaccagaagacctacatgatgggaaggaaccaggcatgcataatgctgagcaatcagcctctctggcaaaagacatagcatgtgcaaaggccctgactcaggaaagctccaaagccttaggaagcctggaaaactctcaagaggtagtcagcactctgtcaaaacggaccaatcagctctctgtaaaacagaccaattggctctctgtaaaatggaccaatcagcaggatgtgggtggggccagataagggaataaaagcaggctgcaagccggcagtggcaacccgctcgggtcaccttccacactgtggaagctttgttctttygctctttgcaataaatcttgctgctgctcactctttgggtccacactgcctttatgagctgtaacactcaccgcaaagg

SEQ ID NO: 582358 - DNA, 553 bp, Homo sapiens
ctcacccagtctaccaactgccatgccaatttcctccagaaacaccctcacagacacacctgagtagccgaatcattctaattgaaagctaaaccacctggattttccttacagcagaagaggaacaaggtcagtgcctactgaagcactgagaataatgaatgttttcccagctacctgggtatcccttaattccgtcaagttgacacttaagtcaactatcacaaaacttaagaaaagcaatttttctgagttagggaatgtaaagagaaattgtataaaattagcttttagttttaaaaaaggacgcagaaataaaagagcctatctccagctggctgaaggcctgggaagaaaattatctgacaatgttatttgggaactgcagsacaaatggtttctagaaggactcattgaacatttgcaggaagagaagcacgtagaagtcaaatcgtatttgtaaaaggagtagagtgaaagacagagctttacttttttgtcatgcaacaggattccatctgagatgaaacttggagccatcacctttcccact

SEQ ID NO: 582359 - DNA, 530 bp, Homo sapiens
atttgagatatttctgtctttaaaaaaatattagtctttctctctaaacagtgctttagctgtattcataagtattggtatgttatctgtaatccatctacaattattttccarttttctttaagatttcctttttaattcattggttatgtaggaatttcatgtttgggaatttctaacatttccttttgttattaatttctaattctatttggttggacaatatacttcatataattaaaattattttgtttattttttaaattaagtttaattttattttaagttctgggatacatgtgcaggacatgcaggattgttgcataggtaaacaaacatgtgccatggtggtttgctgcacctatcaacccatcagctagatatttaaccccacatgcattagctatttatcttgatgctctccttcccccccattccccccacaggcctcagtgtgtgttgttcctctccctgtgtccatgtgttctcattgttcaactcccacttacaagcgagaacatgcattgttt

SEQ ID NO: 582360 - DNA, 417 bp, Homo sapiens
attacaattgcaacggccctatttgcaaataaggttacatgctgaaggttaggacttcaacctaagtttcttgggggcacataattcaattcayaacataaatatttaaatactatactgattactagtgtataagttatggtacaatatagataaactgttcccaaaaggaaaaaaatgtatgtcaaaagaaactaattttctttgtccatacctaccatcactaatctgatgaatccatactaaccacaaatgactttcattcctataataaacctgtgaggtattcatagaaccatttttttacataagtggactgaatctcagaaaagtattgactaatttgcttaacattataaaactggtaaaatggaaactagaaccctttcaactccaggtataataacagcataataa

SEQ ID NO: 582361 - DNA, 417 bp, Homo sapiens
attacaattgcaacggccctatttgcaaataaggttacatgctgaaggttaggacttcaacctaagtttcttgggggcacataattcaattcataacataaayatttaaatactatactgattactagtgtataagttatggtacaatatagataaactgttcccaaaaggaaaaaaatgtatgtcaaaagaaactaattttctttgtccatacctaccatcactaatctgatgaatccatactaaccacaaatgactttcattcctataataaacctgtgaggtattcatagaaccatttttttacataagtggactgaatctcagaaaagtattgactaatttgcttaacattataaaactggtaaaatggaaactagaaccctttcaactccaggtataataacagcataataa

SEQ ID NO: 582362 - DNA, 541 bp, Homo sapiens
gaagaattattttggagtcacttgatgtggacatcattagaggaaagcagtccctggagaagtgattataattaaacctcttttttttctttttttttttcccctcttacacttgcaggctgagcaaacactgttggaaaggcaggaggatgatcttggtacccctaagcttaggttgccagaaaagtacaaaaatctgactgctgataattgcggagcagggacaagtacagcactagatttggaatatggtagtaataaaccaaagggaagggcttatccagaggtcgactagatttaaatcaataagagaatggaattttcattttaaaaatgtattatttatttattattttttgagacggagtcttgctctcttgcccaggctgraatgcaatggtgcgatctctgcttactgcaacctctgccttccaggttcaagtgatcctcctgtctcagcctcctaagtagctgagattacaggcatgcaccaccatgcccgactaatttttgtatttttagtagagactgggtttcacca

SEQ ID NO: 582363 - DNA, 481 bp, Homo sapiens
aacagcagcaattttaagattcaacctaatatttcacatcatcatgatgttgtagcctgtagcagagacactgttagttgcctgtccaacatccgttttyccctttttccctgttagtacttccatttaattcccatttaggaaggtagtaaatctcacttcagctaaatcatagaaatggaattccgacttcttttgcctgtgatgggtttagatttgggcatgtgataaagttctaggcccttgaggtgtcataaaagacagccagaggtttctgggaaaggtttttcttccactggatattttcaggtctagaattccagcggccaccttaccactacaaaggcagtaagcgtacagacaaaatgagcgtgctgaggagacacagaagaaaggaagttgggtcgcaatgatagtactgggctattatattaaacaactatgtaatcccccaaacttgcacttttgctgtgtgaaataa

SEQ ID NO: 582364 - DNA, 535 bp, Homo sapiens
ctagaggacagaagaggctcctgtcacctatctgctcctgcctggcccctcagaaggctggcagtcaggtggcagcagggtgtggacagatgagcaaactggggctgttgtccaatggtaaggaggtcagatcttcatgttcactgtgtagctcagtgtgagctgggcctcagtttcccctctgtgctgcagccctcatggggtgttacaagcaggagctaaactttagagaagagggcaaaatcaatctgattcaagttactagagggatgcactgttctgaccaaagcaaggcagggtcatatgtcacagaggcctcaaagagattaactgactccactctctgaggtaaccccacagttgaacccaactggctgaattcaactgccacccactctggctgagtcacaaaagcagcccttagatttcacaccttgtggatgtgtcgctgttgartgaagaatctcaatgcatccgaggtgcatatgcatgacatgtttgcatttttccagtaactgctacaacctgctctgta

SEQ ID NO: 582365 - DNA, 550 bp, Homo sapiens
ttggctcactgcaacctccacctcccaggttcaagcaattctcctgcctcagcctcctgagtagctgggattacaggcacacaccaagcctggctaatttttgtatttttagtagagayggggtttcaccacgttggccaggctggtcttgaactcctgacctcaggtgatccacccaccttggactcctaaagtgctgggattacaggcgtgagccactgtgcttggcctacaacatgtatttcttaaataacaagacttgaaaatcaaaattactccttgatctgtgaggtgcagaacggatgttgtgttagcaggcatgaaagcaacactaatcaccttgtacattgccatcagagttcttgggtgaccaggttgtcaatgagcagtagtgttttcaaaggtatcttttttatttttttattttttttctggaaagcaggtcttaacaatggacttaaaatattcagtaaaccatgctataaacagatgggctgtcatgcaggctttgttgttccattgacagagcatggtagggtagatttaatat

SEQ ID NO: 582366 - DNA, 419 bp, Homo sapiens
tttggagttttacatttacgtcttcaacaaatcttgagttgattatggtataaggaaggggtctaatttcagtcttttgcatatggctagccagttatcccaacatcatttattgtatarggagtccttaccccataacttgtttttgtcaactttgtcaaagattagatggttgtaggtgtacagcattatttctgggcttcctattccatttcactggtctatgttcatgtttttgtaccagtaccatgctgtttttgtgactgtagccctgtagtatagtttcacattgagtaacaagatgcctacagctttcttctttttgcttaggattgccttggttattcgggctcttacttggttccatatgaattttaaaattttctgtgaaatgacattctgtgaaaaatgtcattggt

SEQ ID NO: 582367 - DNA, 552 bp, Homo sapiens
gatccgccctctttggcctcccaaagtgctgggattacaggcatgagccaccacgcccagacaaattgatgttttatttgataaaatataggggtccagtttcattcttctgcaaataaatgtcagattttcccaggaccattttttgaagaaggtgtcttctcctcagtgtatgttcttggttgcctttgtcaaaaatccattagctgtaaatatgttaatttatttctgggttctctattctgttccattggtctatgtgtctctctttatacctatacaatgctattttggttaccatagacttgtatgtatttataagttggatagtgtgatacctccactttgttctttctgctcaggattgctctggctcttcaagatattttttggttctatacaaattttaggatttttttctatttctgtgaaaaatgacattggtcttttgatagggaacacattgaatctgtagattgctttrggtagtatggtcatttttagcaataccaattcttctaatccatgagcatggaatgtctttccatttgt

SEQ ID NO: 582368 - DNA, 500 bp, Homo sapiens
aataacttaacctctatgtcctgtgtcatcctctgtagaagaataataataaaagtaacatcaaaaattaacagatttaacctgtattatgttagtatttattgtttttaatatagatatgatttgaattctttagtatatagagaataaatttaaatttcagggccagaaagtctgtttttttcttaatatgaggaatatgtattttgtataggtttgacacaaatctctaccaatatctactgttctctaactctttaaattcactaaaagaatcccataatttgactgtaggttgatttctcaaattatttggtttgctagaagctgaacagtattgcccacagtagattaaamacctaggaataacctatcatagcatggccacttttcctgttcttgcatctaaaatctctctctctctttctctctctctctctctctctgtctgtctatgtttgtctatatatgttttttggttttttttttttttttttgag

SEQ ID NO: 582369 - DNA, 574 bp, Homo sapiens
tttcattagctattgccacaataatgctctctagaaaagcaccacaaaatttcagcagcacacagcaatagggttttatttttccctcatgagtttgctggttagctggtgcttctctgctttagactgtggggcagctcggtggctctgctcagtgtacttctctgtcttctgggaccgtgagctagctggggcatttgcttctcaggacgctggcagaggtgcaagagggcaaacagaacttatgagatctcttaccacctaagcttggaactgccagagtcccttttctctacatgtcattagccaaaggaaggcgcacagctaaacccaaagtcaaaaggcagggcagtgygctcttcacagcgagactctggcaagagcatgaatgtggatggggtgaaaaattgggatcaataatttatctactaagttaccccccttccctatacacacatttgccatgcttaataaatgatttaaaatatttttgagatatcgtggacttagcagttgacctgaaaacctgtaccctgtacgagatatgactcagctgtacccataccagctggtg

SEQ ID NO: 582370 - DNA, 525 bp, Homo sapiens
aaaactggacagacaatgagtttgacagattgacagaagttggcttcaagaaggtgggtaataaaaacctcttccaagctaaaggacattttctagcccaaagcaaggaagcaaggaagataagaaccttgacaaggaagataagaaccttgacaaaaggttacaggaactgctaactagaataaccagttaagagaagagcataaatgacctgaagaagctgaaaaacacagcatgagaccttcgtgaagygtacacaagtatcaattgctgaattgatccagcagaagaaaggatatcagagatcgaagatcaacttaatgaaaaaaagcatgaagacaagattagagaaaaaagactgaaaaggaacgaaacaagcctccaagaaatatgggactttgtgaaaagatcaagcctacgattggttggtgtacctgaaagtgacggggagaatggaaccaagaaggaaaacacacttcaggatattatccaggagaacttccccaaactagcaagacaggccaa

SEQ ID NO: 582371 - DNA, 525 bp, Homo sapiens
aaaactggacagacaatgagtttgacagattgacagaagttggcttcaagaaggtgggtaataaaaacctcttccaagctaaaggacattttctagcccaaagcaaggaagcaaggaagataagaaccttgacaaggaagataagaaccttgacaaaaggttacaggaactgctaactagaataaccagttaagagaagagcataaatgacctgaagaagctgaaaaacacagcatgagaccttcgtgaagtgtacacaagtatcaattgctgaattgatccagcagaagaaaggatatcagagatcgaagatcaacttaatgaaaaaaagcatgaagacaagattagagaaaaaagactgaaaaggaacgaaacaagcctccaagaaatatgggactttgtgaaaagatcaarcctacgattggttggtgtacctgaaagtgacggggagaatggaaccaagaaggaaaacacacttcaggatattatccaggagaacttccccaaactagcaagacaggccaa

SEQ ID NO: 582372 - DNA, 603 bp, Homo sapiens
gtgtatatatgtgtatatatatacgtatatatgtgtgtgtatatatatatacacacacatatacgtattatatatgtgtgtatatatatatatacacacacacatatatgtatatataaagcacttagaacagttcatggcacatactaagctatcagtaagtgtgtgatattattacagcatatatattaaagacttaacacagkgcctggctagggttaagtaagcactcaataaatgtttttgtttttgtttcttttttgagataggatttcactttgtcacccaggctggagtgcagtgatatgatctcagctcactgcaacctctgtttcctgggtgcaagcgatcctcccacctcagcctctgagtagcagggagccacaggtgtgtgccaccatgcctggctgatttttgtatttttgtagagatggtgttttgccatgttgcccaggttggtcttgaactcctgagctcaaatgatctgcccgccttggcctcccaaagttctgggattacaagcctaagccaccacgcctggcgaagccactgtgcttggcctttatgaagtttaatttatccattaacataatagcaagaaat

SEQ ID NO: 582373 - DNA, 213 bp, Homo sapiens
agacaggactttttaagtaaggagttctcctcttataaaaagcttagtctagcaaaatagagtaattcaaattttactttgtattttatgacgattttggcttttataatttttatgtatgcaatatataaaattaattgaagcaagaatgtctgttatatgattcattttatgtgakgcagttatacatataaataatagactattgtaata

SEQ ID NO: 582374 - DNA, 560 bp, Homo sapiens
ttgttttttgaaagagagtctcactctgacatccaatctggagtacagttgtgcaatctcaagtcayggcaatttccatcttctaggctcaaatgatcttcccacctaagcctcccaagtagctggggctacaggtgtgcacccccatgctcagctatttttttttgtatttttgggggtagagatggggttttgccatgttacccagagtggtcttgaactcttgggctcaagaagtctgtctgcctcagcctccaaaagtgctgagattacaggcctgaaccaccatgcttgaccaaaatattatatcacttctttatccttgcattccttggcagatttatgatctcaattcttgctctaaggtggccactaaccaatctgtgccaaagtgttaatcaataatatgtgtagtgttaatggcctaaattagcaattttccttggataatctacaggccactttcttagagaggtctctattaaaatgcaagaagatatttgctgagtagttacctcaaatctgtgcttagattccaaaaatattttccaaaacacaca

SEQ ID NO: 582375 - DNA, 505 bp, Homo sapiens
gatggtcaaggctacagtgagccaggattgcaccactgcattccagcctaggtgaaagagtgagaccctgtctcaaaaaaataaaaaataaataaataaaataaaatagaaataaaaataattttttaaaataccaaaatgaaagaggtaaaagaaaaatagtgttatttatctctgtggtagcttgcatgcactagtcatccagaccatgtgacatgccaatcataaagagggcaaagagctgatggtatgctccataatgggtaagttaaaaagagtaaaaaagttagaggtaaatatgattaaaattaatcaactgtattttttaacattatacaatgttaaatatcacatgattttcttatttgttgaactaagtgaataaagttgtyagaaataaagcatcaaggaaattgggggaaatatatttattgagtgcatattaggtgataatcacatgcttatcattgtgtttaaattttctagtttaatctacatggcaatc

SEQ ID NO: 582376 - DNA, 537 bp, Homo sapiens
ctgccttggcctcccaaagtgctgggattacaggcgtgaaccaccgcgcccggctgacccactttctaaaccagagcatgagtactctttgctgatttacatcctatattgaactgtgagcaatatttcatgggaaaacagaggttttctgctaaaatatgaagttagaaaaccactgatctggtggacaaggcactaaatctcagcatgaaaatgtttaaatttccatttctactgcccatttataatttaacttaaaataaccaaaccatgtctaaacacatgactgacaaacaaatgattccacattatcttgatcctagcttttaaactgtaaggaaagctatgtaaattgttctgttcargttgctgtgcatgcaacatccttcattccatgctgtgagtacaaaaatttaggaactatcctgtatgtactgatgtatgggttcccatgttttttctcctttgggaagcatagaaaaatatcattatcataataataattatagtatgttctgaagttgtgatatgcccttt

SEQ ID NO: 582377 - DNA, 570 bp, Homo sapiens
agcatggcacatgtatacatatgtaactaacctgcacaatgtgcacatgtaccctaaaacttaaagtataataaaaaataaaaaaaatttaaaaaaaaataagaattttagatgggtctataatatttatagtcatggtaacaataacattatgctttgggttttttaaactatgcattaaattacttatgcctaaaatggtttttggcctgtttctttgttttgttttggatgagtcttacatttctttctatttttgctatctatacagcagtggcggaataaaaatcatattcaccaacttggagttatrtaagacagagttttgactctagtccaaacctacgtgattttggttaagttactaaaccttcctgtacttgattttcctcatcaattaattggaacaagtaatatacaccacataaagtcactgggtaaattgaataaaaatgtataaaatctacaagaatgagctcacctttagaatgtgttaactaagatttaattccttatcttccctatttattctaccagtacatgtttattgaatttctgctttgagtttgg

SEQ ID NO: 582378 - DNA, 525 bp, Homo sapiens
gcatggcacatgtatacatatgtaactaacctgcacaatgtgcacatgtaccctaaaacttaaagtataataaaaaataaaaaaaatttaaaaaaaaataagaattttagatgggtctataatatttatagtcatggtaacaataacattatgctttgggttttttaaactatgcattaaattacttatgcctaaaatggtttttggcctgtttctttgttttgttttggatgagtcttacatttctttctatttttgctatctatacagcagtggcggaataaaaatcatattcaccaacttggagttatataagacagagttttgactctagtccaaacctacgtgattttggttaagttamtaaaccttcctgtacttgattttcctcatcaattaattggaacaagtaatatacaccacataaagtcactgggtaaattgaataaaaatgtataaaatctacaagaatgagctcacctttagaatgtgttaactaagatttaattccttatcttccctatt

SEQ ID NO: 582379 - DNA, 412 bp, Homo sapiens
ccaacagaatgtgaaatttgtgtgagagaaaaatcaatggaagagaaaagagtgtccagaaattgaccttcaaaaaacatacacaactgatattctaccaatttccaaatgtaattcagcggagaaaaatttagtctttacaaaaatagttctaaaattatcagatatatgtaagcaataggtacatttttaaataaaaactttgatctatatcttgtgctgtttacaaaaattaaaaccttgacctttggataggccaagttttcatagatacatcaaaagaagcacaatccataaaagaacaaactgataaattggacttcatcaaattaaaaaaacttctctttgacactgttaagacaatgaaagggaaaagccaaggatgaagtraaaaatttgcaaatcatatatc

SEQ ID NO: 582380 - DNA, 526 bp, Homo sapiens
gacaatttataataaaatcctgaaaatcaaaggtgaatagaaacctcttaatggccaaagttaatcaacacgtggcctcctaaggcataacaatcaaatttaaagatgacttcttatcagaaaaattggatgctagaagataataacttgacarctttaaagtggtaagcattaataattggcagcttagaattatataaccaataaaaatatcctccaaaaatacaggtgaaataaatgtttctatgtgaaaaggaaaaaaaaaatactgagataattctctccagtaacctctatgcaaaaagcaattccaaagtgagatcattagataaaaccaataaaaaattgtagcagttcaaaacacaaaattatgaaacggaataaagaaccatgaaaaggataaatatgtgggtgaatctaaaagtatattaaatatgtaatgcaataatatatatggtacataagttttaagtatatgcagaattaatattcagaaaaaacaatacaaaaataaaggagcctacat

SEQ ID NO: 582381 - DNA, 602 bp, Homo sapiens
gcctggccaggaagccatctttaacatcctgttgaatgattctgcatagcacatcaatcccttgaaatactttgctgtatcggcttgygattaatcagtatataaaactgaaggtaaaatgggaaatacatgggcttttgatgaaccaagccatagggtgataatgtctgtgtccttgaggaagcagactaagggttgtaagttctggtgggagtacctttggcaaagggagttcctgagtttctggatattatgctacttttaacttaaagatgcaatttatgatttatttttacttaaatctttccagaagatatttggcagtaaggataggatagcgtttgtgtgatactgatgacttagagagttattttgtaattgttcctgtaaggtatgcacattgctcacttgatgaagtacaaatgtcacaggtgggaaaatcagattaagcagactttatcaaatgtcatggctgtaatttttggcaagaaaatgcttcacatcaaccagaaaataaacagaaaacaagaaaacatattcaaatccagtgggagtctgaactctgtccttctctgttataagtacaaggttgttccacatcc

SEQ ID NO: 582382 - DNA, 602 bp, Homo sapiens
gcctggccaggaagccatctttaacatcctgttgaatgattctgcatagcacatcaatcccttgaaatactttgctgtatcggcttgtgattaatcagtatataaaactgaaggtaaaatgggaaatacatgggcttttgatgaaccaagccatagggtgataatgtctgtgtccttgaggaagcagactaagggttgtaagttctggtgggagtacctttggcaaagggagttcctgagtttctggatattatgctacttttaacttaaagatgcaatttatgatttatttttacttaaatctttccagaagatatttggcagtaaggataggatagcgtttgtgtgatactgatgacttagagagtyattttgtaattgttcctgtaaggtatgcacattgctcacttgatgaagtacaaatgtcacaggtgggaaaatcagattaagcagactttatcaaatgtcatggctgtaatttttggcaagaaaatgcttcacatcaaccagaaaataaacagaaaacaagaaaacatattcaaatccagtgggagtctgaactctgtccttctctgttataagtacaaggttgttccacatcc

SEQ ID NO: 582383 - DNA, 499 bp, Homo sapiens
tccaaattattcttcaggctccagggaatgaaatgcttttggactgtgaaagctaatagctctcccctcaggcagggctaagttatctggggaatgcagagttgtgttcatgaggaagatggcactattgtgtcttcttctgcattgccccatcacacgggtgaggaatttttgaaaccagtgaagtgtgagtgcacagtaagtgatgaagttatcatatatccatgaactttcattaataggccaaggmcttctacagatcactcatgcacaaatatccaaaatgtgtttttccattttttgatgtctagagaaaaatatctgttgaggaaacttcttcagcttacagagatctgcttaagtttgagatcccataggagagtgtctttgagtgaattccagtctattaattaaataggtccaaattctctctgttggagtagccttccaattgtgctgatttctttttttttattatactttaagttttagggtacat

SEQ ID NO: 582384 - DNA, 561 bp, Homo sapiens
gtgtcgctcacactgtgagctgtagactggagttgttccyattcggccattttggaaccacccctgagttttggtttcttgatagaacctggacaggtgggctgaggtgctgtgggacataaatggggaagagctggacccaatatccagaaccaagtaagcttttactcaccatgtggttttgtttctgagtttatggtttgaccagatgcagaagagtttgtccgggacttctgaggggtgaagaacttgaagggagaataataaaacttattagtcaaataaatgaaaatatcataattgtggatatgttcttgtgagtgggggtagctcagcagtgtgtgttcatccccagaaaagagaaaatcttgtctgctgtggaaagaagacatagtttttaacatatgtggttattattaacgacaactgagcctgggtactggatcatgttataatgctaaagggaagattcaatagaagaaagaatgtcatagcaaaaacaaaaaaattaagcatcaaagatttaaatgaaatgactttgaatattactagtaatgaaca

SEQ ID NO: 582385 - DNA, 561 bp, Homo sapiens
gtgtcgctcacactgtgagctgtagactggagttgttcctattcggccattttggaaccacccctgagttttggtttcttgatagaacctggacaggtgggctgaggtgctgtgggacataaatggggaagagctggacccaatatccagaaccaagtaagcttttactcaccatgtggttttgtttctgagtttatggtttgaccagatgcagaagagtttgtccgggacttctgaggggtgaagaacttgaagggagaataatawaacttattagtcaaataaatgaaaatatcataattgtggatatgttcttgtgagtgggggtagctcagcagtgtgtgttcatccccagaaaagagaaaatcttgtctgctgtggaaagaagacatagtttttaacatatgtggttattattaacgacaactgagcctgggtactggatcatgttataatgctaaagggaagattcaatagaagaaagaatgtcatagcaaaaacaaaaaaattaagcatcaaagatttaaatgaaatgactttgaatattactagtaatgaaca

SEQ ID NO: 582386 - DNA, 428 bp, Homo sapiens
aggatatagtgtatgattctytggacttttgtatatgattaaaattttccataacaaaatgtttctaaaaggaaaaacagagtaacagtgtatatttcatataggtgttatgggtattaaatgagatatgtaaaagtgcaatactgtctgggatacagaaggggttttgaaaagattattttcccttttattttctcttttaaaatacacctcccccacaacacacagaaaagacacacacacacacacacacacacacacacacacacacacaccaggagtcatccaaaaacagtctttgtgatgttctgcaagggttgaattgtcctagtaagggtttgtgaaagacttggatcttttttacattgaaatcaaaggctggtgtttttagacacacttcagagtcctggagccttgggtactggacc

SEQ ID NO: 582387 - DNA, 550 bp, Homo sapiens
tttgtatatgattaaaattttccataacaaaatgtttctaaaaggaaaaacagagtaacagtgtatatttcatataggtgttatgggtattaaatgagatatgtaaaagtgcaatactgtctgggatacagaaggggttttgaaaagattattttcccttttattttctcttttaaaatacacctcccccacaacacacagaaaagacacacacacacacacacacacacacacacacacacacacaccaggagtcatccaaaaacagtctttgtgatgttctgcaagggttgaattgtcctagtaagggtttgtgaaagacttggatcttttttacattgaaatcaaaggctggtgtttttagacacacttcagagtcctggagccttgggtactggaccttcctactttgggaaaataatcaactcctgagctctgtaaacaataaccagtatagaatagaaagcaggattctctgaagagaarccagagtccccagcatgtgggcagcacctgaagcgtgaccctcagactcagggagggaataagg

SEQ ID NO: 582388 - DNA, 492 bp, Homo sapiens
taaaattgaatgtaataataaagttccaagaagagcaagacaattatgcctttatcaaaccacattataaagctacaataattacaaaagtgtggtagagagaacttaggaacagttttgaaaatttatagaaacttggtatattactgagagggattacaaattaatggagaacaaaacagcacgcaattgatggtgttaggacaattggctatctatatgaaaaaaacacttcccccaacttccaattagattaaagacccaaatattgaaaatggaacttgaatatttttgaagaaatgtggaatatctttactacatcagtataggggggtgaatttcataaacatgacagaaaagcgtgaaatatatacacacacatagaaaaacaaatttyactatattcaaaattacaaacttctctccaggcatgatggctcatgcctgtaatcccagcactttgggaagctgaggtgggtggatcacttgagt

SEQ ID NO: 582389 - DNA, 208 bp, Homo sapiens
gcattagttaatagaaaactgatgctaacttctttaataataacattttaggttggrcaatgtgaaatggccatttttaaagcaaaagatggttaaaaactggcaatttcaaatgattcaacctctatattcttaagtatggtactgtaaattgccagtatatatacaatattccaacctgtagagctaaacacagaacctgtatatt

SEQ ID NO: 582390 - DNA, 208 bp, Homo sapiens
gcattagttaatagaaaactgatgctaacttctttaataataacattttaggttggacaatgtgaaatggccatttttaaagcaaaagatggttaaaaactggcaatttcaaatgattcaacctctatattcttaagtatggtaytgtaaattgccagtatatatacaatattccaacctgtagagctaaacacagaacctgtatatt

SEQ ID NO: 582391 - DNA, 221 bp, Homo sapiens
aaatgcttaactgtgaaacrtgaaattggaaaactactagaagaaaagataggtgaaaatcttcttgacattggtctgggccaagatatttttggatatgactgaaaagcataggcaacgaaagaaaaagtagacaaatgatactgtatcaaactaaaacgcttttgcacagcaaaggagatatttatagagtaaagagacaacctacagaatgggagaaa

SEQ ID NO: 582392 - DNA, 221 bp, Homo sapiens
aaatgcttaactgtgaaacatgaaattggaaaactactagaagaaaagataggtgaaaatcttcttgacattggtctgggccaagatatttttggatatgactgaaaagcataggcaacraaagaaaaagtagacaaatgatactgtatcaaactaaaacgcttttgcacagcaaaggagatatttatagagtaaagagacaacctacagaatgggagaaa

SEQ ID NO: 582393 - DNA, 221 bp, Homo sapiens
aaatgcttaactgtgaaacatgaaattggaaaactactagaagaaaagataggtgaaaatcttcttgacattggtctgggccaagatatttttggatatgactgaaaagcataggcaacgaaagaaaaagtagacaaatgatactgtatcaaactaaaacrcttttgcacagcaaaggagatatttatagagtaaagagacaacctacagaatgggagaaa

SEQ ID NO: 582394 - DNA, 574 bp, Homo sapiens
attcagctcttgcgtcatctggtccagggcttttccttgttggtagattttacattaatgatttgattttggaactcggtatttgtctatttaaggtttcaatctctttctawttcaatcttgggagattgtatgtttccaggaatttctccatttcctctagattatctaatttgtgtgcatagagttgtttatagtattctctgaggatcttttgtatttctgtgggattgtttgtaatgtcatctttgtcatttatgattgtacttatttggctcttctctttttttctttgtttagctatcaggctatccatcttgtttattttttgaaaaactaattattggtttcattgatcttttgtgtggatttttgcatctagtctaaaaaaacagcacctcaaaaagcacttcattcagtgcttctctaattttagatatttctcttctgccagctttggagttagtttattctttttttctagttcccttaactgcaaagtaggaaagttaatttgagatatttctaacttcttgatgaaggcatttcgtgtgtaaactttcctcttaacact

SEQ ID NO: 582395 - DNA, 530 bp, Homo sapiens
cagattttggtattaggctgatgctggcttcatagactgagttagggaggagcccctcatcctcagttctttggaatagtttcaatagaactagtaccagttctttgtacatctggtagaattcagctcttgcgtcatctggtccagggcttttccttgttggtagattttacattaatgatttgattttggaactcggtatttgtctatttaaggtttcaatctctttctaattcaatcttgggagattgtatgtttccaggaatttctccatttcctctagattatctaatttgtgtgcatagagttgtttatagtattctctgaggatcttttgtatttctgtgggattgtttgtaatgtcatctttgtcatttatgattgtacttatttggctcttctctttttttctttgtttagctatcaggctatccatcttgtttattttttgaaaaactaattattggtttcattgatcwtttgtgtggatttttgcatctagtctaaaaaaacagcacctcaaaaagcac

SEQ ID NO: 582396 - DNA, 574 bp, Homo sapiens
attcagctcttgcgtcatctggtccagggcttttccttgttggtagattttacattaatgatttgattttggaactcggtatttgtctatttaaggtttcaatctctttctaattcaatcttgggagattgtatgtttccaggaatttctccatttcctctagattatctaatttgtgtgcatagagttgtttatagtattctctgaggatcttttgtatttctgtgggattgtttgtaatgtcatctttgtcatttatgattgtacttatttggctcttctctttttttctttgtttagctatcaggctatccatcttgtttattttttgaaaaactaattattggtttcattgatcttttgtgtggatttttgcatctagtctaaaaaaacagcacytcaaaaagcacttcattcagtgcttctctaattttagatatttctcttctgccagctttggagttagtttattctttttttctagttcccttaactgcaaagtaggaaagttaatttgagatatttctaacttcttgatgaaggcatttcgtgtgtaaactttcctcttaacact

SEQ ID NO: 582397 - DNA, 574 bp, Homo sapiens
attcagctcttgcgtcatctggtccagggcttttccttgttggtagattttacattaatgatttgattttggaactcggtatttgtctatttaaggtttcaatctctttctaattcaatcttgggagattgtatgtttccaggaatttctccatttcctctagattatctaatttgtgtgcatagagttgtttatagtattctctgaggatcttttgtatttctgtgggattgtttgtaatgtcatctttgtcatttatgattgtacttatttggctcttctctttttttctttgtttagctatcaggctatccatcttgtttattttttgaaaaactaattattggtttcattgatcttttgtgtggatttttgcatctagtctaaaaaaacagcacctcaaaaagcacttcattcagtgcttctctaattttagwtatttctcttctgccagctttggagttagtttattctttttttctagttcccttaactgcaaagtaggaaagttaatttgagatatttctaacttcttgatgaaggcatttcgtgtgtaaactttcctcttaacact

SEQ ID NO: 582398 - DNA, 574 bp, Homo sapiens
attcagctcttgcgtcatctggtccagggcttttccttgttggtagattttacattaatgatttgattttggaactcggtatttgtctatttaaggtttcaatctctttctaattcaatcttgggagattgtatgtttccaggaatttctccatttcctctagattatctaatttgtgtgcatagagttgtttatagtattctctgaggatcttttgtatttctgtgggattgtttgtaatgtcatctttgtcatttatgattgtacttatttggctcttctctttttttctttgtttagctatcaggctatccatcttgtttattttttgaaaaactaattattggtttcattgatcttttgtgtggatttttgcatctagtctaaaaaaacagcacctcaaaaagcacttcattcagtgcttctctaattttagatatttctcttctgccagctttggagttagtttattctttttttctagttcccttaastgcaaagtaggaaagttaatttgagatatttctaacttcttgatgaaggcatttcgtgtgtaaactttcctcttaacact

SEQ ID NO: 582399 - DNA, 543 bp, Homo sapiens
gagatatttctaacttcttgatgaaggcatttcgtgtgtaaactttcctcttaacactgccttagctgcatcccagagattctggtatgttgtgtccctattttcattaattgyaaagaattttttttatttctgccttaatttagattttcacccaggagttattcaggagcaaattatgtaattaccatgtatttatgtagttttgagagatcttcttgatactgatttctatttttgtctcactgtggtcagagtgtgtgcttggtatgatttcaaactttttgaatttattgaggcttgctttatggccaagcatgtgcttgatcttataatatgttctgtgtgcacataagaatgtatcttctgtgtttgttgggcaaagtgttctgtagatgtctatcaggtccaattggtcaactgtcaagtgcgagtacagagtttgttagttttctgcctcaatgatctgtctattgctgtcagtgggttgttgaagtctcctgctgttattgtgtgtctaaatctttttgtaggccaagaaaa

SEQ ID NO: 582400 - DNA, 543 bp, Homo sapiens
gagatatttctaacttcttgatgaaggcatttcgtgtgtaaactttcctcttaacactgccttagctgcatcccagagattctggtatgttgtgtccctattttcattaattgcaaagaattttttttatttctgccttaatttagwttttcacccaggagttattcaggagcaaattatgtaattaccatgtatttatgtagttttgagagatcttcttgatactgatttctatttttgtctcactgtggtcagagtgtgtgcttggtatgatttcaaactttttgaatttattgaggcttgctttatggccaagcatgtgcttgatcttataatatgttctgtgtgcacataagaatgtatcttctgtgtttgttgggcaaagtgttctgtagatgtctatcaggtccaattggtcaactgtcaagtgcgagtacagagtttgttagttttctgcctcaatgatctgtctattgctgtcagtgggttgttgaagtctcctgctgttattgtgtgtctaaatctttttgtaggccaagaaaa

SEQ ID NO: 582401 - DNA, 543 bp, Homo sapiens
gagatatttctaacttcttgatgaaggcatttcgtgtgtaaactttcctcttaacactgccttagctgcatcccagagattctggtatgttgtgtccctattttcattaattgcaaagaattttttttatttctgccttaatttagattttcacccaggagttattcaggagcaaattatgtaattaccatgtatttatgtagttttgagagatcttcttgatactgatttctatttttgtctcactgtggtcagagtgtgtgcttggtatgatttcaaactttttgaatttattgaggcttgctttatggccaagcatgtgcttgatcttataatatgttctgtgtgcacataagaatgtatcttctgtgtttgttrggcaaagtgttctgtagatgtctatcaggtccaattggtcaactgtcaagtgcgagtacagagtttgttagttttctgcctcaatgatctgtctattgctgtcagtgggttgttgaagtctcctgctgttattgtgtgtctaaatctttttgtaggccaagaaaa

SEQ ID NO: 582402 - DNA, 161 bp, Homo sapiens
aagagcaaagacatggaatcaacctaaatgccagtcgatgatagattrgataaagaaaatatggtacatagagcgggacatctggcttctgagcgggaacctttgtagtgccagtgatgaaagagagaattaaatatgggtgatgctgagaaaggcaagaa

SEQ ID NO: 582403 - DNA, 161 bp, Homo sapiens
aagagcaaagacatggaatcaacctaaatgccagtcgatgatagattagataaagaaaatatggtacatagagygggacatctggcttctgagcgggaacctttgtagtgccagtgatgaaagagagaattaaatatgggtgatgctgagaaaggcaagaa

SEQ ID NO: 582404 - DNA, 161 bp, Homo sapiens
aagagcaaagacatggaatcaacctaaatgccagtcgatgatagattagataaagaaaatatggtacatagagcgggacatctggcttctgagcgggaacctttgtagtgccagtgatgaaagagagaattaaatatggstgatgctgagaaaggcaagaa

SEQ ID NO: 582405 - DNA, 483 bp, Homo sapiens
gtttgttacaccacgggatcaccaggaaaagaaagaaccaaagtgtccatgtaggttcatcatttgtaacttgctgatatgactctagtgcaggatgcagatagtggagaaggctgtgcctgtgttggacggggattcatgggagctctggtactttctgttcaagttcactgttatcctaagaccactctaaaataaaatttatgcaacaacagtagcagagacattcttggaagacatyttggacatttttcagaatcatacttagtcttaccatgtgatcaaataatcttgctcaaattattcatccatctaatttgaaaacttgttcacaataatatactcattgatatgattttattgatatggtttgactgtatccccacccaaatctcatcttgagttttaataattccaatgtgttaagggtggggtcaggtggatgtaattgaatcatgggggcggtttcccccatactgttct

SEQ ID NO: 582406 - DNA, 517 bp, Homo sapiens
cagaagaactcagctttatccactgctacttttctcccacacccaagccccaaacaaaacaaaacaaaacaaaacaaagatagtcatagactctaagctaaaagtgataggtgaatttactgaagtgcagccctaawcatgccatttccatgctcaaaatccatactatgtccccactgccaatggcaataaactaaacgtttcaacctggcactcaagagccactctttgacttttccaaccttctcttccgctgtgtgcatcacacatcccatactccaacacatttagactctgtgctctttcccagcctatggacacttgataccctcatgccattgctcatgccccttttcctagagtccctttcccttctcagcctgaagtagtctcttgctttttcaattcttagagccctttgtgtttcttttagggactacgtcactttgcatcattctctagttatttgaagtggtgacttctgtatcccctttaaaggcaaagcccgtggcttacc

SEQ ID NO: 582407 - DNA, 517 bp, Homo sapiens
cagaagaactcagctttatccactgctacttttctcccacacccaagccccaaacaaaacaaaacaaaacaaaacaaagatagtcatagactctaagctaaaagtgataggtgaatttactgaagtgcagccctaatcatgccatttccatgctcaaaatccatactatgtccccactgccaatggcaataaactaaacgtttcaacctggcactcaagagccacwctttgacttttccaaccttctcttccgctgtgtgcatcacacatcccatactccaacacatttagactctgtgctctttcccagcctatggacacttgataccctcatgccattgctcatgccccttttcctagagtccctttcccttctcagcctgaagtagtctcttgctttttcaattcttagagccctttgtgtttcttttagggactacgtcactttgcatcattctctagttatttgaagtggtgacttctgtatcccctttaaaggcaaagcccgtggcttacc

SEQ ID NO: 582408 - DNA, 554 bp, Homo sapiens
gtctggtacacagtcaacactataagcttttgtgaaatgatatcgctgtctagcaatatactctgtgacctaatgggtccctcaattagagggttgacttccatgtgaggcagaggaaaagaaaacagtaaatacaagttcctggaagaaatctgcaatgtctaaaaaagtacacttataagcctcatgattaggaagaaatgaaatcattttcataaaatgatttagaagcaactcaccktaggtccttattatagatatgacctatttaaaagacaggttatcttttaaggtctcatggaatacgaatgaagtaagaaagttcttccttacatatcaaaagggatttagatcactcttaccaataaaatataagcaataagaagcataaagattgtacgaatccaatttaaaacctcattggtaaacagacattaataaactggctaaggaaagcctactcaacacgtgtgaaaagcgggaaaaaaaattttaaataaatacataaaagcctacaacttctgtattgtgacaattttaataattttttccaa

SEQ ID NO: 582409 - DNA, 554 bp, Homo sapiens
gtctggtacacagtcaacactataagcttttgtgaaatgatatcgctgtctagcaatatactctgtgacctaatgggtccctcaattagagggttgacttccatgtgaggcagaggaaaagaaaacagtaaatacaagttcctggaagaaatctgcaatgtctaaaaaagtacacttataagcctcatgattaggaagaaatgaaatcattttcataaaatgatttagaagcaactcaccgtaggtccttattatagatatgacctatttaaaagacaggttatcttttaaggtctcatggaatacgaatgaagtaagaaagttcttccttacatatcaaaagggatttagatcactcttaccaataaaatataagcaataagaagcataaagattgtacgaatccaatttaaaacctcattggtaaacagacattaataaactggctaaggaaagmctactcaacacgtgtgaaaagcgggaaaaaaaattttaaataaatacataaaagcctacaacttctgtattgtgacaattttaataattttttccaa

SEQ ID NO: 582410 - DNA, 517 bp, Homo sapiens
cagaagaactcagctttatccactgctacttttctcccacacccaagccccaaacaaaacaaaacaaaacaaaacaaagatagtcatagactctaagctaaaagtgataggtgaatttactgaagtgcagccctaatcatgccatttccatgctcaaaatccatactatgtccccactgccaatggcaataaactaaacgtttcaacctggcactcaagagccactctttgacttttccaaccttctcttccgctgtgtgcatcacacatcccatactccaacacatttagactstgtgctctttcccagcctatggacacttgataccctcatgccattgctcatgccccttttcctagagtccctttcccttctcagcctgaagtagtctcttgctttttcaattcttagagccctttgtgtttcttttagggactacgtcactttgcatcattctctagttatttgaagtggtgacttctgtatcccctttaaaggcaaagcccgtggcttacc

SEQ ID NO: 582411 - DNA, 517 bp, Homo sapiens
cagaagaactcagctttatccactgctacttttctcccacacccaagccccaaacaaaacaaaacaaaacaaaacaaagatagtcatagactctaagctaaaagtgataggtgaatttactgaagtgcagccctaatcatgccatttccatgctcaaaatccatactatgtccccactgccaatggcaataaactaaacgtttcaacctggcactcaagagccactctttgacttttccaaccttctcttccgctgtgtgcatcacacatcccatactccaacacatttagactctgygctctttcccagcctatggacacttgataccctcatgccattgctcatgccccttttcctagagtccctttcccttctcagcctgaagtagtctcttgctttttcaattcttagagccctttgtgtttcttttagggactacgtcactttgcatcattctctagttatttgaagtggtgacttctgtatcccctttaaaggcaaagcccgtggcttacc

SEQ ID NO: 582412 - DNA, 571 bp, Homo sapiens
atatgtttacatatatatacacagatgctcatatatatattaaaggatatatacatgactactgatgttatttgggttagtgctaaagaatatatctatatatagatatgtatatatagatatatatacacacatttaaatatgcacatatgtagacatgtatatagatatgtgtatctatatctatatacacacaaatacatatttatatatctatatatattacatatatagctaaaagatatatctgtatatatacacacacacacatatacatgtgtgttatatgtgtgtgtgtgtgtgtgtgtagatagatcctttagcactgacccaaattaataatgtcagtagttttcaatgacaccaccattgaaaggtgagttatatcaaatatatatcaaattagtgaaagactactgatgtcattttatccgggccagtgctaacgattaaaaatgtacacttcaggtcaagtgacttcagagacatacttttctggttgaaattatgtacawttgctctacatttataaactggctgaatcctcaaaatgtgtatgtcaatgatttgg

SEQ ID NO: 582413 - DNA, 552 bp, Homo sapiens
ttacttcatttgtgaatgaattttaccaatcttaatatatgcctctcttctttctctccgtattttgaaatttcacccatcattgatgactctaccacacattactctttttaattcaatgaggtaatagctaaaggattaaaaatgaacatagcaagactccacatgttatcctagacttaattttctgayacaaattagcaataattattccacaatttataatctagttcccctgaaaaatggacattaatcagttatttatttgaaacatggtatttaatttttctctggaaacgaggttttagatgtttgtaatgaaatttttcggcctgtgaaaaaaacttaatgaatcaagtttatatacatttctttactcctaaacctaatccccaagttactgtttctggcaaaatttacataaaatcgtattcagtttgtatacacccaccttgctcgcccttgtaactttccgccttctcacgttcaaataccaccagtaactcttccccaatcatgggatgtctttcctgcccttcagatagggttaag

SEQ ID NO: 582414 - DNA, 552 bp, Homo sapiens
ttacttcatttgtgaatgaattttaccaatcttaatatatgcctctcttctttctctccgtattttgaaatttcacccatcattgatgactctaccacacattactctttttaattcaatgaggtaatagctaaaggattaaaaatgaacatagcaagactccacatgttatcctagacttaattttctgatacaaattagcaataattattccacaatttataatctagttcccctgaaaaayggacattaatcagttatttatttgaaacatggtatttaatttttctctggaaacgaggttttagatgtttgtaatgaaatttttcggcctgtgaaaaaaacttaatgaatcaagtttatatacatttctttactcctaaacctaatccccaagttactgtttctggcaaaatttacataaaatcgtattcagtttgtatacacccaccttgctcgcccttgtaactttccgccttctcacgttcaaataccaccagtaactcttccccaatcatgggatgtctttcctgcccttcagatagggttaag

SEQ ID NO: 582415 - DNA, 596 bp, Homo sapiens
tctgtaactgagtcatccctgattcaatcaaacacacatcatcctgggtataagtcttgggtgggtctaaaattacaaaatcccaagaatacaaatttaaactttcattttaaatttgactgattactgttccaaaatacccatrtcaagggaatgtgactgtagttctagaaaacaattatgtatctatgaaatgcatgaataattaacttcatgatacccaataaaaactaggaacaataggtcaaacttccttggattataggcagaaatgttacatgtttttaaaaaatggtcttcctgggctgggtgcgggggctcatgcctgtaatcccagcactctgggaggccgaggtggcaggcagatcacgaggtcaggagatcgagaccatcctggctaacacagtgaaactctgtctcttctaaaaatacaaaaaattagccgggcgtggtggcgggcacctgtaatcccagctatgcgggaggctgaggcaggagaattgcttgaacccgggaggcggaggttgcagtgagccaagatcgtgccactgcactccagcctgggcgacagggcgagactccgtctcaaaaaagtc

SEQ ID NO: 582416 - DNA, 427 bp, Homo sapiens
tcacctttttttttttaatctttgtggtttggtcactttctgtagtgacaaagtttgattcctttctctttctcatgtgtatgtctgcactacaggtgagttttacacgtttgtgttttttgacaatggtaatcatcctcttgcttccagatgtagaaccacctaaagcagtccttgtaaggtcagtctagtgggaatgaattccttcagtttgtgcttgtctaggaaatactttatttctccctcatttctaggggatagctctackaggtattgtattcttggttgacagttgtttttttttttccttcagtactttgaatatatcatcccatcttattgtctactgacctgtaaagtttccactgggaaatctactgctaatcaaatggagtttcccttatatgtgacttgatgcttttttctt

SEQ ID NO: 582417 - DNA, 427 bp, Homo sapiens
tcacctttttttttttaatctttgtggtttggtcactttctgtagtgacaaagtttgattcctttctctttctcatgtgtatgtctgcactacaggtgagttttacacgtttgtgttttttgacaatggtaatcatcctcttgcttccagatgtagaaccacctaaagcagtccttgtaaggtcagtctagtgggaatgaattccttcagtttgtgcttgtctaggaaatactttatttctccctcatttctaggggatagctctacgaggtatygtattcttggttgacagttgtttttttttttccttcagtactttgaatatatcatcccatcttattgtctactgacctgtaaagtttccactgggaaatctactgctaatcaaatggagtttcccttatatgtgacttgatgcttttttctt

SEQ ID NO: 582418 - DNA, 427 bp, Homo sapiens
tcacctttttttttttaatctttgtggtttggtcactttctgtagtgacaaagtttgattcctttctctttctcatgtgtatgtctgcactacaggtgagttttacacgtttgtgttttttgacaatggtaatcatcctcttgcttccagatgtagaaccacctaaagcagtccttgtaaggtcagtctagtgggaatgaattccttcagtttgtgcttgtctaggaaatactttatttctccctcatttctaggggatagctctacgaggtattgtattcttggttgacagttgtttttttttttccttcrgtactttgaatatatcatcccatcttattgtctactgacctgtaaagtttccactgggaaatctactgctaatcaaatggagtttcccttatatgtgacttgatgcttttttctt

SEQ ID NO: 582419 - DNA, 668 bp, Homo sapiens
aattatacaaaatgtcactaaatctaaaatgccattggtaatgacatacactttttaatgcactaatattaaataatgctgaaattaagttatgcttatctaatgtaagatacattgcagtttcagatactaaaatttgaacaagtagacaaacgtttctcttgaaatcagtgaaatctctatctaaatcccttagaatagggttagcacatagtattccaggaaagcaaagcwctaattattattgttggattgtacccagattatgttactatttaagtttctactttatgtaaagcactttttcatatggatattctttatcctaacaatagtccatttgttacaccagaagtaacaccagatacttctgaataataatggcagttaaatctgtggttttgtggaattttgcttatatacgtcactgttgattcaaacaatatagcagctctaagaacatctgtgcctccagcctctgcatttcaaccatgagagcgtcatttctctccatgatgcttaaattaaaaatctaaatatttggtaaattttacgcttttctagaatatgttttgttaatattatattctagtaaaaacaaaaaatgttcttagcctgagaaagattttacagaaaagctttagtaaacattacacttcataatgtac

SEQ ID NO: 582420 - DNA, 668 bp, Homo sapiens
aattatacaaaatgtcactaaatctaaaatgccattggtaatgacatacactttttaatgcactaatattaaataatgctgaaattaagttatgcttatctaatgtaagatacattgcagtttcagatactaaaatttgaacaagtagacaaacgtttctcttgaaatcagtgaaatctctatctaaatcccttagaatagggttagcacatagtattccaggaaagcaaagctctaattattattgttgkattgtacccagattatgttactatttaagtttctactttatgtaaagcactttttcatatggatattctttatcctaacaatagtccatttgttacaccagaagtaacaccagatacttctgaataataatggcagttaaatctgtggttttgtggaattttgcttatatacgtcactgttgattcaaacaatatagcagctctaagaacatctgtgcctccagcctctgcatttcaaccatgagagcgtcatttctctccatgatgcttaaattaaaaatctaaatatttggtaaattttacgcttttctagaatatgttttgttaatattatattctagtaaaaacaaaaaatgttcttagcctgagaaagattttacagaaaagctttagtaaacattacacttcataatgtac

SEQ ID NO: 582421 - DNA, 668 bp, Homo sapiens
aattatacaaaatgtcactaaatctaaaatgccattggtaatgacatacactttttaatgcactaatattaaataatgctgaaattaagttatgcttatctaatgtaagatacattgcagtttcagatactaaaatttgaacaagtagacaaacgtttctcttgaaatcagtgaaatctctatctaaatcccttagaatagggttagcacatagtattccaggaaagcaaagctctaattattattgttggattgtacccagattatgttactatttaagtttctactttatgtaaagcactttttcatatggatattctttatcctaacaatagtccatttgttacaccagaagtaacaccagatacttctgaataataatggcagttaaatctgtggttttgtggaattttgcttatatacgtcactgttgattcaaacaatatagcagctctaagaacatctgtgcctccagcctctgcatttyaaccatgagagcgtcatttctctccatgatgcttaaattaaaaatctaaatatttggtaaattttacgcttttctagaatatgttttgttaatattatattctagtaaaaacaaaaaatgttcttagcctgagaaagattttacagaaaagctttagtaaacattacacttcataatgtac

SEQ ID NO: 582422 - DNA, 565 bp, Homo sapiens
tagtgcaaatgtgctaataatgaatcagctcagtatttgttctgaaaagtctttttctttttggaagacatttttgctggttaaagacttctaggttggcaaaaatgtttttaagtactttaaagaacagctctatagttcctggccatttttttcttacttacatagattcgatgaggagtctgcagtattcttgattgtatgtagtgggttttcccctcatgagctgttctgcccctctctctcggttctcttcttctggcactccaattacatatacaktcaactccttgacgctttcccaagtgcagtgctggagactgaagatttaactgcagtgagcttggactgtgaggattgaagcagagccaaaaactgacagacagtttgtaatcattgcagatgtttgctgaacaattgcaaggtagcaggcactattctacttttcacctgtagaattctgacttatcctcaagatttatcttgaaattttccagaaagccttcctataccatcctttctcaccctaacctctacctcacctctcacactaggttaggtagcc

SEQ ID NO: 582423 - DNA, 565 bp, Homo sapiens
tagtgcaaatgtgctaataatgaatcagctcagtatttgttctgaaaagtctttttctttttggaagacatttttgctggttaaagacttctaggttggcaaaaatgtttttaagtactttaaagaacagctctatagttcctggccatttttttcttacttacatagattcgatgaggagtctgcagtattcttgattgtatgtagtgggttttcccctcatgagctgttctgcccctctctctcggttctcttcttctggcactccaattacatatacagtcaactccttgacgctttcccaagtgcagtgctggagactgaagatttaactgcagtgagcttggactgtgaggattgaagcagagccaaaaactgacagacagttwgtaatcattgcagatgtttgctgaacaattgcaaggtagcaggcactattctacttttcacctgtagaattctgacttatcctcaagatttatcttgaaattttccagaaagccttcctataccatcctttctcaccctaacctctacctcacctctcacactaggttaggtagcc

SEQ ID NO: 582424 - DNA, 504 bp, Homo sapiens
gagatcctgtgcagaaacaaaagaagaaaaaaagagatgtgaaagcctatatattgaagactaccaagtactgcttagagcagttaaagacctttggaatagaaaatgtttcttcttgcatttcaagattgcttttgttttggggggacacactattttttaggaatatgaagttcttcttaggcattcctgtaaaaaaggccacttcttgataggattgtattgaatctgtgggttgctttgagttgtatttttatcttaaccatgttacaacttccaacccatggacacaagatgtctgtccattgatttaggtcttcctgaatctcctcgagcaatgttctgtagttgtctgtgtacaagtackgcaccttcttgaacaaatttattcccaggcatattattcttacaagtgctattataaatgaaatcattgtgtcaattttcttctcagattgttcattgctaacacaactgattgtttactgaaagtttgctgaattc

SEQ ID NO: 582425 - DNA, 619 bp, Homo sapiens
tccctacaaaggacatgaactcatccttttttatggctgcatagtattccatggtgtatatgtgccacattttcttaatccagtctatcattgttggacatttgggttggttccaagtctttgctattgtgaatagtgccgcaataaacatacgtgtgcatgtgtctttatagcagcatgatttatagtcctttgggtacatacccagtaatgggatggctgggtcaaatggtatttctaattctagatagaatgtttcctcttataactcatagtgaatatgactggacaatgaaactattttgtaatttctttcctgaaagataaaggcgttagaacatagaatctttcaytgattctacagaatcttaagactccttcagagatggcagtcattcctaccgtgctgaacatcatgttgtcacggtcagaatcagaactaaattgattaagggtctgaaacagtttggcactcttgggcacttattctgataagaaagctgatgagacagggtaatgaaaagaggctgcaagaaatgaccattcatgcattcagccaacatttaggccaccctcctgtattccaggcactgtacgtggcactgagaatgcaaagcaa

SEQ ID NO: 582426 - DNA, 551 bp, Homo sapiens
ttccatgcagtcgccatgagaatagagtttttgaagtctggtccacctacagtaggttagtaaatgataaggggaggaagaaatggaaacctaaatatctactgcaatgaaaaccaacagcaatgttagtaggaataattcaggcttgcttgaaaagatgtaatcgataatgtcagcccgctctgttttccctgaaccaggagtctccagatgtcaacacagaagtagctgttcacaattgctcagttacctggggcatggtgggccttggtcttcttcctcttcttggtcctttttaattcctgcaatacattcagacagggacagacaaaataagccaattcacctacacccataacagtccactgtctaatccccacacagggatctcaggctcctcagcatgagcacaggacaatgtgasagatatacttcaggaagcctgaaagctggtcatgatattctttggtttgcatctcagaaccaagggtgaaatatccccattctggtagatcgttatcccaaaatcatttatcccaagtttgtgcaaa

SEQ ID NO: 582427 - DNA, 485 bp, Homo sapiens
agaataagccagggggaatcagaaaccacacagccccagctagatttcatggctaacataaggaactgtttaaaaagaaaaaggacagatccattaatgaggtaatgaattattgcctttakgttgggatagaccagggtcaggtggaaaagaatgaaagagaaagacagggagagggagagagagagagaggagaaagtgagctcagcgaattggccgggtgacacactgatgaaggggtcaaaggacactctgagttagtgccctcgggacacacagcgaacagtgatcatgaaaagagtgggctcaataattttccataaacttgctcaagattccatgcagttgccatacagcctttgaggtatggtcaacctatagtaagttagtaaatgataaggggaggaagaaatggaaacctaaacatctactgcaatgaaaaccaacagcaatggcagtaggagtaattcaacctccgttgaaaa

SEQ ID NO: 582428 - DNA, 536 bp, Homo sapiens
gaggagaaagtgagctcagcgarttggccgggtgacacactgatgaaggggtcaaaggacactctgagttagtgccctcgggacacacagcgaacagtgatcatgaaaagagtgggctcaataattttccataaacttgctcaagattccatgcagttgccatacagcctttgaggtatggtcaacctatagtaagttagtaaatgataaggggaggaagaaatggaaacctaaacatctactgcaatgaaaaccaacagcaatggcagtaggagtaattcaacctccgttgaaaacatgaaattgaacacactcttgttttccctggacctggcatctccaggtgtcaacacagaattaagcatccataattgctcaaagttacctggggcatgatgggtcttggtcttcttccacttcttggtacttttcaatttctgcaataagttcagacatggacagtcatattaagctggttctcctacacacataacaatccactgtctaatcctcacacagggacttcaggctcctca

SEQ ID NO: 582429 - DNA, 474 bp, Homo sapiens
taggttgggatagaccagggtcaggtggaaaagaatgaaagagaaagacagggagagggagagagagagagaggagaaagtgagctcagcgaattggccgggtgacacactgatgaaggggtcaaaggacactctgagttagtgccctcgggacacacagcgaacagtgatcaygaaaagagtgggctcaataattttccataaacttgctcaagattccatgcagttgccatacagcctttgaggtatggtcaacctatagtaagttagtaaatgataaggggaggaagaaatggaaacctaaacatctactgcaatgaaaaccaacagcaatggcagtaggagtaattcaacctccgttgaaaacatgaaattgaacacactcttgttttccctggacctggcatctccaggtgtcaacacagaattaagcatccataattgctcaaagttacctggggcatgatgggtctt

SEQ ID NO: 582430 - DNA, 474 bp, Homo sapiens
taggttgggatagaccagggtcaggtggaaaagaatgaaagagaaagacagggagagggagagagagagagaggagaaagtgagctcagcgaattggccgggtgacacactgatgaaggggtcaaaggacactctgagttagtgccctcgggacacacagcgaacagtgatcatgaaaagagtgggctcaataattttccataaacttgctcaagattccatgcagttgccatacagcctttgaggtatggtcaacctatagtaagtkagtaaatgataaggggaggaagaaatggaaacctaaacatctactgcaatgaaaaccaacagcaatggcagtaggagtaattcaacctccgttgaaaacatgaaattgaacacactcttgttttccctggacctggcatctccaggtgtcaacacagaattaagcatccataattgctcaaagttacctggggcatgatgggtctt

SEQ ID NO: 582431 - DNA, 474 bp, Homo sapiens
taggttgggatagaccagggtcaggtggaaaagaatgaaagagaaagacagggagagggagagagagagagaggagaaagtgagctcagcgaattggccgggtgacacactgatgaaggggtcaaaggacactctgagttagtgccctcgggacacacagcgaacagtgatcatgaaaagagtgggctcaataattttccataaacttgctcaagattccatgcagttgccatacagcctttgaggtatggtcaacctatagtaagttagtaaatgataaggggaggaagaaatggaaacctaaacatctactgcaatgaaaaccaacagcaatgkcagtaggagtaattcaacctccgttgaaaacatgaaattgaacacactcttgttttccctggacctggcatctccaggtgtcaacacagaattaagcatccataattgctcaaagttacctggggcatgatgggtctt

SEQ ID NO: 582432 - DNA, 602 bp, Homo sapiens
tacagcctttgaggtatggtcaacctatagtaagttagtaaatgataaggggaggaagaaatggaaacctaaacatctactgcaatgaaaaccaacagcaatggcagtaggagtaattcaacctycgttgaaaacatgaaattgaacacactcttgttttccctggacctggcatctccaggtgtcaacacagaattaagcatccataattgctcaaagttacctggggcatgatgggtcttggtcttcttccacttcttggtacttttcaatttctgcaataagttcagacatggacagtcatattaagctggttctcctacacacataacaatccactgtctaatcctcacacagggacttcaggctcctcagcatgagaataggacactgtgagagatagccttcaggaggcctgaaggctgatcaccatagaggttccttggtttttgtcccagaaactgtgggtaaaattccctattctggtagaccgttatcccaatatcatttgtcccaagtttgtgcaaatggttatgccatatttttccaatcgatttaaagcaaatgcccccaaatggttgctaggagaaaaactgcactat

SEQ ID NO: 582433 - DNA, 580 bp, Homo sapiens
agcaatggcagtaggagtaattcaacctccgttgaaaacatgaaattgaacacactcttgttttccctggacctggcatctccaggtgtcaacacagaattaagcatccataattgctcaaagttacctggggcatgatgggtcttggtcttcttccacttcttggtacttttcaatttctgcaataagttcagacatggacagwcatattaagctggttctcctacacacataacaatccactgtctaatcctcacacagggacttcaggctcctcagcatgagaataggacactgtgagagatagccttcaggaggcctgaaggctgatcaccatagaggttccttggtttttgtcccagaaactgtgggtaaaattccctattctggtagaccgttatcccaatatcatttgtcccaagtttgtgcaaatggttatgccatatttttccaatcgatttaaagcaaatgcccccaaatggttgctaggagaaaaactgcactattcagccctgtctcatcaaatactcagattgttcatggtagcgaggattttagacgctgaaattagagtgaagga

SEQ ID NO: 582434 - DNA, 580 bp, Homo sapiens
agcaatggcagtaggagtaattcaacctccgttgaaaacatgaaattgaacacactcttgttttccctggacctggcatctccaggtgtcaacacagaattaagcatccataattgctcaaagttacctggggcatgatgggtcttggtcttcttccacttcttggtacttttcaatttctgcaataagttcagacatggacagtcatatkaagctggttctcctacacacataacaatccactgtctaatcctcacacagggacttcaggctcctcagcatgagaataggacactgtgagagatagccttcaggaggcctgaaggctgatcaccatagaggttccttggtttttgtcccagaaactgtgggtaaaattccctattctggtagaccgttatcccaatatcatttgtcccaagtttgtgcaaatggttatgccatatttttccaatcgatttaaagcaaatgcccccaaatggttgctaggagaaaaactgcactattcagccctgtctcatcaaatactcagattgttcatggtagcgaggattttagacgctgaaattagagtgaagga

SEQ ID NO: 582435 - DNA, 611 bp, Homo sapiens
cctccgttgaaaacatgaaattgaacacactcttgttttccctggacctggcatctccaggtgtcaacacagaattaagcatccataattgctcaaagttacctggggcatgatgggtcttggtcttcttccacttcttggtacttttcaatttctgcaataagttcagacatggacagtcatattaagctggttctcctacacacataacaatccactgtctaatcctcacacagggacttcaggctcctcagcatgagaataggacactgtgagagatakccttcaggaggcctgaaggctgatcaccatagaggttccttggtttttgtcccagaaactgtgggtaaaattccctattctggtagaccgttatcccaatatcatttgtcccaagtttgtgcaaatggttatgccatatttttccaatcgatttaaagcaaatgcccccaaatggttgctaggagaaaaactgcactattcagccctgtctcatcaaatactcagattgttcatggtagcgaggattttagacgctgaaattagagtgaaggatgaaatctacaagatctacaaaattgagacaaaatcagagttgtgtgaatttgtca

SEQ ID NO: 582436 - DNA, 602 bp, Homo sapiens
tacagcctttgaggtatggtcaacctatagtaagttagtaaatgataaggggaggaagaaatggaaacctaaacatctactgcaatgaaaaccaacagcaatggcagtaggagtaattcaacctccgttgaaaacatgaaattgaacacactcttgttttccctggacctggcatctccaggtgtcaacacagaattaagcatccataattgctcaaagttacctggggcatgatgggtcttggtcttcttccacttcttggtacttttcaatttctgcaataagttcagacatggacagtcatattaagctggttctcctacacacataacaatccactgtctaatcctcacacagggacttcaggctcctcagcatgagaataggacactgtgagagatagycttcaggaggcctgaaggctgatcaccatagaggttccttggtttttgtcccagaaactgtgggtaaaattccctattctggtagaccgttatcccaatatcatttgtcccaagtttgtgcaaatggttatgccatatttttccaatcgatttaaagcaaatgcccccaaatggttgctaggagaaaaactgcactat

SEQ ID NO: 582437 - DNA, 611 bp, Homo sapiens
cctccgttgaaaacatgaaattgaacacactcttgttttccctggacctggcatctccaggtgtcaacacagaattaagcatccataattgctcaaagttacctggggcatgatgggtcttggtcttcttccacttcttggtacttttcaatttctgcaataagttcagacatggacagtcatattaagctggttctcctacacacataacaatccactgtctaatcctcacacagggacttcaggctcctcagcatgagaataggacactgtgagagatagccttcaggaggcctgaaggctgatcaccatagagrttccttggtttttgtcccagaaactgtgggtaaaattccctattctggtagaccgttatcccaatatcatttgtcccaagtttgtgcaaatggttatgccatatttttccaatcgatttaaagcaaatgcccccaaatggttgctaggagaaaaactgcactattcagccctgtctcatcaaatactcagattgttcatggtagcgaggattttagacgctgaaattagagtgaaggatgaaatctacaagatctacaaaattgagacaaaatcagagttgtgtgaatttgtca

SEQ ID NO: 582438 - DNA, 602 bp, Homo sapiens
tacagcctttgaggtatggtcaacctatagtaagttagtaaatgataaggggaggaagaaatggaaacctaaacatctactgcaatgaaaaccaacagcaatggcagtaggagtaattcaacctccgttgaaaacatgaaattgaacacactcttgttttccctggacctggcatctccaggtgtcaacacagaattaagcatccataattgctcaaagttacctggggcatgatgggtcttggtcttcttccacttcttggtacttttcaatttctgcaataagttcagacatggacagtcatattaagctggttctcctacacacataacaatccactgtctaatcctcacacagggacttcaggctcctcagcatgagaataggacactgtgagagatagccttcaggaggcctgaaggctgatcaccatagaggttccttggtttttgtcccagaaactgtgggtaaaattccctattctggtagaycgttatcccaatatcatttgtcccaagtttgtgcaaatggttatgccatatttttccaatcgatttaaagcaaatgcccccaaatggttgctaggagaaaaactgcactat

SEQ ID NO: 582439 - DNA, 580 bp, Homo sapiens
agcaatggcagtaggagtaattcaacctccgttgaaaacatgaaattgaacacactcttgttttccctggacctggcatctccaggtgtcaacacagaattaagcatccataattgctcaaagttacctggggcatgatgggtcttggtcttcttccacttcttggtacttttcaatttctgcaataagttcagacatggacagtcatattaagctggttctcctacacacataacaatccactgtctaatcctcacacagggacttcaggctcctcagcatgagaataggacactgtgagagatagccttcaggaggcctgaaggctgatcaccatagaggttccttggtttttgtcccagaaactgtgggtaaaattccctattctggtagaccgttatcccaatatcatttgtcccaagtttgtgcaaatggttatgccatatttttccaatcgatttaaagcaaatrcccccaaatggttgctaggagaaaaactgcactattcagccctgtctcatcaaatactcagattgttcatggtagcgaggattttagacgctgaaattagagtgaagga

SEQ ID NO: 582440 - DNA, 609 bp, Homo sapiens
ctgcactattcagccctgtctcatcaaatactcagattgttcatggtagcgaggatttyagacgctgaaattagagtgaaggatgaaatctacaagatctacaaaattgagacaaaatcagagttgtgtgaatttgtcacatctgcccaggtccaatgtcatgagagtaggattagggcgccacaggcatggcctgagactaggaagagagccttgctcactgacccatcccttgtctgggcttccaagtggaactagagtttcattcaacgtacatgtgcctataggtcctccctgtggcaatgacatctctcagctcagtaagggccacttgcagtaggaatatgaccctaaccagaagactcagtggatccttatcaccttcatagaaaggtactcaccatccatgtcaacagccaagccaacacgctgttgctccaatacgtaaaaggcacttctgtagggctggcatgagtcagtcagttcaagacaacctgaaggagttgaataacatctatccagtgagtcctgcaagacttcaggccctttctcatccagcagctccctgctgagcctggaaaagtgggaaaaagtaaagaataagccagg

SEQ ID NO: 582441 - DNA, 462 bp, Homo sapiens
cttgtctgggcttccaagtggaactagagtttcaytcaacgtacatgtgcctataggtcctccctgtggcaatgacatctctcagctcagtaagggccacttgcagtaggaatatgaccctaaccagaagactcagtggatccttatcaccttcatagaaaggtactcaccatccatgtcaacagccaagccaacacgctgttgctccaatacgtaaaaggcacttctgtagggctggcatgagtcagtcagttcaagacaacctgaaggagttgaataacatctatccagtgagtcctgcaagacttcaggccctttctcatccagcagctccctgctgagcctggaaaagtgggaaaaagtaaagaataagccagggggaatcagaaaccacacagccccagctagatttcatggctaacataaggaagagtttgaaaagaaaaaggacagatccattaa

SEQ ID NO: 582442 - DNA, 609 bp, Homo sapiens
ctgcactattcagccctgtctcatcaaatactcagattgttcatggtagcgaggattttagacgctgaaattagagtgaaggatgaaatctacaagatctacaaaattgagacaaaatcagagttgtgtgaatttgtcacatctgcccaggtccaatgtcatgagagtaggattagggcgccacaggcatggcctgagactaggaagagagccttgctcactgacccatcccttgtctgggcttccaagtggaactagagtttcattcaacstacatgtgcctataggtcctccctgtggcaatgacatctctcagctcagtaagggccacttgcagtaggaatatgaccctaaccagaagactcagtggatccttatcaccttcatagaaaggtactcaccatccatgtcaacagccaagccaacacgctgttgctccaatacgtaaaaggcacttctgtagggctggcatgagtcagtcagttcaagacaacctgaaggagttgaataacatctatccagtgagtcctgcaagacttcaggccctttctcatccagcagctccctgctgagcctggaaaagtgggaaaaagtaaagaataagccagg

SEQ ID NO: 582443 - DNA, 599 bp, Homo sapiens
tttcattcaacgtacatgtgcctataggtcctccctgtggcaatgacatctctcagctcagtaagggccacttgcagtaggaatatgaccctaaccagaagactcagtggatccttatcaccttcatagaaaggtactcaccatccatgtcaacagccaagccaacacgctgttgctccaatacgtaaaaggcacttctgtagggctggcatgagtcagtcagttcaagacaacctgaaggagttgaatarcatctatccagtgagtcctgcaagacttcaggccctttctcatccagcagctccctgctgagcctggaaaagtgggaaaaagtaaagaataagccagggggaatcagaaaccacacagccccagctagatttcatggctaacataaggaagagtttgaaaagaaaaaggacagatccattaatgaggtaacaaattattgcctttatgttgggatagactagggccaggtagaaaaggatgaaagagaaagacacacacacacacacacacagacacagacacacacacacacagagcgagctgagtgaattggtcaggtgacacactgatgagggagtcaaaggaca

SEQ ID NO: 582444 - DNA, 599 bp, Homo sapiens
tttcattcaacgtacatgtgcctataggtcctccctgtggcaatgacatctctcagctcagtaagggccacttgcagtaggaatatgaccctaaccagaagactcagtggatccttatcaccttcatagaaaggtactcaccatccatgtcaacagccaagccaacacgctgttgctccaatacgtaaaaggcacttctgtagggctggcatgagtcagtcagttcaagacaacctgaaggagttgaataacatctatccagtgagtcctgcaagacttcaggccctttctcatccagcagctccctgctgagcctggaaaagtgggaaaaagtaaagaataagccagggggaatcagaaaccacacagccccagctagatttcatggctaacrtaaggaagagtttgaaaagaaaaaggacagatccattaatgaggtaacaaattattgcctttatgttgggatagactagggccaggtagaaaaggatgaaagagaaagacacacacacacacacacacagacacagacacacacacacacagagcgagctgagtgaattggtcaggtgacacactgatgagggagtcaaaggaca

SEQ ID NO: 582445 - DNA, 599 bp, Homo sapiens
tttcattcaacgtacatgtgcctataggtcctccctgtggcaatgacatctctcagctcagtaagggccacttgcagtaggaatatgaccctaaccagaagactcagtggatccttatcaccttcatagaaaggtactcaccatccatgtcaacagccaagccaacacgctgttgctccaatacgtaaaaggcacttctgtagggctggcatgagtcagtcagttcaagacaacctgaaggagttgaataacatctatccagtgagtcctgcaagacttcaggccctttctcatccagcagctccctgctgagcctggaaaagtgggaaaaagtaaagaataagccagggggaatcagaaaccacacagccccagctagatttcatggctaacataaggaagagtttgaaaagaaaaaggacagatccattaatgaggtaacaaattattgcctttatgttgggatagactagggccaggtagaaaaggatgaaagagaaagacacacacacacacacacacasacacagacacacacacacacagagcgagctgagtgaattggtcaggtgacacactgatgagggagtcaaaggaca

SEQ ID NO: 582446 - DNA, 599 bp, Homo sapiens
tttcattcaacgtacatgtgcctataggtcctccctgtggcaatgacatctctcagctcagtaagggccacttgcagtaggaatatgaccctaaccagaagactcagtggatccttatcaccttcatagaaaggtactcaccatccatgtcaacagccaagccaacacgctgttgctccaatacgtaaaaggcacttctgtagggctggcatgagtcagtcagttcaagacaacctgaaggagttgaataacatctatccagtgagtcctgcaagacttcaggccctttctcatccagcagctccctgctgagcctggaaaagtgggaaaaagtaaagaataagccagggggaatcagaaaccacacagccccagctagatttcatggctaacataaggaagagtttgaaaagaaaaaggacagatccattaatgaggtaacaaattattgcctttatgttgggatagactagggccaggtagaaaaggatgaaagagaaagacacacacacacacacacacagacacagacacacacacacacagagcgagctsagtgaattggtcaggtgacacactgatgagggagtcaaaggaca

SEQ ID NO: 582447 - DNA, 552 bp, Homo sapiens
aggggaggaagaaatggaaacctaaacatctactgcaatgaaaaccaacagcaatgacagtaggagtaattcagccttcgttgaaaacatgwcatcaaacacactctggtttccctgaatctgttgcctccaggtgttaacacagaattaagcatccacaattgctgaaagtcacctggggcatggtggggtttgatcttcttccccttcttttcttccccttcttctttccttctttgatcttcttccccttcttttcttccccttccccttcttttcaatttctgcaataaattcagacatggacagacacattaagctgattcccctacacacataacaatccactgtctaatcctcacacagggacctcaggctcctcagcataagaataggacactgtgagagatatatttcaggaggcctgaaggctggtcatgatagaaattcctcggtttttctcccagaaactgtgggtaaaatgtccctattctagtagatcgttatcccaatatcatttgtcccaagtttgtgcaaacagttacgccatat

SEQ ID NO: 582448 - DNA, 552 bp, Homo sapiens
aggggaggaagaaatggaaacctaaacatctactgcaatgaaaaccaacagcaatgacagtaggagtaattcagccttcgttgaaaacatgtcatcaaacacactctggtttccctgaatctgttgcctccaggtgttaacacagaattaagcatccacaattgctgaaagtcacctggggcatggtggggtttgatcttcttccccttcttttcttccccttcttctttccttctttgatcttcttccccttcttttcttccccttccccttcttttcaatttctgcaataaattcagacatggacagacacattaagctgattcccctacacacataacaatccactgtctaatcctcacacagggacctcaggctcctcagcataagaataggacacygtgagagatatatttcaggaggcctgaaggctggtcatgatagaaattcctcggtttttctcccagaaactgtgggtaaaatgtccctattctagtagatcgttatcccaatatcatttgtcccaagtttgtgcaaacagttacgccatat

SEQ ID NO: 582449 - DNA, 580 bp, Homo sapiens
cacctggggcatggtggggtttgatcttcttccccttcttttcttccccttcttctttccttctttgatcttcttccccttcttttcttccccttccccttcttttcaatttctgcaataaattcagacatggacagacacattaagctgattcccctacacacataacaatccactgtctaatcctcacacagggacctcaggctcctcagcataagaataggacactgtgagagatatatttcaggaggcctgaaggctggtcatgatagaaattcctcggtttttctcccagaaactgtgggtaaaatgtccctattctagtagatcgttatcccaatatcatttgtcccaagtttgtgcaaacagttaygccatatttttccaatcaacttaaagcaaataccctcaaatgatttctaggagaaaaactgcaatatttagccctgtctcatcaaatactcagattgttcatggttgtgaggactttagacactgaaattagagtgaaaaaggaaatctacaaacccttgagtcaaaatcatagttctctgaatttgtcacatctgcccaggtccaa

SEQ ID NO: 582450 - DNA, 566 bp, Homo sapiens
aatttgtcacatctgcccaggtccaatgtcatgagaataggatcagggcgccacaggtatggcctgagactaggaagagagtcttgctcactgacccatcccttgtctgggcttccaggtagaactagagtttcattcaacctacatgtgcctataggtcctccctgtggcaatgacatctctcagctcagtaatggccacttggagcaggaatatgatctttatatggragactcagtggatccttatcaccttcatagaaaggtactcacctcccacgtcaagagaaaagccaacatgtttttcctccaatgcataaaaggaacttccatagggctggcaggagtcaggctgttcaagacaactggaaggagttgaataacatctatccagtgagtcctgcaagacttcaggctctactacctccagcagctccctgctgagcctggaaaaggaggaaaaagtaaagaataagccaggggaaatcagacacaacagagccccaactaggtttcatgggtagcatagggaagtggttaaaaaactaaaaggatagatccattaat

SEQ ID NO: 582451 - DNA, 391 bp, Homo sapiens
gcctgtggcaatgacatctctcgggtcagtaagggccacttggaacaggaatatcacccctatctggaagaccaggtggaggcttatcaccttcacagtaaggtactcactgtccacgtcaagagccaagccaaggtactgttcctccaatgagtaaacagcactkctgtagggctggcctaagtcaggcagttcaagataacctgaaggagtcgaataacatctatccagtgagtcctgcaagacttcaggctctttctcatccagcagctccctgctgagcctggaaaagtaggaaaaagtaaagaataagccagggggaatcagaaaccacacagccccagctagatttcatggctaacataaggaactgtttaaaaagaaaaaggac

SEQ ID NO: 582452 - DNA, 391 bp, Homo sapiens
gcctgtggcaatgacatctctcgggtcagtaagggccacttggaacaggaatatcacccctatctggaagaccaggtggaggcttatcaccttcacagtaaggtactcactgtccacgtcaagagccaagccaaggtactgttcctccaatgagtaaacagcactgctgtagggctggcctaagtcaggcagttcaagataacctgaaggagtcgaataacatctatccagtgagtcctgcaagacttcaggctctttctcakccagcagctccctgctgagcctggaaaagtaggaaaaagtaaagaataagccagggggaatcagaaaccacacagccccagctagatttcatggctaacataaggaactgtttaaaaagaaaaaggac

SEQ ID NO: 582453 - DNA, 566 bp, Homo sapiens
aatttgtcacatctgcccaggtccaatgtcatgaggataggatcagggcgccacaggtatggcctgagactaggaagagagtcttgcycactgacccatccctcatctgggcttccaggtagaactagagtttcattcaacctacatgtgcctataggtcctcactgcagcaatgacatctctcagctcagtaatggccacttggagcaggaatatgatctttatatggaagactcagtggatccttatcaccttcatagaaaggtactcacctcccacgtcaagagaaaagccaacatgtttttcctccaatgcataaaaggaacttccatagggctggcaggagtcaggctgttcaagacaactggaaggagttgaataacatctatccagtgagtcctgcaagacttcaggctctactacctccagcagctccctgctgagcctggaaaaggaggaaaaagtaaagaataagccaggggaaatcagacacaacagagccccaactaggtttcatgggtagcatagggaagtggttaaaaaactaaaaggatagatccattaat

SEQ ID NO: 582454 - DNA, 566 bp, Homo sapiens
aatttgtcacatctgcccaggtccaatgtcatgaggataggatcagggcgccacaggtatggcctgagactaggaagagagtcttgcccactgacccatccctyatctgggcttccaggtagaactagagtttcattcaacctacatgtgcctataggtcctcactgcagcaatgacatctctcagctcagtaatggccacttggagcaggaatatgatctttatatggaagactcagtggatccttatcaccttcatagaaaggtactcacctcccacgtcaagagaaaagccaacatgtttttcctccaatgcataaaaggaacttccatagggctggcaggagtcaggctgttcaagacaactggaaggagttgaataacatctatccagtgagtcctgcaagacttcaggctctactacctccagcagctccctgctgagcctggaaaaggaggaaaaagtaaagaataagccaggggaaatcagacacaacagagccccaactaggtttcatgggtagcatagggaagtggttaaaaaactaaaaggatagatccattaat

SEQ ID NO: 582455 - DNA, 566 bp, Homo sapiens
aatttgtcacatctgcccaggtccaatgtcatgaggataggatcagggcgccacaggtatggcctgagactaggaagagagtcttgcccactgacccatccctcrtctgggcttccaggtagaactagagtttcattcaacctacatgtgcctataggtcctcactgcagcaatgacatctctcagctcagtaatggccacttggagcaggaatatgatctttatatggaagactcagtggatccttatcaccttcatagaaaggtactcacctcccacgtcaagagaaaagccaacatgtttttcctccaatgcataaaaggaacttccatagggctggcaggagtcaggctgttcaagacaactggaaggagttgaataacatctatccagtgagtcctgcaagacttcaggctctactacctccagcagctccctgctgagcctggaaaaggaggaaaaagtaaagaataagccaggggaaatcagacacaacagagccccaactaggtttcatgggtagcatagggaagtggttaaaaaactaaaaggatagatccattaat

SEQ ID NO: 582456 - DNA, 394 bp, Homo sapiens
tttcctccaatgcataaaaggaacttccatagggctggcaggagtcaggctgttcaagacaactggaaggagttgaataacatctatccagtgagtcctgcaagacttcaggctctactacctccagcagctccctgctgagcctggaaaaggaggaaaaagtaaagaataagccaggggaaatcagacacaacagagccccaactaggtttcatgggtagcatagggaagtggttaaaaaactaaaaggatagatccattaatgaggtaacaaattattgccttcatgttgggacagaacrgggccaaatggaaaagaatgaaagagaaagacagatagacacacacacacacacacacacacacacacacacacacacacacacacacaaac

SEQ ID NO: 582457 - DNA, 570 bp, Homo sapiens
tctttggttaaattaattcctaggtattttatagtttgtagctattgtaaatgggattgctttttatatttatttttcagatttctccctgttgatgtatgtaaattctaccgatttaggtatgttgattttgtgtcctgcaattttattaaatttcttgatcagtcctaacagkttttttttggtgaagtcttcaggtttttctaaatataacatcatgtcacatgaaaacaaggctaatttgaaatccttctttccaatttgtatgttctttatttttttcacttatctaattgccctggccaagatttctagtattatcttgaataaaataacactggacacgcttgtcttgttttatattttagaggaaaggctttaagcttttttctattgaatatgatgttagccgtaggtttgtcatatacagcctttatcattttgagaaaagtttcttctacccagtgtgttaagggttttcctgataaagggatgttgaattatattaaatgctttttcagtatctattgaatttatcatatggttttgttattggttctgttaatgtga

SEQ ID NO: 582458 - DNA, 570 bp, Homo sapiens
tctttggttaaattaattcctaggtattttatagtttgtagctattgtaaatgggattgctttttatatttatttttcagatttctccctgttgatgtatgtaaattctaccgatttaggtatgttgattttgtgtcctgcaattttattaaatttcttgatcagtcctaacaggttttttttggtgaagtcttcaggtttttctaaatataacatcatgtcacatgaaaacaaggctaatttgaaatcyttctttccaatttgtatgttctttatttttttcacttatctaattgccctggccaagatttctagtattatcttgaataaaataacactggacacgcttgtcttgttttatattttagaggaaaggctttaagcttttttctattgaatatgatgttagccgtaggtttgtcatatacagcctttatcattttgagaaaagtttcttctacccagtgtgttaagggttttcctgataaagggatgttgaattatattaaatgctttttcagtatctattgaatttatcatatggttttgttattggttctgttaatgtga

SEQ ID NO: 582459 - DNA, 481 bp, Homo sapiens
caaaacaatggagacagtaaaatgatcggtgcttactagagattgggggaagggaggaatgaataggcagagtgtaaaggatttggggagcaattaaatgactgattgatacaacaattgtggtcactataaatttgtctaaacctaccaaatatacaacactgagagtaaaccatggtgcaaactatggtctcttagtgatagtgatgtgtcagctatggtaataaatgtaccattctggtaggagatgttgacaatgggataggttatgcatttaaggattagggggtgtacacacatgtatcctggaacttaaagtaaaatttaaaaaaaatctctgccccttccattcaattttactatgaacctaaaactaaaaaatcaaagcttattaaaaataacaatttgtgtgttggaggaaattaggaaacatatcattcataaaaaatatataatacraaaaacgctatgtctatgaaag

SEQ ID NO: 582460 - DNA, 535 bp, Homo sapiens
aataagacctagtatttgatagcacaacagggtgacyatagtcaataataactgtacattttaaaatattaggttggtgcaaatgttattatcgttttggcattttaaagtaattgcaaaaaccataatttcttttgcacctacctaataagttgaagggtgtaattggattgtttgcaatttaatggataaatgcttgaggggatggacaccccattcttcatgatgtactatgtcgcattgcatgcttgtatcaaaacacatcaggtatccgataaatatatacacctagtatgtacccacaaaaattgaaaaataaatttaaaaaatttttaaaaaaagaaaaaaaatgtggtgattagttttttctgcctatggttacaccagatttcattttcttcctatgatatcagtaggaaaattagttgcaaaccagtacagactgaatgagctgacagaatgtaatatacaagtttaaaatgtataaacaaatccataaaagctactatataaaatgtgtagccacaagttgaat

SEQ ID NO: 582461 - DNA, 535 bp, Homo sapiens
aataagacctagtatttgatagcacaacagggtgactatagtcaataataactgtacattttaaaatattaggttggtgcaaatgttattatcgttttggcattttaaagtaattgcaaaaaccataatttcttttgcacctacctaataagttgaagggtgtaattggattgtttgcaatttaatggataaatgcttgaggggatggacaccccattcttcatgatgtactatgtcgcattgcatgcttgtatcaaaacayatcaggtatccgataaatatatacacctagtatgtacccacaaaaattgaaaaataaatttaaaaaatttttaaaaaaagaaaaaaaatgtggtgattagttttttctgcctatggttacaccagatttcattttcttcctatgatatcagtaggaaaattagttgcaaaccagtacagactgaatgagctgacagaatgtaatatacaagtttaaaatgtataaacaaatccataaaagctactatataaaatgtgtagccacaagttgaat

SEQ ID NO: 582462 - DNA, 614 bp, Homo sapiens
attcctggtatataattatttattctcctttgctttacaaatagatattttgtaaataatagatttcttataagaaaattttaacaactactcttttggagaatggttcaaagaagattgtaatctcttttttctttcagcattctcttatattttttcccacattccctatccccakcacacttagagattctgtcttttctgtattaatttcccttataatataaatgctacattcactgtaataatagttattgcacttaaagccgatcaagcatctatattttaataagccttaacttcatagtattcctgcagcataacaataaatttccctgtcctctctttcatgcaaaataaatattatccactaataacagcacattggcttatgtggagagagctatttaagaatattgcctatagatgtttactagtttatgatccttggacaaatagctatatgtttctttctttctttctttctttcttttttttttgagacagagtttcactcttgttgcccaggttggagtgcaatctcagctcaccacaacctccgtctcccaggtgcaagtgattctcctgcctcagcctcccgagtagctgggatt

SEQ ID NO: 582463 - DNA, 573 bp, Homo sapiens
gatgaagttaaggcatagaatataagctttctttttgcttgcttgcttgctkgcttgtgcaaacagtgttaagttgttatcagcttaaaataatagattataaaataagatttgcaagcctcatagtaacctcaaaccaaaaaccatataattaatgcacacgaaatataaagtgagaaactaaatcctatcaccagagaaaaattaccttcactaaaaggaaaccctacccaacctgtgtatgccaaaatccacgcatcctcaacctgcaaagacaaaaagttggtcctccatattatatgtagatttcacatcctgcaaatgctgtaatttctttcttgcttgcttgcttgcatgcatgctttcagagcatgcatgcaggctctcactctgttgtcctggctggagtgcagtggcgtgatctcagctcactatagccttgaactactggggctcaagccatcctctatcctcagccttcggagtagcaaggactacaccatacacccagctaattttttatattttgtagagacagtgtctcactatgttgtccaggctgggctcaaataa

SEQ ID NO: 582464 - DNA, 573 bp, Homo sapiens
gatgaagttaaggcatagaatataagctttctttttgcttgcttgcttgctggcttgtgcaaacagtgttaagttgttatcagcttaaaataatagattataaaataagatttgcaagcctcatagtaacctcaaaccaaaaaccatataattaatgcacacgaaatataaagtgagaaactaaatcctatcaccagagaaaaattaccttcactaaaaggaaaccctacccaacctgtgtatgccaaaatccacgcatcctcaacctgcaaagacaaaaagttggtcctccatattatatgtagatttcacatcctgcaaatgctgtaatttctttcttgcttgcttgcttgcatgcatgctttcagagcatgcatgcaggctctcactctgttgtcctggctggagtgcagtggcgtgatctcagctcactatagccttgaactactggggctcaagccatcctctatcctcarccttcggagtagcaaggactacaccatacacccagctaattttttatattttgtagagacagtgtctcactatgttgtccaggctgggctcaaataa

SEQ ID NO: 582465 - DNA, 558 bp, Homo sapiens
caaaattagtttaaatgctttaaactaattttgtctgcctccttcaacatgaatactgtagcaaaaatacagttagctaaaagcaaactccacactaaacatattaaaaatataacctataaaataaatttttaaaaatcaaaatcttatcatgtaaaaatttatgaatttatataaagagscttgttgccacaattattatttttttaatttacactttaatggacggtgagaacatataaactgagtcacttatcctaatgaaagatgtaaagataaatgacttcaaaaggtaaaaataagcacataagtaaatgcatgtcataagaggcaaggattaattcaatttaaaataaattttgagaaacatttgaaagtctaaggtttcaactggtggaaagaaaattgaaacatatacatattttttcttattgcaaaatacatagccttcctagaaaaatttaacactggatataagaaaaagctaacatcacatttctgacaaaaatattaagaatttacaagttttgtcccatgctctttaaataatgtcatagt

SEQ ID NO: 582466 - DNA, 598 bp, Homo sapiens
aagaaaaataaaaggaaagaagcaaacttttaaaaattgcctcccttccttacagaattgaacttcaggataacaaaatagttgataaatggaagtttcttattatagaaagagctactaaataaagaatgctagaattaaaaatcactactttggcattcctgatgaaaacattgaaaaacaacagtttactaaatccaaaggccttgattcaatctttgaagaatagctgaatgaggttaagtgtcaggaatatgatcagagaggtagtaggagccaattctattggtaaagattttggttgtatttgtgccacgttttcttaatccagtctatcattgttggacatttgggttggttccaagtctttgctattgtgaatagtgccgcaataaacatacgtgtgcatgtgtctttatagcagcatgatttataatcctttgggtatagtgcacatgtaccctaaaacttaaagtataataataataaaattwtaaaaaaaagattttggtcggattttattctgattgtgttgaatattcattgaagagttctaagcaggcaaataacatcatccagtaatattctaggatacttc

SEQ ID NO: 582467 - DNA, 560 bp, Homo sapiens
tctttacattctccagtgcagattggttttaccataaagtactggaaaattgtacatatcaaagatctcattcctggtgattttgtgctgtcattgattataaagttagaaatactttttaaagccataaactatgtaaattcagaatcttattttactttttctggaagatgtttagtgaatgctgaatcactgtcattaatcactaaatataatctttgtggtcagcccaaggatcctagcttggaacactctatccttagttgccttcatggcacattcctttggatctctgctcatttatcatcttttcattaaagcctttccttatcctcacttcacccaacttccaagctggcactccttataaacctcactttgcatagtttttgacaatagttcatattcaaaaaatgacctatacagtagttcctcacttaacrttgttgacaggttcttgtaaactgtgactttaagccaaaccacctataacaaaaccagtgttaccatcagctaattgatataaacaagagctaagttgctatggcatatttcttgtc

SEQ ID NO: 582468 - DNA, 622 bp, Homo sapiens
aaacatgctaatattagaaagtattaaacaattagagtaaaactctaaattgtacagtactagcaataaaaaaacccagatcattaaaaggtcaatgggattgctgaaagcacaatgacataatacagtctatctaccagcatcattaaacactcaggaggggcaaaactcctttgagagaagcacgtgaagacaacaaatcacagtgagcttctgaagctgcagctgcttttagtttcttctaaactttgaagttatctttgatttttaaaaaatcttccttttattatcaacttcgtcccttcataatatctctggtattcatcctttcggtgttagtcagagttctccagacaaaaagaaccaataggatatatttatataggagatatatatctatataaatatcacacacacatgcacaaacgcacatatatatataatggatatcacatgyacaaacgcacacacacacatatatatatatatatataatggatatatgtgtgtatatataaagtagtgtgtgtgtgtgtgtgtatatatatatataaccagtccctaccatctcatgaatctattccttaaaccagctccctagcctatcacatatatatatgtc

SEQ ID NO: 582469 - DNA, 529 bp, Homo sapiens
gctagtgctttgttgaggattgttgcatctatattcatcagggatactagcctgcagttttttggggggattttttgagatggagtcactttgtcacccaggctggagagcagcagcatgagctcagctcacttcaattttccacctccccatcagcctytcaagtagctgggatacaggcacctgccaccacacctggattttttttttttttttttttttttttagtagagatggggttgcaccacattggccaggctggtcttgaactcctgacctcaggtgatctgcctgcctctatctcccaaaaaggtagttttctttttttatgtctgtctggtttttatatcagggcaatgctgtccttgtagaatgtgttagaaaaaatttacttatcttcaattttttggagtaatttgaaaattctttataaaattcagcagtaaagtcctctggtcctgggctttttttcattaaaagacatttttattactgattcaatctcatcacccattattgttctactcag

SEQ ID NO: 582470 - DNA, 529 bp, Homo sapiens
gctagtgctttgttgaggattgttgcatctatattcatcagggatactagcctgcagttttttggggggattttttgagatggagtcactttgtcacccaggctggagagcagcagcatgagctcagctcacttcaattttccacctccccatcagcctttcaagtagctgggatacaggcacctgccaccacacctggattttttttttttttttttttttttttagtagagatggggttgcaccacattggccaggctggtcttgaactcctgacctcaggtgatctgcctgcctctatctcccaaaaaggtagttttctttttttatgtctgtctggtttttatatcagggcaatgctgtccttgtagaatgtgttaraaaaaatttacttatcttcaattttttggagtaatttgaaaattctttataaaattcagcagtaaagtcctctggtcctgggctttttttcattaaaagacatttttattactgattcaatctcatcacccattattgttctactcag

SEQ ID NO: 582471 - DNA, 529 bp, Homo sapiens
gctagtgctttgttgaggattgttgcatctatattcatcagggatactagcctgcagttttttggggggattttttgagatggagtcactttgtcacccaggctggagagcagcagcatgagctcagctcacttcaattttccacctccccatcagcctttcaagtagctgggatacaggcacctgccaccacacctggattttttttttttttttttttttttttagtagagatggggttgcaccacattggccaggctggtcttgaactcctgacctcaggtgatctgcctgcctctatctcccaaaaaggtagttttctttttttatgtctgtctggtttttatatcagggcaatgctgtccttgtagaatgtgttagaaaaaatttacttatcttcaattttttggagtaatttgaaaattctttataaaattcagcagtaaagtcctctggtcctgggcttttyttcattaaaagacatttttattactgattcaatctcatcacccattattgttctactcag

SEQ ID NO: 582472 - DNA, 605 bp, Homo sapiens
ataagcacaggcaaccaaagcaaaaatggacaaatgggatcacatcaagttaaaaagcttctgcatagcaaaggaaacaatcaataaagtgaagagacaacccataaaatgggagaaaatatttgcaaactagtcagctgacaagggattaataactagaatacataaggagttcaaacaactctataggaaaaaaatctaataatctgatcaaaaatgggcaaaagatttgaatagacattcctcgaaagaagatatataaatggcaaacaggcatatgcaaagatcaacatcattgatcttcagagaaatgcaaatcaaaaccrcaatgagatatcatctcacccaagttaaaatggcttttatccaaaagacaggcaacaacaaatgctgacaagaatgtggagaaatgagaatcttcctaaattcttgtggggaatgtcaattagtcaaagaacagttggaagttcctcaaaatcaataaatagagctattatatgatccagcaatcccactgctgggtacatatccaaaggaaaggaaatcagtatatcaaagagatatctgcactcccatgttaactacagcactattcacaatagcct

SEQ ID NO: 582473 - DNA, 605 bp, Homo sapiens
ataagcacaggcaaccaaagcaaaaatggacaaatgggatcacatcaagttaaaaagcttctgcatagcaaaggaaacaatcaataaagtgaagagacaacccataaaatgggagaaaatatttgcaaactagtcagctgacaagggattaataactagaatacataaggagttcaaacaactctataggaaaaaaatctaataatctgatcaaaaatgggcaaaagatttgaatagacattcctcgaaagaagatatataaatggcaaacaggcatatgcaaagatcaacatcattgatcttcagagaaatgcaaatcaaaaccgcaatgagatatcatctcacccaagttaaaatggcttttatccaaaagacaggcaacaacaaatgctgacaagaatgtggagaaatgagaatcttcctaaattcttgtggggaatgtcaattagtcaaagaacagttggaagttcctcaaaatcaataaatagagctattatatgatccagcaatcccactgctgggtacatatccaaaggaaaggaaatcagtatatcaaagagatatctgcactcccatgttaactrcagcactattcacaatagcct

SEQ ID NO: 582474 - DNA, 557 bp, Homo sapiens
agagcaagaatgaactgaaacctgmaaggatgagctgaagctcatgaatatgaactaaaacttggatctatcttttgctacattcaggcctcaatttcaacattgtgggtgacttgcagaggaagctaacactctttgtcatagatttaggccacatacctggcataggattaggaggagctaaataaggtgtttcatcagcagttgaagtagctgtaggcttggctgccgtcccatgccactaatgtgagccaacagagcagagacaatgtgtgtgaactggagcagagacaatgtgtgtgaactgcagcagaacctgactgaacacaaaacatctgaacacaaatgcaactgatgctttacttatgcctcccaaatctcatgcaaatttttcttgtcaccaaccctaaacagaactatatgggaaagggaattcttgtaaatgtagttccagcttagctaggttaacaaagtataaagccaccactaaccactcttatcaatgtggcccaaccatacttcttttaaccatacctaatttccaaataaaaataaat

SEQ ID NO: 582475 - DNA, 587 bp, Homo sapiens
caatatttgcaaaccatatatctgatcaggggctaatttccaaaatgcataatcaactcaattctatagaaataaagcaacctaataaaacataggcaaagatattgaacagacttttctcaaaagaagacatacaaatgtgcaacagatacctgaaaagatgttcaataccactaatcattaggaaaatgtaaattaaaacatttaaattaatttatattaaaacaatatcacctcacacatrttagaattgtttttattaaaaaagataaatgataaatgttggcaaagatgtggagaaaggggatcctttgtacaccattgatgggaatggaaattagtacatcaattatgaaaaatagtataaaagtttctcaaacaattaaaaatagagctaccatatgatctaggaatcccactttggggtatagatacaaaggatttgatatcagtatgttaaaaggatggctgcacttccatgtacattgcagaactattcacaatagccaagatatggaatcaacctatcaacacacacatacacacttacacacacacacacacacacacacacacacacacacaca

SEQ ID NO: 582476 - DNA, 587 bp, Homo sapiens
caatatttgcaaaccatatatctgatcaggggctaatttccaaaatgcataatcaactcaattctatagaaataaagcaacctaataaaacataggcaaagatattgaacagacttttctcaaaagaagacatacaaatgtgcaacagatacctgaaaagatgttcaataccactaatcattaggaaaatgtaaattaaaacatttaaattaatttatattaaaacaatatcacctcacacatgttagaattgtttttattaaaaaagataaatgataaatgttggcaaagatgtggagaaaggggatcctttgtacaccattgatgggaatgsaaattagtacatcaattatgaaaaatagtataaaagtttctcaaacaattaaaaatagagctaccatatgatctaggaatcccactttggggtatagatacaaaggatttgatatcagtatgttaaaaggatggctgcacttccatgtacattgcagaactattcacaatagccaagatatggaatcaacctatcaacacacacatacacacttacacacacacacacacacacacacacacacacacacaca

SEQ ID NO: 582477 - DNA, 576 bp, Homo sapiens
cattcttggcaggttgttttcaattagaaagattcagcaaccatgatccttggttattctccagctttagttattttgactaaggcatgatattaatcctcttatccctaaagtactcttaatattatcattgagtatatacaaaatattatcttcaacactggctcttatgctgacacaacctaaagtgttaaactttctgttactcctaaaagcattctaagtaaaatctaaactcagaagatacagagtcatttgtttagttgctttgctttagcataattttttccttccagtgtaatttaaatggaaagtgatcttggaaaagaggagctgtaaaacaggagaaaaactttacaaactttcacattttaccttgaactaactcataaaggattttctatcattgtttttgtggatattggaactgttttcacaggctgttagtcagggattctagatgcataccacatgatttggtggaaaaaacacaggtttggaattggccaaaatttctaattctggcccaacaattttctagctttgttatstggggaaaaacatatctctctagat

SEQ ID NO: 582478 - DNA, 597 bp, Homo sapiens
cacctgtaatctcagcactttgggaagccaaggcagaaggatcacttaaggtcagcagttcaagaccagtctggccaacatggtgaaaccctgtgtctactaagaatgcaaaaattagctgggcatgrtggtgtatgcctgttgtcccagctacttggtggctaagtcaggagaatcacttgaacccaggaggcagaggttgcagtgagctgagatcatgccactgcactccagcctgggcaacagagtgagactctgtctcaaaaaaaaagaaaaaagaaaagaaatgaaatcattttttcacccaaaaacttgtacacagatgttcatagaagctttatttgcaatagcaaaaaactagaaaaaatgcaaatgtacatgaacttgtgaatgaataaacgaatgttggcatattcatataaggtagtaccactaaaaattagaaaggaacaaactgataaatgcaaaaagagaaatgaatctgaaagcattatgttaagtgaaagaaaccagacacaacaggcaacatactgactctaattacatgaaagaaggtagacgctagggcctagaaggtgataacagggcatcaattgc

SEQ ID NO: 582479 - DNA, 597 bp, Homo sapiens
cacctgtaatctcagcactttgggaagccaaggcagaaggatcacttaaggtcagcagttcaagaccagtctggccaacatggtgaaaccctgtgtctactaagaatgcaaaaattagctgggcatgatggtgtatgcctgttgtcccagctacttggtggctaagkcaggagaatcacttgaacccaggaggcagaggttgcagtgagctgagatcatgccactgcactccagcctgggcaacagagtgagactctgtctcaaaaaaaaagaaaaaagaaaagaaatgaaatcattttttcacccaaaaacttgtacacagatgttcatagaagctttatttgcaatagcaaaaaactagaaaaaatgcaaatgtacatgaacttgtgaatgaataaacgaatgttggcatattcatataaggtagtaccactaaaaattagaaaggaacaaactgataaatgcaaaaagagaaatgaatctgaaagcattatgttaagtgaaagaaaccagacacaacaggcaacatactgactctaattacatgaaagaaggtagacgctagggcctagaaggtgataacagggcatcaattgc

SEQ ID NO: 582480 - DNA, 643 bp, Homo sapiens
aaatcagacacatagattaggwtaacaaagtaaagagtctagaaatagatccacataaatatggtccattgatatttaatgaatgtgtaaaggcaaatcattgaagaagggtagttggtcaaaaatgtggtcgaacaattggttcaaatgtttggttcattgaactaagtataaaagtagaactataaaacttttagaagaaaacataagaaaactattttaggcaagaagttcttagacatgatactaaacacactatccataaaagaaaaaaatgataaactagacttcaccaacatttttttttaaaatctgctgtatgaatacacttgtaagagaacaaagatacaagctacaaattgagagaaaatatctgcaaatcacatatctgacaatatacccaggcaatactgattatgatcctaaaagatactattctgaatgccataatcacaaatgttgaaattccaaaagttcaaaatccctaaattcaaaactccttaatgtctaaaaaaatccccataatcaaaatcccaaaggattaaaattccaaacgttgaaagcctgaaatccaaattctggggacgaagttggtgcattttcagttgtatgccacctaatgttagttgtgtcatgttaggca

SEQ ID NO: 582481 - DNA, 571 bp, Homo sapiens
ccctaattttaccccaaaaaaaggaatttttaaaaatactttatatccatttttaaaaaatttcaggttggttgcctgaaattagccataatgcgagaatttaccccatgaaaattagcaaactgtacacatcttggctctttttcctttttttggagagctcgggtattttttagctggagcaactattggcattttggttagaaaatgtttttttgggccgggcgctgtgggtcccccctgtaatcccagcatttgggaggctgaggtgggcagatcccaaggtcaaaagatggagaccatcctggccaacatggtgaaaccctgtttttacaaaaattagccaggsgtggtggcatgtgcttgcagtcccagctactcgggaggctgaggcaggagaatcgcttgaacccatgaggcaaaggttgcagtgagtggagatcatgcaactgcactccagcactccagcctggggacagagcaagactcccctggaaaaaaaaaaaaaaaaaaaaaaaaaaaaaaggttttcctatccttgacaggatatttagcatctctgttccttgcc

SEQ ID NO: 582482 - DNA, 571 bp, Homo sapiens
ccctaattttaccccaaaaaaaggaatttttaaaaatactttatatccatttttaaaaaatttcaggttggttgcctgaaattagccataatgcgagaatttaccccatgaaaattagcaaactgtacacatcttggctctttttcctttttttggagagctcgggtattttttagctggagcaactattggcattttggttagaaaatgtttttttgggccgggcgctgtgggtcccccctgtaatcccagcatttgggaggctgaggtgggcagatcccaaggtcaaaagatggagaccatcctggccaacatggtgaaaccctgtttttacaaaaattagccaggggtggtggcatgtgcttgcagtcccagctactcgggaggctgaggcaggagaatcgcttgaacccatgaggcaaaggttgcagtgagtggagatcatgcaactgcactccagcactccagcctggsgacagagcaagactcccctggaaaaaaaaaaaaaaaaaaaaaaaaaaaaaaggttttcctatccttgacaggatatttagcatctctgttccttgcc

SEQ ID NO: 582483 - DNA, 593 bp, Homo sapiens
ttttccttcacttaattcaagcatcctcatgaggrcaattagttcagctagttgagcacttgggcctgaggagagagacacactcttaacaatattattcagagtaactattgcataccctgctttatggagccttttgttctacaaaaggactatcatctgtaaagagaattcagtttgggtgctctaagggggtttcaaagaggtcctctctagccacataggtttgtactgctatctgctatctgttatgttcaaactccccagcttcccctgggagaaaaatggctggatttataaatggacacgttcttagttgaactgcagatccttctaatagcagagcttgataactgaggaggtaattatctgttaccagagactccctttggaagacagcagtcctgccacattatgtgaagtgtagacagttaagttattccgcatgcttagcagcctctggtaccagcaaggctatcactgcaactgcatggaggcaggccagccatcctttggctatcaaatcaagctctttacttaggctgctgggctggacctcaggcctgtgttagaactcccaatgccattccctt

SEQ ID NO: 582484 - DNA, 626 bp, Homo sapiens
gttttcaatcttgaacttggcacattatatctcagcatccagttcttcctcacacagacagtgataataaaacaaagyttgtcctgcctatctcagatgcaaggtgaaggtagaatacaggatgatgtatatgagaatgacttgcataccacactactgggaattattttaaccaatttatctgatgaatgagaagggtaatggtaggatggtagaaatagattatttttaaactgtttggatttgaaggaagaaaattaccaattgctttgtttattgcaattccttctttatctacatatgcttttatgttttaaacttaagcttcttcaatttaatcaattcagattaaaataaattgtaagcaatacatttaaaagactcagataaatatgactttaaataaaaaattgttatactattttgcctaactaaaagctgaaagttcagcacttgaagcattgaactattatgttttttattagctaaataaatttaaaatattaaaatatttgtaatattttagcacccttgtattttaaaatataataaaagtaaaattaaatttcaagacaaatgtgatgtcatttggcattattaaatttaataaattaataattatttag

SEQ ID NO: 582485 - DNA, 626 bp, Homo sapiens
gttttcaatcttgaacttggcacattatatctcagcatccagttcttcctcacacagacagtgataataaaacaaagtttgtcctgcctatctcagatgcaaggtgaaggtagaatacaggatgatgtatatgagaatgacttgcataccacactactgggaattattttaaccaatttatctgatgaatgagaagggtaatggtaggatggtagaaatagattatttttaaactgtttggatttgaaggaagaaaattaccaattgctttgtttattgcaattccttctttatctacatatgcttttatgttttaaacttaagcttcttcaatttaatcaattcagattaaaataaattgtaagcaatacatttaaaagactcagataaatatgactttaaataaaaaattgttatactattttgcctaactaaaagctgaaagttcagcactygaagcattgaactattatgttttttattagctaaataaatttaaaatattaaaatatttgtaatattttagcacccttgtattttaaaatataataaaagtaaaattaaatttcaagacaaatgtgatgtcatttggcattattaaatttaataaattaataattatttag

SEQ ID NO: 582486 - DNA, 575 bp, Homo sapiens
ctagtggctactatattggaccaaggaatcgtgtgataacatgccaccgttttgttttttccttctcagatacattaaaaatagtgcaaattatttgacatggagtatatggttaatatcggcagtttaaaacaactctttagaaggtacccagtgcaataccttgtggtatgatatccactattacacacttaacaactgaatagtcttttctttcacttcagaaattttaatttatcttttaacttgtattttattactgaacatcaatacaattgtaaatagtaataaaatatacatttaatkgtcagcatttgtattatgcccaaacatatttaactgttaacacatatatatatatttttatatatatatttaaaatactaatttttttattatactataagttctgggatacatgtgcaaaatgtgcaggtttattacataggtatacatctgccatggtggtttgctgcacccataaacccatcatctacatcagatatttctcctaatgctatccctccccttttcccccatctgtcactttcaggtacaccaatcaatcgtaggtt

SEQ ID NO: 582487 - DNA, 575 bp, Homo sapiens
ctagtggctactatattggaccaaggaatcgtgtgataacatgccaccgttttgttttttccttctcagatacattaaaaatagtgcaaattatttgacatggagtatatggttaatatcggcagtttaaaacaactctttagaaggtacccagtgcaataccttgtggtatgatatccactattacacacttaacaactgaatagtcttttctttcacttcagaaattttaatttatcttttaacttgtattttattactgaacatcaatacaattgtaaatagtaataaaatatacatttaatggtcagcatttgtattatgcycaaacatatttaactgttaacacatatatatatatttttatatatatatttaaaatactaatttttttattatactataagttctgggatacatgtgcaaaatgtgcaggtttattacataggtatacatctgccatggtggtttgctgcacccataaacccatcatctacatcagatatttctcctaatgctatccctccccttttcccccatctgtcactttcaggtacaccaatcaatcgtaggtt

SEQ ID NO: 582488 - DNA, 575 bp, Homo sapiens
ctagtggctactatattggaccaaggaatcgtgtgataacatgccaccgttttgttttttccttctcagatacattaaaaatagtgcaaattatttgacatggagtatatggttaatatcggcagtttaaaacaactctttagaaggtacccagtgcaataccttgtggtatgatatccactattacacacttaacaactgaatagtcttttctttcacttcagaaattttaatttatcttttaacttgtattttattactgaacatcaatacaattgtaaatagtaataaaatatacatttaatggtcagcatttgtattatgcccaaacatatttaactgttaacacatatatatatatttttatatatatatttaaaatactaatttttttattatactataagttctgggatacatgtgcaaaatgtgcaggtttattacataggtatacatctgccatggtggtttgctgcacccataaacccatcatctacatcagatatttctcctaatgctatccctccccttktcccccatctgtcactttcaggtacaccaatcaatcgtaggtt

SEQ ID NO: 582489 - DNA, 565 bp, Homo sapiens
taagactttaacccatcttcagtttatatttgtatatactgaaaggaaggggaacagtatcaatcttctggatatggctaaccagctatcctagaaccacttattgaatagagtcctttctccattgcttatttttgttgactttgtcaaaaataagatggctgcagatggagctttatttccaagttctctattctgttccattggtctatgtgtctgtttttgtactagtaacatgctgttgtggttactgtggccttgcagcatartataaagttgggtagtgtgatgtctctggctttgttctttttgtttaagattactgtgtctaattgggctcctttttagttctacgtgaattttagaatagttttttttttaattctgttaaaaatgtgttggtattttgataggaataacattgaatctgtaaattgctttgggcagtataatcactttaacaatattgattctttctatccatgagtatgaaatatttttctgtttgtgtcatctctgatttctttaagcagtgttttatagttctccttgtagagacatttta

SEQ ID NO: 582490 - DNA, 565 bp, Homo sapiens
taagactttaacccatcttcagtttatatttgtatatactgaaaggaaggggaacagtatcaatcttctggatatggctaaccagctatcctagaaccacttattgaatagagtcctttctccattgcttatttttgttgactttgtcaaaaataagatggctgcagatggagctttatttccaagttctctattctgttccattggtctatgtgtctgtttttgtactagtaacatgctgttgtggttactgtggccttgcagcataatataaagttgggtagtgtgatgtctctggctttgttctttttgtttaagattactgtgtctaattgggctcctttttagttctacgtgaattttagaatagttttttttttaattctgttaaaaatgtgttggtattttgataggaataacattgaatctgtaaattgctttgggcagtataatcactttaacaatattgattctttctatccatgagtatgaaatrtttttctgtttgtgtcatctctgatttctttaagcagtgttttatagttctccttgtagagacatttta

SEQ ID NO: 582491 - DNA, 574 bp, Homo sapiens
acactggagcaatcagatatataagcaaatattattagagctagagagaggggaaccccaataaaataatagctgcagatttcaacaccccactttcagcattggacagacctcccagacagaaaataaacaaagaaacattggacttaatctacackatagaacaaatggaccaattaactatttacagaacatttcatccaatggctgcagaatacacattttcttcctcagtgcatgaatcattctcaagcatagaccatatgtttggtcacaaaacaagtcctaaaatattgaaaaaaattgaaataatatcaagtgtcttctctgaatacaccacaataaaactagaaattaataaaagagggattttcagaactatacaaatatatagaaattaaacaatatgctcctaaatgaccagtgagtcaatgaagaaattaagaaggatactgaaaaatgttttgaaaaaaatgacaatggaaacacaacataccaaaacctatgagatacagcaaaagcagtattcagagggaaacttacagctgtaactgcctacttcaaaaaagaagaa

SEQ ID NO: 582492 - DNA, 574 bp, Homo sapiens
acactggagcaatcagatatataagcaaatattattagagctagagagaggggaaccccaataaaataatagctgcagatttcaacaccccactttcagcattggacagacctcccagacagaaaataaacaaagaaacattggacttaatctacacgatagaacaaatggaccaattaactatttacagaacatttcatccaatggctgcagaatacacattttcttcctcagtgcatgaatcattctcaagcatagaccatatgtttggtcacaaaacaagtcctaaaatattgaaaaaaattgaaataatatcaagtgtcttctctgaatacaccacaataaaactagaaattaataaaagagggattttcagaactatacaaatatatagaaattaaacaatatgctcctaaatgaccagtgagtcaatraagaaattaagaaggatactgaaaaatgttttgaaaaaaatgacaatggaaacacaacataccaaaacctatgagatacagcaaaagcagtattcagagggaaacttacagctgtaactgcctacttcaaaaaagaagaa

SEQ ID NO: 582493 - DNA, 437 bp, Homo sapiens
taataatagaaatgcttgaagtgaatattacaacttcttgccatataatttcttgtccataaatcaagtatcaatacatttaaatgtatccaagtcatacaaagtatgttctctgaatattacggaattaaattagaaatcactatcagatatctgtaaattctcaaatatttagaattcaagtaatacacttgtaaacaaccaagggccaaaggaaactcaaaaggacagtaagtaattttaaatcaatgaaaatgaaaacacagcatatcaaaatttgtgagctttcaccacagtgatasttagcataaaagatgaagtacttagggataaatctgacaaagaatgtggaagtcctgcacattcaaacctataaaacatttctaagagaaaatcagacttaaagggtttaaaagtttcaatattgttaagatacc

SEQ ID NO: 582494 - DNA, 544 bp, Homo sapiens
aattgaagtcaatcctttcaaactctgccactgctttttgaactaagttcatgttatattctaaatcctatttatgatttcagtgatgttcactgtatctgcaccatgggtattttccatctcaagaaaccactttctttgcccatccataagaagcaattcctcatccattaaaggtttatcytgagatagcagcagtcttcagtcatatcttcaggctccacttctaattctaattttgatatttccacaacttcctccactgaagtcttgaacacttcaaagtctcaaaggtcgagagttggaatcaacttctttcaaactcctgttaatgttgatattttgacctcctttcaaaaatcacaaatgttcttaatgttatctagaatggtaaatcttttacagaagattttcaatttattttgcccagatccattggaggaatctctatccatggcagctatagccttatcataagtatttcttaaataataagacttgaaagttaaaatactcctttaactctgagctgtaaaatgaatac

SEQ ID NO: 582495 - DNA, 568 bp, Homo sapiens
ctcactctgtcgcccaggctggagtgcagtggtgtgatctcgtctcactgcaacctctgcctccctggttcaagcaattctcctgcctccacctcccattcattgtgtctttttaagagccagagagccttggctcccatagttccttcagaactcccttcatctcctcgcactagcctatgacctgttttggctggtattctcagatctgctccttgggtcctccacttgaggtggtatatgtgtggaatgactttctacccctaccttgactggaatcgaggacccacctttggcctcaccgttgttctaccagttctgaagaaaggtgtttcccacatggtcttgatccaaggcaaaggagccaaaagtgccatgggatgggtcttagtcctactcggcagtcacctgcctgtgggagtcagaagtaccttacgaagacagaaaaaatgtcccactcatgtaaactctaggctgtattargcaactataatgcatggtgtatttcagatgaataaatttaacatttgagatgttctttactagcaccatccaaatgcaggtgttg

SEQ ID NO: 582496 - DNA, 574 bp, Homo sapiens
ttagcccacattgccaagtcagaatttatttgatcaattagctggaatttccaacaatttaatcaaacgaaaaaagaacctttgatgttgtgttactagtatatgattaagtacaaataatgttaagcattttcatttgggaaaaagtctaaatttatttttcttcaaaggtaatttattttgcaaacctacagcattttcctacctatatttatttatctagastacctatattatttgtgattgtgtgtgtgtgttcaggagcacatatgtaaggttgctgacccattggaaacttacagttgatgatgtggatgtgttaggtctgaccaatagtactttgataaaatgtattctcatgggcagagccaagtggtactataatttactttgatctatcaaagcctcatcttcagtgtatccaatgtttgactaaaatcattggcaaaaatagtacctcccttctcatcactttattctgttgcacatacattacatttcttgatacttagttgcatttttggctctagatagctgtaactttttctctaaatcctatattatggctgtttct

SEQ ID NO: 582497 - DNA, 406 bp, Homo sapiens
aatcttttctcaagtgaactagttgatttagaagagtgtgtagaagatttaacttaagtttagactttgaaacaatggcgattttggtgataagtaattaagagaaaactggtttcaccatgtgatatggtttggctgtgttcccacccaaatattaccttgaattgtagctctcataatttccatgtgttttgggagggacccatagggagataattgaatcatgygggtgttttcccctatactgttctcgtggtagtgaataagtctcacaggatctgatgattttataagaggttttccttttcacttagctttcattctctcttgcctgctgccatgtaagacgtgccttttgcctcctgccatgattgtgaggtctccccagccatgtgaaactgtgagt

SEQ ID NO: 582498 - DNA, 624 bp, Homo sapiens
ggcaactattctagctgcagggctgtgatcctttatcaatgatagggtgtggaataatgtgtttttttattattcatcacttgagaatgtgtcagttaggcaagagactttgagaaaaatccactgtatcagataaaacactggaggaggatattttaaatcagttgttgatgtagtaaaatagggcttcttaaaatatgggaaaaaatacatttcccacatcatgccattaaaagttttaaaaataatgaatacttttctttgaactctctggagtgcttgcatcacgtgtattgatatttaagaatattgtgtgaatcatacataggatgttgagaaacattgctcctcactgacgttttatgaattggagattcctattccttattaggttggcttggagaagaaaactagaataattaaggccaggtgcggtggctcacgcctgtaatcccagcactttgggagrccaaggtaggtggatcacctgaggtcaggagttcgaaattagcctggccaacatggtgaaacccagtctctactaaaaatacaaaaaattagcagggcctggtggcatttgcctgtaattccagctacttgggaggctgaggcaggaggatcact

SEQ ID NO: 582499 - DNA, 443 bp, Homo sapiens
ggggaggggggagggatagcacgaggagatatacctaatgtaaatgacaactttatgagtgcagcacaccaacatggcacatgtgtacatacgtaacaaacctgcacattgtgcacatgtaccctagaacttaaagtataataaaaaaataaaataaaaaaataaaagaagttaaagtacttatacttccttattcaaagacttaccacaaagccmcattaactatgtgatactgacataaggatagacatatcaatcagtggaataagggaaagtgcccagaaacaaacccttacatttattatcaattgatttttgacaagagcgtcaggaccaatcaatgggaaagaataggcttttcaacaaatggtgctgaaacaactgggtaatcatatgcaaataggtggagttggtgtctatctcacatctcacgccatatgcaa

SEQ ID NO: 582500 - DNA, 443 bp, Homo sapiens
ggggaggggggagggatagcacgaggagatatacctaatgtaaatgacaactttatgagtgcagcacaccaacatggcacatgtgtacatacgtaacaaacctgcacattgtgcacatgtaccctagaacttaaagtataataaaaaaataaaataaaaaaataaaagaagttaaagtacttatacttccttattcaaagacttaccacaaagccacattaactatgtgatactgacataaggatagacatatcaatcagtggaataagggaaagtgcccagaaacaaacccttacatttattatcaattgatttttgacaagagygtcaggaccaatcaatgggaaagaataggcttttcaacaaatggtgctgaaacaactgggtaatcatatgcaaataggtggagttggtgtctatctcacatctcacgccatatgcaa

SEQ ID NO: 582501 - DNA, 468 bp, Homo sapiens
cacacctccactgagactgataaaagacccagtattttagtgtttttatgcactaaaacttaygctggcctctcaggctagagacttaaatcctgacacaatgagctactatggcaactactacggaggactgggctatggctatgactgtaaatatagttatacctctggctttggtgcctttagaatcctggactgtggctacagatgtggctgtggtggggtatggatttgactgctgccaccaatatgattatgctacatgcttattatcaggcactgactgaataatatctacaattgggtccattttcttatgagacaggggtgctgttctactacactttttttaatttgtttaacccaattagaattcttaatgattccctataatcccagcactttaggaggccgaggcgggtggatcacctggggttaggagttcgagaccagcctggccaacatggc

SEQ ID NO: 582502 - DNA, 546 bp, Homo sapiens
gcccacctttgtgcccaggtgtacccaatagaacatacttctttatggctgcatagtattccatggtgtatctgtagcaaattttctttatccagtccattgttgatggacacctgggtcgactccttgtctttgctgttataaatagtgctgcaataaacatacatcactaaagcagttttaatctaccagaatacttggcctttctgtttcttaaaattgtagtaaaatatacataaaatttttcatgtgaatcatttttaagtgtacagctcaacagtgttaagtacattcgcactgttgtgagaccaatttccagsactctttgcatcttgcaaaactgaaactgtgtacccattaaatattgctgcctccccacaggccctgacaaccattctactttctgtctttatgaatttgctactctaagtacctcatatgagtggaatcatactgtatttgtctttttgtgacactttcctggttttgatccatttctctgggtagaatttaaactcaccttaggcattgtcactttgtgtacca

SEQ ID NO: 582503 - DNA, 571 bp, Homo sapiens
aatcaataaagggattcttgggatgtatttgtttttcttttgaaaytaaaacaagttaacaagttcagctgtgtaataactataataaacagtactacaagtgagtttatgaagtttgaactcctttatcttcttggatcactcaggagcttcactaatttaatcttgcctataaaactaacttgagcttattttaataaagtaactttttgacattttcctggcttttaagtatctgtcccctgtctaaatgagaaggatagagatgcgcacatttttattattattattatactttaagttttagggtacatgtgcacgatgtgcaggtttgttacatatgtatgcatgtgccatgttggtgtgctgcacccattaatttgtcatttagcattaggtatatctcccaatgctatccctccccctccctcaaccccacaacagtccctggtgtgtgatgttccccttcctgtgtccatgtgttctcattgttcaattcccacctatgagtgagaacatgcggtgtttgtttttttgtccttgtgatagtttgctgagaatgatggtttcc

SEQ ID NO: 582504 - DNA, 571 bp, Homo sapiens
aatcaataaagggattcttgggatgtatttgtttttcttttgaaattaaaacaagttaacaagttcagctgtgtaataactataataaacagtactacaagtgagtttatgaagtttgaactcctttatcttcttggatcactcaggagcttcactaatttaatcttgcctataaaactaacttgagcttattttaataaagtaactttttgacattttcctggcttttaagtatctgtcccctgtctaaatgagaaggatagagatgygcacatttttattattattattatactttaagttttagggtacatgtgcacgatgtgcaggtttgttacatatgtatgcatgtgccatgttggtgtgctgcacccattaatttgtcatttagcattaggtatatctcccaatgctatccctccccctccctcaaccccacaacagtccctggtgtgtgatgttccccttcctgtgtccatgtgttctcattgttcaattcccacctatgagtgagaacatgcggtgtttgtttttttgtccttgtgatagtttgctgagaatgatggtttcc

SEQ ID NO: 582505 - DNA, 577 bp, Homo sapiens
gtctttgttgatattctcattttgttcatatgttattcttgtaaaattttccttagctttctgtctgtatgcttctttagctatgtgagcatatttaagattgcgttttagaggtcttgtctagtaaggctaagctttttttaggaggacagtcagttcctgggaatttattaatttttttgaacataccacgtttatctgtttctttgtatttcttgtaatcttttgttgaaaattgggcattttaaaagcagctccctctcctagggtttgcaaactgattgtttgcagaaaaatcagcattattgtaattgtggtaactccactttttactctattagaaaatttgaaagacaaaagcataaaaatacctagaagttatattaatgggtacacaataagtaaagatataattcatgacattaataatacaaaggagaaagagtaaaagtagtaatgaagtagtttttctatgcaagtgaagctaatttggtttcattttcaaatamattggattatttttgtatgtaatttgtaatactaatgctaacaaaaaaagaaaagatatatagaatat

SEQ ID NO: 582506 - DNA, 558 bp, Homo sapiens
ttaggtgtttacaaaatatgtggagggactagaagaaaaaggtcactgaaaactaccaatattctaaaaattcaggaagtttcaagaatcccagaaagccagtgatgtttatctcagtttatctcagtttctttgaataataaagtgtgtgattaactgaatggaaaccactgataaaatattatgtcwggcatttccacattttccatagcagtcatttttttagtacttcaatttaccaaatcacactcactttcttcacactggcagaacctggagagaaaacctgcaaattccattttcctgatttttagatatttgcttaattgtattttatatgttccactcaactttccaacccaactatttattatgacaattaggagatctcccaggtgccccagagcaacatgtgctccagatgaggctgccttccctacacttacccacacctccattgacagcaaccaagagggtgctcagcagctctgcctgctccagatacacttgacctttctttggtttagcatgtttatttggtaaattaagcagatttct

SEQ ID NO: 582507 - DNA, 610 bp, Homo sapiens
tttaaaaaataaagttaattaggaatacttttatttttggcaaattatattaaatatgtaaatatatttgtattactttaatataatttactttctttgtgtttagactattaaaaagcttttacttatcagcagtaaagtaccacttaaaagggctatttttattcatttaaagttttacaaatgtatgttatgaacatacaacccaattatattaggttccatcagaaaatgtacataaaatgtagggtcttcaaaaacatgagaataaaaaagaagaacacatgaaaaaataattataataaaaattagaatraactaagtgttaattgttacatgaaaaggacacacaatgtggtaaaaaaaaatcattttcttcaaaatgtttgctgaggtttatcatgcaatagactttatagttgagaataggaaacaaatatagccacagacttctcctcatgaagctcacagcctccggatgtggtggacgtttatccagtactcacacaaacaggtgtaaagtggcaactagatgaagtcttctgaagaagtctagttagagaggccacagaaggacttgaagaagtaatgcttggtttaagaggaaaaa

SEQ ID NO: 582508 - DNA, 516 bp, Homo sapiens
ttaataagttcatattacatgaggtctcttccttggctttttaacaggctgaaatttttaccttcaggcaggaagactggaagcaatatggctactaaagttttaatgaagaggacaccaactttacttggtattaggctatgagtctttcagtttatattttattaggcttctaaatcatamtaagttctggactatttacagaaaaacgtaatgtgatcaaaagtcttttttataacattcatataggaagtaagcatgatacaaagaatgagcaaaagataatttaaaaaattttccaggattcttattttgttgactttatgccatgccaagcaatgatgtattttctcttaagtttacgtccctataaccataggtggagctgatataaatcaaacactactattttaaatgttaatattaaataaataatcaataaactatgagagctgatataaataaaaaattttaatcccataatgtatattatccattagaaggctaattaatcat

SEQ ID NO: 582509 - DNA, 606 bp, Homo sapiens
aggatgccataggagcaggtaaatgtcccccagttgtctagtgtggtcatggaagaacataaaccaatttgtgactcatgaagtctcctggtattgaatcccatttcctttttaattaaaggtgcaagaattcaygtgattcagaaactgaatagcaaaaaattgagatgaatatattactctataaaaatgaatctgaaacatcagagtactaaagaaccaactgaaaaatatttttaagtatgtggattcctgggcctcatgcctcccccaccaaactcccatcctctagcccagagattctgattaaataggattggtgtggggctcaaaaatttgtatgtttggtgggcatgaaagctgattctcatggtgggtgaaaaggctatgagactcatagaatcactggtttaagatacctactatagaatattttaataaattattcccttttaattgaaaaataaatgctatacctctgcatcgttttgtcaattcatcactctggctcattctgtcctaaaatgtgagtttataaagaaatgataatattactgtaataattttccatttctatctcacattgtaattcataaattaattaat

SEQ ID NO: 582510 - DNA, 598 bp, Homo sapiens
agagtgacaacttctttgttcacctttgtattcttagtctatgcaactgtgctgggtttatagtaagccctcaatacaatttgttgatggaatgcctgatgactgaggtgtagggaacaccagaaagtagaattttgtatagccacagagaatacaaagggagctaaaacaaacagctggaaagttaaaatgttaccaggtgtaaaatagaaaataccaactatggcatttgaactttgttcygtagacattgggaggcactgatgatttagagcaggggagtggcttcattctctctcttcttcttagtgatcttctggaagctccatgcatgttgattcacaataggagtaactgagatggagagatacattaggtggctgttgcaactattgcagttggaggtaatcagatctgaagtatgacacaacagaaaaaggagggaagggaatatgatgggaactatttcaggaacataatagaaaaggacaaaaacagacatgctggagcaggaaagaacatgttgtcagagaaaatttctgattttcaaacacgatgttgagaaggatggtaaggtcattaacagaaacatgaaaca

SEQ ID NO: 582511 - DNA, 373 bp, Homo sapiens
gtagacccagctactcaggaggctgaggcaggagaattgcttgaacccaggaggcagagttgtgttattgagccacgatcatgccactgcactccagcatgggcagcagagtgagactctgtctcaagaaaataaacaaacaaacaaacaaaacagttttatttcttctttccaatctctatacctttaattttcttttttttttttttgttttattgcattagatatgactctggtacattattgaataggagaggagagagagggcatcttgctttatcactaaycttgggagaaagcgtctagtttctcatcattatatattatattacatgtgggttttatggagatattctttatcaagttgagggag

SEQ ID NO: 582512 - DNA, 658 bp, Homo sapiens
atattataatctattacctacacattcccaaattcacagagagttcagttcttcaccagtgtaaaggctgaaatttatgtaatttctatttctatgatttattctataaaaatcgtatggaatgattgaataaatctttacgccatttttaaactaaagtgtaattctcaagcagtaaaatttcctctttttgtgttaagcatgttttgaaaaaaatgcatactaccttgtaatcaycaccagaatcaagatataaagatagagaacatgtttatcacttccaaaataaattctctttgcccccatttaatcaatccctccactccaatttattattcatattaatgggatcatgtagtacatagacttttgagtctgttttctttcatttagcacaatgcatgttttagtagttctttccttctaattggcagcaggcagggtgcattccattgtataaatgtgctatgtcttgcttatctattcaccagttgaaggccatttgagttgcttctagtttggggctgttaataacaaagctactacaaacacagacaaaagtttttgtatgaacaaaaagttttattttttctagataaatatttctgagtaaaatgaaattgtgtggctcatttatatttaactttataagaaattg

SEQ ID NO: 582513 - DNA, 236 bp, Homo sapiens
taagaactgcattcaacattgcagaaactgtgaaagcaagaagacagtgaaatgaaaaattcaaaatgttgacagaaaaaaacccaccaacctaagtttctgtacccactgaaaacacccttcaaaagtgaaggagaattaaggccttcctcagaaaaataaaaattcaagaaacttgttgccaggagacctgtcttgcaagaaatkttaaatgaaattctttagagggaaacaaa

SEQ ID NO: 582514 - DNA, 493 bp, Homo sapiens
tatattttttaagtgataaggcttgaaagttgaaattactctttgatccaagggcaccagaatgaatgttgggttagtaggcatgaaaacaatattcagctctttatacatctctgtaaaagcccttgagtaccaggggcattgtcagtgagcggtaatactttgaaaggaatcttatttattgagcagtagttgtcgacagtgggcttaagatattcartaaaccatatttgtaaaccgatagtctgtcatccaggctttgttcccatttgtagagtacaggcagagctgtgttttatcataattcttcagggcccttggattttcagaatagtaaatcatcattggtttcaagttaacatcaccaactgcattaggccttaacaaaagattcagcatgtcctttgaagccttaaatccaggcatcaactcctctctagctgggaacatcctggatggcatctccttctaatagaaggctgttttgtctcca

SEQ ID NO: 582515 - DNA, 536 bp, Homo sapiens
aaaaggccaaagtgaaaaaaaaaaaaaagaaaagaaaaggaaaaaaaaatgaaaaagaagccattgaataccctattgaccataagaaaaaggyagggaaagttggtcaacggcaacccaggcactgaaggaaaaagaacatggagaatgacaaaagcccagagggaagagtaaaaggacacaaacaccattctcagggaccaggactgggcgccgttctcagggaccaggactgggcactaatcacagaactgtaacaggcaccccatgggaatgaccaactgttagacggggcctgcagggcagcacttccctcttgcctcccaccaacagcttctaaagggaaatgccgactgttttcacaccagtcccctcactgcagctgagtttgtgggctcagatgataggtcacaacaacctgattcagtcctcactgtggctgagtgtgtcaggggcagaagacaggccaccacaacctgattcagtcctcactgtggctgtgtgtggggggtcagatgacaggtcaccacaacctg

SEQ ID NO: 582516 - DNA, 536 bp, Homo sapiens
aaaaggccaaagtgaaaaaaaaaaaaaagaaaagaaaaggaaaaaaaaatgaaaaagaagccattgaataccctattgaccataagaaaaaggtagggaaagttggtcaacggcaacccaggcactgaaggaaaaagaacatggagaatgacaaaagcccagagggaagagtaaaaggacacaaacaccattctcagggaccaggactgggcgccgttctcagggaccaggactgggcactaatcacagaactgtaacaggcaccccatgggaatgaccaactgttagacggggcctgcagggcagcacttccctcttgcctcccaccaacagcttctaaagggaaatgccgactgttttcacaccagtcccctcactgcrgctgagtttgtgggctcagatgataggtcacaacaacctgattcagtcctcactgtggctgagtgtgtcaggggcagaagacaggccaccacaacctgattcagtcctcactgtggctgtgtgtggggggtcagatgacaggtcaccacaacctg

SEQ ID NO: 582517 - DNA, 536 bp, Homo sapiens
aaaaggccaaagtgaaaaaaaaaaaaaagaaaagaaaaggaaaaaaaaatgaaaaagaagccattgaataccctattgaccataagaaaaaggtagggaaagttggtcaacggcaacccaggcactgaaggaaaaagaacatggagaatgacaaaagcccagagggaagagtaaaaggacacaaacaccattctcagggaccaggactgggcgccgttctcagggaccaggactgggcactaatcacagaactgtaacaggcaccccatgggaatgaccaactgttagacggggcctgcagggcagcacttccctcttgcctcccaccaacagcttctaaagggaaatgccgactgttttcacaccagtcccctcactgcagctgagtttgtgggctcagatgataggtcayaacaacctgattcagtcctcactgtggctgagtgtgtcaggggcagaagacaggccaccacaacctgattcagtcctcactgtggctgtgtgtggggggtcagatgacaggtcaccacaacctg

SEQ ID NO: 582518 - DNA, 536 bp, Homo sapiens
aaaaggccaaagtgaaaaaaaaaaaaaagaaaagaaaaggaaaaaaaaatgaaaaagaagccattgaataccctattgaccataagaaaaaggtagggaaagttggtcaacggcaacccaggcactgaaggaaaaagaacatggagaatgacaaaagcccagagggaagagtaaaaggacacaaacaccattctcagggaccaggactgggcgccgttctcagggaccaggactgggcactaatcacagaactgtaacaggcaccccatgggaatgaccaactgttagacggggcctgcagggcagcacttccctcttgcctcccaccaacagcttctaaagggaaatgccgactgttttcacaccagtcccctcactgcagctgagtttgtgggctcagatgataggtcacaacaacctgattcagtcctcactgtggctgagtgtgtcaggggcagamgacaggccaccacaacctgattcagtcctcactgtggctgtgtgtggggggtcagatgacaggtcaccacaacctg

SEQ ID NO: 582519 - DNA, 394 bp, Homo sapiens
tgtaataccagctactcaggagctgaggcaggagaattgcttgaacccgggaggtggaggctgcagtgagccgagatcacaccactgcgctctagcctggacaacaagagtgaaactctgtctcaaaagaaaaaaaattwaaaataaaagaacaaggaaacaaaagtaacaaggcttgacaccagatgagcctgaatctaagcaagaaaagcccagaagaaatcccattttgggtcactggctgcatggtagtaataccatacacataagggaagagaggaggatgtggctttcactttgaattttttgagcttaaggtaacttttgcgtagctacaaagaagcattcaacagagagttaaacctatgatggaaagactgaaggggtccaagct

SEQ ID NO: 582520 - DNA, 572 bp, Homo sapiens
ggctcactgcaacctccacctcctggcttcaagcaattctcctgccttagtatcccaagtagctgggactacaggtgcgcatcaccacgcccagctaatttttgtatttttagtagagatggggtttccccatgttggccaggatggtcacgatctcctgacttgtgatctgcctgctttggcctccccaagtgctgggattacaggtatgagccaccatgcctggmcattgtttaacctttgtactaataaaacactacctttctaaaatcatgtatatgcaatagatcaatattaactgcatttttgtcagattactctaaacagcattacacatatacatcctctgttatctaatcttaaaataagtagaaattttactttatttatgtgattatttttctatgtaagcaaacttcaagttatgtctagtcactaaaaatactaaaggtcacattttgtaagtgatgtcttatttttatgataatgtttcttgtttaacttaaacattattttttttttacttattttagatggagccggactgtatagaacaaataattagagaaaca

SEQ ID NO: 582521 - DNA, 572 bp, Homo sapiens
ggctcactgcaacctccacctcctggcttcaagcaattctcctgccttagtatcccaagtagctgggactacaggtgcgcatcaccacgcccagctaatttttgtatttttagtagagatggggtttccccatgttggccaggatggtcacgatctcctgacttgtgatctgcctgctttggcctccccaagtgctgggattacaggtatgagccaccatgcctggccattgtttaacctttgtactaataaaacactacctttctaaaatcatgtatatgcaatagatcaatattaactgcatttttgtcagattactctaaacagcattacacatatacakcctctgttatctaatcttaaaataagtagaaattttactttatttatgtgattatttttctatgtaagcaaacttcaagttatgtctagtcactaaaaatactaaaggtcacattttgtaagtgatgtcttatttttatgataatgtttcttgtttaacttaaacattattttttttttacttattttagatggagccggactgtatagaacaaataattagagaaaca

SEQ ID NO: 582522 - DNA, 572 bp, Homo sapiens
ggctcactgcaacctccacctcctggcttcaagcaattctcctgccttagtatcccaagtagctgggactacaggtgcgcatcaccacgcccagctaatttttgtatttttagtagagatggggtttccccatgttggccaggatggtcacgatctcctgacttgtgatctgcctgctttggcctccccaagtgctgggattacaggtatgagccaccatgcctggccattgtttaacctttgtactaataaaacactacctttctaaaatcatgtatatgcaatagatcaatattaactgcatttttgtcagattactctaaacagcattacacatatacatcctctgttatctaatcttaaaataagtagaaattttaytttatttatgtgattatttttctatgtaagcaaacttcaagttatgtctagtcactaaaaatactaaaggtcacattttgtaagtgatgtcttatttttatgataatgtttcttgtttaacttaaacattattttttttttacttattttagatggagccggactgtatagaacaaataattagagaaaca

SEQ ID NO: 582523 - DNA, 572 bp, Homo sapiens
ggctcactgcaacctccacctcctggcttcaagcaattctcctgccttagtatcccaagtagctgggactacaggtgcgcatcaccacgcccagctaatttttgtatttttagtagagatggggtttccccatgttggccaggatggtcacgatctcctgacttgtgatctgcctgctttggcctccccaagtgctgggattacaggtatgagccaccatgcctggccattgtttaacctttgtactaataaaacactacctttctaaaatcatgtatatgcaatagatcaatattaactgcatttttgtcagattactctaaacagcattacacatatacatcctctgttatctaatcttaaaataagtagaaattttactttatttatgtgattatttttctatktaagcaaacttcaagttatgtctagtcactaaaaatactaaaggtcacattttgtaagtgatgtcttatttttatgataatgtttcttgtttaacttaaacattattttttttttacttattttagatggagccggactgtatagaacaaataattagagaaaca

SEQ ID NO: 582524 - DNA, 486 bp, Homo sapiens
tccctgagagcacacgggagtgcagcacacacaccaacccacaccaactgccattgaagacagagccttggtrggcacagaaccaagaaccccacccctgccagcacctcacccttgagctaatgctgtgcagagaaaaagggaccttcttataccctgagcgaccactgtttctttgaggggcacagagaaggcaccatggtctgcactggccagcagctcaccctgaaccaacactacctccagtgcaacacacacacagcaggggagccctggcccacaccccagctgtcttgcctccaccactgggtgaacgcccgcagggaggaagggaattttgcatccactcgcattccgccacagttgccacacttcggtcccctcagtgcagtggactccaaatctcgaggagccagagaacaaagttggggcctaagacaagttccctagagttaaagcacacagtccaggaattgggagctgcac

SEQ ID NO: 582525 - DNA, 486 bp, Homo sapiens
tccctgagagcacacgggagtgcagcacacacaccaacccacaccaactgccattgaagacagagccttggtaggcacagaaccaagaaccccayccctgccagcacctcacccttgagctaatgctgtgcagagaaaaagggaccttcttataccctgagcgaccactgtttctttgaggggcacagagaaggcaccatggtctgcactggccagcagctcaccctgaaccaacactacctccagtgcaacacacacacagcaggggagccctggcccacaccccagctgtcttgcctccaccactgggtgaacgcccgcagggaggaagggaattttgcatccactcgcattccgccacagttgccacacttcggtcccctcagtgcagtggactccaaatctcgaggagccagagaacaaagttggggcctaagacaagttccctagagttaaagcacacagtccaggaattgggagctgcac

SEQ ID NO: 582526 - DNA, 486 bp, Homo sapiens
tccctgagagcacacgggagtgcagcacacacaccaacccacaccaactgccattgaagacagagccttggtaggcacagaaccaagaaccccacccctgccagcacctcacccttgasctaatgctgtgcagagaaaaagggaccttcttataccctgagcgaccactgtttctttgaggggcacagagaaggcaccatggtctgcactggccagcagctcaccctgaaccaacactacctccagtgcaacacacacacagcaggggagccctggcccacaccccagctgtcttgcctccaccactgggtgaacgcccgcagggaggaagggaattttgcatccactcgcattccgccacagttgccacacttcggtcccctcagtgcagtggactccaaatctcgaggagccagagaacaaagttggggcctaagacaagttccctagagttaaagcacacagtccaggaattgggagctgcac

SEQ ID NO: 582527 - DNA, 486 bp, Homo sapiens
tccctgagagcacacgggagtgcagcacacacaccaacccacaccaactgccattgaagacagagccttggtaggcacagaaccaagaaccccacccctgccagcacctcacccttgagctaatgctgtgcagagaaaaagggacmttcttataccctgagcgaccactgtttctttgaggggcacagagaaggcaccatggtctgcactggccagcagctcaccctgaaccaacactacctccagtgcaacacacacacagcaggggagccctggcccacaccccagctgtcttgcctccaccactgggtgaacgcccgcagggaggaagggaattttgcatccactcgcattccgccacagttgccacacttcggtcccctcagtgcagtggactccaaatctcgaggagccagagaacaaagttggggcctaagacaagttccctagagttaaagcacacagtccaggaattgggagctgcac

SEQ ID NO: 582528 - DNA, 575 bp, Homo sapiens
tactacacacctataaaataggatgaaataatgtcttttgcagcaacatgaatggagctggataccattattctaagtgaattaatgcaggaacagaaaaccaaacaaacactgcatgttctcacttataagtgggggctaaacattgagtccacatggacacaragaagggaacaatagacacaaggtctactgtgggtggagggtggggggagagtgaggatcaaaaaactccctattagatactacgttcactacctggatgactacgtaatctgtacaccaaatcccattgacacacattttacccatataataaacctgcacatgtacccgctgaacctaaaataaatgttggaaggaaataaagttacaaccaactcttgtactattgtgaggaaacaatcatatgtgttgacaaaaaatcagctactaatagatttataatagtatatatgtagcagaaaaatatcagatataacttatatacccaaaagtatgacttaaaaacagcatgacaatctttatgatgggatattgtgcaactactagaagcatattttcagagattattt

SEQ ID NO: 582529 - DNA, 575 bp, Homo sapiens
tactacacacctataaaataggatgaaataatgtcttttgcagcaacatgaatggagctggataccattattctaagtgaattaatgcaggaacagaaaaccaaacaaacactgcatgttctcacttataagtgggggctaaacattgagtccacatggacacagagaagggaacaatagacacaaggtctactgtgggtggagggtggggggagagtgaggatcaaaaaactccctattagatactacgytcactacctggatgactacgtaatctgtacaccaaatcccattgacacacattttacccatataataaacctgcacatgtacccgctgaacctaaaataaatgttggaaggaaataaagttacaaccaactcttgtactattgtgaggaaacaatcatatgtgttgacaaaaaatcagctactaatagatttataatagtatatatgtagcagaaaaatatcagatataacttatatacccaaaagtatgacttaaaaacagcatgacaatctttatgatgggatattgtgcaactactagaagcatattttcagagattattt

SEQ ID NO: 582530 - DNA, 575 bp, Homo sapiens
tactacacacctataaaataggatgaaataatgtcttttgcagcaacatgaatggagctggataccattattctaagtgaattaatgcaggaacagaaaaccaaacaaacactgcatgttctcacttataagtgggggctaaacattgagtccacatggacacagagaagggaacaatagacacaaggtctactgtgggtggagggtggggggagagtgaggatcaaaaaactccctattagatactacgttcactacctggatgactacgtaatctgtacaccaaatcccattgacacacattttacccatataataaacctgcacatgtacccgctgaacctaaaataaatgttggaaggaaataaagttacaaccaactcttgtactattgtgaggaaacaatcatatgtgttgacaaaaaatcarctactaatagatttataatagtatatatgtagcagaaaaatatcagatataacttatatacccaaaagtatgacttaaaaacagcatgacaatctttatgatgggatattgtgcaactactagaagcatattttcagagattattt

SEQ ID NO: 582531 - DNA, 338 bp, Homo sapiens
tggccaatatggtgaaaccctgtctctactaaaaatacaaacattagctgggtgtaatggtgggtgcttgtagtctcagctactcaggaggctgaggcaggagaatcacttgaacccgggaggtggaggttgcagtgagtggagatggcaccaagamaccccagcctgggcgacagagtgagacactgcctcaaaaaaaagaaaaaaaaagtggtatgaaccacagctaaactacaatgaattagagagtaagccaaagcatctcaaagtatatcatcagttatcaggcaataacatgtaatttctaaaacctaacttaaatgcagcttttaaagaca

SEQ ID NO: 582532 - DNA, 338 bp, Homo sapiens
tggccaatatggtgaaaccctgtctctactaaaaatacaaacattagctgggtgtaatggtgggtgcttgtagtctcagctactcaggaggctgaggcaggagaatcacttgaacccgggaggtggaggttgcagtgagtggagatggcaccaagaaaccccagcctgggcgacagagtgagacactgcctcaaaaaaaagaaaaaaaaagtggtatgaaccacagctaaactacartgaattagagagtaagccaaagcatctcaaagtatatcatcagttatcaggcaataacatgtaatttctaaaacctaacttaaatgcagcttttaaagaca

SEQ ID NO: 582533 - DNA, 338 bp, Homo sapiens
tggccaatatggtgaaaccctgtctctactaaaaatacaaacattagctgggtgtaatggtgggtgcttgtagtctcagctactcaggaggctgaggcaggagaatcacttgaacccgggaggtggaggttgcagtgagtggagatggcaccaagaaaccccagcctgggcgacagagtgagacactgcctcaaaaaaaagaaaaaaaaagtggtatgaaccacagctaaactacaatsaattagagagtaagccaaagcatctcaaagtatatcatcagttatcaggcaataacatgtaatttctaaaacctaacttaaatgcagcttttaaagaca

SEQ ID NO: 582534 - DNA, 462 bp, Homo sapiens
agaaaagttgaagtctaggaatgtctccacttcagcaaaaggtccccaggtaatatcattcactcctttcagacatctgatctgttgagattgccttattagaaacattgctggaaaaagtgtgtgagttttttcttttaatgggcacatgttcttttgttgttctgtgggaaaagaaatagagatacttaatgaacctggaaacaatgattgcgagattttgcattcttggaggaattgttatcattcatttccatcctcttgatatctgatctctaaatccggaagagacttcaaaaagctgcaaaagaaaacaaccaccaayacaaccaaatcaatcaaacacaggacattctatataagcctggttttaatcacaaatcaaattgagatcacgataaacatatttttcttacagataccactttttcccacaatatcctctaaaattcattaatatga

SEQ ID NO: 582535 - DNA, 604 bp, Homo sapiens
ttttccttttttttttttttttttttttgatggagtctcgctctgtcacccaggctggagtacagtggtgggatctcggctcactgtaagctccgcctcctgggytcacaccattttcctgcctcagcctcccaagtaactggaactacaggggcccaccaccactcccagctaatttttttttgtatttttagtagacacagggtttcaccatgttagccagaatggtcttgatctcctgaccttgtgatcccacctgcttcagcctcccaaagtgctgggattacaggtgtgagccaccatgcctggcccactgctatgttttctattctccgtattttagagtcttctcttggttgttgtatgtatactgtcccatttttagctgtatttagtgagagaaataggaaaaagtatatctactctatttttctagacctaaagaaatgccagagtctgtttgatatgctgtcaccaaataccatggactgggtggcttataaacaacacaatgtatttctcacagttctggaggcggggcatacaagacgaaggtgctggtagagttggcgtctgaggggagcctgcctctgggtccagatgg

SEQ ID NO: 582536 - DNA, 525 bp, Homo sapiens
ctgttcacactatgctcactgtagtgctaaaaggaatggaacctggagaaggagtttttttcctggaaaggaagtagctttggaaagaaaaaaagaagtaagtgctgatatgttgaaattaaagaaatagccattctgacatagagactgtgctttagacctattgctgaagaggctacataaaaaatatgtgccacattttctttatccagtctaacattgatgggcatttggaatactatgcaaccataaaaaagaatgagttcatgtcctttgcagggacatggttgaagctggaaaccatcattcccagcaaactaactcaggaacagaaaaacaaacaccacatgttcttactcataagtgggagttgaacaatgagaacatatgggcacatggaggggaacatcacatactgggggttgggggaaaggggagggatagcattaggataaatacctactgtagatgaygggttgatgggtgcagcaaatcatcatggcacatgtatacctatgtaacaaa

SEQ ID NO: 582537 - DNA, 345 bp, Homo sapiens
cctctcctaattcagattatgcctcccctctcctcaccccctccccttgttttctgccttatttttcttcatgtcatttatcactttctatgatttttttaagttttagatatttatgacgtttgttgtttcttaaaccccctaaaatgtatgatccaagcatgcagagactgctgtttgctctgtttcctgctgcaatgctcacacctagagcaagctcaccgcgaatctctttggttcaagactcagtgacttgaataaattcttttcgatyttatatcttgatctggtctggtcatccatatcttttcatgcaaaagtaaacacttctataattaatgtcat

SEQ ID NO: 582538 - DNA, 633 bp, Homo sapiens
ggctctgcctcatgacctaatcaccttccaaaggccccacctcctaataccatcactttggaggttaggatttcagcatataaattttgaagagggacacaaacattcagactctagcacactcactagcaagaacttttctattaggtttcactgggtgctcctgagggcaggacaggagaccgcagagaccatctttctttgggggcataggcatgcaggaggtaacctgtggctcctagggaaaacctcaaagtctctctcacccctttttgggtcccttctctcctgtgaaccaaactccttaagccactgaggcaagggaacaaaaacttacactcatggggcacaaagaatgattgtggctgggagaagaatggaagaaaaactccatgtttgtgggagaacaggaaagcaggctggattccatagtgataccctccactggtctgctaccactgggagagagcagaaaatgcctgyccaagataaaccacagatgcaagttcttagagacctataaagagacatagactcctacacaataatagtgggagacttcaatactccattgacaatattagacagatcatcgaggcagaaaattaacaaagatactcaggacctgaattc

SEQ ID NO: 582539 - DNA, 397 bp, Homo sapiens
gatcaatagatgatattggtattagatttattaataacatttaatattaacaattaatattattattattgcataactacctagtaattattattgttactactacaactactattacatcatcatcatgatcaccatcataccagctcacagagcagtcaactgcaaaaccaggcttaaaatctggttgcctaacttaccatgatgacatattttcttctctattatagaaacaacatgaaaacctcaaactgagaaagcatttaaaaaagactcttggcattcagaaggttatttgtaacatgtccataaaattgcagataagaatgtaraataatttaaatggcatagagtacaaagaagcaaattcaatgccatgcaatcttgggcgctaatg

SEQ ID NO: 582540 - DNA, 594 bp, Homo sapiens
  misc_feature 570, 583: n = A,T,C or G
tctatgtaccagaaactgcttagaaaaattagctcatttaatccttggaacaacccttggaggtaggtaggatcaytatccccattttataaatgaggatataagctgcatttctttcttttatcagtttattgtgcttcctttttgtcactctctaatttatgacagtggagcagaaggaaaaacacaggtttctttgaacttctggtagcttggtcatcaaatgtataaatatatacatgtatatgcttattctgcaaatactttttgagcacctactatatgcaaggcatttgcttgatactgttgaaaatgggaagataaatgccaaactgcagcaatcaaatgctcacagccagtacaggagattaaaaaataaagacttaaacttcactgtgatagtgcaataacgcaattgattatttcaaaaagagaggaatggaaccagtgaatcctgcaaatctctgtgaaccagaactcatccacagcttgaccccagtagataaatagcttcttttttttttttttttgagatggagtctcgctcttgtcacccagcctggagtgcantggtgtgatctcngctcactgcaa

SEQ ID NO: 582541 - DNA, 424 bp, Homo sapiens
taggttcagaattttgaatcatcaggtacagtggaggaaaagaatgacaagtggggcagaaaacagggagctaatcaaaactctgtgtataatctgatctgcacagtctgtgtatattgaacaattaattgttcaatctgcttttcaaacacacagaatgttcaaaaccagaaatctttgcttaagcaagtaatgagaggcttttttcactggagctctgttgaaaaggcctgctgagaattaatctattttgtttgagtttcctacaagggcaatatattcacatagtacttgttcaattaaaaaccaggtatagatggtacacagtagtggcatttgattactgtcaccatccttacctaaaaagatgagaaaatattctaaaartgtcttggtcctcaagaaagaggctttcaagaaatat

SEQ ID NO: 582542 - DNA, 605 bp, Homo sapiens
tgtttcccaggctggagtgcagtggcacgatcatagctcactgcagcctcaaactcctggactcaagtgatcctcccatctcagcctccctatatatactttttcatttttckttttagagatggcatctttctatgctgcccagggttgtctcaaacacctgagctcaaatgatcctcctaccttgaccttccgaagtgctgggattataggagtgagccacagtgtccagcccttatatatacttttataccttatttctgatattttatttctgttacttgggtttcaatgttactgtaagttttcatttttctgtcttcataaggttaagtgaaatgttaagaccatctgccttgtagtcttccttatagctgggtgcctgaaagaatgacaaaattaatacatgattaatttatgaaaattttaaaatataaaaagtgaatttagatctataactttatcacccagagacaattatcagcatttttacacatcatgaatatgcttgcttatatagaacagtaatattataagtaaaaaaaaaatcatttagtaaatattgtgtgtaacttgagtatttcactcaacagtatatgtgtgta

SEQ ID NO: 582543 - DNA, 578 bp, Homo sapiens
ggacaccaattctgatctcttttctctttgcatttgatttgctatatttacactaaaattagatttcacagaagagaaattgagagacaataagagtaagagtgagggagagagagattgattcacactgctcaaagttatttccctgaggagcacaggcttctttccattaggtattcaaatgcaacaagaagaaaacaagggattctttacaccagagatttagatgaaactctgaggcatgacctagagcaaagtagcaattaaaactccaagttccagttcctacctattgcccacagcatgctattgattgttgggcttcaatttgccttaatggaaggctgacttgtgatgtcattgtctagaaagctattgaaactcccttgaatttgcctttgytctgtataattgattaaattcaataactttttataatctaaaaatatacagtgacatcatttaaaattccatgatttaaaatgtctttggggggaaaaactctattactttcattttttcatatcaaaaaaggttcaggacaaaattattacctcatttaattttaaaaaatcaac

SEQ ID NO: 582544 - DNA, 565 bp, Homo sapiens
ccaaaggcccaacctccaaatatcacatcagggattagagtttcactatacggattggggcaggggracaaacagtccattgcaatctttccagctgctgtgtggagtggggtgtgaggggagaaactgatcatggtgagatgctggtgtggggtctcaagtcagggcagggaggatgcggggagcagatagatttgaggtacatttggaggcaaagccatggagttttgggatccttgaggtctccatgccttttttgtgtgtccattttacctttcaacctctttgcattttttggtttttggctttctaaattattctcagctagccatttctgatctttactttttgtccattaataagggattcatttgaaaaacctaagtgaccattgatgccctattagtgagggttctccagagaaacagaaccaatatgacatgcatacatatataaatggatgcatatgaatatatgagagagagacattgagagagacagagatttattataaggaattgcctcatgcaatttcaaaggctggcaagtccaaaaggaaaaaaga

SEQ ID NO: 582545 - DNA, 565 bp, Homo sapiens
ccaaaggcccaacctccaaatatcacatcagggattagagtttcactatacggattggggcagggggacaaacagtccattgcaatctytccagctgctgtgtggagtggggtgtgaggggagaaactgatcatggtgagatgctggtgtggggtctcaagtcagggcagggaggatgcggggagcagatagatttgaggtacatttggaggcaaagccatggagttttgggatccttgaggtctccatgccttttttgtgtgtccattttacctttcaacctctttgcattttttggtttttggctttctaaattattctcagctagccatttctgatctttactttttgtccattaataagggattcatttgaaaaacctaagtgaccattgatgccctattagtgagggttctccagagaaacagaaccaatatgacatgcatacatatataaatggatgcatatgaatatatgagagagagacattgagagagacagagatttattataaggaattgcctcatgcaatttcaaaggctggcaagtccaaaaggaaaaaaga

SEQ ID NO: 582546 - DNA, 565 bp, Homo sapiens
ccaaaggcccaacctccaaatatcacatcagggattagagtttcactatacggattggggcagggggacaaacagtccattgcaatctttccagctgctgtgtggagtggggtgtgaggggagaaactgakcatggtgagatgctggtgtggggtctcaagtcagggcagggaggatgcggggagcagatagatttgaggtacatttggaggcaaagccatggagttttgggatccttgaggtctccatgccttttttgtgtgtccattttacctttcaacctctttgcattttttggtttttggctttctaaattattctcagctagccatttctgatctttactttttgtccattaataagggattcatttgaaaaacctaagtgaccattgatgccctattagtgagggttctccagagaaacagaaccaatatgacatgcatacatatataaatggatgcatatgaatatatgagagagagacattgagagagacagagatttattataaggaattgcctcatgcaatttcaaaggctggcaagtccaaaaggaaaaaaga

SEQ ID NO: 582547 - DNA, 565 bp, Homo sapiens
ccaaaggcccaacctccaaatatcacatcagggattagagtttcactatacggattggggcagggggacaaacagtccattgcaatctttccagctgctgtgtggagtggggtgtgaggggagaaactgatcatggtgagatgctggtgtggggtctcaagtcagggcagggaggatgcggggagcagatagatttgaggtacatttggaggcaaagccatggagttttgggatccttgaggtctccatgccttttttgtgtgtccattttacctttcaacctctttgcattttttggtttttggctttctaaattattctcagctagccatttctgatctttactttttgtccattaataagggattcatttgaaaaacctaagtgaccattgatgycctattagtgagggttctccagagaaacagaaccaatatgacatgcatacatatataaatggatgcatatgaatatatgagagagagacattgagagagacagagatttattataaggaattgcctcatgcaatttcaaaggctggcaagtccaaaaggaaaaaaga

SEQ ID NO: 582548 - DNA, 579 bp, Homo sapiens
gctttgtaatatattttcttaccatttagggggtacatactctttgactcttcattttctatgtcaagaataaaaaggcaaatggatccttcctttaacatggttaatgaaaagtaaaatttcaatattgatagtttttgaaagtttctttccagttcacaacttgttattagtaatgtcatatttttaggattgttttcaaatttgggaaaacatctattgaatttctttcctatatgagctgtaagatttcaaaacattttgagcttttctattcagtaattgaatctaagtacatttttgaattgataatactcattaaccaggttttgtcaatatcttattgtgttggcacattttgagctttatattagcttcattaatataaatatttttgtaaagttagccatgtgtgtatttaattaattcatttcattaattggattgtcaaatgtattgaattatcaagtttataacatttattttaaatttatctcaacgaattactgctgtcagtataatccgaaaaatttgttacaattgacytctcaatatcagcataatttctattgattttac

SEQ ID NO: 582549 - DNA, 194 bp, Homo sapiens
cttcttttaagcaaattctttatccagcaaagggcaggaaggtctatgrgtttcaggtatcttggtgatttccactgatgttgccttcttggcaggcatgtgggctcctttgcagtgaaagggcagaaacagcaggtgagggccgatgtgaaccatggcagagaatgagaagtctacagaagaatcatctcaga

SEQ ID NO: 582550 - DNA, 622 bp, Homo sapiens
tttagtaatcacttttatcttaaaatatctaacaatgtcttaagaaaatgtctttctcctaattgtttttgtctttatctaggcttattgaatctgtgcccccaacccctgctccaaaaaagaaattgatgaatccctgtatttatttttgaaatatttgtgctcaaagcttctgaacttgttcctttattgactaaccaataaacaaaaaatgtctgttttctcagcagaagcccaggaacttgtgtcactctgagaaataacagtgaatttcctcattaggaaaaagaccgctgagtctggcatttgatagcaatcaaaagtgcccagggctaagacctacctcttcacccctccactcctgccagcctttatttccctctctgactgcccaatactgggtttgcccamtcaggaggaacctacccatacacttcaccactagggatggtctgtaaatgagtgactaatgaaaatgtaggacctacccaaatttatctaaggtgagttgaagatcaaatgaatgaaatgaagtgaaaagaaaagtttagagaaaaaagaataaaaagaaatgaacaaaccctccaagaaatatgggactatgtgaaaagaccaaatctac

SEQ ID NO: 582551 - DNA, 590 bp, Homo sapiens
gttgacaatgcagcagaatatattttcatgttgaatataggatattaagttttcattaaaatccacagaactttacagcacaaagaataaaccttaatgtatacttttttagtattaggaagttgggatattccggaatggaataaagaatgtgacaagacaatgtaaatgtgtttttaaaaatcacaaccttttcacttaggtcagcacctttttccatgacccccttcagttcacaaccttactgaaggcagtcaaggaaaaaggtcctgacctaagtaactttggaaatgagtctgtaagactaaaggcaaaaggaattatatataagcagtatattctatttgataaagttgttttcaagaagggtctggtttaacagttctaaaaccacaatgcaaatacagttggtcatttttacctgtgggttctgcattcacaagttgaactaactgcagatcaaaaatatttgaataagactatacctgtattgaacatgtatagactttttctcataattattccctaaatgatacagtataaaaactatttgcatagcatctacattawattaggcattacaagtaaac

SEQ ID NO: 582552 - DNA, 626 bp, Homo sapiens
aaactcactcactatcatgtgaatagcatgggggtaactgcccccatgatctaatcaccttccaccagctccctcccttgacacatggagattacaatttgacatgagatttgggtgaggacacagagccaaaccacatcattctaccctggcccctctcaaatgtcatgtctttttacattgataaatgcaattttcccctctcaacagtcctccaaagacttaactcattccagcattaatgcaaaagtccaagtccaaggtctcatgtgagacaaggtgagtctcttctgtctatgagcctgtaaaataaaaaacaagttagttacttccatgatacagtgggagtgcgggcattgrgtaaatgttcctgttccacattggagaaattggacaaaacaaaggggctacagactccatgcaagtctgaaacccagcggagcagtcattaaatcttaaagccccaaaataaatctcctttgactccaggtctcacatccaagacacactgatgcaaggggctggctcttaaggtcttgggcagctctggccctgtggctttgcagggtccacctcccacagctgctttcatgggctggcattgggtgccttcagcttctccaggt

SEQ ID NO: 582553 - DNA, 626 bp, Homo sapiens
aaactcactcactatcatgtgaatagcatgggggtaactgcccccatgatctaatcaccttccaccagctccctcccttgacacatggagattacaatttgacatgagatttgggtgaggacacagagccaaaccacatcattctaccctggcccctctcaaatgtcatgtctttttacattgataaatgcaattttcccctctcaacagtcctccaaagacttaactcattccagcattaatgcaaaagtccaagtccaaggtctcatgtgagacaaggtgagtctcttctgtctatgagcctgtaaaataaaaaacaagttagttacttccatgatacagtgggagtgcgggcattgggtaaatgttcctgttccacattggagaaattggacaaaacaaaggggctacagactccatgcaagtctgaaacccagcggagcagtcattaaatcttaaagccccaaaataaatctcctttgactccagktctcacatccaagacacactgatgcaaggggctggctcttaaggtcttgggcagctctggccctgtggctttgcagggtccacctcccacagctgctttcatgggctggcattgggtgccttcagcttctccaggt

SEQ ID NO: 582554 - DNA, 505 bp, Homo sapiens
tttatgaaacatatattgccctctaattaaggtacaacttagcagataaaagaaactaaacaagaaggctcatatataccatataacattaaggaaaaacacacaaatatatattgcataagcatatttgatttcttttcctagtgaamatgtacctttaacacttgaagaaaattccaatgagtaaatgataaatctatttttgagggctacccctactctaagtcacattttcattaatttaatttatttatcttataatgtgatgaaccaagttagaaattttgaccataaatttttgttttactgagtacaaattagtctgttaggtaaagggtaaaggtataggaaacaaatatttttaaaagtccaggttcatcagcacatcaataatgaaatgcaagagaattttattgctcatgttcaagactaaactgagcagtaactgggttttttttttttttttggaaaatgagatttttgactttaacaaaacaaatacaga

SEQ ID NO: 582555 - DNA, 562 bp, Homo sapiens
gattcattcaagacctgtccccaggggtcccgtcacaattctgtgccatgtgcttgtaatcagcagtcgctccagagaatgaagactcagatcccttggattcttctgcctggccttttagaagcccactggtctatgccctgcccttcgctgaaggcacctcaagcttattgaaatgttggccagccatgacttttaaccactcccagaattctttgttacaggattactcacatccctgaggccatggatggaataactgatctgtaaacaaaagggaaacaactgccaactcctggatccaataataaggattacactgtggaaccttggggattgtgagactcttaaatactaaattccatagtcaggaatggggaatgccccaatttggggctttttggtgtctccatcatgggttgtgtgccgtgtttcttgttcctgatgttttattatgtcamccccaaaaaaaaaaaaaaaaaaaaaaaacccaaaaaacattgcatgcctctgcagtagtcatccttcctttattttcatccttccctctcagattttccca

SEQ ID NO: 582556 - DNA, 562 bp, Homo sapiens
gattcattcaagacctgtccccaggggtcccgtcacaattctgtgccatgtgcttgtaatcagcagtcgctccagagaatgaagactcagatcccttggattcttctgcctggccttttagaagcccactggtctatgccctgcccttcgctgaaggcacctcaagcttattgaaatgttggccagccatgacttttaaccactcccagaattctttgttacaggattactcacatccctgaggccatggatggaataactgatctgtaaacaaaagggaaacaactgccaactcctggatccaataataaggattacactgtggaaccttggggattgtgagactcttaaatactaaattccatagtcaggaatggggaatgccccaatttggggctttttggtgtctccatcatgggttgtgtgccgtgtttcttgttcctgatgttttattatgtcacccmcaaaaaaaaaaaaaaaaaaaaaaaacccaaaaaacattgcatgcctctgcagtagtcatccttcctttattttcatccttccctctcagattttccca

SEQ ID NO: 582557 - DNA, 523 bp, Homo sapiens
tcatacctgtaatctcagcatttctggaggttgaggcaggattacttgagcataggcgtttaataccagcctggacaacatagtgagccttgcctctataaaaaagtaaaaataaaaaaatagctgggtgtggtggtacatgcctatagtcctagttacttgggaggctgaggcaggaggatcacttgagcctaggagtttgaggttactgtaagctatgatcatgccactgcaccccagccagtttgatagagtgatgccctgtctctaagaaaaaagaaaaaagagggaggccaaggcaggcagctcacaaggtcaggggatagagaccatcctggctaacacggtgaaaccttgtctctactaaaaatacaaaraaattagccgggcgtggtggcgggcgcctgtagtcccagctactcgggatgctgaggcagaagaatggcatgaacccaggaggcggagcttgcagtgagccgagatggcgccactgcactccagcctgggcgacagagcgagactc

SEQ ID NO: 582558 - DNA, 522 bp, Homo sapiens
catacctgtaatctcagcatttctggaggttgaggcaggattacttgagcataggcgtttaataccagcctggacaacatagtgagccttgcctctataaaaaagtaaaaataaaaaaatagctgggtgtggtggtacatgcctatagtcctagttacttgggaggctgaggcaggaggatcacttgagcctaggagtttgaggttactgtaagctatgatcatgccactgcaccccagccagtttgatagagtgatgccctgtctctaagaaaaaagaaaaaagagggaggccaaggcaggcagctcacaaggtcaggggatagagaccatcctggctaacacggtgaaaccttgtctctactaaaaatacaaaaaaattagccgggcgtggtggcgggcgcctrtagtcccagctactcgggatgctgaggcagaagaatggcatgaacccaggaggcggagcttgcagtgagccgagatggcgccactgcactccagcctgggcgacagagcgagactc

SEQ ID NO: 582559 - DNA, 612 bp, Homo sapiens
aattttttttctaataaatataatgtttgtgaaaatggggaaaaacctgcttttgtccagggtgtttcatgttgaagtaaaacaaagtattcattaaccatctaatatatatttattgtctgtctacatgtatcattttgtaagtatgtaaccatgaaaaacaaactctgagtctttaagtgtttctgatttgctgtatgcaagctagctacacttaaggtgctactcttccttagatacgactaatgcagcaaagtgtggtctgttcactccacacaccctgccgtggtttgaaagagatgcaaattaggtaaacttcataagtttcatctgtagccatctcatgattgtttctttgagtcataattcatgcattcatactcatgctttaatttaaaatattgattgttttaatttacaagaaaaggcaaacctcctcattgaaaagtgggccaatgtcatgaacagacacctttcaaaaaaagcatacatgcggccatggccaacaagcatgtgaagaaaagctcaacgtcactgatccccaaagaaatgcaaatcaaaaccatgagatactatctcayaccaataagaatggccattattaaaaataaa

SEQ ID NO: 582560 - DNA, 608 bp, Homo sapiens
cattacttgccttttatatttcacatgttggtttaaatgtataaaaatatgaaaccaatccatttaaaatatatttgtagttaaatgcaacattacctttgtctgtgtatatgagtgcagttgatacagaatccaaaaattaaaatttgcagcgtgtaatatcttcaattctatgaacaatctagatttctgataaaaactaaatatatagaatatgaagtgaataaaatacaaacacggaaytgtaattgagatgaagtcttataaaaacttattataattgtacaatcagggttttcctaagaataagttttagaaaatttgtaaaatattctaagaatataaatgtatataatggtttttttgaaatttctgaataaaagatttaaagtataaattttaaccatttttctgtataacatcaatttcattgtatcttatctttagttttgctttagtaaatataactgcatattacatcagaatagaaaatactatttatttacctgaagacctgtaagaacttggaattctacactatactaggatttccagtaattaaaataaggactatattaaatatgtataattaaattaaattaaatata

SEQ ID NO: 582561 - DNA, 591 bp, Homo sapiens
ggttcatgccaaagtaaaagtttctgcgtcattcattccctaccacgattagggaagcacaacagtctttgacttccgaagttaacagattttatatttatacatwttaagcatgaccatgtattgggctactttgagtcagtcccagaggataggactgtgcaacaaattcagactgtgttacaaacagctttattgcttgagttatacaatctagcagtccctttggtggtggtagtagtgggaaaagatgccttatggtcctatggcattcctgaacatatgtaccctcccacaactggaccaggaagaaattgagtccttgaatagaccaataatgagttcaaaaattgaggcagtaataaataccctaccaaccaaagaaagcccatgaccagacggattcacagctgaatactaccagaggtacaaagaacagctagcaccatttctcctgaaacttttccaaaaattgaaaaggagagactactccctcactcattctataataccagcatcatcctgataccaaaacctggcagagatgcaacaaaaaagaaaatttcaggccaatatccttgatgaacgtca

SEQ ID NO: 582562 - DNA, 591 bp, Homo sapiens
ggttcatgccaaagtaaaagtttctgcgtcattcattccctaccacgattagggaagcacaacagtctttgacttccgaagttaacagattttatatttatacattttaagcatgaccatgtattgggctactttgagtcagtcccagaggataggactgtgcaacaaattcagactgtgttacaaacagctttattgcttgagttatacaatctagcagtccctttggtggtgrtagtagtgggaaaagatgccttatggtcctatggcattcctgaacatatgtaccctcccacaactggaccaggaagaaattgagtccttgaatagaccaataatgagttcaaaaattgaggcagtaataaataccctaccaaccaaagaaagcccatgaccagacggattcacagctgaatactaccagaggtacaaagaacagctagcaccatttctcctgaaacttttccaaaaattgaaaaggagagactactccctcactcattctataataccagcatcatcctgataccaaaacctggcagagatgcaacaaaaaagaaaatttcaggccaatatccttgatgaacgtca

SEQ ID NO: 582563 - DNA, 472 bp, Homo sapiens
ggatgatgaatgcccagtggttaatggtgtgtgtagtttcctaaatcttttttcagatttgttgattttgttaaattctcagtatttgaaattttttattatggtctatacatttgaagagtataggtaattaatatatgattccgattaaacaaaaaaaacytaagtagcaaccacccagcttaaaaaaaaaagtcagtacttgcatcctatcccagttgcatccctgtccctcagaagtaactattaaatcctcagtttggggttaattagtctcttgcttaaattaaaaaaaatttttttgcataaatcacatatgtctatcttaatgttttcctgtcattttgtgtaaatcatgctgtatgtatatatttagcagccaattatatttctatataatacctgttactgtgttttgcccattttttcattgggtttttaatttaaaatactattttaaaaaattcatttg

SEQ ID NO: 582564 - DNA, 472 bp, Homo sapiens
ggatgatgaatgcccagtggttaatggtgtgtgtagtttcctaaatcttttttcagatttgttgattttgttaaattctcagtatttgaaattttttattatggtctatacatttgaagagtataggtaattaatatatgattccgattaaacaaaaaaaacctaagtagcaaccacccagcttaaaaaaaaaagtcagtacttgcatcctatcccagttgcatccctgtccytcagaagtaactattaaatcctcagtttggggttaattagtctcttgcttaaattaaaaaaaatttttttgcataaatcacatatgtctatcttaatgttttcctgtcattttgtgtaaatcatgctgtatgtatatatttagcagccaattatatttctatataatacctgttactgtgttttgcccattttttcattgggtttttaatttaaaatactattttaaaaaattcatttg

SEQ ID NO: 582565 - DNA, 472 bp, Homo sapiens
ggatgatgaatgcccagtggttaatggtgtgtgtagtttcctaaatcttttttcagatttgttgattttgttaaattctcagtatttgaaattttttattatggtctatacatttgaagagtataggtaattaatatatgattccgattaaacaaaaaaaacctaagtagcaaccacccagcttaaaaaaaaaagtcagtacttgcatcctatcccagttgcatccctgtccctcagaagtaactattaaatcytcagtttggggttaattagtctcttgcttaaattaaaaaaaatttttttgcataaatcacatatgtctatcttaatgttttcctgtcattttgtgtaaatcatgctgtatgtatatatttagcagccaattatatttctatataatacctgttactgtgttttgcccattttttcattgggtttttaatttaaaatactattttaaaaaattcatttg

SEQ ID NO: 582566 - DNA, 496 bp, Homo sapiens
gtgaggggagaaggatagaaaacaaatcctgaactcttagtacttttttttcaattatataaatataggcaaagcaattctgaaactattttagataaattataggattaagtgagtaaatgaggtggaagggagtcaaagttctctctatggaagaaggaacatacaaatacagcatgagaaatcccactactgggattcatacccattatacaaaaaagatacttgcacatgcatgtttgtagtagcacaattcacaattacaaaaatgtggaaccaacccaaatgcccatcaatcaacgagtgaataaagaaactgtgatatatatgatggaataccactcagccataaaaaagaatgaattaatggcattcacagcaacctaactgagattggagactattgagtgaagtaactcaggaatggaaaaccaaacatcgtatgttctyactcataagacgcagctaagctgtgagcatacaaaggcataagaat

SEQ ID NO: 582567 - DNA, 482 bp, Homo sapiens
ttaaacactggctcatataatactgtttttgaacttatttctggtttgtagaggactaatgatctgtatatgaatacacgactaaaacttaggatgaaaatgtcccactaagactgaagactagtatctgaaacaggctttagaatttaaaattgcattgctacattcagcagtatctgctaaagtgcaattctttattaatattcacaatccatgcacattgctcccaagaatacccaacaccaaataaaattagtcatcaataagtcttcttctcttgaattatatgttaaatctcctctgatccatgctaaaatctatgatccctaaaatccttttcaaatgtgacctactcacatgggctgctcacatttatcaytggtaagttttatttaattaaaaaatttttcttaacaccttttgactactcagaaataggtatgtatatcggtattaggtagctattagtaaccccgttcact

SEQ ID NO: 582568 - DNA, 594 bp, Homo sapiens
ggagtgcagtggcacgttatcagctcactgcaacctccrtcttctgggttcaagtaattctcatgcctcagcctcccaagtagctgggattacagccaccacgcccagctaacttttgtatttttagtagcgacggggtcttcccatattgaccaggatggtcttgaattcctgacctcgagtgatccacctgactcggcctcccaaagtgctgggattacaggcgtgagccactgcacctggccagaacaataataattataaagattggggagttgattggttgttgttaactgacattgaacactgaggaaataaaattatgaaattaggacaatgaatttattaatttaggatacattcttgaggcctttagggcatcatttagaagagccttgtgtcctgcaagtggagggcagactatagtgaatgctgaaaatctgattttgagagtaatgaagatacatacaagtttaaattaactcttagcaagactgttgtgctaattaggaaagaagacacactctgagatagagtgggaatatttctgtgggtattcttgataactttgaatccctacattccattgaatga

SEQ ID NO: 582569 - DNA, 609 bp, Homo sapiens
atctatacctacctttcagtgagtttttgctcttgtgaaacataaaatattttgtctttattaaattttaatcatgtctttattgctttggtgagtttgcttaagtaaaaataattttattaaatttgttaagccatttaaggttatgttaagccatttaagactatgttaagccatttaaggttgcctgtttgactccacttaaaaaaaaagtcatggtataaaattgacatcccacaaatagcttagctaagaaagatactataaaacaaaaatgttagtgttatctaataggtgtagtataatagataatgaagattaatggcatatttaatgatattgtacttacgataaacatgcccatcattataagttcaaccatggcagagaggaatatctcagtatatgaaaatgttaaagttaaaatgacacctgaaagtcaccctattaaattcttcttgtcacagatgagtgcactgcatmcttcagatattaggttttatgtgcaagttttcaaagcaagttaacgacatagccaacctataccccaggatactacactgtcaatccagtttcttactctcactcagtcccagtttttctcagctg

SEQ ID NO: 582570 - DNA, 546 bp, Homo sapiens
aaaaaaaaaaaaaaatagctggatatgatggcacatccctatgaccccagctactcaggaggctgaggcaggagaatcacttgagcccagaaggtcaaggctgcagtgagccatgatcacacagctgcactcyagcctggaggagactgagacactgtctcaaaaaaaaaatatattatgcaaaatttttctgcaaaataaaagtacaagaattttgaaattcataatgaactgcatgttcaactgatgaattgcatgttcaactgatgaactgcatgttcaactaaaattcacagatgaactgcagtctttaagggtagaatcaggaagggtagtatagtgtggcaggatgggtggtggagaagaaatcctccagtaggcagaggaagaagaagatggaacagtgctttgtctaatagttccatctcaaaataaatgctacatgctgtgaaatgtgagccttcttaagagccttcaattttagtctaaacttccgcaaacataagtatcaacgggataaatttcttatagaaaatcccagttaat

SEQ ID NO: 582571 - DNA, 422 bp, Homo sapiens
catttgtattgccattgtaaatgggatctttcttccattttctagttagttattggtggtacatctgaaaagcatttgaggtttgtgtgctgctctcttgattttgtttctagccaccgtactgaattctcatattacttccagtaaaatcttagttgattctcttaggcttctttggctaacatttattattttatatgcaaataatgacagttttgtctcttccttttcaatacttacactctttccttcctttcctttctttkttttttctttctcagggccttgttgtcacccagactggagagcaatggtgtgatctagctcactgtaacctcaaactcctgggcttaagggatcctcctgcctcagcttccagagtggctgggactacaggcaggcagtgaattttaaaactttcg

SEQ ID NO: 582572 - DNA, 422 bp, Homo sapiens
catttgtattgccattgtaaatgggatctttcttccattttctagttagttattggtggtacatctgaaaagcatttgaggtttgtgtgctgctctcttgattttgtttctagccaccgtactgaattctcatattacttccagtaaaatcttagttgattctcttaggcttctttggctaacatttattattttatatgcaaataatgacagttttgtctcttccttttcaatacttacactctttccttcctttcctttctttgttttttctttctcagggccttgttgtcacccagactggagagcaatggtgtgatctagctcactgtaacctcaaactcctgggcttaagggatcctcctgcctcagcttccwgagtggctgggactacaggcaggcagtgaattttaaaactttcg

SEQ ID NO: 582573 - DNA, 382 bp, Homo sapiens
agtgagccctgattgtgccactgcacctctgcctgggtgacagagcaagaccctgtcttaaaaaacaaacaaacaaaaaaaacaatcagcaaagaatgttcttttctcaggatgtctctacagattctctcagaacagatcttagaacattttgctgtctgctttttcatatgctttattccaatatgggggaaccttttaaatgaatactttactattctgcttgctctgtgggccttcagatgccaaccaactttataagaatgatctaaaggttgcaaggagttgcagaaggatcaaggtagggaaaaacctttctsagctctcccacaggatactgttagaattgagagccacaaactgtgctgccatggcaaaatcc

SEQ ID NO: 582574 - DNA, 623 bp, Homo sapiens
ggtggctttcagtggatttttcaacaaaaactttgcaagccaggagagagtttgattatgcggttgacacttgaagaatataaattgaagtacttgggttcacttacatatggattttcatctgcctctaccaccgccaagaccaatccctgtttttcctccttttcctcagcctactcaacatgaagatgacaaggacagctcagccaagcttctgattccctggaacctggagcacttcatcagtttggccgcagaaggcacaactgctctgggggacctaagcttagggtccctggaaggtgaaagcattgactcagctttggcactggagaagcaggatgctctggtaggctgagactttgggtccccagggggtgaggtgctacttcactttgrgtaccagggggtgcaaatgctccagtgggtcaaggcttcaggtcctgccctttctctctcttcatctgaaaaggttgcaatgtaaaatttaactcttttaatggtttcctataaaccctgtagactttcttcattcttttttccttttgctcctctgactggatactttcaattgacctgtcttagagttcacagattctttcttctgcttgatcaagtctgct

SEQ ID NO: 582575 - DNA, 476 bp, Homo sapiens
ttactgtttcaatctcactacttgttattgctccattcagagtttctatttcttcctgatataacctaggacagttgtatatttcctggaatttatccatctcctgtagattttgtaatttgtgtgcataaaggtgttcatagtagccctaaatgatcttttgtatttctgtggtatcggttgtaatgtttcccattttgtttctaattgagcttacttggatcttctattttcttgcttaatcttgctaatggtgtgtcaaatttgttaatcttttcaaagaatcaactttttgttttgtttgtcttttatagttttttgtttcaatttcatttagttctgctctgatctttgttgttgattttcttcagctgggtttgggaytggtttgttcttgtttctctagttccttgagatgtgaccttagattgtctatttgtgcttttttaggctttttgatatagacatttaatgct

SEQ ID NO: 582576 - DNA, 509 bp, Homo sapiens
ctgaagctttttagtttgacgcaattccatttgtctattttttgcttttgttgcctgtacatttggcttcrtactcaaaaaatcaccgtacaaaccaacgtcatggagcttttcctctgttttcttctagtagttttacagtttcagatctgatatttaagtctttaattcatgctgacttttgtatattatgtgaaataagggttcaatttccgtcttctgcatgtggatactcagttatcccaacaacagttattggagactgtccattctctgttatgtgttcttggcgcctttgttgaaaaccaattagttgtaaacgcgtagattcatttgggggctctcttttctgttctatgcgtatatgtgtctgtttttatgccaatactctgctttttttggttactacagcattgtagtatattttgaagttaggtagggtgatacttcaagctttgttctttttgctcaagattgctcagactattcagggatcttctgcagttcca

SEQ ID NO: 582577 - DNA, 609 bp, Homo sapiens
attttatttcttccttttcagtaagtatgctttttatttctttttcttgatcaattgaattggccaggacttgaatattggatagatgtataagaacagacatcctttccttgttctcaatcatggagggagggaatttaaaccttcaccattaagtatgctaggtttaagttrtatgtgcatgttcatgtgcatgtgtgcacatgctacccattatgggattaagaaagttcccttatgttcctagtttgctgagagtctgttgaaaaatatacaatgaatggaatttgaactttatcattttttctgcatatatgtggtttttcttctttagtatgtttatatggtaaaatacatttctctaattgtattttctaatttgggaccaatcttgcattcctgggatagactttgcttggttatttattatcatttttatgtttttgcatttgatttgctaatactttgttgagaatttttgcatttctgtttgtgaggtatattggggcatagttttcttgtgcagtgtttctgtagttgtagtatcagggtactgctaccctcctaaaatgagttgggaagtgttatctccagttttcttgaagactt

SEQ ID NO: 582578 - DNA, 609 bp, Homo sapiens
attttatttcttccttttcagtaagtatgctttttatttctttttcttgatcaattgaattggccaggacttgaatattggatagatgtataagaacagacatcctttccttgttctcaatcatggagggagggaatttaaaccttcaccattaagtatgctaggtttaagttgtatgtgcatgttcatgtgcatgtgtgcacatgctacccattatgggattaagaaagttcccttatgttcctagtttgctgagagtctgttgaaaaatatacaatgaatggaatttgaactttatcattttttctgcatatatgtggtttttcttctttagtatgtttatatggtaaaatacatttctctaattgtattttctaatttgggaccaatcttgcattcctgggatagactttgcttggttatttattatcatttttatgtttttgcatttgatttgctaatactttgttgagaatttttgcatttctgtttgtgaggtatattggggcatagttttcttgtgcwgtgtttctgtagttgtagtatcagggtactgctaccctcctaaaatgagttgggaagtgttatctccagttttcttgaagactt

SEQ ID NO: 582579 - DNA, 574 bp, Homo sapiens
agatcaagctagatcaagtaatcatctcttttttcatttgaataaggttaccccaaaggaaaatgtaataaacagaatatttttacatcaatcttttatatttaggggagaagaggatttgtaaatttttttcacgagctagttagaaaaactaaacccctatgcaatgttgtacttctcaaaataatatccaaaggaacagcagttctagactaaatactaaatccaaatgkggctagattccatcttcattttggaaacagctacagctgtggccagcccagcagctgatggaatgcagttgagggtttgatatgggggaaaggaaaggttttctgcacaaaggcagttggtgcatagaccctgcccttccctgcccctgcatcctgttcccaacgcctcatcactacccaggaaatacattggtgatcttgccaagatctggcaattggattctgtactgttgggaatatcatggtaaagggcctcaaaataaaatctaagatgacaatattatattctatgtctcaaactcccaccaagtttggacaattatcgagttaagccacagaga

SEQ ID NO: 582580 - DNA, 574 bp, Homo sapiens
agatcaagctagatcaagtaatcatctcttttttcatttgaataaggttaccccaaaggaaaatgtaataaacagaatatttttacatcaatcttttatatttaggggagaagaggatttgtaaatttttttcacgagctagttagaaaaactaaacccctatgcaatgttgtacttctcaaaataatatccaaaggaacagcagttctagactaaatactaaatccaaatggggctagattccatcttcattttggaaacagctacagctgtggccagcccagcagctgatggaatgcagttgagggtttgatatgggggaaaggaaaggttttctgcacaaaggcagttggtgcatagaccctgcccttccctgcccctgcatcctgttcccaacgcctcatcactacccaggaaatacattggtgatcttgccaagatctggcaattggattctgtactgttgggaatatcatggtaaagggcctcaaaataaaatctaagatgacaatattatattctaygtctcaaactcccaccaagtttggacaattatcgagttaagccacagaga

SEQ ID NO: 582581 - DNA, 574 bp, Homo sapiens
agatcaagctagatcaagtaatcatctcttttttcatttgaataaggttaccccaaaggaaaatgtaataaacagaatatttttacatcaatcttttatatttaggggagaagaggatttgtaaatttttttcacgagctagttagaaaaactaaacccctatgcaatgttgtacttctcaaaataatatccaaaggaacagcagttctagactaaatactaaatccaaatggggctagattccatcttcattttggaaacagctacagctgtggccagcccagcagctgatggaatgcagttgagggtttgatatgggggaaaggaaaggttttctgcacaaaggcagttggtgcatagaccctgcccttccctgcccctgcatcctgttcccaacgcctcatcactacccaggaaatacattggtgatcttgccaagatctggcaattggattctgtactgttgggaatatcatggtaaagggcctcaaaataaaatctaagatgacaatattatattctatgtctcaaactcccaccargtttggacaattatcgagttaagccacagaga

SEQ ID NO: 582582 - DNA, 564 bp, Homo sapiens
  misc_feature 510: n = A,T,C or G
gaacatattttcagcatctattcatagaactgcagcccacagaccttgagcagataattgagaacacatagacttcagatgtagaatttggctcagaggccttcatggaggtggcactttcacttggctcacctttcaagaccacagtctttccaaggtgctgcctacttacctgggttagttgaataacttcaccttttctcctctgatattgatcttctgtgactttaactaaactttagtttctgaagtgcttccttttaaaaggaagagaattttgttattcttaacttttctttcataatagcttcatacctccttgatcccmccccagaacacaatagctgattacaaagatattttctgcaaggagcctcatttggatttacctacaccaagctgaaatgcctgagtaccatccaaaagggaagaaaaaaaaatgtgtccctgtagtatcaaaaatgctggaatggagatataaagtaatgtatagtcagtgagagcatgttntatatctatgacagaatattctgacattagaagcgcagactaaaatcaaacaaa

SEQ ID NO: 582583 - DNA, 454 bp, Homo sapiens
attctggggtctagaggacagtggccctcttctcacagctccactaggcagtacccccgtggggactctatgtggggactctcaccccacatttccctttcacactgcccttgcagaggttctccatgagggttccacccctgcagcacacctctgcctggatatccaggcatttccatacatcctctaatttctaggcagaaggtaccaaaccccaatgcttaacttctgtgcaccctcaggctcaacaccatgtgtaagccaccraggcttgcaccctctgaagcaatgtcctgatctgtacattgtattttggctccatttcatccatggctgggacacagggcaccaagtcccaagactgcacaaagcagcaaggccctggacccagcccacaaaaccactttttcttcctaggcctcagcttgtgatgagaggggctgctgtgaagacc

SEQ ID NO: 582584 - DNA, 315 bp, Homo sapiens
ggggactccatctcaaaaacaaacaaacaaacagaaaggaataggactgaagaacagaggttgctgcatttagaaatgaagyggggtcagaggagcagagggaacatttggtcactgctcgcagctgctgctgagtaaagcaggataaagtccttcatgacccttgaacttttttattggaattattaaaaatcagatttccatattaaaaacacaataagtgatgaaaaatagatttctggatgagaccatgtgtcacagattccaatggaaggggagaaacaggataatagaaaaaccacaaaaagtagacaa

SEQ ID NO: 582585 - DNA, 638 bp, Homo sapiens
gcaatcagcagggtaattaattcagggacaggcatgtgatccaagctgggctgatggaagtcatccctgcacttttgatgaaactgctgggaatgaggtgctttctttttattggcatagctatttgcaaggaagtaaatgatatggaatttatggggccatttttgctgttctctcaaaatagctagcatgaaaagcagagctgacacaggaaatgaagggacagaatgagtcttggttgatattatttgacccctgatctcactgagccagaagcccatctatttaaggatatttttagtaattasagtcaagtaattcaatgttctcctggatcgagtaggtttcagtcacttgcagttaagagagtcctgcgtaatagcaatttctcttatggttaggtcccaccttccagagctttagagctgtagaaggtataaagtaaacccaggcagtgctgagctagccagcctcctggataagtgtgcaaaggaaccctggaatcactaccactttggtctgacaagtagccttgcctgctgcttaccatacagccataggggtactgtttccctgagcccttaggcattataccactttttaaaaatgatttttatctaagaaaatgttttgtagag

SEQ ID NO: 582586 - DNA, 638 bp, Homo sapiens
gcaatcagcagggtaattaattcagggacaggcatgtgatccaagctgggctgatggaagtcatccctgcacttttgatgaaactgctgggaatgaggtgctttctttttattggcatagctatttgcaaggaagtaaatgatatggaatttatggggccatttttgctgttctctcaaaatagctagcatgaaaagcagagctgacacaggaaatgaagggacagaatgagtcttggttgatattatttgacccctgatctcactgagccagaagcccatctatttaaggatatttttagtaattagagtcaagtaattcaatgttctcctggatcragtaggtttcagtcacttgcagttaagagagtcctgcgtaatagcaatttctcttatggttaggtcccaccttccagagctttagagctgtagaaggtataaagtaaacccaggcagtgctgagctagccagcctcctggataagtgtgcaaaggaaccctggaatcactaccactttggtctgacaagtagccttgcctgctgcttaccatacagccataggggtactgtttccctgagcccttaggcattataccactttttaaaaatgatttttatctaagaaaatgttttgtagag

SEQ ID NO: 582587 - DNA, 638 bp, Homo sapiens
gcaatcagcagggtaattaattcagggacaggcatgtgatccaagctgggctgatggaagtcatccctgcacttttgatgaaactgctgggaatgaggtgctttctttttattggcatagctatttgcaaggaagtaaatgatatggaatttatggggccatttttgctgttctctcaaaatagctagcatgaaaagcagagctgacacaggaaatgaagggacagaatgagtcttggttgatattatttgacccctgatctcactgagccagaagcccatctatttaaggatatttttagtaattagagtcaagtaattcaatgttctcctggatcgagtaggtttcagtcacttgcagttaagagagtcctgcgtaatagcaatttctcttatggttaggtcccaccttccagagctttagagctgtagaaggtataaagtaaacccaggcagtgctgagctagccagcctcctggataagtgtgcaaaggaaccctggaatcactaccactttggtctgacaagyagccttgcctgctgcttaccatacagccataggggtactgtttccctgagcccttaggcattataccactttttaaaaatgatttttatctaagaaaatgttttgtagag

SEQ ID NO: 582588 - DNA, 237 bp, Homo sapiens
tttccagagatcagcaagcagmgagagcaaagggaacatgattaagggaaaagaggagcaataactcttccctttccaaacagattttcagaaatccaaaccagtgaattctgcgtttcacattggccaagactataagctctgctcactgcagttatgagaaaaactgggaaactcatttaaagacattaatcagggccaggcatggtggctcatgcctgtaattctggcaatttg

SEQ ID NO: 582589 - DNA, 236 bp, Homo sapiens
tcatctcactagactcatcctgtggttaatttgtggggragggcaggagaaaataacatatctttaaatttagcttcttgattcacatttttcttcaagtttcaatagctctattttaggaaaatgcctccaagaagatattcagatgctttgggctttctgtggcctcaaggcaaagtgaaagtgagtctcaagtctcttattgtcttcatgctgatctctggatctctgctttc

SEQ ID NO: 582590 - DNA, 236 bp, Homo sapiens
tcatctcactagactcatcctgtggttaatttgtgggggagggcaggagaaaataacatatctttaaatttagcttcttgattcacatttttcttcaagtttcaatagctctattttaggaaaatgcctccaagaagatattcagatgctttgggctttctgtggcctcaaggcaaagtgaaagtgagtctcaagtctcytattgtcttcatgctgatctctggatctctgctttc

SEQ ID NO: 582591 - DNA, 384 bp, Homo sapiens
tcaccaggttcagccatacaaaatctcagagtcactcacaaattgttccacccaacataaatcaacaaaactgttggaaacaaaacaaaattttgaaatacagtcaaaacatacaatgtacataacagtatctttttaacaagacactaattgagttggcagttactaataatttgcaaaattattgttgtttatatcttaattagtgtrcaccccattttttacatcgcaaatgttttcccctgctattctgaaaaatttatattcatcttttaagactcagaaagtaggctggacataatagctcacatctgtaatcccagcactttggaaggccaaaatgggagaattgctcgaggccaagagtgtaagaccagcctggga

SEQ ID NO: 582592 - DNA, 384 bp, Homo sapiens
tcaccaggttcagccatacaaaatctcagagtcactcacaaattgttccacccaacataaatcaacaaaactgttggaaacaaaacaaaattttgaaatacagtcaaaacatacaatgtacataacagtatctttttaacaagacactaattgagttggcagttactaataatttgcaaaattattgttgtttatatcttaattagtgtacacmccattttttacatcgcaaatgttttcccctgctattctgaaaaatttatattcatcttttaagactcagaaagtaggctggacataatagctcacatctgtaatcccagcactttggaaggccaaaatgggagaattgctcgaggccaagagtgtaagaccagcctggga

SEQ ID NO: 582593 - DNA, 384 bp, Homo sapiens
tcaccaggttcagccatacaaaatctcagagtcactcacaaattgttccacccaacataaatcaacaaaactgttggaaacaaaacaaaattttgaaatacagtcaaaacatacaatgtacataacagtatctttttaacaagacactaattgagttggcagttactaataatttgcaaaattattgttgtttatatcttaattagtgtacaccccattttttacatcgcaaatgttttcccctgctattctgaaaaatttatwttcatcttttaagactcagaaagtaggctggacataatagctcacatctgtaatcccagcactttggaaggccaaaatgggagaattgctcgaggccaagagtgtaagaccagcctggga

SEQ ID NO: 582594 - DNA, 460 bp, Homo sapiens
gaattcattatattcttttyctttttttttttttttttttgagtgagagtctcacttctttgcccaggctggtgtccaatggcacaatcttggctcactgcaacctctgcctcccgggttcaagcaattctcctcgctcagcctcccaagtagctggggttacaggcaggtgccagcatgcctggctaatttttctatttttagtagcgaggggtttcaccatgttggccaggctgatcttgaactcctgagctcaagtgatctgcctgcctcggcctcccaaagtgcttggattacagacatgagctaccatgcccagcctatattgtttattatatatcatatgatatatatatattgctgatacatataccatatatattattacagatataatctgttatatatatatcagttatatatacacattagatgaaaagttgtatgtatatatacacat

SEQ ID NO: 582595 - DNA, 460 bp, Homo sapiens
gaattcattatattcttttcctttttttttttttttttttgagtgagagtctcacttctttgcccaggctggtgtccaatggcacartcttggctcactgcaacctctgcctcccgggttcaagcaattctcctcgctcagcctcccaagtagctggggttacaggcaggtgccagcatgcctggctaatttttctatttttagtagcgaggggtttcaccatgttggccaggctgatcttgaactcctgagctcaagtgatctgcctgcctcggcctcccaaagtgcttggattacagacatgagctaccatgcccagcctatattgtttattatatatcatatgatatatatatattgctgatacatataccatatatattattacagatataatctgttatatatatatcagttatatatacacattagatgaaaagttgtatgtatatatacacat

SEQ ID NO: 582596 - DNA, 457 bp, Homo sapiens
actcttacaaggaaaacagatgttcagagtaaccacactgtttctataaacactttagacacagtgagccactcttctcagggaatggtggaaaccctccmaattccaatttccttaacaccagccaagggccagccttgcatgcaggcctttctaaggatggcagtctcttgcctgctatatgaaatcttttctgcacaatgcttatagccccaatttaatttttagtgttgttttaaaattttattttaataacacataatattataagataaggtaacttggtactaatttctgttgtatgatccatcttaagttgcaatgctggttactttttgacttttggtgactaacaggtatttgtatataagttaccatagcaatgttaggtaattataatctgtcctttttatctcattaagctttcagtaaaattgttaaattaaataagcataat

SEQ ID NO: 582597 - DNA, 457 bp, Homo sapiens
actcttacaaggaaaacagatgttcagagtaaccacactgtttctataaacactttagacacagtgagccactcttctcagggaatggtggaaaccctcccaattccaatttccttaacaccagccaagggccagccttgcatgcaggcctttctaaggatggcagtctcttkcctgctatatgaaatcttttctgcacaatgcttatagccccaatttaatttttagtgttgttttaaaattttattttaataacacataatattataagataaggtaacttggtactaatttctgttgtatgatccatcttaagttgcaatgctggttactttttgacttttggtgactaacaggtatttgtatataagttaccatagcaatgttaggtaattataatctgtcctttttatctcattaagctttcagtaaaattgttaaattaaataagcataat

SEQ ID NO: 582598 - DNA, 457 bp, Homo sapiens
actcttacaaggaaaacagatgttcagagtaaccacactgtttctataaacactttagacacagtgagccactcttctcagggaatggtggaaaccctcccaattccaatttccttaacaccagccaagggccagccttgcatgcaggcctttctaaggatggcagtctcttgcctgctatatgaaatcttttctgcacaaygcttatagccccaatttaatttttagtgttgttttaaaattttattttaataacacataatattataagataaggtaacttggtactaatttctgttgtatgatccatcttaagttgcaatgctggttactttttgacttttggtgactaacaggtatttgtatataagttaccatagcaatgttaggtaattataatctgtcctttttatctcattaagctttcagtaaaattgttaaattaaataagcataat

SEQ ID NO: 582599 - DNA, 476 bp, Homo sapiens
actccttaatgtaggttaacaaaactaaaatgaacaaaaaaaatctaggaatacttgtgtttagtaaaccagttttaggtttcacccctgtacatttcaccaattatctaggaccaattaaacatttggtaatgaggaataattcagagcaacaactcctaggggagaactagattgtttggttgttgatcaaaaagaactaaagcatctctgaaggcaattagcccccagcactgtgaccaaggcactggaggtggggcttgttctttttgccytccacacaccccttcagactgaacaaggtgttattttttaaccactttgtgaattacacttctttaaattcctgtgataattgttccctatttcataaggatgcctttctataacatcttgaatatgttacacaaatagtctttcttgaggcaccttctattgataatactaaagatcacaatcaaaaacgattgtgccca

SEQ ID NO: 582600 - DNA, 476 bp, Homo sapiens
actccttaatgtaggttaacaaaactaaaatgaacaaaaaaaatctaggaatacttgtgtttagtaaaccagttttaggtttcacccctgtacatttcaccaattatctaggaccaattaaacatttggtaatgaggaataattcagagcaacaactcctaggggagaactagattgtttggttgttgatcaaaaagaactaaagcatctctgaaggcaattagcccccagcactgtgaccaaggcactggaggtggggcttgttctttttgccctccacacaccccttcagactgaacaaggtgttattttttaaccactttgtgaattacacttctttaaattcctgtgataattrttccctatttcataaggatgcctttctataacatcttgaatatgttacacaaatagtctttcttgaggcaccttctattgataatactaaagatcacaatcaaaaacgattgtgccca

SEQ ID NO: 582601 - DNA, 506 bp, Homo sapiens
attgtgcttgtttctaaaacaaatgaatatacttttaaaacaattataacctaattattatatgtttgttgtctttcattttgagccagtgattcaaagagcaattttgaatctgttaaaaaaagaggctgaagcttaaaatgtttatcagtagtatcaaaactaataactgaattcagaattaagtctgattcataaaaatttgaaatcataattatgttagtattaatgtaatctggtcataaaaaaagcaatagaatccattcataattttaaaaagtgatcaacgaacaatgtagcttaagaccaattcaaaagtatcacataatttctaaatcacaactttttcttatgccaactggtcttaatcatcaaatgactccatagtaagaatcattactctgaaaggttgattttgttataataataatggaaatttaaatatttaaaagaaaaaacagatgccttttttttctaaaactstacaaagtaaattgctacaagag

SEQ ID NO: 582602 - DNA, 560 bp, Homo sapiens
attagctaggcatgatggtgggtgcctgtaatcccagctcctcggcaggctgaggcgggagaattgcttgaacccgggaggcggaggttgcagtgagctgagattgtaccattgcactccaacctgggtgatgagagtgaaattctgtctcaataaataaataaataaataaatataaagtattaccaatatgaacaggataacatttctgaaagaacatttctgaaaagtagagaacataaaatatatatagagaaaaaatatttgtgtgacaagacagcaataattttgcagttacaattaatgaatgaatgatataagcagagaaggaaagcttaartatggaaattaagaaccaacatgaaagttgtatcaaatatctttgcatttattgttcactaaataaacttttaattaattgattggtttttgattaatgtgattaagcactaaactcggcagataacctgaagcctggttctttgcacagagtagggctgagacaaacgtatggtttttctatggtctctgaataaggccagaggcaatatagtggatct

SEQ ID NO: 582603 - DNA, 560 bp, Homo sapiens
attagctaggcatgatggtgggtgcctgtaatcccagctcctcggcaggctgaggcgggagaattgcttgaacccgggaggcggaggttgcagtgagctgagattgtaccattgcactccaacctgggtgatgagagtgaaattctgtctcaataaataaataaataaataaatataaagtattaccaatatgaacaggataacatttctgaaagaacatttctgaaaagtagagaacataaaatatatatagagaaaaaatatttgtgtgacaagacagcaataattttgcagttacaattaatgaatgaatgatataagcagagaaggaaagcttaaatatggaaattaagaaccaacatgaaagttgtatcaaatatctttgcatttattgttcactaaataaacttttaattaattgattggtttttgattaatgtgattaagcactaaactcggcagataacctgaagsctggttctttgcacagagtagggctgagacaaacgtatggtttttctatggtctctgaataaggccagaggcaatatagtggatct

SEQ ID NO: 582604 - DNA, 514 bp, Homo sapiens
catggcacatgtatacatatgtaactaacctgcacattgtgcacatgtaccctaaaacttaaagtataataataataaaataaaaaaaagaatgatacaattgtaacaaagctgcacattctgcacatgtatcccagaacataaagtataataaataaattttaaaaagaaaaaagaaaaaaaaaagaaaggcattctaggccataaggtctgtaacccttaagtgagtcctggtgctgaactaggctcagagacagtggactagaggggtacacaacaccagctggggtggctgagggagtactggcatcaccccttccstaatcccagaaggcacagctcacaggtccaaaagagacctttttcttctacttgaagagaagagagggaagagtggggaggactttgtcttacatctaagataccaactcagccacagcaggatagggcagtgttcagaatcgtgaggcccctttccaggccctagctcctagatgacatttctagacacacc

SEQ ID NO: 582605 - DNA, 553 bp, Homo sapiens
agtaaggaaagggaacaagagtctctgtctggtaatccagagaatcctcctggatcttgtccatgaccatcaaggcagtacctctacaagtctgcaagaaccacagtgttactgggcttggggtgcccgattacaacacccaggtcctttcaaatatctggaaagccttcccaagaaagacaactacaaataagtccagacagtaaagactacaataaatacctaactgtttgatgcctaaacactaaagcacatctactagcatcaacaccatccagaaaaacatgmccttaccaaatgaactaagtaaggcaccagggactaatcttggagaaacagagatatgtgatctttcaaaaacagaattcaaaatagtggtgttgaggaaactaaaataataataataataaaactcaagataacacagataacacagaggaggaactcagaattctattagataaatttaacaaatagattgaaataattaaaaagaatcaagcagaaattctagaactgaaaaatgcaattggcatactgaagaatgcattag

SEQ ID NO: 582606 - DNA, 610 bp, Homo sapiens
tttttcactttgatgcctaatggtgcaatatgtttgtttttctgggttctcatatagaactaaaaggccaagaataaatctgtcactattttcatgtagactgcattatctaaaaacacattcagctaactttttgatggtgtgtacaagtaatttagcatccatgaaaataccctgaaatatgatatttttctgttttaattacttatatatcatacaagaaaaaagccttaattattataaccctctcatggccctgataatacagattttctagacttttatatcttggaagatataaagatatatttatatgctctctatattacttttgtcggttgcctatgtggtaatattttctcccagattgtgtctttgaactttgtgcaaaagagtagtgggtcctagatttttgagctcttaatctagtcaacatatgagcccctctttaagaaaaatgatacaaagttaaaattcaaaagtttttattaaaatcagtatttatttagaatgagaaaataaatcacatattacaaagtttacaaagctgacaatatccacaaatattacrattctcaaaagaataatacaatctttttttaaaaacttg

SEQ ID NO: 582607 - DNA, 575 bp, Homo sapiens
ataacattcattatatggttccttaaatctaccttttcattttctttccctcctataaactttttttttttttttttgagatggaggctcagtctgttgcccaggctggattacagtgatgagatctcagctcactgcaacctctgcctcccgggttcaagagattctcctgcctcggtctctcgagtagctgggattgcaggcgcatgccaccacgcctggctaatttttgtatttttagtagagacggggtttcaccatgttggccaggctggtctcgcactcctgacctcaggtgatccacccaccttggccttccaacgttctgggattacagacgtgagctaccacaccyggcctgagccaccaggcccggcctggtcctctttcgctaccactttgttcccctgaggtgcctggtgaccttattataccagccccagccttctcttgccgtttgctgcagaaactcaaaagtggagcagaaatagtatgccaaatcacagctctattccagaatcctcccaacagggagtgaagaaaaagcatttctgttttctgttctctgttttgca

SEQ ID NO: 582608 - DNA, 617 bp, Homo sapiens
tatttgcttccctagtcaaatcttttactgacattgactgtcttttatttttataataacccttgtgattatattaggtccactcagaaaatccaggacaatctcccatttcaagatccttaacataataacattttcaaatttccttttcttatataaggtgatctaktcacaggttccagagactagaccatggacatcttttgaaaccactttctatataatatactttatcatctcagtcaaattgaaaacgttaaaactgtctttcaatatttttgagcctacaatagtcctggcaaatacatgtcttgacatattgctgtggacactctaaaaggaaaaaggataactattcaaaaaaccatgctagacaaaatatagaattagactcctacctgacgccatataaaagaatcaacttagatggtataaaaatcactttataactcagggtaaagaagaaaataatgacaaacctcaatctaggagaagatatttgcaacacaaataactgacaaagaattagtatctagaatgaataaaaatatccctatggattaatataaaaattgggcaaaaaccatgagcaggtacctcagagaaaagaaaataac

SEQ ID NO: 582609 - DNA, 617 bp, Homo sapiens
tatttgcttccctagtcaaatcttttactgacattgactgtcttttatttttataataacccttgtgattatattaggtccactcagaaaatccaggacaatctcccatttcaagatccttaacataataacattttcaaatttccttttcttatataaggtgatctagtcacaggttccagagactagaccatggacatcttttgaaaccactttctatataatatactttatcatctcagtcaaattgaaaacgttaaaactgtctttcaatatttttgagcctacaatagtcctggcaaatacatgtcttgacatattgctgtggacactctaaaaggaaaaaggataactattcaaaaaaccatgctagacaaaatatagaattagactcctacctgacgccatataaargaatcaacttagatggtataaaaatcactttataactcagggtaaagaagaaaataatgacaaacctcaatctaggagaagatatttgcaacacaaataactgacaaagaattagtatctagaatgaataaaaatatccctatggattaatataaaaattgggcaaaaaccatgagcaggtacctcagagaaaagaaaataac

SEQ ID NO: 582610 - DNA, 440 bp, Homo sapiens
agattccatacacattctaaaccataccttagatgcagggattgggatcactatgcatgattaagagcaagcattatgttctgtgactaggggaaaggggattattttctctaagatttttttttgactggaagaaaagtggggcagaactaataaataccttttggtagtcaattatcaaagtccatttcatttaaagttaatttgtccatttcatttcacagagaaataggacattgttttgccaagcttacctaaagtgcagtggtgccatctcaggtcactgcaacctctgcctcttgggttcaagcgattctcctgcctcagcctcctgagtagctgaattgccagtgcgtgccgccacacctggctaatttttgtattttttagtagagacggggtttcrccatgttggccaggctggtctcaaactcctgacc

SEQ ID NO: 582611 - DNA, 590 bp, Homo sapiens
atagaaactgaattgttatattttcttctagttgattgaagaaatatttaatagcagcactccgtctcagatagattcaaatsctgacttcacaatatgaacattttcccatataaataaacattcttttgcaagattttaaatagctacgtatgattacattatatggagacacaataattgactcaacctttcccctacagctgggcatttgggaggtttccaattattcactattataaacatcactataataaaaattattgtagaggcattcctgtgctcttccctgataaagtctttaacatcaggtgtcagaagtgaaattgctggctttaatatagtacccatttttaaatctttcaatataattgatattttcacggacattatatgaaactgtgcaaatccccacatctgaccacaagtaggtaatgtaagaaaaatcaataacttactcttgtttcttcatcctcgagcattcatatttatcatcttgtccccaatcactggcatttctttctatttctctgcaattctgggacagcatatggtgttgatcaattaaatcactgacaatttttagcaaa

SEQ ID NO: 582612 - DNA, 615 bp, Homo sapiens
ggtatcctcattttcacgtatggttttaataatttttctcagtcagtctagtgaaagatttatcagtgtcattgatcttataaaaaatgaatttttgtttcattgatttattgcttttctattctctattttatttatcggtactctgatctttattattttatttcttctgttagctttgattatatttagctgttcttttcctagttcattagagttaggttagtatttggaggtctctcttttttttctttttagtgtagacatttacagcttaaatttctgtaaaagcactgctttcaktgcatatcataaattttgacaagttgtgttttcatgtatgtttataagaagtattttccaatttctttagcaatttcttctttgacttatttgttgtggaagagtgaattgtttaattcacacatatttataatttttaaatttttttcattttgttattgatttctatcttcattcaattatgcttggattatatatttttataatttaaatattttaaaatatattgatacttattttatggcctaatattgtatattatggagaatgctgtgtgttcttgaaaagaatatatgttccactgttgttgag

SEQ ID NO: 582613 - DNA, 582 bp, Homo sapiens
tcaccaactatgcatagacaaatgtmtaatatccaggatctataaagaacttaaagaaatcaacaagaaaaaaaacatataatcttattaaaatgtgggcaaaatacatgaacaggcacttctcaaaagaagacatacaattggccaaaaaaacatgaaaaaatactccatatcaccaatcatcagagaaatgcaaatcaaaactacaatgagatatcatctcacaccagtcaaaatggttattattagaagtcaaaaaacaacagatgctaatgaggctgtgtagaaaagagaacacatacacacagtgaaaagcagtttgaagatttttcaaagaatctaaaacagatctaccattcaactcagaaattccattactagttatatatccaaaagaaaataaaacattctaacgaaaagacagctgcattcatatgtttattgcagcagcacttatgatagtgaaaatcatgggatcagtgtagctacccatcaacagtggattggataaaggaaatactgtacatatacatcatggaatactacacagccatcaaaaagagtgaaatcatgttcttttta

SEQ ID NO: 582614 - DNA, 568 bp, Homo sapiens
acattctactaaaatatggattccagtgcgatgggaaatatgtatgtcctagatgttggaagtctcttcagggggagaagttgtgtgtcactgcagtagaagtatatccctcatttcgagggttcaagactagcctttggtcctacgagagtaaaatttcagcagctttttcctatggtgaggaagcgtggaaacaggccatttttcaagaaaaaaaaaaagaattgggggttctatsccctgttgtctcttaattttttaaaggacaggactgcgtgaagctgtggagaccatgagttgggagacatgaggagagttaagtatttaattacagaaaacagcctcctagcctgggcaacctagtgggatcctgtctctacaaataatacaaaaattagctgggtttagtggcatgcctgtactcccagctacttggaaggctaaggcaggaggatcacttgaactcaggagttcaaggctgcagtgagacacgattgtgcaactgccctccagcctaggcaacagagcaagattctgcctcaaaaaaaacaaaacaggccaggcgtgg

SEQ ID NO: 582615 - DNA, 562 bp, Homo sapiens
gaggatgaaacacaagtatcagtaaacaatagaaaacatgacatagattgtcacaaaaaaaggagcaaacaagatgttttgatggatcagaaaagagatcgcttctgcttagatgcaaaatagcaaaggattttcaaaaaaaaataagcttgtagatgagctttgaatactggattggctttccctatgctgggctgaaagaaatggttatctttccaggtagaagaattaaaagcagcaaagataggaggagaacttttagggcaatttcagggtctayagagctttccaatgagattagtgcattgagtacagaaatggcaaaaactcgataagaatctgtaaagagactcagattgtcctgtggctggccatgaacaccagctagaggagtttaaacttaattcagcaagttgaggggacactgctggctctttctcaggagaattgctttctataaaatgtggtttgggaagaatgatctgtaaaagctatgaggaatgttttgtatcacggagaaactagaactgggtagatgattttattttgcggtaacataggg

SEQ ID NO: 582616 - DNA, 583 bp, Homo sapiens
tacaatttactctgcttgggatttaaggcacattgcaaacttattcttaattaacatctctagccttgacttttattgtttaattatagagaaaatctccaaaaataaaccaatctcatgactgttttttagtctttgtagacttaaaaaaaggtgccttttctctgagtataaaatgtccccagtataaaaattttaaacatgtagtaaatgacaaaactgaacaaataaagttctaaggacataaatagttaaatcagagaagtacaaactgccaataaacattgagagataaatgctaaatattgcttgtacaagaaatgtaaattataattccaaaaacatgctgytttttagcctatcacattagctaaacttttaaaaagaattttgattagttattttatatgcgtacatgcagtcataccttattttattgcactttgatttattgcactttgcagatactatattttttacatattagagttttgtggcaatcctgtatcaagcaagattattggcaccacttttccaacagcatgtgctcattttgtgtttctgagtcacattttggtaattc

SEQ ID NO: 582617 - DNA, 583 bp, Homo sapiens
tacaatttactctgcttgggatttaaggcacattgcaaacttattcttaattaacatctctagccttgacttttattgtttaattatagagaaaatctccaaaaataaaccaatctcatgactgttttttagtctttgtagacttaaaaaaaggtgccttttctctgagtataaaatgtccccagtataaaaattttaaacatgtagtaaatgacaaaactgaacaaataaagttctaaggacataaatagttaaatcagagaagtacaaactgccaataaacattgagagataaatgctaaatattgcttgtacaagaaatgtaaattataattccaaaaacatgctgctttttagcctatcacattagctaaacttttaaaaagaattttgattagttattttatatgygtacatgcagtcataccttattttattgcactttgatttattgcactttgcagatactatattttttacatattagagttttgtggcaatcctgtatcaagcaagattattggcaccacttttccaacagcatgtgctcattttgtgtttctgagtcacattttggtaattc

SEQ ID NO: 582618 - DNA, 467 bp, Homo sapiens
gaattctcaaattttgattttgctgatattatccccagagtgtcattgaccatgttcatctgttccccaaatttccaaaaactggtagttaaatttaggtggttgatctgattcagattacactctcagtatcgcatatgctttgatcaggaggcataatgtgtacttgtgtgtgcgtatgtgtgtttttttagtgatgttagtggtcactgcctgtgtcagcatttcactaccagggtaatttggcaatgtctggagacacactgattgtcacagcttgggagagggaatgctataggtaccttcaggggtaagagtcagcacagcacagcacagccccctaacgcaaagtattaataggcctaaaatgtcagtagccctgaggttgagaaactctggcctacttttgtagtttcatcaggtgtttgtgaaatggttttattstaactgttatttcttctttcttt

SEQ ID NO: 582619 - DNA, 505 bp, Homo sapiens
gaaatttaggccgggtgtggtggctcacacctgtaatcccagcaatttgagaggtcgaggcgggaggttcaggttcacttgagtctagaagtctgagaccagcctgggaaacctaggtggacccggtctctagagaaaagtcaaagaaattagccaggcatggtggygtgtgcctatagtcccacctagtcaggaggctgaggcaggaggattgctggagcccacgagttccaggaagcagtgagccatgattgcaccactgcactccagcctgggtgacagagtgagactttatctcttaaaaaaatttaagaaatttaatgtgggtacagttctattaactaaataataatgtgaactattatctaaggttatgaaggctagaattatcccatttttgcctaacttctcgtacctgtcccaagatcccaccttggactcaccctctgccttcagctcacgtctcttcagcttcctccacatggtccagcaaacacacacctgg

SEQ ID NO: 582620 - DNA, 551 bp, Homo sapiens
acctgaagtcccagctactcgggaggctgaggcacaagaattgctttaagccgggaggtggaggtagcagtaagttgagatagagccactgtaccccagcctgggtgacagagactctgtacaaaaaaaaaataacacggaataaaatcataattgcctggggaaggagcaaggaaaaggggagaaaaggattataaaggggcatgaggaaatgttctagggtgatgaatatgctcattacctggttacattcatgagaaaacttatcaaattacatattttaagatgtaccctttatagtatgtcaacattacaggtactctcacaaagctatcaacaaaaataggaaagmagcagcagcaagcaacaacagccataactactgcctggagaatttcccccaaaacaaacaaaccaaaaaaagtgtgggctgcagctaaaagcagtacatttttaggattaaaatttatatttaaatgaatataatagaaagaaggactgaaaagtaataagccaaacatccatctcaagacttctgtttgttttttgtt

SEQ ID NO: 582621 - DNA, 564 bp, Homo sapiens
tctggaattgtgccaactacacatcaagagactatttagctttgttacagaagtcagtatcagtttcttgttataagacragacctggttttacagacttttctatttctcaatggaactttactctgaagatatactcttccatttaaatactagttccaaaacctacattatatggtggctgcttaataaacatttaacattttggttaatttaaatcttgttgatgtgtatacatgaataactgggctaaaagcagatacctttgattattgtgaaacttcaagtaaatattgtgtgaaaaggaccccttctgtctcacaaattctggcccctcagctcattgtctgaacagtgattcccttgcatataataaattcccttggcttatatataataataaatgaagtttattatttatttgaactttttacccctgtaaataccaaggttctttttgcctaagtggtaatttgtgtcattcaaagagtttttattaaatattattattattatttgagatagagtctcactcttattgcccaggctggagtgcagtggcac

SEQ ID NO: 582622 - DNA, 564 bp, Homo sapiens
tctggaattgtgccaactacacatcaagagactatttagctttgttacagaagtcagtatcagtttcttgttataagacgagacctggttttacagacttttctatttctcaatggaactttactctgaagatatactcttccatttaaatactagttccaaaacctacattatatggtggctgcttaataaacatttaacattttggtkaatttaaatcttgttgatgtgtatacatgaataactgggctaaaagcagatacctttgattattgtgaaacttcaagtaaatattgtgtgaaaaggaccccttctgtctcacaaattctggcccctcagctcattgtctgaacagtgattcccttgcatataataaattcccttggcttatatataataataaatgaagtttattatttatttgaactttttacccctgtaaataccaaggttctttttgcctaagtggtaatttgtgtcattcaaagagtttttattaaatattattattattatttgagatagagtctcactcttattgcccaggctggagtgcagtggcac

SEQ ID NO: 582623 - DNA, 564 bp, Homo sapiens
tctggaattgtgccaactacacatcaagagactatttagctttgttacagaagtcagtatcagtttcttgttataagacgagacctggttttacagacttttctatttctcaatggaactttactctgaagatatactcttccatttaaatactagttccaaaacctacattatatggtggctgcttaataaacatttaacattttggttaatttaaatcttgttgatgtgtatacatgaataactgggctaaaagcagatacctttgattattgtgaaacttcaagtaaatattgtgtgaaaaggaccccttctgtctcacaaattctggcccctcagctcattgtctgaacagtgattcccttgcatataataaattcycttggcttatatataataataaatgaagtttattatttatttgaactttttacccctgtaaataccaaggttctttttgcctaagtggtaatttgtgtcattcaaagagtttttattaaatattattattattatttgagatagagtctcactcttattgcccaggctggagtgcagtggcac

SEQ ID NO: 582624 - DNA, 188 bp, Homo sapiens
tggttctagatacaactgatactctgatacaacctgggtaaatgtggtcttgagtagtaaattatctgtgaagcttctccgaactttgccacataaatgagcctgctcttgttgtgaagtaaatcttactctaatctgtatgtgagtcagtgggaaatawctgagccttcggatggcttttgttgtta

SEQ ID NO: 582625 - DNA, 220 bp, Homo sapiens
tttgaacaccatacaagtatgtggttcttggtttatttggtcacttgtaatctctttaaaattttattttaaattaggaagtattttagaaatacaagaaagtcacacactatgagattaaacagatgttaacattttgccccattttcatcagactgtgcatgctttttttgggggggaataaaatgtcacagataycactaaagcccgtttccatctc

SEQ ID NO: 582626 - DNA, 596 bp, Homo sapiens
atattaataagccatgtgaaggaacacactgataaaagatgttaataagagaggaaactaggttgcggctacatgggaaatatctgcttttttttgacaatttctgtgtaagtaaagatgtaaaataaaactttatttgaaacactgtttttttgaacacttccttgtttaattatttataccatgaattactagtaattgacactgttaactagtcctgtttttttaaataagagcatttatgacacaaaaaattaaacagtgcagactgatatataaatcaaaacaaatgttctttacatgttttctgttacwgtagtaacaatatgtgtaaacttaattatcatatttttttcttgtgttgtggttgtgtcctgggttcattctctaaaatgctgttcaccttagaccaggaaaaatagtaaccatacagactctgtttcaattcatagctaaatattttcaaaagagtgactttgtaaaaatatgttccaatggcaaattgattcattgtgatgggatcacttatcccgaagacttcttgtctttattttgttcccatgcctaccttttagccataatacagcagaatcaaa

SEQ ID NO: 582627 - DNA, 578 bp, Homo sapiens
aacatagacagcacttactatacaccaggccagagtctagtcctcttaacaactctaaggaagtaggtggtattattttttttccattttgccaatgagaaaacatgttctagatcatacagctaacaaacagtacaggtaggtaggacttgaacacaggctctctgctcacacagacatgtgagaatgtcttgaggaaaaatgtgcctcagataaattaaaagaatayacagctatacagggactgtagaaaggcttgactggaggatctgacttcaggttctctgaggttttgtgaaactcccctataaaaggtatttccttaggtgttggtaaacacctaaagaaataaatttagaggaagttaattattgcagaaatattattattgcaagtaatattattgcagaaataaatttagaggaagttaattattgcagaaatattattattgcaagtaatattattgcagaaataaatttagaggaagttaattatttctccccttgccttctctctcactctctttctccctttccctctctactctctctatttttgttttttggtcaggaatt

SEQ ID NO: 582628 - DNA, 517 bp, Homo sapiens
tttcctttatcagagttttgtagttttcctcatatatatctattttttgcacttttatgtgtgatcttatttttgaatgtattttgttaacaattgacttttgtatattaacattgtattctraagccttactctaatagtttattagttccaaaagggttttggtttattcttttatattttctacatacatgatcacgttatatgtgaacaaacacaattttagttatttttcccaatctgtataccttttatttctatttcttctcatactgaattacctagaattttcagtatgatgtcaaaaaggagtcaagagaggggacatctttgcatttttcctgatcttagtgggaaagtttttagtttttcaccattacaaatggtgttagctataagttcttttgtaggtattcgttatccagttgagaaagttgtcattgattcccagttttctgagagtttttgtcatgaataggtacttgattttgtcatctttaaatttattgatattatc

SEQ ID NO: 582629 - DNA, 517 bp, Homo sapiens
tttcctttatcagagttttgtagttttcctcatatatatctattttttgcacttttatgtgtgatcttatttttgaatgtattttgttaacaattgacttttgtatattaacattgtattctgaagccttactctaatagtttattagttccaaaagggttttggtttattcttttatattttctacatacatgatcacgttatatgtgaacaaacacaattttagttatttttcccaatctgtataccttttatttctatttcttctcatactgaattacctagaattttcagtatgatgtcaaaaaggagtcaagagaggggacatctttgcatttttcctgatcttagtgggaaagtttttagtttttcaccattacaaatggtgttagctataagttcttttgtagrtattcgttatccagttgagaaagttgtcattgattcccagttttctgagagtttttgtcatgaataggtacttgattttgtcatctttaaatttattgatattatc

SEQ ID NO: 582630 - DNA, 559 bp, Homo sapiens
gagttaggcacactgcagtgctgygggctcaaggcaggggggcagctcacctagagcacaggggagattgcagaatgctatgcatttgtagggccctgctctctggcactcatgccacagccagactgcaacaggctcacctaaaaggcctggaagttaccttggagaagagcaaaagatatagaacacccagaatttccttaaggaaatatttgaattattggatcagactaagtttgacaaactgagaaactggatcagccccaagaaacaaggaagctccacttgtcttcatacatctcaccctaaagtatacagttgtgaaccttctacatggctcaaaaattgtaccaaaatatgcccagatttccaggataattggtggcccaattcttctaagtactgtcaagtatcaaaacacctgtgtgatgctgaagcctacatcttagagcttgttacgaaggatctggtgtttgtaggaatagaagattaatggagtttatagagcctcaatgagatgaggaggccattgtgacatcacattatcaaaattattatg

SEQ ID NO: 582631 - DNA, 572 bp, Homo sapiens
ggccacatgggaatggatagacacttcccaggtaaggtcaggtagcaaactctacctactgcaacccagggttacttctgattgaggagactgcttcagatcctcaatagggaaacactcctttctgtcttttgggcatatggctgagttggtccctgaattgatctccttgccaagatgaggaacaatatcctcaactatcaaaacaactatctgtcatctgaaaacacttccagtcaaatatatatatatatatatatatatatatatatwtttttttttttttttttttttttgaggtggagtctcactctgtcgcccaggctggagtgcagtgggagatcttggcccactgcagcctctgcctcccgggttcaagtgattctcctgtctcagcctcccaagtagctgggattataggtactcaccaccatgcccggctaatttttgtatttttagtagagatgggatttcactacgttggtcaggctggtctcgaaatcctgaccttaagtgatccacccgccttggcctcccaaaatgctgggattacaggtgtgagccatcgtgcc

SEQ ID NO: 582632 - DNA, 483 bp, Homo sapiens
aagtaccacttagtaagtacckccttagtaagtaccacttagtagctacctccttagtaagtaccacttagtaagtacctccttagtaagtaccacttagtactaccaccacgcctggctaatttcgtatttttttttttttagtagagacggggtttctccatattggtcagactggtctcgaaatcccgacctcaggtgatccgcccacctcagcctgccaaagggctagggattacaggagtgagccaccgcgcctggccgagaaatctttctaaagatcttcgcatcaaaattatagaaatgtggttttactctttcatcagtcttaacctttatgggaatcagctaaaagttacagacctcttcttaagaatacatacacttaattaaatacaaaaatatttagcgtataatgaattttattctactgaaaactcatttcaaaatatctattgaggacaatatctagtgaaactttat

SEQ ID NO: 582633 - DNA, 621 bp, Homo sapiens
aaataatcctcatttttctttaataatttctgctaatgtgtccataataaatgaaataatttcaaataattcatatttcttagcttcctgattcatgattgatcttttgattcttgtgccaatgttatatcaatttgattcctgagattaatgctacttacattaattataaaagttgctaacacttacaagcacttactatacactgggtcatataaaaagctttatatcttttatatgattcaatttacacatggcacatttgaggtgtttattattctcctttgaaagatgaaaatgagagaaagacatgttaagagacttgccaaatgatgaaaatctctttggtgaagcccagattcaacyccaggttaacttattttgccagggtatgtctatttccatgaaagaaagtgtctgtcttacttctcttctttaaaatttataattaagtatggccatttttccactttggtttcccatattaatcttagtgtcatatccttcttctaacaaacccctttcctcaaaccccattcttttgttagtattccagttttgtacttataacaggaggttgttttgcagatttaattttgtaatttaatttacatttaattt

SEQ ID NO: 582634 - DNA, 407 bp, Homo sapiens
tttggctttctgcttgtctactgtagctgtatggaatgcttgtgatttttgcacgtggcttttgtatcctgagacttcgctgaagttgcttatcatcttaagaaacttttgggctgagacaatggggttctctagatataggatcatgtcatctgcaracagagatggtttgacttcctctcttcctatttgaatacactttatttctttctcttgcctgattgtcctggccagaaattccaatattatgttgaataggagtggtgagagagggcatccttgtcttgtgcctgttttcaaggggaatgcttccagcttttgctcaaagtaatttatagacccaatgctatttccattaaactaccattgacattctctacagaattagaaaaaactactttaaaatt

SEQ ID NO: 582635 - DNA, 407 bp, Homo sapiens
tttggctttctgcttgtctactgtagctgtatggaatgcttgtgatttttgcacgtggcttttgtatcctgagacttcgctgaagttgcttatcatcttaagaaacttttgggctgagacaatggggttctctagatataggatcatgtcatctgcaaacagagatggtttgacttcctctcttcctatttgaatacactttatttctttctcttgcctgattgtcctggccagaaattccaatattatgttgaataggagtggtgagagagggcatccttgtcttgtgcctgttttcaaggggaatgcttccagcttttgctcaaagtaatttatagacccaatgctatttccattaaactaccattgacattctytacagaattagaaaaaactactttaaaatt

SEQ ID NO: 582636 - DNA, 407 bp, Homo sapiens
tttggctttctgcttgtctactgtagctgtatggaatgcttgtgatttttgcacgtggcttttgtatcctgagacttcgctgaagttgcttatcatcttaagaaacttttgggctgagacaatggggttctctagatataggatcatgtcatctgcaaacagagatggtttgacttcctctcttcctatttgaatacactttatttctttctcttgcctgattgtcctggccagaaattccaatattatgttgaataggagtggtgagagagggcatccttgtcttgtgcctgttttcaaggggaatgcttccagcttttgctcaaagtaatttatagacccaatgctatttccattaaactaccattgacattctcyacagaattagaaaaaactactttaaaatt

SEQ ID NO: 582637 - DNA, 620 bp, Homo sapiens
ttttccattctttcctctcttaattttattacgcctttttttttgatcgtcaaacaaagttattttacactgaagaagccctgtattttctcttttacttattttagaaaacgtgtaatttttatgtgcagagtgcctgttcttttttcccttcctatccactttttgttgatattcctcatttattcacyattccactgaatcctatccagctccaatttcactcttatcaaccacagactatatcccacaggaatcaaagggattcacacattcttaggcacaagtaagtaataggctatgctaatagcaactggaggttacagagattttccaagacagttgccattttaaatatcttactctgttttttccagaaatgcacttgtcagactatgtgttctgattttgagtttagaaaatatatttcttccagcccagctgtaactcaacccagacaggccaagttcatataaccctagtaatgttaacaagtcagcagctgtagaaacatgcattcctaagcttcaagagacaagcagctgaattttctagatcctgaggcatctatggaataagtcacattatgcctaaaacattttattttagaaagttgcagt

SEQ ID NO: 582638 - DNA, 185 bp, Homo sapiens
ctaatgtgcatttagctgactgggcaatagagctttcatttgtgcaccaaatggttgccaagcacaacatgtttctgacttaaatatgctttctartgtattttcgttttcctgtattggcttttaaaaattttgcctttctttcccctgaaactctattgttacaaatctatcagggattaaat

SEQ ID NO: 582639 - DNA, 520 bp, Homo sapiens
gatggtctcaatctcctgacctcgtgatctccccacctcagcctcccaaagtgctgggattacaggtgtgagcaactgtgcccagcctcagccaaatttcttaatgtcttgaaagagttacagatggcctgtccttttcaacaccttttactaatgttcaacctactttgatttagcctctgtctctctcattatgactaacgatcaccttcatattgccaaagccaatgaacatttttcagttcttggtggaatttgacattaaccactgttttcttcttgaaayaatttgttctgctgtcttccccagatatcattatctgctggttatctgcttagctctctggtcattcttcctctctatatacatatatatctttttttccagtttatcctcctctgtctggtgattaaatgttggagtttctcgaggctgaatcctgggctcttttcacattctattatatctccacaggcaaatgtatctattacgtctatgacttgaaaaattctaaattga

SEQ ID NO: 582640 - DNA, 594 bp, Homo sapiens
aaaattaggtggcaggtgcayagcttgaacatatttcatttcagaattccaatatccttagtgtttgaataataagaaaaaagccttatatgtttatctatgtagttaccatttctggtgctcttcattcctttggataggtcaatatttccatctggtattttccttcttcctaaaaaaactttaactactattatcttgtgaggtaaatctgctggttattaattcagtttttgaatatgtgatatggtttggttgtatccccacccagaatctcatcttgcattgtaatccccataatccccatgtgttaagggtgggaccaggtgggagtaattggatcatgggggcagtttctcccatgctgttctcgtgatagtgagtttcacgagatctgatggttttacaagcatctgacatttcaactgcttgcactcactctgtcctgctgccctgtgaagaaggttgtaggtacatgaatgtgctttggtcaacgaataggccgaggtgaatatccaagcctgcatgactcggtgagtttggtgctcaagcgcacacctccacttgttatataacctgtttgtgtaagttcat

SEQ ID NO: 582641 - DNA, 585 bp, Homo sapiens
  misc_feature 91: n = A,T,C or G
gctacagtgcctttgctaattaaattaatagctacaaatgcttaccaaagagattaacttatgcactgccctccttagaagagctagttgntaggcagccttgggtgaaagcttggcatctagctccttttctctcaggacagagactgctattcatcctcgagtgggagaatgaatgctacaatgctttcactaaaagcattcaccttcatctttacatctcagttgctccattttaattattttaatcacttagtgcattttaggtgtttcaagcctatttaatctggagtatattttgtgtcatgcttgtggacatgttccattgtcttatattaacacttgactcaacttatatcatgtctctttacaagcatcaatcttatattgcacacggctttcctaccataaacaggcatcctttatgactattcaaccattttacagaagtagtgataatactgatttttgcatattccttcaacctgtaaaaatacatattgccaaatatttgtttagtgtaactcatgatttcccacactaccccattctttaktttttgaaattgtatcctttgttattttt

SEQ ID NO: 582642 - DNA, 565 bp, Homo sapiens
atttccttgtttcctttttatctagacacttgtgatcacatttaggtcccattcagataatccaggataatttatctcaaaatctttaatcacwcctgcaaagacccttttcctgaagaaggtaatactcaggtgctagggattagggcctggataatatgggagtcccattattcagcttaccacaatgttccagcccccaacatagctttccacatacacaaaatatgtgactataaagaaaaaaacctgtgtaccctttagttttactaaccttgccaaattactactcaatcttcaaaactaagctgaaggatcacctcctccatgagatttcttatgcccttcactgcattacagacagacagtcccttcatgtcatcctattgaactttgtatatatttcagtgatatgacttgctggtatatatctcttgctgaactctaggcttcttgctctttttcatctttgcaaccttaacgatgagcacaatgaattacccaagatacaataatacagtaagatgtagcaaagctttgccataatcaataaagaaaaacataa

SEQ ID NO: 582643 - DNA, 461 bp, Homo sapiens
gttcacagtggaatggatttatagtcccagggggattatggctgtctctgctgagtcatacaggtttccagggaagtgggggaaagctggcagtcacaggtctcacagagcccrcagtcctaaatgccagtctcactcccactgtgcccctgcaatagtaccaagtctatttttagacagctagtcaccagggctgagatctcgccccaggccatgagacagcggcctgccgcaatgatccagttccttcaaagcatctgtggatgctctcagctttcctggtatattcctgtggtatttcttggagcataagttcacgatgtgagtctccacatgctgctcttgtccctctgaatgggagctgcaagctaatcctgcctcctatctgccatctgaatccctgctagtgctccactatagacttattagaatgactaaaatccaaaacactaacaccacca

SEQ ID NO: 582644 - DNA, 593 bp, Homo sapiens
aggtgcagagaaagcatttaataaatctaccattcattactggttatttaaaaaaaaaaaaaaaactcatcgcaaaatagaaatagagaacttcctcaaccttatacaaggcatctatttaaaaaacactacagctagcatcatagttaattgcaaaaccctgaatattttattctaagttcaggaacaaaacaaggatgtccattctgcattcaatattatactggagtttccagccaatgcaatcaggcaagaaaattaaataaacagcctctagattgtaaaaaaaaatagtaataagtaaaactgtctttattcatagaagtcattgttaatgtagaaaagctgatgaaatttacaaaraagttattagaactaaaatgtgagagtagcaagtttgctggtccaagatcaatatacaaaatgtttacgtatttataataaaaagtcagaaattaaaataaaaacaataccatttaaaatagtatgaaaatatgaaatattttaggattcatgtgatgaaatatgtaaaagatcagtacaatgaaaactacaaaacactgttgagagaaataaatggagatctaaataaa

SEQ ID NO: 582645 - DNA, 456 bp, Homo sapiens
tggttttttttttctttttttttaagggcaattaatggaagttggatttcacatttatgggacaaagttctcacccgccatttaaatttttcacaaagggggcttctgatgttttggggaatattagtgccatcacagctactgtcactgtcccactcatgaaccaagggcatcttactacaagcaccatgcctctctaccagaggtcagtctccagccattgctcaagttgtgcataggacaggctcattctgggraattaggcttcctggagcagccatccataaatgacaacaggaatggatagataaataccacaagcctccttggctcttagatggaacaggtctgagatgttccctccactgtctcacagaagttcccagtgggattgtaccccagctaccctcaggtggtaaccacctattatgcaacttctactggcttccttccttt

SEQ ID NO: 582646 - DNA, 566 bp, Homo sapiens
gattcttatttatttatttatttatttatttatttatttattatactttaagttttagggtacatgtgcacaatgtgcaggttagttacatatgtatacatgtgccatgctggtgcgctgcacccactaactcgtcatctagcattaggtatatctcccaatgctatccctcccccctmcccccaccccacaacagtccccagagtgtgatgttccccttcctgtgtccatgtgttctcattgttcaattcccacctatgagtgagaatatgtggtgtttggttttttgttcttgcgatagagattcttttttaagaaagagatttaagacccatgcattgttcatttcacaggttctattttgcattacaacacaggcagtaatcccaggccctgtgtagaataatgtcttcctagtgttccccttgagaacctacatttgctgctaatgtggggctgcatgtgatgacagcctgctagtttcctgctggtggactaatggctgcaactaagcactcctttcaaactgtgctcaaacccttgatgtggagatctcttcctttgaa

SEQ ID NO: 582647 - DNA, 596 bp, Homo sapiens
gatatttagcatttttcacatgcctgttggccatttgcatgtcatcttttaagaaatgtctatatcctttgcccatgttttaatgggtttattacttttttgctattgagttgtttgagcttcttgtatattctggatattactcctttgtcagatgaatagtttgaaaatattttctcccattccacaggttgtcttttcactctgtttcccttgctgtgcaggagctttttagtttaatatcccatttgtccatttttgttttcgttgcctgtgcttttgagatttagccataaaatctttgcctagaccaatgtcctgtagtgtttcccttacattttcttccagtagttttatagtttcatgtcttatattaagctttttaatcaattttgaggggtcttcttgtgtgtgtatggtgagagataggggtctagtttcattcttctgcatatagacatccagttttcccagcaccatttattaacgagggtatccattccccatgtatgttctcggtgcctttgtcaaaaatcagttggctgcaaataygtggatttatttcggggttctctattctgttctattggtccatg

SEQ ID NO: 582648 - DNA, 596 bp, Homo sapiens
ttttgcttgttgatttatttaaattccttgtagattctggatttttgacctttgttggatgcatagtttgcaaataattttcccattctgtagattgtttgtttactctgttgacagtttcttttgctgtgtaaaagctctttagtttaattagttctcacttgtcaatttttggtttttgttgcaattgcttttgaggatatgctgataaattctttgtcaaagctgatgtcaagaatggtgtttcccasgtgtatgagtctgttctcatgctgctaataaagacatacctgagactgaataatttataaaggaaagaggtttaattgactcacagttcagtatggctggggaggcctcaggaaacttacaatcatggtggaaggagaagcaagcacatccttcctcacatggcagcagcaaggaaaattaatgagcaaaagggggaaaagccccttataaaaccatcagatctcgagagaactcactcactatcatgagaagagcagcatgggcgtaaccacctctgtgattcaattacctcccaccaggtctctcccatgacatgtggagatgatgggaactaaaattcaaga

SEQ ID NO: 582649 - DNA, 574 bp, Homo sapiens
gtaacaagcagatgaccataagatgcccagaggaacactcaacagacccagacacaaaaacacacccacatttatacagaagcacacaggtgggctctcactccctctctgtcacgcacacacactcacaatcacttccaaaatatacaatggaaactggaccaaagaatcctcccagcttctccacctatccctttccatgacgctcttccacctcaccmtagcctttcttcttcccacagaaaatttcccttgccattctcaaaactgactcttcacacctttctgggaatgaaggtatgggtaccctatacacctctgggagacaaggggtcattctgaactgggacacgccaggtggagctgaagtgggacggaaagggcggttttcccacagaaatacagcctgacccccagatctggagaatctggactttgccctcctggagtggggtgagcagcattagacgctctccaagggctcccaagcttgagtcatttctggggccacaccttcacactgatcccaggggacatggctgaaagagagcctggccacaagcaagttggtcga

SEQ ID NO: 582650 - DNA, 616 bp, Homo sapiens
aatgtatacgctgtaaaattattgaatcaagctatctatctgtcacctcacatacttatttttttgtgataagaacatttaaaatctactctcagtaatttycaggtatataaaacattattatttactgtaatcaccatgctgtcccgtaggtctctggaacttatttttcctaactgaaacttgtatcctttgactaatatattcccatgctctcaacacccttctacccctgcctcccagcccccaggaaccaccattctactctgcttctatgagttcaacttttttagattccacatgtaaataacattgtgtagcatttgtttttctgtgcctggcttgttacactcagcataatgtccttcaggtttattcttgttattacaaatgatataattttctttttttaatatataaggctgaatagtactccattttgtgttaacatatgtgtctatcacatttctttatgtattcatccatcgatggatgcttaggttgattccatatcttgactattgtgagtgaagccacgataaacatgagagtgcaaatacctctctgacatactgatttcctttcctttggatacatatccagaggtgaaatgact

SEQ ID NO: 582651 - DNA, 616 bp, Homo sapiens
aatgtatacgctgtaaaattattgaatcaagctatctatctgtcacctcacatacttatttttttgtgataagaacatttaaaatctactctcagtaatttccaggtatataaaacattattatttactgtaatcaccatgctgtcccgtaggtctctggaacttatttttcctaactgaaacttgtatcctttgactaatatattcccatgctctcaacacccttctacccctgcctcccagcccccaggaaccaccattctactctgcttctatgagttcaacttttttagattccacatgtaaataacattgtgtagcatttgtttttctgtgcctggcttgttacactcagcataatgtccttcaggtttattcttgttattacaaatgatataattttctttttttaatatataaggctgaatagtactccattttgtgttaacatatgtgtctatcacatttctttatgtattcatccatcgatggatgcttaggttgattccatatcttgactattgtgagtgaagccrcgataaacatgagagtgcaaatacctctctgacatactgatttcctttcctttggatacatatccagaggtgaaatgact

SEQ ID NO: 582652 - DNA, 612 bp, Homo sapiens
ctctacaaataatttaaaaattagctgggtgtggtggtatgcgcctgtggtcccagctagtagagaggctgaggttgggaggatcacttgagcctgggaggtcaaggcttcagtgagctgtgactgcaccactgcactctaggctgagagacagagggagaccctgtctcgaaaaaataaatacatacacaaaggttacttggttaagtaccaaataagatagcttatttttataccatgcttgcttaatgaaggtatacttccatgacaagtaggtttcttgacaagaaaatctaacaattttagtaactcaactaaacattaacacacagaaaatgtagttgatcactgacgtttaatttagaaaatgtctatctttagaaagagctaaattttgcgtgcttattatgtgccaggcactgtgctagaaagattcatgtgccttatcccatttagtcctaagaggtaggtactattattagcacacctatttcacagaggggaagtggagctttgattttgtaycttacccagctaggaaatgttaaatctattctttgaactgaggactatgtcagagctcaagaaagattctaattccattcctgttca

SEQ ID NO: 582653 - DNA, 553 bp, Homo sapiens
accaatatacttagacagcaggatttgcaacagagaaagagtttaatgatttcagggcaactgagcaaagagataggaggagactctcaaagccatctccctgaggaattatgggctggggcttttaaggggatcatggagggcaaggagctgtaaaattggggttgttgattggttaggggaaaggacataaagtcatcaggatatggaaattatgttctttggtgaatcagcttccctggggtgtcattcagatcagctgacatcagtagtttcattggtatgcaggagctgaaagaatatctcaaagggaaaacttaagattttacaatgtttaagttgttatctttaaagcagttaaggggaacgatagtcttgtgataaggtctctgtgagtctgaggcaataggcagtggaycgctctgaggaagcaggttggagagcaagctgcctaatgattaatgctgaacatgctgcaagcatgatttctttttgtttctcctcttccttcttccctgattagttttataaaatttataggaatagtttcatc

SEQ ID NO: 582654 - DNA, 592 bp, Homo sapiens
atcatgataagtttatagaatgatttttgaaaaactgacagaaatatttagtcacctaatctatacctccctatttatttaggtactttcaaacttgtatcagccatgttttacagtttatgcaaatcttgtacatcttttttcatatttttccctaagtatttcatactttcagtatagtgaaaaacagtattttaaaactagccacaaattcttttcataagaatgtaactaatgccagaaaatctgaggtggaacagtttcatcctaaaagcatgcccccactccctctgaaaaaagtcccttgtgccagaaaggttggggaccactgctatagttgattcctcaatgacagctgatgaattacgtctatatattactggattgtatcacggaaagaatgcaactgttcagttgtcactgcatttaaagagtgtaaaatatcaaagctaatttaagattacgtatgtctggatgttgaatcataatatgttaggtgaaagctacttyaatatttcatatctcatatctggattacttctcgtgaagtgttattagctatcaacaacaggcagaggagaatgcattaact

SEQ ID NO: 582655 - DNA, 543 bp, Homo sapiens
ttctaactcattcaataaagccaacatcaccttaatactaaggcatgagaaagaaaatacaacttcaagctagtatccctgataaacatagtacaaaaatgctcaagmaaatactagcaaaccagatttaaaccacattacaattttcatacaccataaccaagtagaatttatacctaggatgagaggatggttgaatcaatcatccaaatcaatcaataagttacactacattaacagaatgaacagtaaaacttacatgatcctcttagtagctacaaaaaagtatttgataaaatttaattccctttcataataagaatgctcaataaagtagaaggaactaacctccaaacaataaagaccattttaaaaaaattggcgggcgtggtggctcatgcatgtaatcccagaactttgggaggccgaggcaggtgaatcacaaggtcaagagattgagataatcctagctaacatggtgaaaccctgcccctactaaaaatacaaaaaattagccaggcatggtggcacacacctgtagtt

SEQ ID NO: 582656 - DNA, 543 bp, Homo sapiens
ttctaactcattcaataaagccaacatcaccttaatactaaggcatgagaaagaaaatacaacttcaagctagtatccctgataaacatagtacaaaaatgctcaagaaaatactagcaaaccagatttaaaccacattacaattttcatacaccataaccaagtagaatttatacctaggatgagaggatggttgaatcaatcatccaaatcaatcaataagttacactacattaacagaatgaacagtaaaacttacatgatcctcttagtagctacaaaaaagtatttgataaaatttaattccctttcataataagaatgctcaataaagtagaaggaactaacctccaaacaataaagaccattttaaaaaaattggcgggcgtggtggctcaygcatgtaatcccagaactttgggaggccgaggcaggtgaatcacaaggtcaagagattgagataatcctagctaacatggtgaaaccctgcccctactaaaaatacaaaaaattagccaggcatggtggcacacacctgtagtt

SEQ ID NO: 582657 - DNA, 524 bp, Homo sapiens
cagcaaacccccatgacacacatttacctgtgtaaaaaacctgtacatgtaccacagaacttaaaataacagttaaaaaattacaaaaataaaattaaaaaaaagttcttgcaaatgatccaacatcatgttttaagaaattacattgtgaaatgtaccatacgtgcaaaaaaatgtctcaaaggtatttacaaaaacaaaccaaacaacaaaaawactagccccatcacaaaacttagagttcagatgttatttacatccaggcctattatttcagttggcttctgatatggtttggctgtgtccccactaaaatctcatcttaaattttagctcccataatcccctggtgggaggtaattggatcatgggggcgggtctttcccatgctgatctcatgatagcaaatgagtctcatgagatccaatggttttttaaagggtagctcccctgtacacactctctcttgcctgctgccatgtaagacatacctttgctccccttcaccttacactatgattgtg

SEQ ID NO: 582658 - DNA, 524 bp, Homo sapiens
cagcaaacccccatgacacacatttacctgtgtaaaaaacctgtacatgtaccacagaacttaaaataacagttaaaaaattacaaaaataaaattaaaaaaaagttcttgcaaatgatccaacatcatgttttaagaaattacattgtgaaatgtaccatacgtgcaaaaaaatgtctcaaaggtatttacaaaaacaaaccaaacaacaaaaatactagccccatcacaaaacttagagttcagatgttatttacatccaggcctattatttcagttggcttctgatatggtttggctgtgtccccactaaaatctcatcttaaattttagctcccataatcccctggtgggaggtaattggatcatgggggcgggtctttcccrtgctgatctcatgatagcaaatgagtctcatgagatccaatggttttttaaagggtagctcccctgtacacactctctcttgcctgctgccatgtaagacatacctttgctccccttcaccttacactatgattgtg

SEQ ID NO: 582659 - DNA, 524 bp, Homo sapiens
cagcaaacccccatgacacacatttacctgtgtaaaaaacctgtacatgtaccacagaacttaaaataacagttaaaaaattacaaaaataaaattaaaaaaaagttcttgcaaatgatccaacatcatgttttaagaaattacattgtgaaatgtaccatacgtgcaaaaaaatgtctcaaaggtatttacaaaaacaaaccaaacaacaaaaatactagccccatcacaaaacttagagttcagatgttatttacatccaggcctattatttcagttggcttctgatatggtttggctgtgtccccactaaaatctcatcttaaattttagctcccataatcccctggtgggaggtaattggatcatgggggcgggtctttcccatgctgatctcatgatagcaaatgagtctcatgagatccratggttttttaaagggtagctcccctgtacacactctctcttgcctgctgccatgtaagacatacctttgctccccttcaccttacactatgattgtg

SEQ ID NO: 582660 - DNA, 634 bp, Homo sapiens
tatgagtattgacttccagatttctatagtgattttctattgctaaatccaaatatttacatgtttgatagacaacattcacaaaataaaatattttagataagatagtagaataaattaaaaagttaaagatataaaacccattatatttcttatttagtttccattctataaatatagatagtatataataacawgtaaaataaaacatacatataaatacatatgatagaatgtcctgagtttataatattttctagtatcccataccttctatttattccatgtttattttaaggaaaaaaaattctatgtctgtttttaaagaatctataatatgaaaacattccaatatgcataggttcttatagcaggaaaacagaaagatgttctttcagacataaaggcccatactaatataaatatatttccccagtggaagtcaagtaaaaagagtttgaagtataataaaattaaccatgagataaccagtcaagatagtttaatcaaaatgcttgccattaataaattcaagtaataacaatcccggcttaaaattatgaactattttagaccaaatagaaagtaaaacatcaggggaaaggaatgaggaaaattcccaacttctctaaat

SEQ ID NO: 582661 - DNA, 546 bp, Homo sapiens
tcacttgactttcttcttaatgacctcaaaagacagtcactctctaatattgtagtaaattaagcctttgagtaaataacatcagctgtttaggctgctggggttcaacattatcaggtgtttgtatataaagattaaaatatatggcagctggtaaaatacttagggtccgtgttatgccagattattctccycattaacttttgctttgaatatattcaccagtacctctcagtgaatgataaaatgttttcatttcaacaagcctaactcatgggattcaataagtctgttcaagggatatttaaaaataggttacacttttaaacaagtgataatggactcactaaagcttaacatttctctttgatgtcagatatagttttataatagaactgcaagtaatattctagtcaatttctccaccaactttagcattcagtcactgagaaaaatcctgtttggaccacattattctgaattaggattatacagacaggcagaataaattggaaaaaatataatctaagaggataaaatattttt

SEQ ID NO: 582662 - DNA, 586 bp, Homo sapiens
tacattaatatttcttgctctgagtakcattatattgcatggatgtattatggtttattcacttattgatggatatttgacttgtttccagtttttgaatgttaaaatgaagctgctacacatattcatgcatactttttaacaaatggacatatacttttatttatcttggaaagacatctaaggatgaaatgactaaattgcatatatgtgcaatttttaaagaaactgccaaactatttgtcaaagtagtcatacaatttagcattcccaccatcagtgtatgagaattccaggtcctctgtactctcactgacgcctgatatggtcaacgtttaattttagctattgtaatatgcatgtgctggtattccatcatacttttaattgtgttcccctaatgactacaatgttgaacatctttttctgtgcttatttgcttccatatttctagctgttaatatctgtttatttaaaaaattaggttatttgttttctgagttttgagatttctttttatattctgggcactggtgtttatagaatatatgatttgcaaatattttcttctaggctgtggcttgtg

SEQ ID NO: 582663 - DNA, 503 bp, Homo sapiens
tgttgcccagtttggagtgcagtggtgagatcttgtttcactgcaaccttcgcctcccaggttcaagtaactctcgtgcctcagccctctgtgtcactggaattacaggcgtgcaccaccacacctggctaatttttgtatttttagtagagatggggtttccccatgttggccaggctggtctcgaactcctagccccaagtaatctgcccaccttggcctcccaaaatgctgggattacaggcatgagtcacagtgcccagtctgttattcttgaaggattttatttttacytttttcaaaccaactacttgaattggctacatacaaatttggaaagctctctaaattaagcaaacttcttgccttgtcttaaggtcatttatttccaaccaatcacacacagatacagatacagacatatgcgtttattttagaaaccctcataacttgacccatactttgcagcccctggcatcacatacaattattttttatacgat

SEQ ID NO: 582664 - DNA, 412 bp, Homo sapiens
aaaacaatcataaaatgtgtatgaaatcaagacaaatagccaaagcaatcctgagcaaagtcacccaagctgaaggcataacattacctgacttcaaaatatattacatatagtamccaaaacagcatgctattggtatggaaaaagacacatagaccaatgaaataaaacagagaacccagaaataaatatttatagacaactgatttttgacaaaggcatcaagaacttacactggggaaaggacaccctctttaataattcattatgtgaaaaatgaatatccacatgcagaagaataaaacttgaaagcctatatctcactatatacaaaaaacaactcaggatggattaatggcaaaaaagtaagacccaaaactataaaactattagaagaatacatagggaaaac

SEQ ID NO: 582665 - DNA, 596 bp, Homo sapiens
atgcccatcaataatagactggataaagaaaatgtgatacatacacaccatggaattctatgcagccataaaaaggaatgagatcatgttttttgcagggacatggatgaagctggaagccatcatcctcagcaaactaacacaggaacagaaaaccgaacactgcatgttctcactcataagggggagctgaacaatgagaacacagggacacagggagggaaacaccacacaccagggtgtgttggggggaaggagggagggagagcatcaggataaatagctaagtcatgtgggccttaatacctaggtgatgggttgataggtccaacaaaccaccatggcatacatttacatatgtaacaacctgcacattctgcatatatatcctggaacttaataaaataaaaataaaataaaataaaaaactatagtatacttgttattaaattctagcttcttccattgtttttcagtttttattatttacttacaatttagattgaatgctraattctttcctgactacaagtctctaaacagatttttacatttttattctgtttttctcacttggacttaaagaaattgccact

SEQ ID NO: 582666 - DNA, 406 bp, Homo sapiens
aatgaatggaacagaatacagaacccagaaataaagccaaacacttacagccaactgatctttgacaaagcaaacaaaaacataaactggggaaatgacaccctattcaacaaatgatgctggggtatattagctagccacatgtagaagaataaaactggactgtcatctctcaccttatacaaaaaatcaactcaagatgaatcaaagacttaaatttaagaccagaaaccgtgaaaattctagaagataacaytggaaaaacccttctagatattgccttcagcaaagatttcatgaccaagaacccaaaagcgaatgcaacaaaaacaaagataagtggatgggacttaattaaactaaaaagcttctgcacagcaaaataaataatcatcagagttaacag

SEQ ID NO: 582667 - DNA, 531 bp, Homo sapiens
ttgctttggtttctgccagtgagcttacatctccataagcagcatgtgtcttaattgctgagccccagtcaccaccagacaatctaatcaatgtctccataattaacctcaccaaatggaaagtcataaatttagaactaaaatgaaattctgctcagtctgcatatagaaactgacatagcccaaaaggagacaacagggtaattaccagaataatttaagaaaaccttgtttggaagggaaggaaaacaaaataatgtgataccaaaatgaccagatggatcatatacattaatcgtagttgctgggtgactgctggaaaaatatgtctctcacaaatatttataaattagtggcataaaagcatttggctgactggccaggcacrgtggctcatgtaatcccagtactttgggaggcttaggcatgtggatcacttgaggtcaggagtttgagaccagcccggccaacatggtgaaaccccatctctactaaaaatacaacaaaaaaaaacagctgggcatggtggcg

SEQ ID NO: 582668 - DNA, 533 bp, Homo sapiens
aattgttttatactctgtcacctttacacactagaattttacttttatgttattataacatacttgttccagtatttaaaactatggttataggtcataagttgctgagataaattagttttgattaacttacagaaaaagaaaccttccaatttaaataaaatggaaaatgtctcttcatctctgggagaaaaatgcttttgtcttgatagtgactacgtggacttaatttcttggcacttargtactgggatgcctactgatggcagcttcccctcgaggctttgtgtgcatcatccaccctcccactgagatgccactttggtctttttgaagataatgctttgctaagcagctcaaaaggtgaaaaggtgcagcactgtaagggtctgtgtaaggagtgccgatgaggctggctctgtggtcagataacttgggtttgaatcctggctttcttagttgcttgctcttagataagtcctttatcttgctggaccttagtttcatcattttgtaaaagagagatggtaatg

SEQ ID NO: 582669 - DNA, 632 bp, Homo sapiens
tgtttcatatataggccaggtgtctttgccctccagatgtgcactccacctttctttctatactttctgccccagaacgtgtcctctgtagacaacatcccaactgcacaattcaatgatgttagtgatgttgttaggacatcgtgggagtatttactccatgaaaatcctaacaggcgccaaatcagtttttttcttcttcctcccctaagagccagtggtttaaacatytaccagcatgaggccctaattcacacatatagtaaatatctattaatttcataaattatctaatagtttacattgagaataaccatttaaaatatgtgtgtgtgtgtgtgtgtgtgtgtgtgtgtatgtgtgtaaaattacaagggagtcatgggtattgcctgctaatgagaaaccccaccaccttcttatgggtagagggaaaaaggtttgggtagagggaaaaagtttaggatgaagtacaatgaaatgggagaattccctaacaaataaaacaactggctattatttggcaaagtatattcacctgagtgaactatagggacaactgagatactgttaaatgaatgggactacccttaatttttaacacagaaactataatatggtcttcatattgg

SEQ ID NO: 582670 - DNA, 605 bp, Homo sapiens
gtgacatatctaaggcagtgttaaaaggaaaattcatagcactaaatgcccaaatcaaaatgttagaaagatctcaaattaaaaacctatcatcgcaactgaaagaattatagamgcaagaacaaatcaaccccaaagctagcagaaaacaagaaataaccaaaataagagctcaactgaaggaaaatgaagacacaaaaaccattcaaaatataaacaaagccaggagttggctttttgaaaaaattagtaagataggtcactaatgagactaataaaaaagaaaggagagaagatccaaataaagacaattataaatgacaaagaggatattaccactggccccacagatagaaaaataaccatcagaaactactatgaacacctctatgcacataaactagaaaacctagaaaagatgaatacatgcctggacacatacactctcccaagactgaaccaggaagaaattgattccctgagcagacaaataacaagctttgaaacaaaatcagtaataaatagcctaccaaccaaaaacaaaaaaacaaaaaacaaaaacaaaaagaaaaaaaaaagcctaggacctgatgaattcacagttg

SEQ ID NO: 582671 - DNA, 605 bp, Homo sapiens
gtgacatatctaaggcagtgttaaaaggaaaattcatagcactaaatgcccaaatcaaaatgttagaaagatctcaaattaaaaacctatcatcgcaactgaaagaattatagacgcaagaacaaatcaaccccaaagctagcagaaaacaagaaataaccaaaataagagctcaactgaaggaaaatgaagacacaaaaaccattcaaaatataaacaaagccaggagttggctttttgaaaaaattagtaagataggtcactaatgagactaataaaaaagaaaggagagaagatccaaataaagacaattataaatgacaaagaggatattaccactggccccacagatasaaaaataaccatcagaaactactatgaacacctctatgcacataaactagaaaacctagaaaagatgaatacatgcctggacacatacactctcccaagactgaaccaggaagaaattgattccctgagcagacaaataacaagctttgaaacaaaatcagtaataaatagcctaccaaccaaaaacaaaaaaacaaaaaacaaaaacaaaaagaaaaaaaaaagcctaggacctgatgaattcacagttg

SEQ ID NO: 582672 - DNA, 503 bp, Homo sapiens
gaattcaatgcaattcaggttacacaaaacagtttcacttcttacggggagatctgctgattgaagattaacctgcagcaaaaaaggaaaagtgaaaagcttggaggaactagtcaaactagagaaagtgttactctttgttttgctgttcagcgtgggatagcaggggctggagaaaggagatacctgcaatgtaaacatgtgatctactttcacaatatctaaacaattcacagtccaacagagtgaagaataaacactgccatcaaacacatgtatgtgtctggtgtctctgaaaggtgacttcatcatcatgaatgagaatataaagggcgagaggcaaaatatgtagctaagcagaaacatgctcaatttcattaccaaacagaccagatatcactgcctttagtcagaaatatactcacctgattgtcatttctctaatcaaccagcagactccacacaataaaaaatccycttttgaaatacttgaatctctggct

SEQ ID NO: 582673 - DNA, 547 bp, Homo sapiens
aattttaaaaaatagttaaaaattggaaacaactcaaatatccattgaaattagaatagataaatatgtaaaatagttgtacaattcaagacaatgcagaaatgggaataaatgaaatacaactacatacaacataggtggatcaaacaaacatatcataaaattccatttatagaaggtttaaaaataacccatacaaatccaaggtgttggaactcaggatattaattactcttgggttagtgacttaaatagggaatgagaatggcttctggaattctagaatgttttctttctttcttttcttttctttttctttttctttttctttttctttttttgacagagtttcactctgttgcccaggctggagtatagtggcaccatcttggctcactgcaacatctgcctcccaggctcaagcrattctcacttgtgcacctcagcctcccaagtagctgggattacacgaatgtaccactgcacctggctaatttgtgggtgtgtatgtgtgtttagtagaggtggggtttcaccatgttggcca

SEQ ID NO: 582674 - DNA, 564 bp, Homo sapiens
gaggagtttggcagagataattgttgttatacgtattttgaattttaggattgtatgcattttatgaagttttcatatgttttgtctcactataatatgttatgattgaaaaaaggcaaatatttaaagtctccattacaaccacaatggaactgaccttgagaaaagttaaatgtgttgtatgtatggaatctctctggctttaactttctagaactcatcctctaagtcaagaaagcatgatttttttatgaagtctaaaatgtaaaatatttacattttaaggaattataatttaggagtgataatgggattgtgattatgtttttaagaatccttttgtttaagacatatgtactaattttttttttttttttttttttttgagctggagtctcactctgtcgcccaggctggagcgcagtggcatgatcttggcttactgcaagctccgcctcccagtttcacaccattctcctgcctcagcctcccgagtagctgggaccacargcgcccaccaccactcccagctaattttttgtatttttagtagatacggggttt

SEQ ID NO: 582675 - DNA, 503 bp, Homo sapiens
tttcaaaactcataaaaaataaaataggcaaaaatgaaaatgacaaccattttgctgctggtttatatacagtatttttcttaaatcacaaaaatgaacaaatttattcaaaatataatttaatatattttaatatatttaatttactcattaaatatattttgtgattatatttatgaataatatattcataaatatatatgtaaataatatattcataaatatattatgaatactatatattcatgatatattatgaatactatacattcataatatattatgaatactatayatcatgatatattatgaatactatacattcataatatattatgaatactatatattcataaatatattcactaaatatatttaatatatttaatttattcaaaatataattataattttaaaatgagaatttaaaaatatttaaatgaacatgcagagttaaattgaagcacatcttttactatatacctatttttcaaaattatttc

SEQ ID NO: 582676 - DNA, 385 bp, Homo sapiens
ataataataataataataataataataaaagaactttaagaatcccatgaactcttctttgtgcttttccttttcttgtttttttttttttttttttttttccccattactttttttcctaaaaaaaccatttttttgggggaccaaagcaagcaggaatcaaaagtggaagcaggkggaagcttcggccacccaaaaacttgttcatagggaattctgcatatttgttaaatccaacaaacaaataaatccaaatgttttatttcataaatccttgaatattacttattacaatttcatatttacctaaaaggggtctgaggcatattcactttgaaatattgatttaggcaaccaggtttagtcccaataattctggaaaaaa

SEQ ID NO: 582677 - DNA, 385 bp, Homo sapiens
ataataataataataataataataataaaagaactttaagaatcccatgaactcttctttgtgcttttccttttcttgtttttttttttttttttttttttccccattactttttttcctaaaaaaaccatttttttgggggaccaaagcaagcaggaatcaaaagtggaagcagggggaagcttcggccacccaaaaacttgttcatagkgaattctgcatatttgttaaatccaacaaacaaataaatccaaatgttttatttcataaatccttgaatattacttattacaatttcatatttacctaaaaggggtctgaggcatattcactttgaaatattgatttaggcaaccaggtttagtcccaataattctggaaaaaa

SEQ ID NO: 582678 - DNA, 351 bp, Homo sapiens
acaagaaatgcagtatataccaaataagatgaataaaaaaacccacatgcagataaatcaaaatgaaattggaaacaccaacatctaagggwacattattatttggcattattgaaatataattgacaaagaaaaatggtatatgtttaagatgtacagcttgatatttcgatatatatatatatatatatatatatatatatacacacacacacacacacacacattgtaaaacaatcaccacaatcaggctgattaacatacccatcaccgcacatggctgtcatgtcttccttttgtgtgtgtgtgtgtgtgttaagacatgatttatcttgttagcaaatttcaagt

SEQ ID NO: 582679 - DNA, 598 bp, Homo sapiens
ctggtttttttttttggtagagatggggtcttgctatgttgcccaggctggtcttgaagtcttggcctcaagggatcctccgaccttggcctcccaaagcactgggaatacaggtgcgagccacaacacctgacctatcaaaactcttgaacgtagtgtctctcagatttttttgatggcaatccacagtaagtgtcaacctaaataataaagagagactctctaaaagaaagaaagcaatgtttctttgtgaatraagtattgcaatgggactatgtgaaccaaagtgtattcagggaggtaaaggaagacaaagatcattaaaggaaaaaatgaggaggattatcacataattgttttgaaataattatccttggctccagaggtcaataacaagagtggtgccagtccaaggctggacaggcagctgatgagtagataaccttgcagaagtgttttttgtgtaaggttgcaatgaccttcgttcaaagttgtagtttttgcagtcttttgtgacagtttttcttaccagtcatgagaaccctctcttcattgccttccctggctctatttgtcaggctctatttgttttaacatt

SEQ ID NO: 582680 - DNA, 408 bp, Homo sapiens
gcttgccacatgatgagttgcatgcccctggaccacctgcccagcctcggcggctccggttccctgactgccccatgaggataacagttcaccatcccaggattatctggggaattaaatgagttgatgcacataaagcacccagcattgtagctggcacataatagckttcaagatgaatttttaaaactctaggctcagccaggcatggtggctcacgcctgtaatcccagcacttggggaggcagaggcaggctggttgcttgagctcaggagattgagactagcctggacaacacaggaagaccacatctttacaaaaaataaaacataaagagtagccagccatggtagcacacacctgtagtcccaactactctggaggcggaggtgcaaggattgcttgag

SEQ ID NO: 582681 - DNA, 652 bp, Homo sapiens
gctgccttctccttcctctggaagctgcatcctagaggggcacctgccagagccagagctctcctgtatgacatgtctgttgacccctgcagggaggtgtctcccagtcaggaggcatggggatcagggacccacttgaggaggtagtctgtcccttagcagaactccagcactgtgctgggagatccactgctctctgcagatccatcagrtagggatgtttaagtctgctgaagctgcacccacagctgccccttcccccaagtgctctgtcccagggagatgggagttttatctataagcccctaactggggctgctgccttcctttcagagatgccctgcctaaagaggaggactagagaagcaggctacagaggctttgctgagctgtggtgggctccacccagttcgagcttgctggtggctttgtttatactgtgagggaaaaccacctactcaagcctcagtaatggtggacgtggcttctccctccaccaagccagagcatcccaggtccacttaagactgctgtactagcagcaagaatttcaagccagtggatcttagcttgctggactccatgggggtgggatccgctgagctagaccacttggctccctggcttcagccccctttccagaggagtgaat

SEQ ID NO: 582682 - DNA, 652 bp, Homo sapiens
gctgccttctccttcctctggaagctgcatcctagaggggcacctgccagagccagagctctcctgtatgacatgtctgttgacccctgcagggaggtgtctcccagtcaggaggcatggggatcagggacccacttgaggaggtagtctgtcccttagcagaactccagcactgtgctgggagatccactgctctctgcagatccatcagatagggatgtttaagtctgctgaagctgcacccacagctgccccttcccccaagtgctctgtcccagggagatgggagttttatctataagcccctaactggggctgctgccttcctttcagagatgccctgcctaaagaggaggactagagaagcaggctacagaggctttgctgagctgtggtgggctccacccagttcgagcttgctggtggctttgtttatactgtgagggaaaaccacctactcaagcctcagtaatggtggacgtggcttctccctccaccaagcyagagcatcccaggtccacttaagactgctgtactagcagcaagaatttcaagccagtggatcttagcttgctggactccatgggggtgggatccgctgagctagaccacttggctccctggcttcagccccctttccagaggagtgaat

SEQ ID NO: 582683 - DNA, 652 bp, Homo sapiens
gctgccttctccttcctctggaagctgcatcctagaggggcacctgccagagccagagctctcctgtatgacatgtctgttgacccctgcagggaggtgtctcccagtcaggaggcatggggatcagggacccacttgaggaggtagtctgtcccttagcagaactccagcactgtgctgggagatccactgctctctgcagatccatcagatagggatgtttaagtctgctgaagctgcacccacagctgccccttcccccaagtgctctgtcccagggagatgggagttttatctataagcccctaactggggctgctgccttcctttcagagatgccctgcctaaagaggaggactagagaagcaggctacagaggctttgctgagctgtggtgggctccacccagttcgagcttgctggtggctttgtttatactgtgagggaaaaccacctactcaagcctcagtaatggtggacgtggcttctccctccaccaagccrgagcatcccaggtccacttaagactgctgtactagcagcaagaatttcaagccagtggatcttagcttgctggactccatgggggtgggatccgctgagctagaccacttggctccctggcttcagccccctttccagaggagtgaat

SEQ ID NO: 582684 - DNA, 622 bp, Homo sapiens
agagtgcctttactgagctcatcagtagattgggcaaggcctaggaaagaattggtaaacttgaagatatgttaaaagaaacctcctggctgtgcgcagttgctcatgcctgtaatcccagcactttgggaggccgagacaggtagatcacaaggtcaggagatcgagacaatcctggctaacatggtgaaaccccatctctactaaatatacagaaaattagctgggcgaggtggcaggtgcctgtagtcccagctactcgggaggctgagacaggagaatggcatgaacccaggaggtggagctttcagtgagccgagatcgcgccactgcactccagcctgggtgacagagtgagactccatctcaaaaaaaaaaaaaaagaaaaagaaaaaaaaaaaagaaacctccctaactgaaattcaaggagaaaaaggagtgggagaggaacagaatatccacgtactgcaggacaatgtaaaagggtgtaacatatgcagaattggaataccagaaagaaaagaagagaaaggagaagaagaaagatttgagtaatgaagaactttccaaaattaatgacagacaccaaagcacagayctaagaagcttagagaaaattcag

SEQ ID NO: 582685 - DNA, 628 bp, Homo sapiens
gcattgttgtgcgactaggtcatcacctatgggatgtgagccaatgtcctgacgttaaaaggggtggaagatgccttcctcttgcctagttctaccatttgcttggctggaatgtggaaatagcagtgaaagctgagatagccatcttggccacaggacagaatccaagtgttgacaaccacagagcaactacagaaggaactttgttctctgaaggttgtggaactatgatatccctctctaagcctaaataccatcattatagcatcaactgcttaactctccttaagtgcagcaagggaacttcagcatwtaaactctatgcaaatgacgacacacataccatactctatttggcaaagatgacctgtaatgtgtgcaggaatcacctgggagtcttgttaaaatgaagtctgtttcagtaggtctgggctgaggcctgacattcagcatttctcacaagctgtgatgccagtgatgctagttgggtcatgtcctggatctaaagcaatgaacctgagttcgagatgagcctggtgaacatagcaagatcccatctctaaaactaaaaaagaggcaggtgcacctatagtcccagctacttgggtggctgaggcaggaggatggc

SEQ ID NO: 582686 - DNA, 593 bp, Homo sapiens
gcttcaggccaggagtttgagaccatcctggccaacacagccagacccggtctctacaaaaaataaaaaaaattaactgggcatggtggtgcatgcctgtagtcccaattactagggaggctgaggagggaggatcatttgagccgaggaatttgaactttcagtaagcaatgattgcaccacttcactacagcctgggctgcagagtgagaccatgtctcacaaacaaacaagcaaacaaacaaaagccttagggatgagatgggatgggataaggagggctctgagttggccaaagatcaaagtccaatttcacttgaagactctggggcctagttatacacagagaacctctgtggttatcaaatacaactcaagcctgcagtgtgttcggcattggccttcctccaggactttgcctctaacagctatttcarttatgaattctgacaacaatgatttctttaatatattctggccattaatggctgacagtgaggcaaacacttagtaatcaacactatagagtaagaagaagaggagctggaagaagaggagaagaaagagaaagatttaagagaataaagacagta

SEQ ID NO: 582687 - DNA, 462 bp, Homo sapiens
cctcctctattttttggaatagtttgaatagaattggtatcagttcttccttaaatgtttggtagaattcagcagagaagccatcaggtcctaggcttttctttactgggactctttttttacaacttcaatttcattacttcttatyggtctgttcaggttttggatttcttcctggttcaaccgtaataggttgtgtgtgtctaggaatttgtccatttcttctggatttcctaatttattggcatatagttgttcacatcacagtagccactaatgattctgtaaatttctgcagtatcagttgtaatgtcttctttttcatttctgattttatttggatcttctctctctttttcttagtctggctaaaggtttgtcaattttatttaacttttcaagaaaccaactttttgtttaattgattttttttatttttaaatttcagtttcatttacttct

SEQ ID NO: 582688 - DNA, 462 bp, Homo sapiens
cctcctctattttttggaatagtttgaatagaattggtatcagttcttccttaaatgtttggtagaattcagcagagaagccatcaggtcctaggcttttctttactgggactctttttttacaacttcaatttcattacttcttatcggtctgttcaggttttggatttcttcctggttcaaccrtaataggttgtgtgtgtctaggaatttgtccatttcttctggatttcctaatttattggcatatagttgttcacatcacagtagccactaatgattctgtaaatttctgcagtatcagttgtaatgtcttctttttcatttctgattttatttggatcttctctctctttttcttagtctggctaaaggtttgtcaattttatttaacttttcaagaaaccaactttttgtttaattgattttttttatttttaaatttcagtttcatttacttct

SEQ ID NO: 582689 - DNA, 486 bp, Homo sapiens
tcctggccaacacggtgaagccccgtctctactaaaaatacaaaaattaactgggcgtggtggygggcgcctgtagtcccagctactcaggaggctgaggcaggagaattgtttgaatcccaggaggcggaggctgccgtgagctgagatcgcaccactgcagtccagcctggagacagagagagactttgcctcaaaaaaaaaaaaaaaaaggaaaaaggatattgaaagtctttacagaaacagaaacaaatagctcatgaacataatggagacatgtttagtctcactcagtagtataaatacaaatcaaaactatacagggagtccatctttcatttagaatattgtcaaaaatcacacaggtttgaggtactgtgttggtgaggctgtatcgaggcactcttatagatggctggtgggcaaacacaatatacagtcctgtagagggcaatttagcaatatctcaaaattacaaagtcatat

SEQ ID NO: 582690 - DNA, 453 bp, Homo sapiens
tatattgctttttgtacatttaaatattttaaaaatccaatttcccaaaatacttctatatcattctccatcacagttttgctatttttttcatttggttattataatattttatagataaattttcttaaaaataattgtgaacatctgcaagtttatctctgcaaaaacataatccctaccagatgtttctggctggctctgagcccagagatawtaatggaattataatggagaaggtcttgggcaaatatatttgtcaggctaactgtgaatttgatcttaaattgtactaaagcctgtgatagggtggcattaagtaaaactgccgtgggacttcagcagttgatccgaacagctggctgattctattctcttctgttctctgcttcaaaagccaagtttgtccttatatcatgttatataacccaagattaagattggttttgcaga

SEQ ID NO: 582691 - DNA, 617 bp, Homo sapiens
taatccatgtgtctataaccaactgagtttttacaaagatgccaaaaacactcattgggaaaaggacagtctcttcaataactggtgctgggaaaactggatatccatatgcagaagaataagactagactcccacttctcaccttgtataaaaatcagggcaaaatggaccaaagacctaaatgtaagacctgaaatgataaaactagtagaaaaaaacataggagaaatgcttcaggacactggtctgggaaaatattttatgaacaagacctcaaaagcagaagtaacaaaagcaaaaataaacatatgggatcataccaaaccaaaggcttcttggtttggttcataccaacaaaggaaaaaacaacagtgaaaagacagcctacaaaattggagaaaatatttgcaaattgctcatccaataggggattaatatccagaatatacagggaactcaatcatctcaacagcaaaaaaaaaaaaaaaaaaaaaaaaaaaaaaaaaaaaaatttccatttaaaaaggggcaaataatytaaacaaacttttttaaaaaaaatccttccaaagggccaaggatttataaaaaaaggctggacttccctaaccaaacc

SEQ ID NO: 582692 - DNA, 414 bp, Homo sapiens
ccctgctctctcacccagttgttcccccttacatgtagctactgcccgttcctgctggattgttcttccggaatctggttgcaaatacatgcctctccaaaactctgcatgaggccaggcgtggtggctcacacctgtaatcccagcactttgggaggcagaggcaggcagatcacctgaagtcaggagtttgaggccatcctggccaacacggtgaaaccccatctctactaaaaatacaaaaattagctgggcgtggtggtggccgtctgtaatcccacctaattgggaggcagaggcgrgagaatcgcttgaaccctggaggcggagccaagatctcgccactgcactccagcctgggtgatagagccagactccatctcaggaaaaaaaaaaaaaatctgcatgagttct

SEQ ID NO: 582693 - DNA, 546 bp, Homo sapiens
aagaacttgcatgattcctactagcaacagctaaccttaataaaattggacgtggcagttgagatgcccaggccactgggctagatattaccatgagcacttgggcagtttccacacagggctaaagtagggagtagctgcaggagtgggccccatactcctctggtccttggccttttcaagaccctagcagcattacccaggcaatggaaaattgagtccagttaattcaattgaatccaaggtcttggacaccacagacgtgctgattctgtcaatcttcattcaattttttgcctttatatttctcctgggtgtccacccattttccaaatggagatcctcctgtctattttttacacagtgtttctggcacctcagcctcttcttgcagcactccttccccattctggccctaaccatcacctrtctttcataggtcagaagatatgatctatgtctcatctgaagatgtcacttatctgtatccctctaaatagtaaagtagataaataaagtatataaataaagtattttataaataaa

SEQ ID NO: 582694 - DNA, 668 bp, Homo sapiens
  misc_feature 1, 2, 3, 4, 5, 6, 7, 8, 9, 10, 11, 12, 13, 14, 15, 16, 17,18, 19, 20, 21, 22: n = A,T,C or G
nnnnnnnnnnnnnnnnnnnnnngacagggcccagagtaggtaacaaaataactcaaactctaaaataaactgactatgctcagggtgctttgccagctgctatcttagacataatcaagtgctcctcgacctgccccaggaaacatgatgatcccagaaagaacaagacagtcaaacgctgactgtggctggctaaggaaggggactgaatcagaagcaaaggctagagtccttctttagtgttccaggaaagaaaaaataatcacagatactaaagagggtctccactttttaatgtttcccatttaatcatttcttagccarcaaaatgtcaagaaactttcattgcaagggaggagaatgccaaaggaaagcaaaaacataaccgaaaagggacaatcttatgcatatcttgtgaggggaaggggtcacctactggcataaattccaaagccagaaaggtcccatttcctggcttccctgtgcagctgcctctcccacaatacgtaaacacacacacacacacactcacacatactgttactgatgcctgaaattcccataattgacatttcattccttttgcctgaacttaatgggatctatttcaacagttaaaatgtaaacatcctgaaggagagaggggcacataataaatttgacctatc

SEQ ID NO: 582695 - DNA, 495 bp, Homo sapiens
tttcataaatttatctagttgtttcagatttgttgtaaaaatatgtattttctattgtcctttgtcttcatagaaaatcagttcatcatctatattaaacacgaacatatttatggatgctccattttttaacatgcagctttaaaaatcttaaaataatttaatgttacttctttgattatattmttttccaagattggttaagttacctatgttcctttgtatttctgcatatttatatacatcttgacatcacattgtttatttttattttgcagtaaaatctgatgtgattttcatcagagttgaaatacatttgtagatcaatgtaaggtggatggatatcttaatataaataacatcaataagaacatgtatagatctacgttttctattttttcttaacatttatcaataatattttttagcttttagataaaagacctatgcatattttgttgcctttattcctaagaattatatgcttgtgattat

SEQ ID NO: 582696 - DNA, 495 bp, Homo sapiens
tttcataaatttatctagttgtttcagatttgttgtaaaaatatgtattttctattgtcctttgtcttcatagaaaatcagttcatcatctatattaaacacgaacatatttatggatgctccattttttaacatgcagctttaaaaatcttaaaataatttaatgttacttctttgattatattattttccaagaytggttaagttacctatgttcctttgtatttctgcatatttatatacatcttgacatcacattgtttatttttattttgcagtaaaatctgatgtgattttcatcagagttgaaatacatttgtagatcaatgtaaggtggatggatatcttaatataaataacatcaataagaacatgtatagatctacgttttctattttttcttaacatttatcaataatattttttagcttttagataaaagacctatgcatattttgttgcctttattcctaagaattatatgcttgtgattat

SEQ ID NO: 582697 - DNA, 495 bp, Homo sapiens
tttcataaatttatctagttgtttcagatttgttgtaaaaatatgtattttctattgtcctttgtcttcatagaaaatcagttcatcatctatattaaacacgaacatatttatggatgctccattttttaacatgcagctttaaaaatcttaaaataatttaatgttacttctttgattatattattttccaagattggttaagttacctatgttcctttgtatttctgcatatttatatacatcttgacatcacattgtttatttttattttgcagtaaaatctgatgtgattttcatcagagttgaaatacatttgtagatcaatgtaaggtggatggatatcttaatataaataacatcaataagaacatgtatagatctacgttttctattttttcttaacatttatcaataatattttttagcttytagataaaagacctatgcatattttgttgcctttattcctaagaattatatgcttgtgattat

SEQ ID NO: 582698 - DNA, 572 bp, Homo sapiens
ggggaagctgcattaaaattggtaaaggaagaaacataatatgaaaggagggaaataatgaggtaaaagatgcagagactgctttccagacaaagtaagaatgaacttcactttggaataacaaagcagtgcttgcttggcaaggtgagtcttagaatctgactaacatcaacagggcagagtctcaggtaattaacaaaaccaagaaggaacagggagcagcaatgctaaaacacaagaacccaggttactttgtcctacttcatagttgttattttcctaatcattggagataagctatgattaacagaaaaactacccatgtaaaatattgtcacccaacttttaagaaaaacaagaaagaagatacaaaacttagcaaacagaataagtaatttcagagaatcagaattaagacaagaaacaaatgtaattacagtaagtgtaattcatatcttcagagacatgcaagaagaggttgcattttagaaaatactgataatagctcttggattaaaaactcaacagatgytctgaagagaacaatagacatagttaaatatagatctagc

SEQ ID NO: 582699 - DNA, 392 bp, Homo sapiens
taaatgtttttacaaatagtgtcctataagtacccaaatacgcatttaattttgtggacaaagcaaagacaattgtgcatatctcccaattcccaagcatttaaaaatccaaaaataaaataataaaattaacaaacagatttttagaattatrtctggcaggagtttcgatcagtcatagagcgcaatagcatacttgaaaataaggacaatatggccattttattgattcttcctatccatgagcatagaatgttttttcatttgtttcatcctctctgatatctttggtgtttttagttcttacagagatctttcacctcactggttagctgtattcctaggtatttgattctttttgcagcaattgtgaatgagattgcattcctgat

SEQ ID NO: 582700 - DNA, 392 bp, Homo sapiens
taaatgtttttacaaatagtgtcctataagtacccaaatacgcatttaattttgtggacaaagcaaagacaattgtgcatatctcccaattcccaagcatttaaaaatccaaaaataaaataataaaattaacaaacagatttttagaattatgtctggcaggagtttsgatcagtcatagagcgcaatagcatacttgaaaataaggacaatatggccattttattgattcttcctatccatgagcatagaatgttttttcatttgtttcatcctctctgatatctttggtgtttttagttcttacagagatctttcacctcactggttagctgtattcctaggtatttgattctttttgcagcaattgtgaatgagattgcattcctgat

SEQ ID NO: 582701 - DNA, 572 bp, Homo sapiens
tttgtaaaccaaaaataaaattttaaggtgcccccaccatctcaatggacccttcctctcggtcaaggcattccagagttaacctgaaaatctaagtctgatgagaaacatttacagtctattctctctgcagcctgctacttggcggcttcatctgcatgataaaaccttggtctctacaaccccttattgtaacccagacattcctttctactgataataactctttcagccagttgccaatcagaaaaattttaaatctacgtatgacctggaagcccttccccacttcaaattgtcctgcccttccagatcataccaatctaaatcttacatgtattgattgatgtattatgtctttctaaaatgtataatagcaagctgtatctcaatcascttgggcacatgtcatcaggacctcctgaggctatgtcacaggtgtgttcttaaccttggcaaaataaactctgtaagttgactgagacctgtctcagatattttgggttcatatattcatttttgatagtttttttttcttttcttggtaattcctttttatatttctttaaaca

SEQ ID NO: 582702 - DNA, 563 bp, Homo sapiens
agagtgactagcaaaggaagactgggatgagtgggtgaggcgtgaggawccacttggaaccccatagctggtatgaagattattttaagctgaagatgtttgaaattcaacagatgcagaaataagttttcttggagcttcctttatctgattaaaatcagcaacttctgggaaatgaggctgccataaattccctcttcaggagggtctactttcagaaggaagaactgaaatatacctaccataaatcccctggagttttatggccctgaaaaagaccacttgtaagtacctacagaaacaaacattgtcacaaactttctttttcttgttctcctaaaaacccaatttgtctttcttaagaaaacgatttgttcttcccataggaagaacttcccacttcctccccaccccaactttaactttaatgagctagttactttagttacttctttcgttagctcatatgcatgtgaataaaccttttttctcctgttaatctgtattttattattttagtttgcaggccccagctcctgaatctaaaagagtcgtagattttg

SEQ ID NO: 582703 - DNA, 563 bp, Homo sapiens
agagtgactagcaaaggaagactgggatgagtgggtgaggcgtgaggatccacttggaaccccatagctggtatgaagattattttaagctgaagatgtttgaaattcaacagatgcagaaataagttttcttggagcttcctttatctgattaaaatcagcaacttctgggaaatgaggctgccataaattccctcttcaggagggtctactttcagaaggaagaactgaaatatacctaccataaatcccctggagttttatggccctgaaaaagaccacttgtaagtacctacagaaacaaacattgtcacaaactttctttttcttgttctcctaaaaacccaatttgtctttcttaagaaaacgatttgttcttcccataggaagaacttcccacttcctccccaccccaactttaactttaatgagctagttactttagttacttctttcgttagctcatatgcatgtgaataaaccttttttctcctgttaatctgtattttattattttagtttgcagrccccagctcctgaatctaaaagagtcgtagattttg

SEQ ID NO: 582704 - DNA, 436 bp, Homo sapiens
tgtccatatgagcaaagtaacacagattaaacagtgattcatttcataccaaactgcatccrtcattttaaaaactgtgtcatcatcctactccaaactgtatgtggcatcttctcttcctcttctgccaagcagagcaaagactctaggttacagctcatgaaggtgtaaattgggttgatatgctctatggaggcaaatggaggaaaaagaaaggaaggaaaccctgaatgggggttgggggcagggaggggtaagatttactctgctaactacatagatttctggtcattttggactgagtttcattttttttttttttggaggcaaggtttcactctgttgcccaggttgcagggcagtggtgcaatcttggctcactgcaactttcgtctcagcctcctgagtagctggaactacagatgtgtgccactac

SEQ ID NO: 582705 - DNA, 580 bp, Homo sapiens
gggtactgatctgggatattttgcctatttatagtggaactttcctttctgttgtcataagtgattgaagaatggctaaaagcatgatatggagatgggacattagaccacagagactattaatggcagtagtggrtacggtaagtcaagcacaaacatatattcttacttgtagaagttagacaattcatagaattatgtcattatcatcatcagtgttattatatagcatttatccatctattaggaggtgccatgagtggcattagggacactaagaacaaaaaatgaacaatattcttagagtaatctcagaaatgagaattttaaaagcgacatttaggataacaatgacactttgttctctccttgattacctcttctttgtctaaacccatccttactacatttaactaaatttcaatatgtagctattttttgagcaataaataagtaaatctctatataatacatgctgcagaagagatgaaaatgagtgagttaaaccgatctctactgtcagcaattcccagactatttgggcaagtggttgtcacaaacagatggctaacttcttacc

SEQ ID NO: 582706 - DNA, 586 bp, Homo sapiens
atctgttacactgtggagagagactttgattatataaaattttcaaaaagctgaatatgagacttatttcctatatgtacaacgttgatgggcttcatgatgtcagaaaattctgattaggctctcctatctgaacagtcctctaactgtccctttatcccagcttcagaaagagtacagtagctgaggggaccctgcatcaggatcatctatgggttcacagttcacttcgtgggctaaaggttctggggcaggagtatgtaagaggaactttttccactggatttcctaacccttctaatggagacgatgctacaagaaactcacgctacaatgcccatctgatrtttaagacttctgagaatttagcttcttcacctacctcgtatgcacattagtccagccccatgtgcactgagtaggctaattgcattaaagacttctgacaaccagggtccaacaaagcaaacacaatgattttccaatacagatgcagtaattgtgccttaggggaaatggcagattagaagatcaagtgatcacactctccatttcctagttttgtccagctccagagtccacagct

SEQ ID NO: 582707 - DNA, 308 bp, Homo sapiens
actaggtcataaagcaattgtcttagatttttttcttaatarataaccaactgcctcagtgccatgtattgaacatcgagctatgacagcagctctgcattcatcaaagctcaacataagtacaagtcaatttttggcctctgtattctcttccattgacctatccttgcctcaggatcacactgtctttcttttttttttttttttgagacggagtcttgccctatcaccccagctggagttcaatggtatgatcttggcctaccacaacctctgcctcctgggttcaagtgattctcctgcctcag

SEQ ID NO: 582708 - DNA, 308 bp, Homo sapiens
actaggtcataaagcaattgtcttagatttttttcttaatagataaccaactgcctcagtkccatgtattgaacatcgagctatgacagcagctctgcattcatcaaagctcaacataagtacaagtcaatttttggcctctgtattctcttccattgacctatccttgcctcaggatcacactgtctttcttttttttttttttttgagacggagtcttgccctatcaccccagctggagttcaatggtatgatcttggcctaccacaacctctgcctcctgggttcaagtgattctcctgcctcag

SEQ ID NO: 582709 - DNA, 457 bp, Homo sapiens
taaccttaattagtttcctattttagggtaattgaacttcttttttagcattaatccctttctktgtttggcatagttgtttctgtgtttgtgtattgtcccttctagcctgcaagtctttgcagatcaggttttttttttttcttccaagtattagaagaaaggaaataacatattcaaatatactaaggtactatttttattcacaaattcttgatggagagactccctatttttagccataggcatgtgttgggatggggagaaacagtattgtcctagtagaaatgcaaaaagaaagagttggctgggcaaaaagaaagagttggctgggcatgtggcttatgcctgtagtcccagcatggtggaggccgagtagtgcagattgcttgcttgagcccagaagttcaggaccagcctgggcaacatggcaaaactcttgtctctacaaaaatac

SEQ ID NO: 582710 - DNA, 457 bp, Homo sapiens
atacataatatgagattcaaagaaggtccaggtggttgaggcttaaataccctcttcataggagagatggaaatgggatggaggaaattttgaggagtagtaaatgaattttcagggaaatcgaatgagcacaaagaayagacagtggcttgggacaaagttctgagctctggaggaggtggtgagaggttgaggggcagaacttcgctatgaacaaaggttgtcttattatgctaatagagtctcccaggtaatctctcagaagaattgatgataagtctgcctgggtgtggtgacaacttttagacttttctcttgtccagcagttagtctttcctggttatttgatgagattcccagggaggggatcttaagacaattacatttctttttctttatttatttattaacagagtcttgttctgtcacccaggctggcgtgcagtggcatgatcac

SEQ ID NO: 582711 - DNA, 535 bp, Homo sapiens
cactgttggtgggaatgtaaaagccactttggagaacagtatggtggtttatcaaaaaaccgcaaatagaaataccatatgatccagtagtcccactactggcatttatccaaaggaaaagaaatcactatttcaaagagacatctgcatcctcatgtttattgcagcgctattcacaatagccaagatatggaatcaccctaggggtccactaacagatgaatggataaagaaaatgtgggatatgttcatgatggaatactattcagccataaaaatgtgtgaaaaaaaatgtgtgaaatcctgtcattcgtggcaacatggatagaattggatgacataatgttaagtgaaataagccagaaacataaaattaaacactgtatgttttcactcatgtggaagctaaagaaagttgatctcatagagttgaaaagtagaagaaaggatactcaargctgaaaagggtagagggaagaggggagtagggagagatttgttaaaggatgcaaagttagagctagataggaggaat

SEQ ID NO: 582712 - DNA, 535 bp, Homo sapiens
cactgttggtgggaatgtaaaagccactttggagaacagtatggtggtttatcaaaaaaccgcaaatagaaataccatatgatccagtagtcccactactggcatttatccaaaggaaaagaaatcactatttcaaagagacatctgcatcctcatgtttattgcagcgctattcacaatagccaagatatggaatcaccctaggggtccactaacagatgaatggataaagaaaatgtgggatatgttcatgatggaatactattcagccataaaaatgtgtgaaaaaaaatgtgtgaaatcctgtcattcgtggcaacatggatagaattggatgacataatgttaagtgaaataagccagaaacataaaattaaacactgtatgttttcactcatgtggaagctaaagaaagttgatctcatagagttgaaaagtagaagaaaggatactcaaagcygaaaagggtagagggaagaggggagtagggagagatttgttaaaggatgcaaagttagagctagataggaggaat

SEQ ID NO: 582713 - DNA, 595 bp, Homo sapiens
ttttgggaacttgtggaaagggtgggagggggctgaaggataaaaagctacaaactgggtttagtgtatactgctcagatgatgggtgcaccaaaatctcacaaatcactaataaagaacttactcatgtaaccaaataccacttgttccctcaaaacctatgggaatttaaaaataaaagcttatttcctggacacaatcaggaccataatacccaacttgctgaatcatgataaggattaacaattttattaacaataaaaatatgcaaagaaaggtataaaatcctaaatccatatgagggataggctgtggttacgtgctctgagagacaaacaaggcccacaagcgctgcttttttttgtttgttttttttaagacataatctcattctgttgcccaggctggagctggaatcagtggcctgatgtcggctcactgcaacctccgtctcccatgttcaagcgatcctcctcccttagcctcctgaatagctgggactacaggcacgtaccaccatgcycagctatttttttgtcttttcagtagagacagggtttcgctatgttggccaggctggtctcaaactcctgaa

SEQ ID NO: 582714 - DNA, 594 bp, Homo sapiens
ctgaaaccttgggcaagttackatactcttcatgcctgagttcccccaactgtaatggaatagttggtataaacccctattgcatggatttcctgttaagattaaatgagttgatgtgtcagggttggaacagggcctgcctagcacattgtcaacactatttaaggttagctattattattattgctattattatcattaatgggagagcatttcaaaagctgaaatcacgtctccccctctctctatatataatctgctactcaaggtcaaaatatactttctgaccatgcggactctttcctggctctatatatatttgatgtcctggtgcatctcagaggcatgtcctgccctttccctttacaggtattaatattttggataatttgttggggactgaatttttatatcctttaccttaaatttggttagtttgcccagaaagttaaagtcataccttcttactctcaattcaaaatgattttgggctgcctgagtacggaaaaatgtattgcattttctgcccagatgtttgaactggggaataaccttggttttgtaagtcatcttctttttactgtattgactatt

SEQ ID NO: 582715 - DNA, 446 bp, Homo sapiens
tgggtggggacacagagccaaagtcaaaccatattattctgcccctggctgctcccaaatctcatgttcttttcacatttcaaaactaatcatgccttcctcaacagtccaagatataatgggggtacaggcattgggttaatgttcccattccaaatgggagaaattgactaaaacaacagggctacaggctccatgcaaatccgcgactcagcctggcagtccttacatcttaaagctccagaatctcctttgactccatgtctgacatccagggcatactgatgcaaggggtgggctccctcagccttggccagcaccaccccatggctctgcagggyacagcccctgtagctgctttcaccagatggtgttgaatgtctgtggcttttccaggcacatggtgcaaactgtaggtggatctactattttggggtctggaggat

SEQ ID NO: 582716 - DNA, 446 bp, Homo sapiens
tgggtggggacacagagccaaagtcaaaccatattattctgcccctggctgctcccaaatctcatgttcttttcacatttcaaaactaatcatgccttcctcaacagtccaagatataatgggggtacaggcattgggttaatgttcccattccaaatgggagaaattgactaaaacaacagggctacaggctccatgcaaatccgcgactcagcctggcagtccttacatcttaaagctccagaatctcctttgactccatgtctgacatccagggcatactgatgcaaggggtgggctccctcagccttggccagcaccaccccatggctctgcagggtacagcccstgtagctgctttcaccagatggtgttgaatgtctgtggcttttccaggcacatggtgcaaactgtaggtggatctactattttggggtctggaggat

SEQ ID NO: 582717 - DNA, 514 bp, Homo sapiens
tcccagcactttgggaagctaagacagatggatagcttgaggtcrggagtttgagaccagcctggccaacatggtaaaactctgtatctactaaaaatacaaaattagctgggcatagtagtgcacacctgtaatcccagctgctcaggaggctgaggcaggagaatcacttgaacccaggaggcagaggttgcaatgacccgagatcatgccattgcactccagcctgagcaacaagagcacaactctgtttcaaaaataaataaatatttattttaaatactaataaaaagatttacaaatacaatcgacaaataagttttcaaaatcatctctaattaccaattagattcattcaaaatatgaagagatagttcaaagatagatttttttaacaaatcgatcaataacttttttcctaacaaaagtccattgaaaaatcttatatgatcagcttgattgttggcaagaggcatttaaacacacacacacacacacacacacacacacacaa

SEQ ID NO: 582718 - DNA, 635 bp, Homo sapiens
ctcgctctgtcacccaggctggagtgcagtggcatgatctcagctcacagcaagctccgcctcctgggttcacaccattctcctgcctcagcctcctgagtagctgggactacaggcgcctgccaccacgcctggctaattttttgtatttttagtagagacagggtttcactgtgttagccaggatggtcttgatctcctgacctcgtgatccgtccacctcggcctcccaaagtgctgggattacaggcrtgagccaccgcgcctggtcacatattgttttttacctacaaattcatccttatttctctactcagctttgtggccatatgaagtacatttcccaaaatgcaaagttagctggttcctattggtttctaccaacaggagacgctatagggggattggagggaggaagtagagagaagggacttgattgtttgtttgtttggttggtttttttgctcttgtcagcttggttccatccttcagcttcccttagcactcctagaatcagcctcatcacactctcagaaatctagcaacagccagagatgccccttcctcagagagctgagtacctggattctgctaaatccacctcacatctctctctttttttttaaacctcaatt

SEQ ID NO: 582719 - DNA, 635 bp, Homo sapiens
ctcgctctgtcacccaggctggagtgcagtggcatgatctcagctcacagcaagctccgcctcctgggttcacaccattctcctgcctcagcctcctgagtagctgggactacaggcgcctgccaccacgcctggctaattttttgtatttttagtagagacagggtttcactgtgttagccaggatggtcttgatctcctgacctcgtgatccgtccacctcggcctcccaaagtgctgggattacaggcatgagccaccgcgcctggtcacatattgttttttacctacaaattcatccttatttctctactcagctttgtggccatatgaagtacatttcccaaaatgcaaagttagctggttcctattggtttctaccaacaggagacgctatagggggattggagggaggaagtagagagaagggacttgmttgtttgtttgtttggttggtttttttgctcttgtcagcttggttccatccttcagcttcccttagcactcctagaatcagcctcatcacactctcagaaatctagcaacagccagagatgccccttcctcagagagctgagtacctggattctgctaaatccacctcacatctctctctttttttttaaacctcaatt

SEQ ID NO: 582720 - DNA, 636 bp, Homo sapiens
atatgttgttacatatacatatatgcatatacacacatatacatatatgcatatacacacatatacatatatgcgtatacacacacatatacatatatgcgtatacacacamatatacatatatgcgtatacacacatatatacatatatgcgtatacacacatatatacatatatgcgtatacacacaaatatacatatatatgtgtatacacacaaatatacatatatatgtgtatacacacaaatatacatatatgtgtatattttatacatatatgtgtatattttatacatatatgtgtatatacacaaatatacatatatgtgtatatttatggaacatagagtccaattaggactccaatgtatatgttgttcatccaactgaaacacagatcttttcaaaatttgattatctactctatgcaagcactataagaaatttaatgatggtataagacataattccttttctcagttttttaatatttgagattgatttatcacttagagcacaagcacctggttcagtatatgatcaataaatatttgttaaatttgtggaatgaataaattaatgaataacaatcttgtttctgatcttgaacaatgcttaaaatgctgaaagttggga

SEQ ID NO: 582721 - DNA, 587 bp, Homo sapiens
gcacgtttattaaagattagtttaccatatatgtgtgggtttatttctgggctctatttcctttccaatggactgtgtatttgttttcattccagaaccaaaactattttgattgttacaactttgtaatataatttgaaatcgaaaagtctgatgcctctagctttgttcttcctcaagattcccttagctcttttstatttttatggttctaaaggatttttaggccttcagaagtttaaaagaactacttgcctaaataaaattgtattgttattcaatacttgcagaatataattaaggccttttcaaaaatggtttttgattgaacttgatttctaagtcattgggttgagacttatatggaagtgatattcattcatttgttgccatgataactcctacagcaaatataagtgtatattttatacctataaatacttattattttattatgctctcaagatacagtaaaaagcaaaagttagctcccagtttttacaaaagtcttttgtcatgaaggaccaaaaacagaaaaaaccaaagaaaatagcaaatacacttgaagcacagagagagagggaata

SEQ ID NO: 582722 - DNA, 603 bp, Homo sapiens
ttctgaggtaatagcaatgctatcagtcaaacagagccttaactctaaaaataactttattcaccaaatctgtgataactacactcattcaaagatgatatctagaaagaaatgtgttatatgataatttatatgaggcaagatagcacatgttatgtatgaacatatttgtttttttcaataaatctgtaaaatatggtaacatcttaagaccatgctgatacacttatgaacaggcaaatgagtgtctgttctctttgagtaaagaagtgaggagaaaacaaaaatcaacaacatatacatttaaataattgtgacaagaacaatgaatgctatcataaaaatcagaaaagttgaggtggaagagaacaaagggagagcttatcttaaaaaaagcgatctgccgggcacagtggctcacgactgtaatcccagcactttgagaggccgacgccggcggatcacgaggtcaggagatcgagacyatcctggctaacacggtgaaaccctgtctctactaaaaatacaaaaaaattagccgggcatgatggcgggcgcttgtagtcccagctactgaggaggctgaggcaggagaatggcatg

SEQ ID NO: 582723 - DNA, 605 bp, Homo sapiens
ccaggctggtctcgaattcttgatatcagatgatccacccaccttccaaagtgctgggattacaggcatgagccactgcactcagccaagcttttttttatatgcttgttggccacatgtaygcttctttcaaaaagtgtctgttcacgttctttgcttatttaataggatctttttttcttgtaaattcaagttccttataggtgttggatattatacttttgccagatacataatttgcaaatattttctccaattttgtagcttgcctgttctctctgatgatagtttcttttactgtgtagaagctctttagtttaatttgaacccataggtcaatttttgcttttgttgcaattgttattggcatcttcatcatgaaatcttgcctgtgcctatgtcctgatggtattgcccaggtcattttccatggtttttatagctctgagttttatatttaagtctgttttgttttgttttgtttgagacggagtctcactctgtggccaggctggagtgcagtggcatgatctcagctcactgcaagctccgcctcatgggtttacaccattctcctgcctcaacctcccaagtagctgggacta

SEQ ID NO: 582724 - DNA, 628 bp, Homo sapiens
ggcaggtctctaactactgggctcaaatatctgtctgctgcagcctcccaaagtgatgggattagaggcattagccaccccacccagcctcaaccaaggttaaatcttaataatggcttttttataatttttagacaatatacyttttataattttctgtttctaatttatttttctaacaagaatacattaacgttatagtcttgaagtgctcattaaattttataaaataaatgttattaagcataactagttctgttgaagttcatttacattcttcttacaattagagtttaaaatatgacagtcttctgtctgaatgtcttctgatttataaccacacaaaccatttcaataagtatgttattcttttctctaaatatgtaattttaaagttgacacaaattaattttaatattgaataaaattttcattaagggtaaacattaagtagagttcacataagtatgaaaaaatattttaaatattaagaactagattagataatttcttgggatggtcttcctagtatgtatgaaatattttaaatcttgaaggaatatctttttacttatttctttttaaaataactgtattgtaagtaatcattagggctactgacaattta

SEQ ID NO: 582725 - DNA, 636 bp, Homo sapiens
ttctctttttctctaccaaaccatttctctcaaggctatcagaaggagcatgagcatatctaaatgagattgtgtaaaagccttcaatggctgcccaatactwccaagtaaagtccgaaatccttagagtggcatccaagatcattaaagatctgattcatgcctatttctctagagtcatctcttactgttcccatttcttttttttttttttaattgtacaagtcaattctttatccattccaaactattgccagaagcagtaaacttgcactcactgctgccttcctgagagtctctgctttttccattctgcgtattccttttccacttggtttactcctagacttacctaattccctccctgccatttatttaggtaagatgtccagagtactgtgtggatacttattggaacttaccacactgcactgtaatagtttactttttaccattggactatagacccttgaagtcaagaaccacatcttatttatctgtattctctgtagctactataatttttatctgtgagatgaatataagtaatatttcataaacgaataattatctacttcagtacattgtcacaagatgatccctcctcaaacacaaaactcttcacacaaaacccgg

SEQ ID NO: 582726 - DNA, 636 bp, Homo sapiens
ttctctttttctctaccaaaccatttctctcaaggctatcagaaggagcatgagcatatctaaatgagattgtgtaaaagccttcaatggctgcccaatacttccaagtaaagtccgaaatccttagagtggcatccaagatcattaaagatctgattcatgcctatttctctagagtcatctcttactgttcccatttcttttttttttttttaattgtacaagtcaattctttatccattccaaactattgccagaagcagtaaacttgcactcactgctgccttcctgagagtctctgctttttccattctgcgtattccttttccacttggtttactcctagacttacctaattccctccctgccatttatttaggtaagatgtccagagtactgtgtggatacttattggaacttaccrcactgcactgtaatagtttactttttaccattggactatagacccttgaagtcaagaaccacatcttatttatctgtattctctgtagctactataatttttatctgtgagatgaatataagtaatatttcataaacgaataattatctacttcagtacattgtcacaagatgatccctcctcaaacacaaaactcttcacacaaaacccgg

SEQ ID NO: 582727 - DNA, 616 bp, Homo sapiens
acttgtcagggagggattttataattattatcttgagatcattttcccataaaacagttcaacatttaatatatctgcttgtgtcagggaacagtcactgtggaaatatgtgtacttatcagagtgaagagttcacatgcagacatgtttgtttgtctgagacaagagtccacatgaaggaaatgtcattaccaaataaaagagtaaatgtaaaggacatacgtggtggtctgaggaaagagtccatgtggggacatatgtgtttgtctgagggaagaatccacgtgagtaaaggtgtgtttgtctgacggaagagtccccatsttgacaggtgtgtgtacccatctgtgggtaaatgcccattcagggacagtgtgtgcctgaactgagctgaagtttggggaaaatctttatcaaccaaggaaagaaaagaattatctgggttatttgcttgtcaggaagaaaaaacctgggtcacgttgaaaattgatttttttaaattaaaggtctttagtgaatggtaacatcttatatgcaaatgaggaaaattacttcattcttttttgcatgcatctcatgatatccccaccctcaccaaataagttattagataact

SEQ ID NO: 582728 - DNA, 566 bp, Homo sapiens
tttgtttgtctgagacaagagtccacatgaaggaaatgtcattaccaaataaaagagtaaatgtaaaggacatacgtggtggtctgaggaaagagtccatgtggggacatatgtgtttgtctgagggaagaatccacgtgagtaaaggtgtgtttgtctgacggaagagtccccatgttgacaggtgtgtgtacccatctgtgggtaaatgcccattcagggacagtgtgtgcctgaactgagctgaagtttggggaaaatctttatcaaccaaggaaagaaaagaattatctgggttatttgcttgtcaggaagaaaaaacctgggtcacrttgaaaattgatttttttaaattaaaggtctttagtgaatggtaacatcttatatgcaaatgaggaaaattacttcattcttttttgcatgcatctcatgatatccccaccctcaccaaataagttattagataactttatacagtctgcatttaatcctgggtttaatgaactgctaaatactttttacaaaaattgtatatatttaggtttatattttccatcacacaatta

SEQ ID NO: 582729 - DNA, 566 bp, Homo sapiens
tttgtttgtctgagacaagagtccacatgaaggaaatgtcattaccaaataaaagagtaaatgtaaaggacatacgtggtggtctgaggaaagagtccatgtggggacatatgtgtttgtctgagggaagaatccacgtgagtaaaggtgtgtttgtctgacggaagagtccccatgttgacaggtgtgtgtacccatctgtgggtaaatgcccattcagggacagtgtgtgcctgaactgagctgaagtttggggaaaatctttatcaaccaaggaaagaaaagaattatctgggttatttgcttgtcaggaagaaaaaacctgggtcacgwtgaaaattgatttttttaaattaaaggtctttagtgaatggtaacatcttatatgcaaatgaggaaaattacttcattcttttttgcatgcatctcatgatatccccaccctcaccaaataagttattagataactttatacagtctgcatttaatcctgggtttaatgaactgctaaatactttttacaaaaattgtatatatttaggtttatattttccatcacacaatta

SEQ ID NO: 582730 - DNA, 566 bp, Homo sapiens
tttgtttgtctgagacaagagtccacatgaaggaaatgtcattaccaaataaaagagtaaatgtaaaggacatacgtggtggtctgaggaaagagtccatgtggggacatatgtgtttgtctgagggaagaatccacgtgagtaaaggtgtgtttgtctgacggaagagtccccatgttgacaggtgtgtgtacccatctgtgggtaaatgcccattcagggacagtgtgtgcctgaactgagctgaagtttggggaaaatctttatcaaccaaggaaagaaaagaattatctgggttatttgcttgtcaggaagaaaaaacctgggtcacgttgaaaattgatttttttaaattaaaggtctttagtgaatggtaacatcttatatgcaaatgaggaaarttacttcattcttttttgcatgcatctcatgatatccccaccctcaccaaataagttattagataactttatacagtctgcatttaatcctgggtttaatgaactgctaaatactttttacaaaaattgtatatatttaggtttatattttccatcacacaatta

SEQ ID NO: 582731 - DNA, 566 bp, Homo sapiens
tttgtttgtctgagacaagagtccacatgaaggaaatgtcattaccaaataaaagagtaaatgtaaaggacatacgtggtggtctgaggaaagagtccatgtggggacatatgtgtttgtctgagggaagaatccacgtgagtaaaggtgtgtttgtctgacggaagagtccccatgttgacaggtgtgtgtacccatctgtgggtaaatgcccattcagggacagtgtgtgcctgaactgagctgaagtttggggaaaatctttatcaaccaaggaaagaaaagaattatctgggttatttgcttgtcaggaagaaaaaacctgggtcacgttgaaaattgatttttttaaattaaaggtctttagtgaatggtaacatcttatatgcaaatgaggaaaattacttcattcttttttgcatgcatctcatgatatccccaccctcaccaaataagttattagataactttatacagtctgcatttaatcctkggtttaatgaactgctaaatactttttacaaaaattgtatatatttaggtttatattttccatcacacaatta

SEQ ID NO: 582732 - DNA, 531 bp, Homo sapiens
ttctgttgtgtaagtctgtggcactttgttatggcagcccaasaaaactaacacatgcacacacatgcttggatgcatgcatatggccacagccataaaggcgcacacatagacacacaaacagagatcacccacaaaacagccacgcagacctgtgctcactgccgtacacactgccatgcgctccactgctagcaggaagtataaacagagattgctaaactcaatctcagcctagttagtgcagaatatctcacaaagggtaaaagatcaggaaaacaagcacaaagaatagtgcaattcagaaaaggggcaagagggctgaagcgtgagatggggaagtggtccagggtggtgcacgggagagtgattgagtggtaagtgctttggttcaggtggtagacagtctgcctctcaaagtagctctgtgactttgggaggctgggcatggtggctcatgccagtaagcgcagcactttcggaggctgagacaggtggatcgcttgaggtcaggagttcaagaccagcctg

SEQ ID NO: 582733 - DNA, 599 bp, Homo sapiens
  misc_feature 533: n = A,T,C or G
ttcaccgtgttagccaggatccctgtccgttttttgactcattcttacaacttatttattccctaatcctaaagaaccaaccctaaataatacatatttggtaattttttttagcaaaacatttacccatgagacatgatttttttaaatgaacgttaaagaagtgttgcctatttctaataaagtctaaaaagcttgtttcaagtccaaattcatttacgaaaaagctatgtaaccttgtgcagggtgccaaggggtctcagcctytatatttgctattgttgaaactactaccatttatctcaaaacatgttttaaaagtgaattacttatgaataaaatgataaaatgtctggaatgtgttccaaaatagcctgggggttagagagggtgagaataatttgaatagaagaaacaagacagtctattgctgaaaattgctgaagttggggttcgattatactattaagtggatataaggacaaaataagatgaaatgggccgggtacggtggctcacgcctgtaacctcanaactttgggaggttgcagtgagccgagatggtgccactgtactccagcatgggcaacaagagcgaa

SEQ ID NO: 582734 - DNA, 599 bp, Homo sapiens
  misc_feature 533: n = A,T,C or G
ttcaccgtgttagccaggatccctgtccgttttttgactcattcttacaacttatttattccctaatcctaaagaaccaaccctaaataatacatatttggtaattttttttagcaaaacatttacccatgagacatgatttttttaaatgaacgttaaagaagtgttgcctatttctaataaagtctaaaaagcttgtttcaagtccaaattcatttacgaaaaagctatgtaaccttgtgcagggtgccaaggggtctcagcctctatatttgctattgttgaaactactaccatttatctcaaaacatgttttaaaagtgaattacttatgaataaaatgataaaatgtctggaatgtgttccaaaatagcstgggggttagagagggtgagaataatttgaatagaagaaacaagacagtctattgctgaaaattgctgaagttggggttcgattatactattaagtggatataaggacaaaataagatgaaatgggccgggtacggtggctcacgcctgtaacctcanaactttgggaggttgcagtgagccgagatggtgccactgtactccagcatgggcaacaagagcgaa

SEQ ID NO: 582735 - DNA, 599 bp, Homo sapiens
  misc_feature 533: n = A,T,C or G
ttcaccgtgttagccaggatccctgtccgttttttgactcattcttacaacttatttattccctaatcctaaagaaccaaccctaaataatacatatttggtaattttttttagcaaaacatttacccatgagacatgatttttttaaatgaacgttaaagaagtgttgcctatttctaataaagtctaaaaagcttgtttcaagtccaaattcatttacgaaaaagctatgtaaccttgtgcagggtgccaaggggtctcagcctctatatttgctattgttgaaactactaccatttatctcaaaacatgttttaaaagtgaattacttatgaataaaatgataaaatgtctggaatgtgttccaaaatagcctgggggttagagagggtgagaataatttgaatagaagaaacaagacagtctattgctgaaaattgctgaagttggggttcgattatactattaagtggatataaggayaaaataagatgaaatgggccgggtacggtggctcacgcctgtaacctcanaactttgggaggttgcagtgagccgagatggtgccactgtactccagcatgggcaacaagagcgaa

SEQ ID NO: 582736 - DNA, 553 bp, Homo sapiens
cactcccactaacaagggtgcacagcttttatcattagagaagggttgaagataaactggtgaggggtacatagcatggcctcaggaaaaactgtgtagcaagtgggaattttcgtgggtccctctagtttctctttcatccttcttacacctgagtagccctactcttttcaaaggtgaaagtaggcagatatgagaagttcgggtgttttttcaccaacctgtaagaaagtggcagcagcttgctattctggctttcattgacaggtaacaaagggtggaacatgtggaaaaggatattgaagtttaaaagttcaaaagctgattcatggtgacatggaggtggggatacaggagtggcacgtgcaaactagctgaaaggaatcactttctcttttttcasgtctgattcatccgggaggtgtccctggggactccttgttggagacatattccttctctcaggctgaagtatcatctaggtctcccaactatgctccttgagcatctctaactggcctgttccctacgataagcaagaggtcacaggcaa

SEQ ID NO: 582737 - DNA, 509 bp, Homo sapiens
tcttttcatgcaaggcacatccacaggagttcactgaactcctcaggaatgatgaagctcacatatgtgttaggataagcaattaactttaggaatatgtagaaagacattcattaaaagcrttagtcagcaaatctggggagttggaggaaaccagaatttcctgccccctaccccaaaccctcaagatgcctttggggacccttttcagtttaatgcctgtacagcctggatgtgaagctcacatgattcttatcaaagactagtaactgacatcttaacttcttcagcttcccaggaattcatatttaccctcaaagagaatgctaccctacaaacatatcacatttcatgttagctgtggaatactgcctttgaggcactcagtgcaggcatgccactgacacaaaccctcactgaacacatgttctcctatcaaggatgaagggcatgttgttgttgcttatttcctcgtatctcttatccattctagactataagcaaaacac

SEQ ID NO: 582738 - DNA, 634 bp, Homo sapiens
tgggaaaaaattagcttattttttctgttgtcgcccaaagaatgtcactggtgatataaagaagtggaaaatgagaaaactccatgatcatccaaaagccattattgtccatttcctgatcctgatgggaaggaaaattggaccataaatcttagacttacacatggtcrtggtctcttaatgccctctgctggcgaggaggcagactgcagctgcctgcactgtgttatagtggacaaactgcatagtacctctaggcttcatttccctcatctataacatggggataataatagtctttctcggccgggcgaggtggctcacacctgtaatcccagcactttgggaggtcgagacgggtggatcacctgagctcaggagttcaagaccagtctggccaacatggtgaaacaccatctctactgaaaatacaaaaaataaaaaataaataaataaccagatgtggtggcgcacacctgtaatcccaggtacttgggaggctgaggtgagaggatcgcctgaagccgggaggtggaggttgcagtgagccgagatcgcaccactgcactccagcctggaggacagagtgagactccatctcaaataataatcataattaataataataatagta

SEQ ID NO: 582739 - DNA, 634 bp, Homo sapiens
tgggaaaaaattagcttattttttctgttgtcgcccaaagaatgtcactggtgatataaagaagtggaaaatgagaaaactccatgatcatccaaaagccattattgtccatttcctgatcctgatgggaaggaaaattggaccataaatcttagacttacacatggtcatggtctcttaatgccctctgctggcgaggaggcagactgcagctgcctgcactgtgttatagtggacaaactgcatagtacctctaggcttcatttccctcatctataacatggggataataatagtctttctcggccgggcgmggtggctcacacctgtaatcccagcactttgggaggtcgagacgggtggatcacctgagctcaggagttcaagaccagtctggccaacatggtgaaacaccatctctactgaaaatacaaaaaataaaaaataaataaataaccagatgtggtggcgcacacctgtaatcccaggtacttgggaggctgaggtgagaggatcgcctgaagccgggaggtggaggttgcagtgagccgagatcgcaccactgcactccagcctggaggacagagtgagactccatctcaaataataatcataattaataataataatagta

SEQ ID NO: 582740 - DNA, 634 bp, Homo sapiens
tgggaaaaaattagcttattttttctgttgtcgcccaaagaatgtcactggtgatataaagaagtggaaaatgagaaaactccatgatcatccaaaagccattattgtccatttcctgatcctgatgggaaggaaaattggaccataaatcttagacttacacatggtcatggtctcttaatgccctctgctggcgaggaggcagactgcagctgcctgcactgtgttatagtggacaaactgcatagtacctctaggcttcatttccctcatctataacatggggataataatagtctttctcggccgggcgaggtggctcacacctgtaatcccagcactttgggaggtcgagacgggtggatcacctgagctcaggagttcaagaccagtctggccaacatggtgaaacaccatctctactgaaaatacaaaaaataaaaaataaataaataaccagatgtggtggcgcacacctgtaatcccaggtacttgggaggctgaggtgagaggatcgcytgaagccgggaggtggaggttgcagtgagccgagatcgcaccactgcactccagcctggaggacagagtgagactccatctcaaataataatcataattaataataataatagta

SEQ ID NO: 582741 - DNA, 429 bp, Homo sapiens
tttgcaaattatgcatttggcaaaagactgatatccagaatctataagacaatcaaacaaattagcaagaaaaataatccatcaaaaagtgggaaaatgatatgaatagacaattctcaaaagaagatatacaaatggccaacaaacttatgaaaaaaatgctcaaaattactaatctccagtgaaatgcaaattaaaccacaataagttactaycttaccccagtcagaataatcattattaaaaaatcaaaaaacaatagatgttggtatgaatgtggtgaaaagggaacacttacacactactggtgggaatgtaaattagtacaacctgtatggaaaacagtatggacttcgggttatctcagagaaccaaaagtagatctaccattctatccagcaatcccactactgggtatctacccaaagg

SEQ ID NO: 582742 - DNA, 282 bp, Homo sapiens
taatttctgttgttttaaacttctaggaagatatgagactgtgctctgaatgaaaatgtggtattagggttggtaaagcaaggggactccaygtggagaaaactcattagcaagggaaagaatgagtgagtagggactggataaagactggagtgattacctgtgagactagtgcaaggtaaattgaggtagataaagtgatcctgctgttgtaaggcctttgaaaacgtacagtagaatcgatccattttatgctctcacttatataataagggtttccta

SEQ ID NO: 582743 - DNA, 578 bp, Homo sapiens
tttcaaatattagtaaatcatagaataagagagaacacaatgaaaaaagtttagcaatgggagttaaagatttaaatcctgatacaaaattcaccaaattaaaatctagaaaatgcatcctacattgtttctgggcatctgaatattggcacattgctctgtctgctcagtcgaaccccttgcctctaattcacagaaagccccaattagagacttctggtcaaaaaagaatggactcatgacaaacatacagataacaagtcagttaaaaggactgtcggctgggcgcggtggctcatgcctgtaatcccagcacttggagaggccaaggtgggtagatcacgaggtcaggagatcgagaccatcctggctaacatggtgaaactctgtctctactaaaaatataaaaaaaaaattagccagacgtggtggcaggcgcctgtagtcccaggtactcgggaggmtgaggcaggagaacggcgtgaacccgggaggcggggcttgcagtccgctgagattgcgccactgcactccagcctgggcgaaagagcaagactccgtctcaaaaaaaaaaggac

SEQ ID NO: 582744 - DNA, 611 bp, Homo sapiens
cttagggcatgatatgcattattcaaaatgttctgcctttgttaccattgaattggtagttatacttcagaaaaaccaagggacagaaacacctgtttcttatcaaatcrtatctcctagtgattacaataattttatgtgcaagatagactttaaaatttaaatactgcaatattctgaagtttatatttttagataaaagtttattttaaaagtatcagtggaaaatgtgaaacaaaatgtaacatgacaattatcaattttagtccaaatattcttaatagcaaagtatcaagtgtctacatttaaaatgctcttcataacttgtattgatttttgtcctaatgcaaacatttaattattaaaatttgggaaataactaaatatttaaaaatgtgacaaaaactttcaataatttgttatattttcttcaaatcacccgcccatttggttagttatttgtctatataaaattaggataatactaaatgtatttttataagtttgctgttttattagttccaaagctcatgagatattaaagcacattttaattgaaaaaaagtcaaatggcttttaaatctatgttttcttttaaaagaatgaagtcc

SEQ ID NO: 582745 - DNA, 387 bp, Homo sapiens
gaagataaaacaaatggaaaaatatactatacttatgggtcagaagaattgatgtcattaaaatgaccatattgtccaaagcaatttacaaattcaacacaatccctatcaaaatgccgacaccatttttcacagaattagaaaaagcagtcctaaaattcaatagaaccaaaagagagcccaaatagccaaagcagtcctaagcaaaaagaacaaagctgaagccatcacatgacctgagttcaaaatatattacaaggctatagtaaccaaagtagagtagagtagagtagagtagagtaaagtgtagtaaccaaggtatcgtaacccataccaaatagcaytggtattggtataaaaatagatacacagaccaatggaacaaaa

SEQ ID NO: 582746 - DNA, 581 bp, Homo sapiens
caaaatcagcatttcctaaatgtgttctgtaaaacatttatcagccaaaatgtttcatgttaaaactacctgatttaagttgctgagaaggtctgatgwtaaaaaacatgttgtttaacccagaatttcccaaactaatttcacaatggaatcatattttttccatgtaatatgtgttaatatcctgggaactgtttttctgcagaagagattttggaaaacactatttgtgcccctaaggaccctagtaagtccatcattctagaaacaaactactaagcctggctttctacaagaacttcattttatgcatcttttgtcttcaggcctctttagcagatgtttaggtaccttgtcaagtaccttctcaataacacatgccagggtccagatttactgataggtgtcctattccctaccctagctccacaaagagaattatgctttgttaacttagcctcttcctctatggagatttgtgcccttaaccaccctgttccaggctttttaaatgcaaatcatggagttggatgaaaagtgctacaactggaaagatggcaggaataaaagagtaacttgcc

SEQ ID NO: 582747 - DNA, 581 bp, Homo sapiens
caaaatcagcatttcctaaatgtgttctgtaaaacatttatcagccaaaatgtttcatgttaaaactacctgatttaagttgctgagaaggtctgatgttaaaaaacatgttgtttaacccagaatttcccaaactaatttcacaatggaatcatattttttccatgtaatatgtgttaatatcctgggaactgtttttctgcagaagagattttggaaaacactatttgtgcccctaaggaccctagtaagtccatcattctagaaacaaactactaagcctggctttctacaagaacttcattttatgcatcttttgtcttcaggcctctttagcagatgtttaggtaccttgtcaagtaccttstcaataacacatgccagggtccagatttactgataggtgtcctattccctaccctagctccacaaagagaattatgctttgttaacttagcctcttcctctatggagatttgtgcccttaaccaccctgttccaggctttttaaatgcaaatcatggagttggatgaaaagtgctacaactggaaagatggcaggaataaaagagtaacttgcc

SEQ ID NO: 582748 - DNA, 604 bp, Homo sapiens
gaaattatgtgtcaaatgctcagtaagacaaaatgaattattgatgtggtcttgtaaaatggtagcaaatgaatgcattttataagaagcacataaaataaaaagaaactaaatggtcatgagaacagagcatgctatgtaaagaggagggattgtacatagacttaactttccttctaaaaggaaggaaggataaaccattaccattttatattataaatcaaaatttaaacataatgtgtttaatattgaaactggtaaaagcttgtattagaacattatgtcattaactttatgttttattacaactagggcattgttgatttgaatttgaagataaatactaaagattattttttaaaacctgccttcaatttggaatttaaagttttattacactaatacaattttcatggtaagccaacactaattgctaattagacattgcttgcaggtgcaaaatataaaaacatttcataaaattgtggggggaggggggagggatagcattaggargtatacctaatgttaaatgacgagttaatgggtgcagcacaccaacatggcacacgtatatgtatgtaactaacctgcacgttgtgca

SEQ ID NO: 582749 - DNA, 652 bp, Homo sapiens
tgaaagataaatggaaagactaagaaaaaatgaggcagaaagtattgccatatttctattcttatgtcatattttaaaaatgcatttattcatttcattcgtgacatgagaatgcctctaaacatgtttcattaacttaccttttttttgccctttgtagccatttaagttcttaaacccatgtaaagatttgaagtgaaagtttagtgcctagytgctctacctattggacagttgtttagttcaatggagagactttctcagatatgccgcagttcactcctcaaagctctagtaccatttttttgggaaacaaactagtgaggaaagttttagacccactaaaaaatgaatatcgattaaatttcatttcataatatttgtttctcctgaaaacattcagaaatctagaaaggacattttgcagagaaatagaaagtaaacaattttttgatacttgtatgaaaattttcaccactgtatcccagacacagatatgttgctttatctctcatgcaaagatgaaaattgtatgaaagctgaaagttgtatgaaagatttgtacaaatacaaaaagaatcaagatgatagtttataaacaggatattagtgtgggaaaaaactgtggcattcaaattgatcaaatatgata

SEQ ID NO: 582750 - DNA, 652 bp, Homo sapiens
tgaaagataaatggaaagactaagaaaaaatgaggcagaaagtattgccatatttctattcttatgtcatattttaaaaatgcatttattcatttcattcgtgacatgagaatgcctctaaacatgtttcattaacttaccttttttttgccctttgtagccatttaagttcttaaacccatgtaaagatttgaagtgaaagtttagtgcctagctgctctacctattggacagttgtttagttcaatggagagactttctcagatatgccgcagttcactccycaaagctctagtaccatttttttgggaaacaaactagtgaggaaagttttagacccactaaaaaatgaatatcgattaaatttcatttcataatatttgtttctcctgaaaacattcagaaatctagaaaggacattttgcagagaaatagaaagtaaacaattttttgatacttgtatgaaaattttcaccactgtatcccagacacagatatgttgctttatctctcatgcaaagatgaaaattgtatgaaagctgaaagttgtatgaaagatttgtacaaatacaaaaagaatcaagatgatagtttataaacaggatattagtgtgggaaaaaactgtggcattcaaattgatcaaatatgata

SEQ ID NO: 582751 - DNA, 652 bp, Homo sapiens
tgaaagataaatggaaagactaagaaaaaatgaggcagaaagtattgccatatttctattcttatgtcatattttaaaaatgcatttattcatttcattcgtgacatgagaatgcctctaaacatgtttcattaacttaccttttttttgccctttgtagccatttaagttcttaaacccatgtaaagatttgaagtgaaagtttagtgcctagctgctctacctattggacagttgtttagttcaatggagagactttctcagatatgccgcagttcactcctcaaagctctagtaccatttttttgggaaacaaactagtgaggaaagttttagacccactaaaaaatgaatatcgattaaatttcatttcataatatttgtttctcctgaaaacattcagaaatctagaaaggacattttgcagagaaatagaaagtaaacaattttttgatacttgtatgaaaawtttcaccactgtatcccagacacagatatgttgctttatctctcatgcaaagatgaaaattgtatgaaagctgaaagttgtatgaaagatttgtacaaatacaaaaagaatcaagatgatagtttataaacaggatattagtgtgggaaaaaactgtggcattcaaattgatcaaatatgata

SEQ ID NO: 582752 - DNA, 570 bp, Homo sapiens
tctttattagttctaatatttttttgaatgcatatcttagaattttctatatacaatatcatgtcacttatgaataagatctacttctttccaatatggatgtcttttatatcttgtcaaatttcttgagcacttttattatgaaagggttttggattgtattaaatcactttttgcctctagtgagataattatgtaatcttttttttgtaaatattattttacatttattgattttcgtatgttatacctaccttgcattcttgggatamatcccacttggtcatactgcataatctttcttatatgctgctggattctgtatgctaacattgtgttaaagatttttgtgtctgtataaacaatatcgttctatagtatccttgtgatatctctgtctggttttggtatcagagtaacagcagcttcatagaacaatttgggaagtattccttcctttactaatttttggaagagtttatgaagtgttgatgtttctgcctttatttttctttacttcttttcttctctgatctttccttctatttgcttattctggttttagtttgt

SEQ ID NO: 582753 - DNA, 547 bp, Homo sapiens
ggtgcaatcacagctcactgcagcctcaacctcccyggctcaagtaattctcccatctcagcctcccaagtaagctgggactacaggtgtggtgtcaccatgcctggcttttttattttttagagacagagtctccccctatgttgcccaggctagactcaaacccctgggctcaagggatcctcccactttggcctcccaaagtgctaggattacaggcataagccactacacctggcccattttcttgtctaaattaacactgagtaagcctttcattattcactgaacatattcagccaactgcaataattgttcaaacaaagaattgaaggaaatggttccaaactgaagctagtttggaaaatctggagcaagataatccactgagatttgaacatatcatattaaagattttttttttgcctttaatactgtttggagttttcatgagctgtgaagactcaagggaataagccaaagtatccttgcagaaattctgaataccactaaaatgagctgtcaaacataaatcagtatctggcta

SEQ ID NO: 582754 - DNA, 606 bp, Homo sapiens
cataagtactccagcctgggcaacagagtgagaccctgcttcaagaaagaataagacaaagacgaaggaggaggaggaggaagaggaagaagaaaaagaagaagaggaagaagaagaagaggaggaggaggaaggagaagaagaacaacaacaacaggaggaaggagaagaagaaaaggaggaagaaacctttaagaatacaagttgaaaatatgggcaaatactttcatgattctcaaatgggaaaggctttttaagcaagtccaaaggatgccataaataaactcaaaaagagatgaatgacaatttgcaatacacatgacaagaagtaagttgccttaatttagaaaaacttctttaaaaatcaataagaaattagaaaggatggacacagacaagtcacagaaaaataagtgcaaaggccattcagtcaataaacatgaaaatacgtctgtcttttttgacaaccgaattacaaattgaaacaagataccatttttaaactcactgtaaaaatccaacartctgataatgcacacttgtgagggtatgagttgctggggcagagcaaactggttcaccctcattggaggacaatttggcaaa

SEQ ID NO: 582755 - DNA, 582 bp, Homo sapiens
  misc_feature 543, 544, 545, 546, 547, 548, 549, 550, 551, 552, 553, 554,555, 556, 557, 558, 559, 560, 561, 562, 563, 564, 565, 566,567, 568, 569, 570, 571, 572, 573, 574, 575, 576, 577, 578,579, 580, 581, 582: n = A,T,C or G
tgtaagcctgcagcacattaatcaaatgccctcaggcactctgctgtttgtcgtgctggagggggtgtgtgtgattaggggcaggtatgctcagcctccaagctcacatgtcaaggtagaaactacaggtctgggtgacaagtaaacccagtggtctcccaggtgattggtgcatcagggtggaaatcttgggttagcttgggagagcctcttttgcagtatccaggctgtggaagaatgaaccaatgggctctttcaccaattagccatggtttccagggaccgtttaggcagtcctggtagggacgcctgtgcctgtggacaagcgagtacccagccctgtggaagcggtggcagcaagattaactggccctttcatctcagagcacgcaggaggcagagggaggagaaagagggggtatagggaggaagaagaggagggagggagagggcagacagcccaagagagaaaaggagacaggaaggagaagaaaggggggtagtgagagagtgctcayttatctgtctgacacaccaagtttnnnnnnnnnnnnnnnnnnnnnnnnnnnnnnnnnnnnnnnn

SEQ ID NO: 582756 - DNA, 641 bp, Homo sapiens
ctcgcactgtcgcccaggcttgagtgcagtggtgctatctcggctcactgcaagccgcctcctgggttcacactattctcctgcctcagcctcctgagtagctgggaccacaggcgcctgccaccacacccacctaaatttgtgtgtgtgtgtgtgtgtgtgtgtgtgtgtgtgtgtgtatttttaggagagatggggtttcaycatgttaaccaggatggtcttgatctcctgacctcatgatccacccacctcggcctcccaaagtactgggattacaggcgtgagccaccgtagaagtgtttcttaaatagaaaattgttttcttgttgggggtatagctttgctctaaaatcctaggtcttgtcactacccctgtacagcatcctggattgccttcactagagcaaaattagatctactggcttataaaggccaagtggcagaccttcttgcactgtctctggccaagttggttgaccctttttttgctctggactccctcaaatctagtagttttccaatcatccaattaatgcaccaataaatggttgcactagttagtatatgatatctctaaaatccaatgaatctcatcacctgttgtgattttttaccaacagtagacacaggcaggaagg

SEQ ID NO: 582757 - DNA, 550 bp, Homo sapiens
tgtaagatttttactatggatccatttagtaatggctagtcttaaaaccaaaaatctatttaaaggttgtgataccctgaaagcaaatgcatgagtgagagatcctctgtcaaggcctctgcaccatagtttcttacactaatatggtttggctgtgtccctacctgaatctcatcttgaattgtagttcccataatcctcacatgccatggagggacccggtgggaagtaattgaatcataagggcagtttcccccatgctgttctcatgatagcaagtaagttctcgcaaggtctgatggttttataaggggctttaccctttgctcagttctcatttttctccttcctgtcaccacgtgaaaaatgatgtgtttacttccccttctgccatgattgtatgtttcctgaggcttcctcagccctgcagaactgtgagtcaattaaacctctttcctttctaaagtacccagtcttggacagttctttatagcagcaggagaacagrctaatatagtaaactggtaccacagagagttgggtgctgcta

SEQ ID NO: 582758 - DNA, 608 bp, Homo sapiens
ggactgtttaacacacacacttctctgtttagtgattatctgtgtagtaatcctggcctattctgattcgttccagaggatgagtgaacatctctcagtgtagactaagtacctggctcagtgcccggcacattggtggctccatgccaacagcagggagctttcctaggtgagtgggcatgtggatcacagaagaatttgtacacatgggttactagtaaaccaggtgtagaaatgtgggattctatagccccatcagattaagaatgacaattacatgatgtgatgaatgcaacagggctttaattccgaaagtcaatttaattttttgaaataactgttctccatagcttccttacaaaaatgggtaccctttgcacttctagaatttggtaacatgtaaatacataagctgcttcagtgcaaataataggacaactgacaaaactatttcttaatactgtgttgcacagttaggcayaaaaaatgtgcaagtataatgaaactgatgacttttgttctaaccttttacattattcactttctctactttgctttttaaaaatgttatttttctgtgattacaataatattatatgtagatcatt

SEQ ID NO: 582759 - DNA, 588 bp, Homo sapiens
tcaccattttgcccaggctggtcttraactaagggatctgcctgccttggcctcccaaagctctgggattacaggtatgagccaccacacacccagcccaattattctgctttattacaatttaacttcttaaaacaaagcaaaaaataccaaatatgaacaccataatttggaaaattaataactgtgtcaattatttaattttagggaagatgaaacaaagcagtcaggtaagattacaagaatgtgtgtgtatctgtgtgttgggtagtgggaggggggaggcaggggcaggttctgagcattttcttaataggaaagaagggaaatgaaaatacaaccattatattttaaatttcttacatttttatttacttattttaattgacacattgtatagactcttttaaaatgttaatccctaactgtccaaagaaagtgtttgtatgactacttaattcccataactgtggatcaagagagctgccagaaattggcataggagagagctatgcttccatctgtaaaatcatcacaaacctaaactcaagagcctgctaatattaccttgaaagataggtgttcata

SEQ ID NO: 582760 - DNA, 588 bp, Homo sapiens
tcaccattttgcccaggctggtcttaaactaagggatctgcctgccttggcctcccaaagctctgggattacaggtatgagccaccacacacccagcccaattattctgctttattacaatttaacttcttaaaacaaagcaaaaaataccaaatatgaacaccataatttggaaaattaataactgtktcaattatttaattttagggaagatgaaacaaagcagtcaggtaagattacaagaatgtgtgtgtatctgtgtgttgggtagtgggaggggggaggcaggggcaggttctgagcattttcttaataggaaagaagggaaatgaaaatacaaccattatattttaaatttcttacatttttatttacttattttaattgacacattgtatagactcttttaaaatgttaatccctaactgtccaaagaaagtgtttgtatgactacttaattcccataactgtggatcaagagagctgccagaaattggcataggagagagctatgcttccatctgtaaaatcatcacaaacctaaactcaagagcctgctaatattaccttgaaagataggtgttcata

SEQ ID NO: 582761 - DNA, 538 bp, Homo sapiens
accaaggcatgaaaggaacatacctcaacttaataagagccatctataacaaacccacagccaacattatactgaatgggcagaaattcaaaccattctccttgagaaatggaagaagacaaggatgtccaccctcaccactcctattcagcatagtactggaagtcctatccagtaggactatcatgcaagcaggcaagaaaaatgaataaaaggtatccaaataagaaaatatgtcaaactatctctctttgctgatgatataattggatacctagaaaatcttaaagactctgccaaaaggctcctggaactgataaacaactctggtaatgttgcaggatactgtactycctattcttgtctcaatgaagcaatttagtaccattttcttcccaaaatcttattttggtgaaaattttatctgtactagagatagcagcaaacagacaaaaaaaaattagtaagatagatcctaattttgattactttcacttatctaagaattgcaaagctgactcagacatgagggtgttaa

SEQ ID NO: 582762 - DNA, 538 bp, Homo sapiens
accaaggcatgaaaggaacatacctcaacttaataagagccatctataacaaacccacagccaacattatactgaatgggcagaaattcaaaccattctccttgagaaatggaagaagacaaggatgtccaccctcaccactcctattcagcatagtactggaagtcctatccagtaggactatcatgcaagcaggcaagaaaaatgaataaaaggtatccaaataagaaaatatgtcaaactatctctctttgctgatgatataattggatacctagaaaatcttaaagactctgccaaaaggctcctggaactgataaacaactctggtaatgttgcaggatactgtactccctattcttgtctcaatgaagcaatttagtaccattttcttyccaaaatcttattttggtgaaaattttatctgtactagagatagcagcaaacagacaaaaaaaaattagtaagatagatcctaattttgattactttcacttatctaagaattgcaaagctgactcagacatgagggtgttaa

SEQ ID NO: 582763 - DNA, 608 bp, Homo sapiens
tgggagggccaggttttttgygggctacgtaaatgacacacctggtcaaaccaatcccctgggccctatggaaaccagacactgcctcctccagcatcccaatataagcagccacttttcagcacacacggagttttctctttgttcatatcccccctcccgctgtctctgtatggcagagctgttttcttcttccttccttctttcttgtctattaaacttttcactccttaaaaccactctatgtgtgtctgtgtcattttatctgaaccggcatgagacgaaggaccctggtgttcctccagtcatcgaagctgtgtcaccaggagcggttctaaaggaacagaattttatggatggattcctttctggagttgactgcttaatatgattataccccaaaatgctaaggactctacttctaatagcatggagaacacagatagtccttggcatgaactgtttaaagagttatgtgaaataaatgcatttgatactcctggttcactgcttgtgagaggcaaggagtttagtgactctatacataataactttgaccatatgtggagaacaaaggaacataatgaagctggttgtttgctcctaag

SEQ ID NO: 582764 - DNA, 364 bp, Homo sapiens
gtgtcactgtctcccatcacctccagatgggaccatctagttgcaggaaaacaagctcagggaccccactgattccacaatatggtgagttgtataattattccattatatattacagtgtaataataatagaaataaagtgcacaataaatgtaatgcacttaaatcatcccaaaatcaccccccgcctcaacctgttccatggaaaaactgtctttcatgaaactggtcactggtgccaaaaaggttgggaactgctgccttaggagacacattaaggctatttctagggcacatayatttgcagggtaaaacttgtacagctttttgtgctatgggaagaatacaagcttatacaataagt

SEQ ID NO: 582765 - DNA, 569 bp, Homo sapiens
tggggtactatctttagcctccttaagcaaaataattggcagccaagaatagtttatccagcaaaactaagcttcataaataaataagagataaagtatttttcagagaaacaaatgctgagagaatttgccacaagccagcactacaagaaatgctaaaaggaattctaaattttttttctttctttctttttttttttttaagatggaggcttactccatcgcccaggctggagtgcagtggcacaatctcagcttgctgtaaccttcaccttccgggttcaagtgattctcctgcctctgcctcccgagtagctgggattacaggcatgcactaccacacccagctaatttttgtattttagtagagatggggtttcaccatgttggccaggctggtctctaactcctgatctcaaatgatctgcacccccctcagcctccccaagtgctgggattacaggtgtgagccactgcgcccagctgggattctaaatcttgaaataaaacctcaaaataggcaaaaatagaacctccttaragcataaatcttgcagggcctataaaac

SEQ ID NO: 582766 - DNA, 533 bp, Homo sapiens
actcattatgtttactcatttggcttaacttctaagaagctcagagttaaatatagtgctcaaacaaacatattccatgtttctggttctataagcttttacttttctttaataccaaatggtttctaggtttcctgcaatatatatgtaacttaccaatttctcacgtcttcatgccattgaaaggtctaatcctatttgggacatgtgtgggatatgcatatgtcacattcatgtacacagacatattttacataggaaaccacattttatatcgcatgcaacatatttgtgagtcccataccctctttactatttcacagtactcctccatcttgctttttaaaaaataartgcaataaaatattaagggggaaattttttttgccaagttctatctggctgtctggctactcagttatcttagagatattattttgggcatcttgaactcctggcctcaagcaatccccctgctttggcctcccaaagtgctgggattataggcatgaaccaccatgcccagtctagaa

SEQ ID NO: 582767 - DNA, 535 bp, Homo sapiens
gataattttcataattataaattcttaaaatggggagctctcaatattggtaatattcatttagactaatttagactaggaatgattgtgctgttccctgtaccgtagtctctgcagaaacttttaaaaaatgccaatcccatcagatgggcaaacacaaaacaaacaaaaaccctaaaacacctaacaataccaaggaccagagatgatayggagcaattataactcaaatacattctggcgggaggctaaatatgtacaacaccttggaactgtttggcaccatctccccaagatgagtctgtggcccagcaattccactcctacatttatacccaagagaaacaaatgcatatgtgcatcaaagacatacaaaaatgttcccagcagtactattcacactagccccaaactggaaacaactcaaatggccatcaacagaggaatgaataaataaaattgcagtgtatttatacagtgaacaaactatgacaaactacaacaacatggatgaatctgaatcccacaaacagaa

SEQ ID NO: 582768 - DNA, 535 bp, Homo sapiens
gataattttcataattataaattcttaaaatggggagctctcaatattggtaatattcatttagactaatttagactaggaatgattgtgctgttccctgtaccgtagtctctgcagaaacttttaaaaaatgccaatcccatcagatgggcaaacacaaaacaaacaaaaaccctaaaacacctaacaataccaaggaccagagatgatacggagcaattataactcaaatacattctggcgggaggctaawtatgtacaacaccttggaactgtttggcaccatctccccaagatgagtctgtggcccagcaattccactcctacatttatacccaagagaaacaaatgcatatgtgcatcaaagacatacaaaaatgttcccagcagtactattcacactagccccaaactggaaacaactcaaatggccatcaacagaggaatgaataaataaaattgcagtgtatttatacagtgaacaaactatgacaaactacaacaacatggatgaatctgaatcccacaaacagaa

SEQ ID NO: 582769 - DNA, 535 bp, Homo sapiens
gataattttcataattataaattcttaaaatggggagctctcaatattggtaatattcatttagactaatttagactaggaatgattgtgctgttccctgtaccgtagtctctgcagaaacttttaaaaaatgccaatcccatcagatgggcaaacacaaaacaaacaaaaaccctaaaacacctaacaataccaaggaccagagatgatacggagcaattataactcaaatacattctggcgggaggctaaatatgtacaacaccttggaactgtttggcaccatctccccaagatgagtctgtggcccagcaattccactcctacatttatacccaagaraaacaaatgcatatgtgcatcaaagacatacaaaaatgttcccagcagtactattcacactagccccaaactggaaacaactcaaatggccatcaacagaggaatgaataaataaaattgcagtgtatttatacagtgaacaaactatgacaaactacaacaacatggatgaatctgaatcccacaaacagaa

SEQ ID NO: 582770 - DNA, 535 bp, Homo sapiens
gataattttcataattataaattcttaaaatggggagctctcaatattggtaatattcatttagactaatttagactaggaatgattgtgctgttccctgtaccgtagtctctgcagaaacttttaaaaaatgccaatcccatcagatgggcaaacacaaaacaaacaaaaaccctaaaacacctaacaataccaaggaccagagatgatacggagcaattataactcaaatacattctggcgggaggctaaatatgtacaacaccttggaactgtttggcaccatctccccaagatgagtctgtggcccagcaattccactcctacatttatacccaagagaaacaaatgcatatgtgcatcaaagacatacaaaaatgttcccagcagtactattcacactagccccaaactggaaacaactcaaatggccatcaacagaggaatgaataaataaaattgcagtgtatttatacartgaacaaactatgacaaactacaacaacatggatgaatctgaatcccacaaacagaa

SEQ ID NO: 582771 - DNA, 332 bp, Homo sapiens
actctagatctggaaggaattcwtcttctggtttcagggattttttttttttttttttttggtgctgggaaaagggaagggaactggggtggtctctactgtttccgaaatgtagatttttttttaccttaaattgtgtcaacccagaatatttttgcatttttaaaaattatcatgggactatattctgcattatgaacaatttccaagtgtgacttcaactggaaactttattagctcattcaggcatgactcgtgtcacttagcaaactgctgcttcagtgaaggaaataaatgtactttcaggggtgcactgcgtctgacacgcagag

SEQ ID NO: 582772 - DNA, 558 bp, Homo sapiens
ccctttggtgaaaatatcagccattcagttgtgataatcacagtgttatcaacctagtagaracaccagcgcagcagaatactataaaaggctaagttttttttttaatggacttcagcaatctattgaaaataaaaatgtaattagtgtggcaaaacaatagttcacatcttctaattactgttctattttttgacagaatgttttaattattgttttctttcctcttctcttctgtttctattgatttgttgccagtttaattaagtcagtaggacctcccagttctccataagttaccctcaggggcttctgtctgcttcattgttttaaagtaaaccagatctccaaatacctataaaacaaacccagaagttgaagggatatttttaaatgagaaaaaactagaaggaataaagaataagacatacaattcaaggtataaagggaagattagacagaaaaccagtttctaattttagagctaaaggaataattattattaataaatatgctacagacttacctatttaaaatgctaaagcagaggaacaataa

SEQ ID NO: 582773 - DNA, 558 bp, Homo sapiens
ccctttggtgaaaatatcagccattcagttgtgataatcacagtgttatcaacctagtagagacaccagcrcagcagaatactataaaaggctaagttttttttttaatggacttcagcaatctattgaaaataaaaatgtaattagtgtggcaaaacaatagttcacatcttctaattactgttctattttttgacagaatgttttaattattgttttctttcctcttctcttctgtttctattgatttgttgccagtttaattaagtcagtaggacctcccagttctccataagttaccctcaggggcttctgtctgcttcattgttttaaagtaaaccagatctccaaatacctataaaacaaacccagaagttgaagggatatttttaaatgagaaaaaactagaaggaataaagaataagacatacaattcaaggtataaagggaagattagacagaaaaccagtttctaattttagagctaaaggaataattattattaataaatatgctacagacttacctatttaaaatgctaaagcagaggaacaataa

SEQ ID NO: 582774 - DNA, 519 bp, Homo sapiens
aagtgttctcattgttcaattcccaactatgagtgagaacatgtggtgtttggttttctgttcctgtgttagtttgctgagaatgatggtttccagcttcacccatgtccctgcaaaggacgtgaactcatccttttttatggctgcatagtattccatgatgtatatgtgtgaggccacattctctaaatttattttaacagaggagacctctttctcactgagagtacaaaaatataccgtagacttaactacttgttagaatactacactgaattatacatataacacctcacatcttcataatgaccttgtaataaatacattattatttcaatttttcagatgagggaactgactgtcagaaatatttacctctccaaaggctgtgtatgagtaagttgctcattarggattttattccagttctataagattctaatgtctttgctttgcttgcatgcttaaaatatttatttcccctatctaagacctcaaatgaagaaaattcagttttaa

SEQ ID NO: 582775 - DNA, 608 bp, Homo sapiens
ttcaggtcatcagaaaaatagagattttcagagcatcgtcacatgtttctcatctcttatcttcctacctcttgatccataccygagtgacctgactaccaaccagacagagttttaatctccctcaggtttcatggaaggtggtgtacagagtatctaaaattcatagataaccttcctattggtttatcttctcaacattaatgcagatgactagaaatcacacatgaaaaaaacccctttcccttgggtgatttaaagagtgtttatctttggtgcagactctcaactaaaattttttttggtagcatatatcaagaggttttcaagggttgaggagtataagcaggtaggttaccactcgatgaaaagtgattggtaatggaggaaagaccgtgaaactcatgtttgctctttactgatagccaaacccaaagagaattaatgtcacttctatatctgcttgaaatcaatattattaatttctagtatctcagaatttcaacttatagagtataactgtgtcaggcaccatatagattgatccaaggcacattcttttttttttttttagagacaggatctcactctgtcatccaggctggagt

SEQ ID NO: 582776 - DNA, 612 bp, Homo sapiens
cgctgcttgaagctatggctcataacaagcagggtgcctcatgagaaaatgatcgaagttcctgctttccagccaggaactaaaccaagtcccccacagctttcctgaatgtatggcaatatctccatatcacaataggtcattagaagatctgatttggaacagaggcccagtgggtggagtgcgcgaggaagcactggatgcagaaccactgcacaatgagaaatatgtttccgttggatttaacaacaaggggactattgataaccttaacctcagtagtttcatgcaattgcagatgcaagtaccagaatagtatgggagggtaactgagggtgaaaggaagagttaggcatactgagtgtaratatctttctcaagaaaaatagaatacgcttctcctacagagtcaggtacaaggaacactgaaaaaacaaaaaacagactttaaaacaacaacgaaaagttactaaagaaaaaagggacttttattatgataaaaaggtcagtatatcaggaagaaagaacaattataaacatacagatattaaagaggaattagataattcaatattaattggagacatcaatatcccacttacaatgatgaat

SEQ ID NO: 582777 - DNA, 565 bp, Homo sapiens
atgatcgaagttcctgctttccagccaggaactaaaccaagtcccccacagctttcctgaatgtatggcaatatctccatatcacaataggtcattagaagatctgatttggaacagaggcccagtgggtggagtgcgcgaggaagcactggatgcagaaccactgcacaatgagaaatatgtttccgttggatttaacaacaaggggactattgataaccttaacctcagtagtttcatgcaattgcagatgcaagtaccagaatagtatgggagggtaactgagggtgaaaggaagagttaggcatactgagtgtagatatctttctcaagaaaaatagaatacgcttctcctacagagtcaggwacaaggaacactgaaaaaacaaaaaacagactttaaaacaacaacgaaaagttactaaagaaaaaagggacttttattatgataaaaaggtcagtatatcaggaagaaagaacaattataaacatacagatattaaagaggaattagataattcaatattaattggagacatcaatatcccacttacaatgatgaata

SEQ ID NO: 582778 - DNA, 468 bp, Homo sapiens
ttaatgattttaatgatttctcctggctattccatattgacagagcaggagcaccatcatcttgaacaaacactgccactttaagttccagctctctttctagcctgatgcatttcaatgaaatcacttctcttctaattacaagcrgccagaaagagctgacagtaacacacagataagacaggaagctgaggcatgagaatcgctcgaacctgagaggcagaggttgcagtgagcagagatcacaccactgcactccagcctgggcgacagagtgagattccatctcaaaaaagcgaagcaaactaacaaacaaaaaaacactgtttctgttcaaaggcttctagatctgataaacaacttcagcaaacttccaagatacaaaatcaatgtataaaaatcagtggcatttctattcaccaataatatccaaactgagagccaaatcaagaacacaatcccattcac

SEQ ID NO: 582779 - DNA, 583 bp, Homo sapiens
ggaactccaaggcctgttccttttaacttgtaacagtgctgtctgtcctgtagaccaaaaaggtagctctggctttaagacagtaaaatttaaagaactgcatgtccttgtcttacaatttcatttggttgacatactacttagtagagcagtctttcctgaatataagtgttggagctgtgttagcgtattccactgaatgttacagtctgggcatccaatttgtggttttctgtacagatgtttagggctgctgctgcttaagcctctcttgtgttaaaccattgcagactgcttctgattgttttaggattatgaacataygcagcatggcaggcatcaaagtacaaggaaataggccttttataggagagagggtcttctttggtttgagctataagctctctttcttttttttttttctctgatttaatatgtgttttaaaccagaatttataggttaagagcttagggttcataacatacatatagctgattatttcctgggtcacagactgaataggtggtctgattgtatgtgcaggttcctaacctggttcctgtatatttatagtaggtatgg

SEQ ID NO: 582780 - DNA, 437 bp, Homo sapiens
gtgttttttttttttttcatactatggccctgacatttatccttctagtgtgcttttcttttacatcaagcacattaatctttctctagcctcagcyggctttcaaactcctgtccagactagctttttccacgactgcgttcacacctgcgttcatgcctccttgcaaagccagcttctctttccgtaagggttgctgctagtaaattagcctttttaaagcctccgatcagccttctgatctcggttaatttacatcttggtagccactttaataagctgagtagcattcacacctatggagcttctaacttctgcaatttatgcctggtatctccttggtcctgccttacaaacaccatattcacaatgtgctgattttcagcagcctcagagttaaacggagtatacaaccgaaatgcctcacagtcttttat

SEQ ID NO: 582781 - DNA, 526 bp, Homo sapiens
aaaaacacagaatattacaacactgtaactgtgatgtgtaaactagtctttgatgaacgaatcaaaaatagtaactacagcaacgtttcaagacatagtcaatacaataagatataaatagaaaaaacagaagttaaaaagcagggggattaaattaaggcatagagtttttattagttttctttttgtttgtttatgcaaacaatgttaagtttttatcaggtaaaaatattggattataagatagcaattgcaagcctcatggtaacctaaaaccgaaaagcatacaatggatacacaaaaaataaaaagcaagaagctaaatcatatcatcagagaaaatcgccttcactactggaagacagaaaggagagaaagaaggaagagaaaaccagaaaacaaataataaaatggcaggaggaagtccttacttataaataataacattaagtgtaaattgactaaattctctaataaaaaatagacwgagtagatgaaaaaacaagaccctctgatctactgccta

SEQ ID NO: 582782 - DNA, 549 bp, Homo sapiens
ccactctgaacataggcactggcaaagctttcatgaacaagactccaaaagcaattgcaagacaaacaaaaacagacaagtggaaactaattaaactaaggagctctgcatagtaaaagaaactatcaacaaagtaaacaaacaacctacagaatgggagaaaatgtttgcaaactatgcctcccatgaagtctaataaccagaatctataaggaacttaacaaaacaaacaaaaatcaagcaactccactaaaaaatgggcaaaagacatgaatagacacttctcaaaagaagtgaaacatgtggacaacaagcataygaaaagatactcaacataactagtaagagagaacaaaaaaaaagagagagaagacacaaccaacatcaggagtgaatgaggacacatccctatagattctgaaaaccagaaatctgttatctataaagagataacacaaaatattacaaactactttatgcatataaatacaacacatttaaaaatccaatgttggacaaattccttgaaagatacaatctaccaaaatt

SEQ ID NO: 582783 - DNA, 590 bp, Homo sapiens
agacacttctcaaaagaagtgaaacatgtggacaacaagcatacgaaaagatactcaacataactagtaagagagaacaaaaaaaaagagagagaagacacaaccaacatcaggagtgaatgaggacacatccctatagattctgaaaaccagaaatctgttatctataaagagataacacaaaatattacaaactactttatgcatataaatacaacacatttaaaaatccaatgttggacaaattccttgaaagatacaatctaccaaaattcataaaatggtgtgttcctacctcattgagattatatctatgaactctgataaaagacttcagacataatgactttaggaaagtaccttattctcttaatgcttttgttttcccatttataaaatggagaaagtggctgtaattactgcaaaaggtcattgttaaaattaatatgtgtaaattgttagaataatatctgacacrtagtaatcttatgtatttattatttttataaaattcactgtgctaagtaaaataaggcagaaactgaaatatgtggaatctaaaaaagtcacactaatactcatacaaaagt

SEQ ID NO: 582784 - DNA, 573 bp, Homo sapiens
cagtattagggtcagagtgggaggtacagaacttgttgyaataaatgcaattacctttgtaaataaacaatactaaattttcaagaaacagagaaaaagagagacaccaaatataagacttgctccctatgtttcataacacatctaaacaacttgagtattttctccaaaggaatgtacaagtaatcacataattacatgatttatttggctcaaatcaagggaaactatctttgagatatccataaaatgataagtacagtgcagtttaaactacagtccaaaaagcttctctgttcttcaaactttaagacattagacctcttccagtcctttctgaaataaaaagtatagtgttcttaataagttttacaactggtagagagtgacctatgataaaatactgtattgaaaaccataatataatcataaagttaaaataccagaattccctgagaacagtttttataaagataaaaaccaatgtagtaacaggattatatctttacctggaaataactacatttatcaatacctacttttctattataagagtgagtaaaataaatattg

SEQ ID NO: 582785 - DNA, 570 bp, Homo sapiens
aatatgtatgagatacaaacattctttttgtgttgcacacaattcagatacatttatttaattacaataattgaaacaaaatcctacctgaaacaacttttcctttaggcccataccattggaatgatgggtctatcagttcagcatttcgcagttgttgcgttacacataacacgtgtggactcttttgatggagcatgacatacgctttcactgaaaatacaatatttaaaatgttccaatagtattttatcttcttttctttctctataatgtacacttttgtagtttgggttacatgcaataataagagtactttgaattattgctcctattacttgataaaaactaaatttcattgcattctatgyaattaacattaaaaatatattatgtatttgtatgtatatatgtgtatgcatgtatgtgtgtgtacatgtatccccaaccttagcataatgtgttagtacttttcattcagagctcatatacactaacctgttttattctcagaatattatttcaataacaaagtattaagataatactatatctacactttatctgttt

SEQ ID NO: 582786 - DNA, 556 bp, Homo sapiens
ctcttttcacaccctctgccctaaccacgccacagcagcacacagcatcattcttttgtgattttattgatataaattcctcctcatctttggagactcagcataagtatatcctttgtgctttggcttgacagtacctcataccatgactgtacccttcctctcgcccccactaacccctgtacctatttcacagcaaatataaatgaatccagaagagtttcccaatgcaagatcaacatacaaaaacaaataatattcctctacaycaacaataatgcattaaaccattttataggaaggaagataatatttagagtacaataaacaaaagtcactctataatcaagtaagacctctgtgggaaacatcttcaggctctaacaaaagacataaaattagaccaaaatgccataatcatgactgcatacacataactttaaagatgtcaatttattcccaaatttatttatcaacacataagcaaaatcccagaagaaattatttaagaagctcttcaatactgattctaaaatccatttggaagattaaagct

SEQ ID NO: 582787 - DNA, 622 bp, Homo sapiens
cataactttaaagatgtcaatttattcccaaatttatttatcaacacataagcaaaatcccagaagaaattatttaagaagctcttcaatactgattctaaaatccatttggaagattaaagcttcataaatatctgaaagaattctataacagaaaagcaaagaggagggactagcaataagagttactgagatatattaacatttacactaaataaaaaaagagaggcctggtgtaggaacaaataakgggtctagggaaaaaatcaaattggcataaataactgatatatatgtggtagacaaggtacctaaaatcactggagaaaatatagattatcaataaattatagttaaaagttatctcaaaatacatgcaaatgtaaacttagatttatacctcttaccgtatataaaaataaattccaggtacactgaataactgaaggcaagtaattatttaaagaaaataatacctttatgtctgaaccagttatagaaaattatctcaatgcaaaaagcacaaatataaaaatactgaactcaacttcttaaatggtaacactttctgtttgatcctgtataacataggcaaagttaacaaatttgactgtagggagag

SEQ ID NO: 582788 - DNA, 601 bp, Homo sapiens
tttaagaagctcttcaatactgattctaaaatccatttggaagattaaagcttcataaatatctgaaagaattctataacagaaaagcaaagaggagggactagcaataagagttactgagatatattaacatttacactaaataaaaaaagagaggcctggtgtaggaacaaataatgggtctagggaaaaaatcaaattggcataaataactgatatatatgtggtagacaaggtacctaaaatcactggagaaaatatagattatcaataaattatagttaaaagttatctcaaaatacatgcaaatgtaaacttagatttatacctcttaccgtatataaaaataaattccaggtacactgaataactgaaggcaagtaattatttaaagaaaataatacctttatgtctgaaccagttatagaaaattatctyaatgcaaaaagcacaaatataaaaatactgaactcaacttcttaaatggtaacactttctgtttgatcctgtataacataggcaaagttaacaaatttgactgtagggagaggatatttgcaacaaagttaataatgcatttataactggaatataaacaata

SEQ ID NO: 582789 - DNA, 537 bp, Homo sapiens
ctttactgaggaagtcaggttaaaatgaagtcatcaggctgagtacaaatccaatatgactgatctccttataaaaaggggaaatttggaaacacagacaaatacagagggaagaggatacagagtgatagggaaaagatggcaatctaaaagccaaagacaaatatctggaacagattctttcttcaaagtcttcagaagaaaccaactctgccaatactttgatttttgatttctagcctctataactgtaagacartaatttctgttgtttaagccaccctgtctgtggttcttttgttccagcatccctaaggaactaattaaaatcagtaggaacagtgagcttgtagtattttaacgtgcctgattcccatgcctccttctccagctctgcaataaggagccatgacaaccaacagtttacaatcacagtgagaaccagcagcctggcagccaatgaagggggcaggcatggtaagaatgccttcaaagcctccctcccagagtactatcagtatgcgaactgtcagtcaa

SEQ ID NO: 582790 - DNA, 537 bp, Homo sapiens
ctttactgaggaagtcaggttaaaatgaagtcatcaggctgagtacaaatccaatatgactgatctccttataaaaaggggaaatttggaaacacagacaaatacagagggaagaggatacagagtgatagggaaaagatggcaatctaaaagccaaagacaaatatctggaacagattctttcttcaaagtcttcagaagaaaccaactctgccaatactttgatttttgatttctagcctctataactgtaagacagtaatttctrttgtttaagccaccctgtctgtggttcttttgttccagcatccctaaggaactaattaaaatcagtaggaacagtgagcttgtagtattttaacgtgcctgattcccatgcctccttctccagctctgcaataaggagccatgacaaccaacagtttacaatcacagtgagaaccagcagcctggcagccaatgaagggggcaggcatggtaagaatgccttcaaagcctccctcccagagtactatcagtatgcgaactgtcagtcaa

SEQ ID NO: 582791 - DNA, 604 bp, Homo sapiens
agtggaagagatgctatattagagaaaaatctagattcccctgaaagattatgccatactatcatgatatagcacaccaagataatagtcaacaagcatgtsaactatagaaaatatgacataaatttcagatactgctagagaagaattaaacacaggtttagaaaaagtagttgtctctttgataaagggcaataaaaactggtgtatttcagactatgatgactccagctgatgggagttattatcaacagtgatacttacattgattgtacctaccctgatatttttgtcagaaattactatattagtttcaaacatactacttaagaaataaatttttatctatttgaaacatgtacataattaattagaaaaaagttaatgacatttcaatagaagtttgaaatgaccataatgtagttatttcagttatcaaagtacaggggattgggttgtaaaatgcctcttaggacacaagcaaaatatatgaattgatgtatagtacaaaacacgtcttagcaccttagacaggtcatatcatagctgctgttattagacacctgtttaaattttaggaaacttacataaattactagcactt

SEQ ID NO: 582792 - DNA, 604 bp, Homo sapiens
agtggaagagatgctatattagagaaaaatctagattcccctgaaagattatgccatactatcatgatatagcacaccaagataatagtcaacaagcatgtcaactatagaaaatatgacataaatttcagatactgctagagaagaattaaacacaggtttagaaaaagtagttgtctctttgataaagggcaataaaaactggtgtatttcagactatgatgactccrgctgatgggagttattatcaacagtgatacttacattgattgtacctaccctgatatttttgtcagaaattactatattagtttcaaacatactacttaagaaataaatttttatctatttgaaacatgtacataattaattagaaaaaagttaatgacatttcaatagaagtttgaaatgaccataatgtagttatttcagttatcaaagtacaggggattgggttgtaaaatgcctcttaggacacaagcaaaatatatgaattgatgtatagtacaaaacacgtcttagcaccttagacaggtcatatcatagctgctgttattagacacctgtttaaattttaggaaacttacataaattactagcactt

SEQ ID NO: 582793 - DNA, 604 bp, Homo sapiens
agtggaagagatgctatattagagaaaaatctagattcccctgaaagattatgccatactatcatgatatagcacaccaagataatagtcaacaagcatgtcaactatagaaaatatgacataaatttcagatactgctagagaagaattaaacacaggtttagaaaaagtagttgtctctttgataaagggcaataaaaactggtgtatttcagactatgatgactccagctgatgggagttattatcaacagtgatacttacattgattgtacctaccctgatatttttgtcagaaattactatattagtttcaaacatactacttaagaaataaatttttatctatttgaaacatgtacmtaattaattagaaaaaagttaatgacatttcaatagaagtttgaaatgaccataatgtagttatttcagttatcaaagtacaggggattgggttgtaaaatgcctcttaggacacaagcaaaatatatgaattgatgtatagtacaaaacacgtcttagcaccttagacaggtcatatcatagctgctgttattagacacctgtttaaattttaggaaacttacataaattactagcactt

SEQ ID NO: 582794 - DNA, 589 bp, Homo sapiens
aggaaaggtagacagaaaaaaagggggatatggaacatatgaaaactattatgaactaacttgacctaattgatataaataccaatggcacacagaacattcactgagataaattatattctggaatatcaaacacatcaaatgaaatcaaaaaattgaaattatagaaagatgttctckgattgcaacaaaattaaactagaactcaataataaaagatgcctggtaaaaaataaaaacatatgtgcacatttagaatatagtgatatacaaatggttaatacatcattataaagttaggtttattcaggtatgtaagttttgcttaactttagaaaattgataaatgtgattcattgtgttaactgattaaaatacaagtcatctactcatctcaagatatgaaaaaaaattgacaaaaaggattgacattatccttaaattaataatggatgtctgtgaaaaggtaaatcaaacttaatattaaatagtgaaatgttgaaagcatcccctgtgtaagcaatctcaagcaagtatgtcctctttcacgttctcttttctcctcctcctttcacctaagcactgaagt

SEQ ID NO: 582795 - DNA, 589 bp, Homo sapiens
aggaaaggtagacagaaaaaaagggggatatggaacatatgaaaactattatgaactaacttgacctaattgatataaataccaatggcacacagaacattcactgagataaattatattctggaatatcaaacacatcaaatgaaatcaaaaaattgaaattatagaaagatgttctcggattgcaacaaaattaaactagaactcaataataaaagatgcctggtaaaaaataaaaacatakgtgcacatttagaatatagtgatatacaaatggttaatacatcattataaagttaggtttattcaggtatgtaagttttgcttaactttagaaaattgataaatgtgattcattgtgttaactgattaaaatacaagtcatctactcatctcaagatatgaaaaaaaattgacaaaaaggattgacattatccttaaattaataatggatgtctgtgaaaaggtaaatcaaacttaatattaaatagtgaaatgttgaaagcatcccctgtgtaagcaatctcaagcaagtatgtcctctttcacgttctcttttctcctcctcctttcacctaagcactgaagt

SEQ ID NO: 582796 - DNA, 589 bp, Homo sapiens
aggaaaggtagacagaaaaaaagggggatatggaacatatgaaaactattatgaactaacttgacctaattgatataaataccaatggcacacagaacattcactgagataaattatattctggaatatcaaacacatcaaatgaaatcaaaaaattgaaattatagaaagatgttctcggattgcaacaaaattaaactagaactcaataataaaagatgcctggtaaaaaataaaaacatatgtgcacatttagaatatagtgatatacaaatggttaatacatcattataaagttaggtttattcaggtatgtaagttttgcttaactttagaaaattgataaatgtgattcattgtgttaactgattaaaatacaagtcatctactcatctcaagatatgaaaaaaaattgacaaaaaggattgacattatccttaaattaataatggatgtctgtgaaaagrtaaatcaaacttaatattaaatagtgaaatgttgaaagcatcccctgtgtaagcaatctcaagcaagtatgtcctctttcacgttctcttttctcctcctcctttcacctaagcactgaagt

SEQ ID NO: 582797 - DNA, 591 bp, Homo sapiens
tgtagcccaatgcccatcagtgaataaatgaaaaacaaaatgtgtgtataggtacaatagaatgttattcagccttaaaaaggaaattctgacacatgctataacatggatgaatcttaaaaatattgtgctaagtgaaataagccagtcataaaaagacaaatactatatgattccacttatatgaggtatctagartagtcacatttatagagaaaaaatgtagaatggtggttttcaggtgttggagggagaagggaatggggagttattatttaatgggtatacaatttcagtctagaagttgaaaaaaattctagagatggatggtgatgatgatttcacaacagtgggactgaagttaatgccactgtgtatttaaattatacatttaaatacacttaaaatgttaaattttatgttatgtacattttaccataataaaaagtgatatatacacattcatatatttaaattagctaatatctacaatttgattatgccaagaattcacatagatatggaataacagagtttcttccaccctactgttggaaatgtattaataaaaccaactgtgaaaaatagtct

SEQ ID NO: 582798 - DNA, 588 bp, Homo sapiens
ctaacaaccatgtataagatctatatgatgctaactacaaactaccaatgaaagaaataaaagacctaaaaaaaaatagatgggcatgctatgttcatggatctaaagatttaatatrgtaaaattatgaaaattccacaaatcctatattgagctataagtttaatacaattgctatcaatatcctagaataattttttttgtaaatacagataaactaaacttcatatggaaaagcaaagaaacaagaatagctaaaattagctttgtgagagaagaaaaaagtaggagaaatcacaccaccaattttaagacttactaaccatagtaatgaagacagtgtttgctatggtttgaatgtttgtcccttccaaactcatgttgaaatttaattgccattataacagtatttagtaagatccttaagaggtgattagaccatgagggcttggccctcatgaactgattaatgtcattatcatggggttggattctgagtttggcccctttgtctctgtttctctctctgtctcacgccctctctttgcacttccatcataaggttacacaatgagaaggccctcacca

SEQ ID NO: 582799 - DNA, 588 bp, Homo sapiens
ctaacaaccatgtataagatctatatgatgctaactacaaactaccaatgaaagaaataaaagacctaaaaaaaaatagatgggcatgctatgttcatggatctaaagatttaatatagtaaaattatgaaaattccacaaatcctatattgagctataagtttaatacaattgctaycaatatcctagaataattttttttgtaaatacagataaactaaacttcatatggaaaagcaaagaaacaagaatagctaaaattagctttgtgagagaagaaaaaagtaggagaaatcacaccaccaattttaagacttactaaccatagtaatgaagacagtgtttgctatggtttgaatgtttgtcccttccaaactcatgttgaaatttaattgccattataacagtatttagtaagatccttaagaggtgattagaccatgagggcttggccctcatgaactgattaatgtcattatcatggggttggattctgagtttggcccctttgtctctgtttctctctctgtctcacgccctctctttgcacttccatcataaggttacacaatgagaaggccctcacca

SEQ ID NO: 582800 - DNA, 588 bp, Homo sapiens
ctaacaaccatgtataagatctatatgatgctaactacaaactaccaatgaaagaaataaaagacctaaaaaaaaatagatgggcatgctatgttcatggatctaaagatttaatatagtaaaattatgaaaattccacaaatcctatattgagctataagtttaatacaattgctatcaatatcctagaataattttttttgtaaatacagataaactaaacttcatatggaaaagcaaagaaacaagaatagctaaaattagctttgtgagagaagaaaaaagtaggagaaatcacaccaccaattttaagacttactaaccatagtaatgaagacagtgtttgctatggtttgaatgtttgtcccttccaaactcatgttgaaatttaattgccattataacagtatttagtaagatccttaagaggtgattagaccatgagggcttggccctcatgaactgattaatgtcattatcatggggttggattctgagtttggcccctttgtctctgtttctctctctgtctcacgccctctctttgcacttccatcataagrttacacaatgagaaggccctcacca

SEQ ID NO: 582801 - DNA, 576 bp, Homo sapiens
ggaaaattgtgtgaaagcccagtacatgagagggagagtgagtgtctctgtgatacccattcccactgggtagccaggcaatccaggccacagaagagctccttgaccctccaaaaccctgaatctgacttggggagcagtcaggaaactatgagaaggaacagcactgggaagtgtaccaaacttgctcccggacctgggcaccaaaagaggaggccattccttttcctagatcctagtgagttgcttgggaacatgccagttagcacgagtgacagtcactgtttttgagaatctcagactggggattggcactctggccttgaggagggtaggagctcccatagccagarctgacagatgagtatgacacccctgacccctgccactttcacagaactgtagcaggaagctatttgtctgagtttcgcagactgaaagcaaactgcttgtgacttaacttattgtccccacttgctgccaatgtcagggcatgggagggaatgccactgggtctagaggataaaagcaaagtgggtcccacaactgctcactaggctgtggagccagtcactc

SEQ ID NO: 582802 - DNA, 475 bp, Homo sapiens
gggtctgtgactgtttaagactggtagagggtaaaagatgttttaggtaataactgactaatgtttatcacagtactcacatattaaaaactgagagaagaaaattaagattaagtgctctcttcatggtgcctcaaatcctaaatcttatttcaagagttaaaaagaagaaaacctatcccaaggaagagaggtaatgcttaagaaaattttttaaatgaagatatgagataatatrtgaattaatgacttagaccagcagttcccagcctttttggcagcagggactggtttcatgaaagacaatttttccacagactgggagggtgggggatggttcgagggtgactcaagggcattacatttattgtgcactttatttatattattattacattgtaataaatcatgaaataattatacaactcaccataatgtaaaatcagtgaaagctctgagcttgtcttcctgcaac

SEQ ID NO: 582803 - DNA, 439 bp, Homo sapiens
tcaccaaaattaacttcataatataatcacagacatctttgtaaaatacacaaaactggaaagytggaaacaaagaaaattaaagtgaccttgggtttgttaatgactttttacatacaaatttgcatgtaaaaatgtgtgtgtctatactttgctcaatttttctgtaaaaattgtaaaaactgctctaaaaatagtcaatgtaaaaaaaacccacacaacatagaaaatgtgcagcaaaaaggcaaaagtaagtcctcccttatcagtaataatttcaaatataagtggtttaatttaaaggcaccaattaaaaggcagaagtggacataatggataaaaatgcaggatctaactattgtctgcaagagattcaccttaggtgcaaaaacagaaaaataggttaaaagtaaagggatgaaaaaagatattttgtgca

SEQ ID NO: 582804 - DNA, 402 bp, Homo sapiens
aaacaaaactggtttttggaaaaaatgcaataaaattgacaaacattcacatagagaaatcaaagtagagacattactacctacctttcagaaataaaaaggataacaagagaacaatataaaccattgtaggccaataaattaagtaacctaaatgaaataaatygctagaaacacacaaactaccaaaactgactcaagaataaacagaaaatatgaataggtctataactaagtaaggagtttgaatcactaatcaaaaacctgccaacaaagaaaaaaccagaacccaaaggcctcagtgattaattctatcagttaaagaagaattaaataaaattcatctcactttcttccaaaagaatagaagaggaggtaacacttccaaactcatatcatgaa

SEQ ID NO: 582805 - DNA, 517 bp, Homo sapiens
aaacccccaaatctggtcataaactggccccaaaactggccataaacaaaatctctgcagcacttgacatgctcgtgatggccatgacacccacgctggaagattgtgggtttaccagaatgagggcaaggaacacctggcccacccagggcagaaaaccgcttaaaggccttcctaaaccacaaacaatagcatgagtgatctgtgccttaaggacwtgctccttcttcagataactagccagagcccatcccttgtttcgtcccatccctttgtttcccgttaagtaatacttttaatctataatctatagaaacaatgcttatcactggcttgctgtcaataaatacgtgggtaaaactctgttcagggctctcagatctgaaggctgtcagccccctgatttcccactccacactctatatttctatgtgtgtgtctttaattcctctagcaccactgggttagggtctccatgacctaaatggtctcgacacccattggtgtgctgtattca

SEQ ID NO: 582806 - DNA, 567 bp, Homo sapiens
agaccagcttgaccaacatggygaaaccctgcctctactaaaaatacaaaaattagctgggcatggtggcgcatgcctgtagtcccagctactcgggaggctgaaacaggaggatcgcttgaacctgggaggcagaagtttcagtgagccaagattgtgccactgcactccagcctaggtgacagagcgagactccgtttcgaaaaaaagattgttatcatatattattgttcataaacatgtcagttggattatctagagcctacactatttaataaaactttctgtatgcagtttatccaggacaatgagacttccaggcagagccagcttggagacctagaaccagtctgcaagtatcattgctagatgccacagccttctcccctgagatcatggggcaatggggtgctttctgctccatgcccaggcagatcatcaggcggttggagaactcacttacctggatcagcagcctgagccacttcacgcttcctgcacatagaccatgatgtagcagggccctctctgccccatactcatgcagatcgccaggcagttggagca

SEQ ID NO: 582807 - DNA, 452 bp, Homo sapiens
ggcgaatgtgtaaagagaaagcaagtttattaagaaagcagaggaatgaaagaatggctactccacagacagagcagccatgaaggctgctggttgcccatttttatggttatttcttgatgatatgctaaataaggagtggattattcatgcctctcctttttagaccgtatacggtaacttcctgacattgccatggcatttgtaaactgtcatggctctaatgcgagtgtagcagtgaggatgaacagaggtcactctcattgccatcttggctttgttgggttttagccagcttctttactgcaatctgttttatcagcaaggtctttatgacctgtattttgtgccaacctcctatctcagcctgtgacttagaatgtcttaaccacctgggaawgcagcccagtaggtctcgaccttattttacccagcccctattcaagatggag

SEQ ID NO: 582808 - DNA, 511 bp, Homo sapiens
aaaatgtgttggctccctaaccaacacacacacacacacacacctacactcccaaattctttcctcctgtatgaaaaaacttaaggctgggcacagtggctcatgcttgtaatccagcactttgggaggctgaggcagcaggattgcttgatccaaggaatccaagaccagcctgggcaacatgatgagaccctgcctctacaaaaagaaaaggaggaaaaaattagctaagcatgccaatagtcccagctactagggaggctgaggtgagaggattgcttgagcccaggaggtcaaggcggcagtgagcygtaatccagccactacactctagcctgaatgacagagcaagactctgtctcaaaaatgaacaaagaaagaaagagagagagagggagggagggaaagaggaaggaaggaaggaaggaaggaaggaaggaaggaaggaaggaagcaaggaaggaaggaaggaagaaaaggaaggaaggaagtttacagagtttttgagttg

SEQ ID NO: 582809 - DNA, 511 bp, Homo sapiens
aaaatgtgttggctccctaaccaacacacacacacacacacacctacactcccaaattctttcctcctgtatgaaaaaacttaaggctgggcacagtggctcatgcttgtaatccagcactttgggaggctgaggcagcaggattgcttgatccaaggaatccaagaccagcctgggcaacatgatgagaccctgcctctacaaaaagaaaaggaggaaaaaattagctaagcatgccaatagtcccagctactagggaggctgaggtgagaggattgcttgagcccaggaggtcaaggcggcagtgagctrtaatccagccactacactctagcctgaatgacagagcaagactctgtctcaaaaatgaacaaagaaagaaagagagagagagggagggagggaaagaggaaggaaggaaggaaggaaggaaggaaggaaggaaggaaggaagcaaggaaggaaggaaggaagaaaaggaaggaaggaagtttacagagtttttgagttg

SEQ ID NO: 582810 - DNA, 290 bp, Homo sapiens
gagtttttgagttgttagtgttccctaaattgtatggtcttcagaggtttaccctcctatagcttcaaggggtgagtcctgactrgcaggaaaatcaatcacactcttacttgccagtgattcatttagggaagacagctaactaagctcttccactttgattatttcatttaattgtaacaaccatcttatcatgacttcttcaaaattaccctgccagtaagtgttggaggactccccagaagcagaaaccaccatgcttcctgtatagcctacggaaccatgagcca

SEQ ID NO: 582811 - DNA, 290 bp, Homo sapiens
gagtttttgagttgttagtgttccctaaattgtatggtcttcagaggtttaccctcctatagcttcaaggggtgagtcctgactagyaggaaaatcaatcacactcttacttgccagtgattcatttagggaagacagctaactaagctcttccactttgattatttcatttaattgtaacaaccatcttatcatgacttcttcaaaattaccctgccagtaagtgttggaggactccccagaagcagaaaccaccatgcttcctgtatagcctacggaaccatgagcca

SEQ ID NO: 582812 - DNA, 412 bp, Homo sapiens
gtcacaaaattattttttttcctttgaaatcccttgtttcctcaaacagaatttaccattccaattcgatttctgaatacatgggagttaatagaatactcctaatccatttataggatctacactaagtaaaaaaattaaagacatctgaaaactattttgtgagtccttataatccatatcaacaatcatggaatgtattaagtaatagaccaaaaattaatcatcatattaaccaaaaacacatagcaagacaagataactaaatattttcatttggaaattgggaaatttagtcaattttaaaactcagcaaatgagatcatttcacagaagcaasctaggtttgctggtaaattaaaattatgacattttgttttggtttgggagggtagttcctcttctgtaaatt

SEQ ID NO: 582813 - DNA, 500 bp, Homo sapiens
aattacaaggttctatggttctaaattccaatctagtcttccacatcattttgaaggtataatattacttgtcaaagtgggatgatagaagatatgtgtggacataaattgttgacaaggaaaaaaactaaaataagaaaataagagagaaaaatatatgtatgtacagtggttarctagaaatatgccttttaaatatttggcatgtggtatgtgggcctcaatgtgtactattgcactagcttcccaaatattaaaggatgtcttttaaaagaaaaacctcttcctaaaaggttaacagttaaaataaccagagtggcacaggtaccagtcattaagtgaaacctttcatcttcccagaatagtacctgttcccaagccagcttctttgaaaatcattttctctcctttactatttagtttacagattgtatagtaacaatacagaaaccacaatagtagcaacaaaataaagaatatttttaaatgaaaactcacat

SEQ ID NO: 582814 - DNA, 500 bp, Homo sapiens
aattacaaggttctatggttctaaattccaatctagtcttccacatcattttgaaggtataatattacttgtcaaagtgggatgatagaagatatgtgtggacataaattgttgacaaggaaaaaaactaaaataagaaaataagagagaaaaatatatgtatgtacagtggttaactagaaatatgccttttaaatatttggcatgtggtatgtgggcctcaatgtgtactattgcactagcttcccaaatattaaaggatgtcttttaaaagaaaaacctcttsctaaaaggttaacagttaaaataaccagagtggcacaggtaccagtcattaagtgaaacctttcatcttcccagaatagtacctgttcccaagccagcttctttgaaaatcattttctctcctttactatttagtttacagattgtatagtaacaatacagaaaccacaatagtagcaacaaaataaagaatatttttaaatgaaaactcacat

SEQ ID NO: 582815 - DNA, 648 bp, Homo sapiens
gtatgtgggcctcaatgtgtactattgcactagcttcccaaatattaaaggatgtcttttaaaagaaaaacctcttcctaaaaggttaacagttaaaataaccagagtggcacaggtaccagtcattaagtgaaacctttcatcttcccagaatagtacctgttcccaagccagcttctttgaaaatcattttctctcctttactatttagtttacagattgtatagtaacaatacagaaaccacaatagtagcaacaaaataaagaatatttttaaatgaaaactcacatcctaactctaccaaaacatgaaaattaaacctgaatgcttcccattcctgatatatttttcacgtaaatattcagctctgggattgcattgtttttggattgagtggaaattattgcctggtcttgaaatcttccataatgtgtgtgtgtgcgtgtgtgcgtgtgtgtgtgtatgtatgtrtgtgtggtgaatatatttctttttgttcagagaaaacattttttcaatatgtatatttattttaggcagattatgctagtaattttctacaaatgtgctttttaaaaaataacctttaatttaaaaaaaaattattcttactcagtggcccacaattgttaaaaacgctaccaatg

SEQ ID NO: 582816 - DNA, 648 bp, Homo sapiens
gtatgtgggcctcaatgtgtactattgcactagcttcccaaatattaaaggatgtcttttaaaagaaaaacctcttcctaaaaggttaacagttaaaataaccagagtggcacaggtaccagtcattaagtgaaacctttcatcttcccagaatagtacctgttcccaagccagcttctttgaaaatcattttctctcctttactatttagtttacagattgtatagtaacaatacagaaaccacaatagtagcaacaaaataaagaatatttttaaatgaaaactcacatcctaactctaccaaaacatgaaaattaaacctgaatgcttcccattcctgatatatttttcacgtaaatattcagctctgggattgcattgtttttggattgagtggaaattattgcctggtcttgaaatcttccataatgtgtgtgtgtgcgtgtgtgcgtgtgtgtgtgtatgtatgtatgtgtggtgaatatatttctttttgttcagagmaaacattttttcaatatgtatatttattttaggcagattatgctagtaattttctacaaatgtgctttttaaaaaataacctttaatttaaaaaaaaattattcttactcagtggcccacaattgttaaaaacgctaccaatg

SEQ ID NO: 582817 - DNA, 300 bp, Homo sapiens
gcttccaaaggaaattatttacaaaataatktctgcatcctgggtctatatatctattgcctatgaggagagcgtttaagatctgagccatcttcaagtcttatactttgtgtatagctctcatgtttttgcaggttaagtaagtttgtataccctttcttttattaatctgtgtatggtcagttcatttcgggtaatcttcagagggtgaaaggggaagcttttcacttcactcctactgtgacaactaactaccttcttacttattcaattttttagtctatatcaacacttttatat

SEQ ID NO: 582818 - DNA, 557 bp, Homo sapiens
atttcttggggccaggaatttgagaccagcctgggcaatatagtgggactttgtcactacaaaacaaatttaaaaattacgccaggcatggaggctcacgccggtaatcccagcactttgggaggccaaggcgggcaaatcacctgaggtgagaagtttgagatcagcctggctaacatggtgaaaccctgtctctactaaaaatacaaaattagccaggcgtggtagtgcatgcctgtaatcccagctactcaggaggctgaggcaggagaatcgcttgaactcgagaggcggaggttgcagtaagccaggatcacaccactgcactccagcctgggcaaaagagtacgactctgtctccaaacaaacaaacaaaaaaaaattaaattaaccagacatgatggcatgcgcctgtagtctcagctacttgggagcctgggrcaggaggatcacttaagcctgaaagtgatggtgcagtgatcatgccactgcactccagcctaggtgagagagcaagaccctgaggaaggaaggaaggaaagaagcaaggaagaaaa

SEQ ID NO: 582819 - DNA, 461 bp, Homo sapiens
ttatttgacattcaagacctagaatattatataggctagtgaatattatccttcatgtctggagtacgaaaaggagcgtaamtggtgaaattgctggttttttgttatctgactaagtgtattaatcaaatccagtgaacgtttctgtctgcatcgtattcaagatctttgcagcttttgacgccaatgatcactctcttattgaaacacttgtcttttttttttttttttaattctgaggcaccacttactggttttcttcttccctcactgcttcttcctttcttgtcttccatattccattcttcttttcctaacttctaaatatgaaatatcactcaggatttagacctgggccatttcctcttttccttttatatagtttgtctatgtggtctcatcaatgtccaagatatcatatttatgcatacaaccttccaatttaaacattatctggccag

SEQ ID NO: 582820 - DNA, 461 bp, Homo sapiens
ttatttgacattcaagacctagaatattatataggctagtgaatattatccttcatgtctggagtacgaaaaggagcgtaaatggtgaaattgctggttttttgttatctgactaagtgtattaatcaaatccagtgaacgtttctgtctgcatcgtattcaagatctttgcagcttttgacgccaatgatcactctcttattgaaacacttgtcttttttttttttttttaattctgaggcaccacttactggttttcttcttccctcactgcttcttcctttcttgtcttccatattccattcttcttttcctaacttctaaatatgaaatatcactcaggatttaracctgggccatttcctcttttccttttatatagtttgtctatgtggtctcatcaatgtccaagatatcatatttatgcatacaaccttccaatttaaacattatctggccag

SEQ ID NO: 582821 - DNA, 377 bp, Homo sapiens
aacagggcaagaccctgtctctttaaaaataataaaataaaataaaagctgcttgggcaaactgttaaacrtttgcttctattcctgagatacccaactggtccagaattttttttagaatacattactagatttactattattttattttagatgtttgtatctaagcttagtttggcctccaattttcttggattataatgatcttaaatatttatattgcatttatgttagcctcacaaaatgaattgaaggtgttccctctttttccattctctgaaattattttgatatgatagtgcttatttatatgttctttgaatgtttggtagaactttcatattaaagtatctcatactagtgggtgttttctatga

SEQ ID NO: 582822 - DNA, 585 bp, Homo sapiens
cctattttattattcttttcaaagaatcagcatttggttttgtgaatcttgcctattgtttctttgttttatagtttattaatgtctatttctacttttagccttattkcctttaatttattttatttaggtttactccaatttttttttttttttagacagagtcttgctctgttgcccaggctgcaatgcagtggcccaatctcggctcactgcaacctctgcctccctggctcaagcaattcttctgcctcagcctcccgagtagctgggattataggcacccaccaccacacccagctaatttttgtattttcagtagagacaggagtttcaccatgttggccaagctggtcttgaactcccgacctcaggtaatccgccctccttgacctcccaaagtgctgggattacaggcctgagccaccatgcccaatctctttttctctttccaaacttcctaaggtggacacttaactaattttcagcctatttttcaatataaaaatttaaagatataaattaccctttcagtactgcctcagctttatctcacaagttttgttatgtagtatttcacttcca

SEQ ID NO: 582823 - DNA, 585 bp, Homo sapiens
cctattttattattcttttcaaagaatcagcatttggttttgtgaatcttgcctattgtttctttgttttatagtttattaatgtctatttctacttttagccttattgcctttaatttattttatttaggtttactccaatttttttttttttttagacagagtcttgctctgttgcccaggctgcaatgcagtggcccaatctcggctcactgcaacctctgcctccctggctcaagcaattcttctgcctcagcctcccgagtagctgggattataggcacccaccaccacacccagctaatttttgtattttcagtagagacaggagtttcaccatgttggccaagctggtcttgaactcccgacctcaggtaatccgccctccttgacctcccaaagtgctgggattacaggcctgagccaccatgcccaatctctttttctctttcyaaacttcctaaggtggacacttaactaattttcagcctatttttcaatataaaaatttaaagatataaattaccctttcagtactgcctcagctttatctcacaagttttgttatgtagtatttcacttcca

SEQ ID NO: 582824 - DNA, 327 bp, Homo sapiens
aggcaatattaagtactctaaattcattcttacttagcaagattgttttggctattctaggtatttttgtatttctatataattttagaatcagcttgtcartttttccaataatctttctagacttttggcaggaattgcagttaatttgtagatcaattgacatctaacaatattgagtcatctaatccattaacatgatatatctctccatttatttaggcatttatctgagtgatgttttttagttttcagtgcaaagttttcacacttattttattaaatttattcctaattattattgctatagtttgagtgtctctacca

SEQ ID NO: 582825 - DNA, 327 bp, Homo sapiens
aggcaatattaagtactctaaattcattcttacttagcaagattgttttggctattctaggtatttttgtatttctatataattttagaatcagcttgtcagtttttccaataatctttctagacttttggcaggaattgcagttaatttgtagatcaattgacatctaacaatattgagtcatctaatccattaacatgatatatctctccatttatttaggcatttatctgagtgatgttttttagttttcagtgcaaagktttcacacttattttattaaatttattcctaattattattgctatagtttgagtgtctctacca

SEQ ID NO: 582826 - DNA, 442 bp, Homo sapiens
agattagcactgagagaagaaagccagttgacaattattgagacaatttttttaaaggccctgaagacatttcagaaatttttgaggttgcctctccagaggtttaggaggacagaatggttttaagagacagaacccatgcatcactgccctgtgctgttttgagatcctgctccccaawttctggcacagccctcagcagccaccccagccatggcacaatcatactcaggtgtggctcaggctgccattccacaagatacaaaccataaaccttggtggcacgcagtcatggatcaagcagcctcagataccgctcatgacagcactctggagggtgcaagtggtaagccttgatggcttttacagccatgtggtagttgctttgcagatgtgcagaatacaagagaagtggaggcatggtggctgctatctagatttt

SEQ ID NO: 582827 - DNA, 442 bp, Homo sapiens
agattagcactgagagaagaaagccagttgacaattattgagacaatttttttaaaggccctgaagacatttcagaaatttttgaggttgcctctccagaggtttaggaggacagaatggttttaagagacagaacccatgcatcactgccctgtgctgttttgagatcctgctccccaaattctggcacagccctcagcagccaccccagccatggcacaatcatactcaggtgtggctcaggctgccattccacaagatacaaaccataaaccttggtggcacgcagtcatggatcaagcagcctcagatacmgctcatgacagcactctggagggtgcaagtggtaagccttgatggcttttacagccatgtggtagttgctttgcagatgtgcagaatacaagagaagtggaggcatggtggctgctatctagatttt

SEQ ID NO: 582828 - DNA, 442 bp, Homo sapiens
agattagcactgagagaagaaagccagttgacaattattgagacaatttttttaaaggccctgaagacatttcagaaatttttgaggttgcctctccagaggtttaggaggacagaatggttttaagagacagaacccatgcatcactgccctgtgctgttttgagatcctgctccccaaattctggcacagccctcagcagccaccccagccatggcacaatcatactcaggtgtggctcaggctgccattccacaagatacaaaccataaaccttggtggcacgcagtcatggatcaagcagcctcagataccgctcatgacagcactctggagggtgcaagyggtaagccttgatggcttttacagccatgtggtagttgctttgcagatgtgcagaatacaagagaagtggaggcatggtggctgctatctagatttt

SEQ ID NO: 582829 - DNA, 294 bp, Homo sapiens
gatgcactgctaaagccctcaccagaagctaagcagatactggtgccatgcttcttgaacttcccagtctggagaaacrtgagctaaataaacctctttatacagtctcaggtgttctattataacaacataaaacaaactaagacatttatttttgatgctattgtgattggaattgttttctttatttcatctttgtattgtttgttgctactatatatataaccgatttttgtatattgatcatatactctacaaacttactaagccccctcttagttctagtaagtctgg

SEQ ID NO: 582830 - DNA, 406 bp, Homo sapiens
atatggttttgtcctttattctgttaatatagtttattacattgatttttggatgttaagtcaacctcacattcctgagataaacttcatttgattatggtataaaatccttttcatgttactcaattacatttgctaatatttggttaagaatttttatgtctaggttcacaagggatattggtatatagctgtgttttcttgtaatgtctttgtcttgttttgatatcagggtaatattgatatcaaatgaartaaagttagttgggaagtttccttcatcctctatttgctgaataaagtttttgtaacattggtattatttcctcccttaatagtttgatagaattcaccagtgaagtatattttttctctacaggaagatttgaaattactgatgcaattt

SEQ ID NO: 582831 - DNA, 237 bp, Homo sapiens
gtttattatgaacttctcctggttgatcacattgatacctgtgtactgtttsatccacttccagggatccacatcatacttagcaaattctttgactatatcagggcaaatgtaacagtatttctccttaatgacttttgtggtctccagtgactgctcaagagggattcctacctccctctcccttagcagttgttgaatgaaatacacagtatcacctacaatcaggatgtgatt

SEQ ID NO: 582832 - DNA, 534 bp, Homo sapiens
tttgtaaccaacgtttattatgaacttctcctggttgatcacattgatacctgtgtactgtttcatccacttccagggatccacatcatacttagcaaattctttgactatatcagggcaaatgtaacagtatttctccttaatgrcttttgtggtctccagtgactgctcaagagggattcctacctccctctcccttagcagttgttgaatgaaatacacagtatcacctacaatcaggatgtgattgatgcagctcccaattacataaccttctacaactgggagaacaagggtgactccatctcctttgtcaatgactatactcattaacatatattcacccacttgttgagatgtccaagatacttccaaggctagtacctcctgaactgcaatgtagaatcctggtacattaaataattcaaacataatttctgcaaaaatgttctgtattttctagtgtattcagtggaagttctgtcattaaaaaataatggtcctcagattctgctcaaagatatttaaaaacca

SEQ ID NO: 582833 - DNA, 534 bp, Homo sapiens
tttgtaaccaacgtttattatgaacttctcctggttgatcacattgatacctgtgtactgtttcatccacttccagggatccacatcatacttagcaaattctttgactatatcagggcaaatgtaacagtatttctccttaatgacttttgtggtctccagtgactgctcaagagggattcctacctccctctcccttagyagttgttgaatgaaatacacagtatcacctacaatcaggatgtgattgatgcagctcccaattacataaccttctacaactgggagaacaagggtgactccatctcctttgtcaatgactatactcattaacatatattcacccacttgttgagatgtccaagatacttccaaggctagtacctcctgaactgcaatgtagaatcctggtacattaaataattcaaacataatttctgcaaaaatgttctgtattttctagtgtattcagtggaagttctgtcattaaaaaataatggtcctcagattctgctcaaagatatttaaaaacca

SEQ ID NO: 582834 - DNA, 590 bp, Homo sapiens
tctcccttagcagttgttgaatgaaatacacagtatcacctacaatcaggatgtgattgatgcagctcccaattacataaccttctacaactgggagaacaagggtgactccatctcctttgtcaatgactatactcattaacatatattcacccacttgttgagatgtccaagatacttccaaggctagtacctcctgaactgcaatgtagaatcctggtacattaaataattcaaacataatttctgcaaaaatgttctgtattttctagtgtattcagtggaagttctgtcattraaaaataatggtcctcagattctgctcaaagatatttaaaaaccacttgctccatgaacctttccataatatcccagtcttcagtgattccatgtcatattgaccactttgtagcatacatagatttatcaatggcttcatcctgtatgaaaaagtcaagctcatcaactcccctcaacattctcccttgggctttgtcaactacctttgctgactctctgatagaaatgcatgaaagaatagtaaactatggctcagtgttgcctgcacagccaagctcggaatatctgct

SEQ ID NO: 582835 - DNA, 590 bp, Homo sapiens
tctcccttagcagttgttgaatgaaatacacagtatcacctacaatcaggatgtgattgatgcagctcccaattacataaccttctacaactgggagaacaagggtgactccatctcctttgtcaatgactatactcattaacatatattcacccacttgttgagatgtccaagatacttccaaggctagtacctcctgaactgcaatgtagaatcctggtacattaaataattcaaacataatttctgcaaaaatgttctgtattttctagtgtattcagtggaagttctgtcattamaaaataatggtcctcagattctgctcaaagatatttaaaaaccacttgctccatgaacctttccataatatcccagtcttcagtgattccatgtcatattgaccactttgtagcatacatagatttatcaatggcttcatcctgtatgaaaaagtcaagctcatcaactcccctcaacattctcccttgggctttgtcaactacctttgctgactctctgatagaaatgcatgaaagaatagtaaactatggctcagtgttgcctgcacagccaagctcggaatatctgct

SEQ ID NO: 582836 - DNA, 590 bp, Homo sapiens
tctcccttagcagttgttgaatgaaatacacagtatcacctacaatcaggatgtgattgatgcagctcccaattacataaccttctacaactgggagaacaagggtgactccatctcctttgtcaatgactatactcattaacatatattcacccacttgttgagatgtccaagatacttccaaggctagtacctcctgaactgcaatgtagaatcctggtacattaaataattcaaacataatttctgcaaaaatgttctgtattttctagtgtattcagtggaagttctgtcattaaaaaataatggtcctcagattctgctcaaagatatttaaaaaccacttgctccatgaacctttccataatatcccagtcttcagtgaytccatgtcatattgaccactttgtagcatacatagatttatcaatggcttcatcctgtatgaaaaagtcaagctcatcaactcccctcaacattctcccttgggctttgtcaactacctttgctgactctctgatagaaatgcatgaaagaatagtaaactatggctcagtgttgcctgcacagccaagctcggaatatctgct

SEQ ID NO: 582837 - DNA, 590 bp, Homo sapiens
tctcccttagcagttgttgaatgaaatacacagtatcacctacaatcaggatgtgattgatgcagctcccaattacataaccttctacaactgggagaacaagggtgactccatctcctttgtcaatgactatactcattaacatatattcacccacttgttgagatgtccaagatacttccaaggctagtacctcctgaactgcaatgtagaatcctggtacattaaataattcaaacataatttctgcaaaaatgttctgtattttctagtgtattcagtggaagttctgtcattaaaaaataatggtcctcagattctgctcaaagatatttaaaaaccacttgctccatgaacctttccataatatcccagtcttcagtgattccatgtcatattgaccactttgtagcatacatagatttatcaatggcttcatcctgtatgaaaaagtcaagctcatcaactcccctcaacattctcccttgggctttgtcaactacctttgctgactctctgayagaaatgcatgaaagaatagtaaactatggctcagtgttgcctgcacagccaagctcggaatatctgct

SEQ ID NO: 582838 - DNA, 596 bp, Homo sapiens
ttctgtattttctagtgtattcagtggaagttctgtcattaaaaaataatggtcctcagattctgctcaaagatatttaaaaaccacttgctccatgaacctttccataatatcccagtcttcagtgattccatgtcatattgaccactttgtagcatacatagatttatcaatggcttcatcctgtatgaaaaagtcaagctcatcaactcccctcaacattctcccttgggctttgtcaactacctttgctgactctctgatagaaatgcatgaaagaatagtaaactatggctcagtgttgcctgcacagccaagctcggaatatctgctgaggtgatcacagggctgagacccagagcagtgggtgcagctcaatctccaggtatgggctggatgtcaggggctgagagcaaggcaatggaggagccagggcgggcactgagtggcccttacctgatrccacagtctgccacacaggaaggcaggaaccccgccatgcttggaatacacaacacttagccctactggccaccgtggagcaccctgccaccatccacttggcaacccactcaccccatacaccctgtctcctg

SEQ ID NO: 582839 - DNA, 598 bp, Homo sapiens
cagcagtattgttatagttattgcctataataatcagatgattttttaaaaaaagagatgaaatcagaatacacacacacacacatacacacatacaatcttttgtacttacaaatttatttaccatttcccatgccgtttattacttataggttcaagttgccatctgktgtcatatccttttatcttaaaagcattttctttagtgtttctttagcaaggttaagttctttttatttttatttatctggaaatgtctttatttcagctccatttttgaaggatcgtttaactggatacagaattcttaattgacagttatttttccctccacttttgaaatgtcgcttcataaggcctccatttttttcagataaaaatgccagtattgataacattattgttcccctgtatgtgataagtcatctcttgctactttcatgattttcttattatccttggttttcaccaatttgacaaggatggctctaggtgtgaatctctttgtgtttatcctacttgagatttgttggacttcttatatctgaagattaatgtttttcatagcatttttgaagttttcagacattatgttttc

SEQ ID NO: 582840 - DNA, 564 bp, Homo sapiens
gcaattaatactcaagtcttacttcatttttactttttgtcatactctcttgagtctttcttgcacttccatacttttccaattggccatatgtgtggagaacttttctcaaactttctatgattctctcctttccaggatttctctctctctctctctctttttttttaggaatactcagggttttaaattattatagtgaatggatacaaagcaaaattagcaaagggaaaaagttgwatgtggtaaagtctggaggataccaggcacaagcttcctggaatcatctcttgtggagttacaaggatgtgtttctctttcccagcatgaaattttgacagcacatgtgcaatgtcgtctaccaggaccagagtctcattagagactcagtactcaggattttatggaggttgctctccttcacatgtaccagaattccagactcccagaggaaaagcagctgttcagagtaaaccacattgtttgtatgaactgtttaggcacagtgagccactcttctcagtgagagaattggaacttggaactggaaaactctagccttgc

SEQ ID NO: 582841 - DNA, 580 bp, Homo sapiens
gtcatttataaatgacagaaaagaaggaaatttcaaggtccttaaagtaaatatattttataaatacatatagataaatacatatatatgtcaaggtacttaaatgaaaattgaacataggaraaaaatagaagttataaaatgaaaaatggggcatgtatagatgaaaaataaatattttaaataaaaattccatgagattgaataagtaatggattttaccctaacatcagaaaatttatagaacaaaatagaagctttacaaactaaaggacaaagggtaaactaaaataagaaagccagaaactcactgatacgtcagacaatatgcagcagtgtaacatacatgtaattaatatctcaaaaaggatgggtaaaggaattacaggtgaataaagaatggtacactcattcctgagggcaccgaggagggaggatagctttagatttctaagggagggtattatccattcatgaaggtccaaccccatgaccaaacacctcccagtaagccccacctgcaacattggggatcaaattttaacatgagattggaaggggcaatcattcaaaccatagc

SEQ ID NO: 582842 - DNA, 301 bp, Homo sapiens
aggattaacatatttgttaaatgcacaaatacgttctttcacaaatattagtttaataattttatattaagctccctctatacttacaatatgaattagataattgagaataarcattccagtggaaaaaaactaaacaatttgttgtaaaacatccttaaaagcatcagaaagttaatacagcaatgaagaattacaggaccaaattaagaatggtatggaagcctgtttgtgaggcttatgtttgggttatctctttacttagagagactataaatctcaaaagaggattaaagggaga

SEQ ID NO: 582843 - DNA, 488 bp, Homo sapiens
  misc_feature 476, 477, 478, 479, 480, 481, 482, 483, 484, 485, 486, 487,488: n = A,T,C or G
aggattaacatatttgttaaatgcacaaatacgttctttcacaaatattagtttaataattttatattaagctccctctatacttacaatatgaattagataattgagaataagcattccagtggaaaaaaactaaacaatttgttgtaaaacatccttaaaagcatcagaaagttaatacagcaatgaagaattacaggaccaaattaagaatggtatggaagcctgtttgtgaggcttatgtttgggttatctctttacttagagagactataaatstcaaaagaggattaaagggagaaataaccatatcaactcacatggtaagggtatgcaaacatctcttagtaatggagaaaattgaaagaaaagaaaaaagagaaagggagaaagagaaacagagcgaaagggataatgaaggagagaaagaagaagagaagggaagaggaagaaaagtaaaaaggaggaggagggannnnnnnnnnnnn

SEQ ID NO: 582844 - DNA, 587 bp, Homo sapiens
ccttggatatgaactccctttggagctttgcaacaagcagtttcttaaaggcaaaaaagggtccagaagtgggatgatccaaagaggtttgtcacaaattctcattggcttatggaaataacatttattagtgactggctatacactgttacactawtattgggtgtggattatagtgtctggagtggcgttattggttaatttatagctactgtggcaacagcaagcagcctagatgaacacacagctcaaagaggagcaggacagaactgccgtctcatttgaatatctctctgggcctgattatttaaaaggacttgcatttctcacatgaaagttattttcttttctcaatgtccataaatgagaataaatagatgtaaaatagatcttttcgaggatgaagtaaatggaatgaaaaacaaaacccaagctgaccagaaatcatagagggaagaaaaggttataaatatatggatttttcaaagtgattttaagctattaggaatcagttaaatgttgggggattttgtctgagaatgggctaaaggagaatgtcccttttgccttctgaagtttccctgaaa

SEQ ID NO: 582845 - DNA, 394 bp, Homo sapiens
tctcattggcttatggaaataacatttattagtgactggctatacactgttacactaatattgggtgtgkattatagtgtctggagtggcgttattggttaatttatagctactgtggcaacagcaagcagcctagatgaacacacagctcaaagaggagcaggacagaactgccgtctcatttgaatatctctctgggcctgattatttaaaaggacttgcatttctcacatgaaagttattttcttttctcaatgtccataaatgagaataaatagatgtaaaatagatcttttcgaggatgaagtaaatggaatgaaaaacaaaacccaagctgaccagaaatcatagagggaagaaaaggttataaatatatggatttttcaaagtgatt

SEQ ID NO: 582846 - DNA, 394 bp, Homo sapiens
tctcattggcttatggaaataacatttattagtgactggctatacactgttacactaatattgggtgtggattatagtgtctggagtggcgttattggttaatttatagctactgtggcaacwgcaagcagcctagatgaacacacagctcaaagaggagcaggacagaactgccgtctcatttgaatatctctctgggcctgattatttaaaaggacttgcatttctcacatgaaagttattttcttttctcaatgtccataaatgagaataaatagatgtaaaatagatcttttcgaggatgaagtaaatggaatgaaaaacaaaacccaagctgaccagaaatcatagagggaagaaaaggttataaatatatggatttttcaaagtgatt

SEQ ID NO: 582847 - DNA, 394 bp, Homo sapiens
tctcattggcttatggaaataacatttattagtgactggctatacactgttacactaatattgggtgtggattatagtgtctggagtggcgttattggttaatttatagctactgtggcaacagcaagcagcctagatgaacacacagctcaaagaggagcaggacagaactgcygtctcatttgaatatctctctgggcctgattatttaaaaggacttgcatttctcacatgaaagttattttcttttctcaatgtccataaatgagaataaatagatgtaaaatagatcttttcgaggatgaagtaaatggaatgaaaaacaaaacccaagctgaccagaaatcatagagggaagaaaaggttataaatatatggatttttcaaagtgatt

SEQ ID NO: 582848 - DNA, 587 bp, Homo sapiens
ccttggatatgaactccctttggagctttgcaacaagcagtttcttaaaggcaaaaaagggtccagaagtgggatgatccaaagaggtttgtcacaaattctcattggcttatggaaataacatttattagtgactggctatacactgttacactaatattgggtgtggattatagtgtctggagtggcgttattggttaatttatagctactgtggcaacagcaagcagcctagatgaacacacagctcaaagaggagcaggacagaactgccgtctcatttgaatatctctctgggcctgattatttaaaaggacttgcatttctcacatgaaagttattttcttttctcaatgtccataaatgagaataaatagaygtaaaatagatcttttcgaggatgaagtaaatggaatgaaaaacaaaacccaagctgaccagaaatcatagagggaagaaaaggttataaatatatggatttttcaaagtgattttaagctattaggaatcagttaaatgttgggggattttgtctgagaatgggctaaaggagaatgtcccttttgccttctgaagtttccctgaaa

SEQ ID NO: 582849 - DNA, 612 bp, Homo sapiens
tttgttcagccctatgaggtgtgctactgtattagtccattttcacaccaccggtaaagacatgcccaagactgggtaatttctagaagaaagaggtttaatacaygcacagttccacatggctgggtaggcctcacaatcatggcgcaaggtgaaaggcacgtctcacatggcagcagacaagacaagagagcttgtgcagggaaactcctctttataaaaccatcagatcttgtgagacttattcactatcagaagaacagcatgggaaatacctgcccccatgattcaattacctcccacctgttccctcccacaacatgtgggaattcaagatgagatttggctggggacacagctaaaccctctcttcagctaccctcttctctctggatctgtgagtaataaacctacttctgtgatttcccatgtttggttctgtggcctccatgtgtctgagctgacctacactggaacctaactctcctcctggccagggtctctgagagtggctcttgtcagaaatacacagggcacaggtcaggcaacagtcaccaggcatctcctagtctcaacagatgttctgtgagagggaggcctggtcgtgggatg

SEQ ID NO: 582850 - DNA, 612 bp, Homo sapiens
tttgttcagccctatgaggtgtgctactgtattagtccattttcacaccaccggtaaagacatgcccaagactgggtaatttctagaagaaagaggtttaatacatgcacagttccacatggctgggtaggcctcacaatcatggcgcaagstgaaaggcacgtctcacatggcagcagacaagacaagagagcttgtgcagggaaactcctctttataaaaccatcagatcttgtgagacttattcactatcagaagaacagcatgggaaatacctgcccccatgattcaattacctcccacctgttccctcccacaacatgtgggaattcaagatgagatttggctggggacacagctaaaccctctcttcagctaccctcttctctctggatctgtgagtaataaacctacttctgtgatttcccatgtttggttctgtggcctccatgtgtctgagctgacctacactggaacctaactctcctcctggccagggtctctgagagtggctcttgtcagaaatacacagggcacaggtcaggcaacagtcaccaggcatctcctagtctcaacagatgttctgtgagagggaggcctggtcgtgggatg

SEQ ID NO: 582851 - DNA, 612 bp, Homo sapiens
tttgttcagccctatgaggtgtgctactgtattagtccattttcacaccaccggtaaagacatgcccaagactgggtaatttctagaagaaagaggtttaatacatgcacagttccacatggctgggtaggcctcacaatcatggcgcaaggtgaaaggcacgtctcacatggcagcagacaagacaagagagcttgtgcagggaaactcctctttataaaaccatcagatcttgtgagacttattcactatcagaagaacagcatgggaaakacctgcccccatgattcaattacctcccacctgttccctcccacaacatgtgggaattcaagatgagatttggctggggacacagctaaaccctctcttcagctaccctcttctctctggatctgtgagtaataaacctacttctgtgatttcccatgtttggttctgtggcctccatgtgtctgagctgacctacactggaacctaactctcctcctggccagggtctctgagagtggctcttgtcagaaatacacagggcacaggtcaggcaacagtcaccaggcatctcctagtctcaacagatgttctgtgagagggaggcctggtcgtgggatg

SEQ ID NO: 582852 - DNA, 490 bp, Homo sapiens
tcttgtgagacttattcactatcagaagaacagcatgggaaatacctgcccccatgattcaattacctcccacctgttccctcccacaacatgtgggaattcaagatgagatttggctggggacacagctaaaccctctcttcagctaccctcttctctctggatctgtgagtaataaacctacttctgtgatttcccatgtttggttctgtggcctccatgtgtctgagctgacctacactggaacctaactctcctcctggccagggtctctgagagtggctcttgtcagaaatacacaggrcacaggtcaggcaacagtcaccaggcatctcctagtctcaacagatgttctgtgagagggaggcctggtcgtgggatgcacacctggccactgctggagtaaggaagtgtcctgtgaaagggacatgttaagcatccacaaccccctgaccagaaccccagaaaggcagggctccaattgatggtc

SEQ ID NO: 582853 - DNA, 490 bp, Homo sapiens
tcttgtgagacttattcactatcagaagaacagcatgggaaatacctgcccccatgattcaattacctcccacctgttccctcccacaacatgtgggaattcaagatgagatttggctggggacacagctaaaccctctcttcagctaccctcttctctctggatctgtgagtaataaacctacttctgtgatttcccatgtttggttctgtggcctccatgtgtctgagctgacctacactggaacctaactctcctcctggccagggtctctgagagtggctcttgtcagaaatacacagggcacaggtcaggcaacagtcaccaggcatctcctagtctcaacagatgttctgtgagagggaggcctggtcgtgggatgcacacctggccactgctggagtaaggaagtgtcctgtgaaaggsacatgttaagcatccacaaccccctgaccagaaccccagaaaggcagggctccaattgatggtc

SEQ ID NO: 582854 - DNA, 645 bp, Homo sapiens
tttttctagttttccgtgcaattctatcaytgtttcatctttactcctaccagagtaattttccaaaatagatatcttgtcattcttcctgttgttatcagtaaataagtgaaatgaaaagctagattatataatttatctagaacaagaaagtagaattgaatctatattcattaatgagactaaccagtcaattacacagataggcattttacattttgaagatcatatggacccattgtcagaaatattattatttatgtctatatggacatcacctgtgcatatttacatagaaatcaatgagagctgatttttatttttattatatatattttttgagatagggtcttgctttgttgcccaggctggagtgcagtggtgcaatcactgctcactgcagcctcagcctcccaagctcaagcaatccttccaccttggcctcccaaatagctaggacaacaggtgcacatcaccatgcccactttttttttttttttaaacttttgatagagactgggtctttctatgttgcccaggttgcttttgaactcctgggctcaaggaatcctctcatttcagcctcttcaactgctggtattacaagcatgagccaccatatgggctggaagctgatttttaaaa

SEQ ID NO: 582855 - DNA, 458 bp, Homo sapiens
tttgggcagggctgcagtctttctgagggctatgtggcagaatctattacttgattttttccagcatccagaggccacctttattccttggaacatgacctcattcttatatcctatttttcttttcttttcttttttttttttttttgagatggagtctccttctttcacccaggctggagtgcagtggcatgatctcagctcactgcaacctctgcctcccgggttcaagtgattcttctgcctcagcttcctgagtagcttggactacaggcacttgccaccatgcccagttaattttttgtatttttagtagggatggggtttcaccatgttacccaggatggtctcgatctcctgacytcgtgatccacccaccccagcctcccaaagtgctgggattaggcgtgagccactgcgctgggtcctcattcttgtatcttaaaagtcagtgatgt

SEQ ID NO: 582856 - DNA, 594 bp, Homo sapiens
ttgaaatctaatttcacactgccgtgcaacctaacatatttgtatgttagactctgggaattaggacatgaaaatttttgrgaggccattcttttgcctacagcagacataatctatttaacctgcagattaaagcgttctttatttttctgtctccctgtcttaatttttttaaaataatatgaattgtagtaaagagaaagaaagaaaagaaaacaaagaaagaaaaagaaggaaggaaagaaggaaggaaggaaagaaagaagaaggaaaagaaggaggaaatgagggaaggaagggagggagggaggaagggagaaaggcaggaagggagaaaaaagaaaacatgaacacaagaaagaaagaaggaaggaaagaaagaaagaaagagaaagagagaaagaaagaaaggaggaagggaggaagaaaaggaggaagagagaatggtaaaagggaggaaggcaaagaaacaaagaaaataaagaggcgaaggaaggaaggaaggaaaaagaggaaaggaagggagggaggaaggaagaaaaggagggcgggaggaagggagaaaaaaggaaagaaagcaagaacgtgagaaag

SEQ ID NO: 582857 - DNA, 414 bp, Homo sapiens
tagttcacctttgatttctttcatgttttacctcacgtatttggaggctctgttgttagctgcataccctaattagtaggatgtttacatcttcttgagaattgattattctattatctctcatctctgatactatttcttgttccgaactctgttgtgtctaatatcaatgtagtccttccacagccttattttagtgtttccatgatatggctttctccatatcttgatgataacctatttatatctctatatatttggagcaagatataaaatttagacttgaytttttaaagatttttcaaagatgtttcaagatggaattcttatttctttttgttctatttgacattctctgagttttctatatctgaagtttgattttctgtcacttcttttagaatatttttggca

SEQ ID NO: 582858 - DNA, 414 bp, Homo sapiens
tagttcacctttgatttctttcatgttttacctcacgtatttggaggctctgttgttagctgcataccctaattagtaggatgtttacatcttcttgagaattgattattctattatctctcatctctgatactatttcttgttccgaactctgttgtgtctaatatcaatgtagtccttccacagccttattttagtgtttccatgatatggctttctccatatcttgatgataacctatttatatctctatatatttggagcaagatataaaatttagacttgattttttaaagatttttcaaagatgtttcaagatggaattcttatttctttttgttctatttgacattctctgagtttyctatatctgaagtttgattttctgtcacttcttttagaatatttttggca

SEQ ID NO: 582859 - DNA, 414 bp, Homo sapiens
tagttcacctttgatttctttcatgttttacctcacgtatttggaggctctgttgttagctgcataccctaattagtaggatgtttacatcttcttgagaattgattattctattatctctcatctctgatactatttcttgttccgaactctgttgtgtctaatatcaatgtagtccttccacagccttattttagtgtttccatgatatggctttctccatatcttgatgataacctatttatatctctatatatttggagcaagatataaaatttagacttgattttttaaagatttttcaaagatgtttcaagatggaattcttatttctttttgttctatttgacattctctgagttttctatatytgaagtttgattttctgtcacttcttttagaatatttttggca

SEQ ID NO: 582860 - DNA, 414 bp, Homo sapiens
tagttcacctttgatttctttcatgttttacctcacgtatttggaggctctgttgttagctgcataccctaattagtaggatgtttacatcttcttgagaattgattattctattatctctcatctctgatactatttcttgttccgaactctgttgtgtctaatatcaatgtagtccttccacagccttattttagtgtttccatgatatggctttctccatatcttgatgataacctatttatatctctatatatttggagcaagatataaaatttagacttgattttttaaagatttttcaaagatgtttcaagatggaattcttatttctttttgttctatttgacattctctgagttttctatatctgaagtttgatwttctgtcacttcttttagaatatttttggca

SEQ ID NO: 582861 - DNA, 549 bp, Homo sapiens
tgctcccaaattcagtgttgatgagagcccatttcatggttcatagatggtgccttctttctatgtcctcacacagtggaaggcacacaagaactccattgagcttcttttataaaggcacyaatccgattcataagagctcagcccccaagacctggtcacctcccaagtgttctgctctccctgatctgtatcatatacagactctcttggattccttaccaattgcttgagagatcatagtgggtttgtggagaaaaagttttcaagatgatggatctttcccaacttttgcagctgtcagcggtctcccaatctgaccagccccactttgtctttaggaatttattgattattccagctttacttgtcatagtggtgtctatttgcatctgtcctatgtaagtgcatctgtcctctttctccttgcaggtgcttgttttccctcacattttgactcagttcttggcaacctcgttgctataaaaataaagtcatgactttgaagttagtttggttctttcattgttgtcaggttaggaaccctat

SEQ ID NO: 582862 - DNA, 549 bp, Homo sapiens
tgctcccaaattcagtgttgatgagagcccatttcatggttcatagatggtgccttctttctatgtcctcacacagtggaaggcacacaagaactccattgagcttcttttataaaggcactaatccgattcataagrgctcagcccccaagacctggtcacctcccaagtgttctgctctccctgatctgtatcatatacagactctcttggattccttaccaattgcttgagagatcatagtgggtttgtggagaaaaagttttcaagatgatggatctttcccaacttttgcagctgtcagcggtctcccaatctgaccagccccactttgtctttaggaatttattgattattccagctttacttgtcatagtggtgtctatttgcatctgtcctatgtaagtgcatctgtcctctttctccttgcaggtgcttgttttccctcacattttgactcagttcttggcaacctcgttgctataaaaataaagtcatgactttgaagttagtttggttctttcattgttgtcaggttaggaaccctat

SEQ ID NO: 582863 - DNA, 549 bp, Homo sapiens
tgctcccaaattcagtgttgatgagagcccatttcatggttcatagatggtgccttctttctatgtcctcacacagtggaaggcacacaagaactccattgagcttcttttataaaggcactaatccgattcataagagctcrgcccccaagacctggtcacctcccaagtgttctgctctccctgatctgtatcatatacagactctcttggattccttaccaattgcttgagagatcatagtgggtttgtggagaaaaagttttcaagatgatggatctttcccaacttttgcagctgtcagcggtctcccaatctgaccagccccactttgtctttaggaatttattgattattccagctttacttgtcatagtggtgtctatttgcatctgtcctatgtaagtgcatctgtcctctttctccttgcaggtgcttgttttccctcacattttgactcagttcttggcaacctcgttgctataaaaataaagtcatgactttgaagttagtttggttctttcattgttgtcaggttaggaaccctat

SEQ ID NO: 582864 - DNA, 511 bp, Homo sapiens
agagcccatttcatggttcatagatggtgccttctttctatgtcctcacacagtggaaggcacacaagaactccattgagcttcttttataaaggcactaatccgattcataagagctcagcccccaagacctggtcacctcccaagtgttctgctctccctgatctgtatcatatacagactctcttggattccttaccaattgcttgagagatcatagtgggtttgtggagaaaaagttttcaagatgatggatctttcccaacttytgcagctgtcagcggtctcccaatctgaccagccccactttgtctttaggaatttattgattattccagctttacttgtcatagtggtgtctatttgcatctgtcctatgtaagtgcatctgtcctctttctccttgcaggtgcttgttttccctcacattttgactcagttcttggcaacctcgttgctataaaaataaagtcatgactttgaagttagtttggttctttcattgttgtca

SEQ ID NO: 582865 - DNA, 642 bp, Homo sapiens
tttcatcacatctcctcatcatttcaactcattgcatctcatatcatcatttccatttcattattccatttcatcatttcatttcattatttcatttcattatgtcatttcatctcrtcacatttcatctcatctcatatcatcatttcatctcatctcatcatttcatctcatttcatctcattatttcatctgatttcatgtcatcatatcatgccatcatttcatctcatttcatcacatctcatctcatcatttaatctcatcatttaatctcatttcatctcatctcatcatttcatcatttcatctcatcatttcttctcatctcatcattgccatttcattatttcatcatttcatttcatcatttcattatttcatttcatctcatttcattattgcatttcattatgtcatttcatttcatcacatttcattacatctcatttcatttcatctcatttcatctcatttcatctcatctcatcccatttcatctcatcatttcatctcatttcatctcatcatttcatctcatctcatttcaatttcattacatttcataatttcctttcattatttcatttcatctcatttcattatttcatctcatttcatctcatttttcatctcattttt

SEQ ID NO: 582866 - DNA, 444 bp, Homo sapiens
ttgcttttagtatattcacaatgttccagggcaatttcatcatgtcccttccaaaawcccattatgcataaagtggttacaccctattctgcttccctgagccctaatgaccactaatctaatttacatcccaattgatttgccaattcctgatgtttcatgtgaataaaatcaagcaatatttgtccttttgtgcacttaacataatgctttcaaatttcaccaatattataccatatataagtacttcattctttgttatagctgaaaatttggtgtccagttatgagtcaacaagcatatggattgtttccactttttgactgtatgaatattactgctgtaaatattcatgcacatgtttattttttgagcacctatgttttgtaagattaacagctgacttaagagaaacaatggaaagcaagaggcagtagaataata

SEQ ID NO: 582867 - DNA, 639 bp, Homo sapiens
ccattatgcataaagtggttacaccctattctgcttccctgagccctaatgaccactaatctaatttacatcccaattgatttgccaattcctgatgtttcatgtgaataaaatcaagcaatatttgtccttttgtgcacttaacataatgctttcaaatttcaccaatattataccatatataagtacttcattctttgttatagctgaaaatttggtgtccagttatgagtcaacaagcatatggattgtttccactttttgactgtatgaatattactgctgtaaatattcatgcacatgtttattttttgagcacctatgttttgtaagattaacagctgacttaagagaaacaatggaargcaagaggcagtagaataatatattcaaaagatgcaaaggaaaaaaaactctcagccacgaattccttatccagcaattatttttcaaaaatgaagataacacaaagacttacccagataaacagaaatattagctgaagttgttgctggcagacctaccacattaaaaaaaaaaaaactctaaaataaattcctaaggctaaaagcaagttacagaagacagtcacttgaatccacatttttaaaaaagcactggtataggtaatattgacat

SEQ ID NO: 582868 - DNA, 554 bp, Homo sapiens
atactcataacacacaatatagactattaaaaatgtgaataggattttaaaaatttatattgtagtaaaaagggggtcaacgctttaggaagacatagctattacaatcatgtatgcacagatatgagctaaattgtttcctctatatagatgctgcaattcyaaccactgaatatgacctcattaggaaataggttctttacagctgatcaagttaagatacaatcagatgagcctgaattcagtatgactgatgtccttattaaaagaagaaatttgagtagagggagacatacacacagggagagtaccatgtgattatgagggcagagattagccaaggaatgccaaagactgccactaaaccatcagaagtgagaaacaaggcatagaacaggctttctctcatagccctggaagggaccatccctgctgacacctcaatctcagacttttagcttccaggactataagactataaatgtatgttgttcatggcacccagtttgtgttacttggttatggcagccctagaaaactaatacatgaactaa

SEQ ID NO: 582869 - DNA, 554 bp, Homo sapiens
atactcataacacacaatatagactattaaaaatgtgaataggattttaaaaatttatattgtagtaaaaagggggtcaacgctttaggaagacatagctattacaatcatgtatgcacagatatgagctaaattgtttcctctatatagatgctgcaattccaaccactgaatatgacctcattaggaaataggttctttrcagctgatcaagttaagatacaatcagatgagcctgaattcagtatgactgatgtccttattaaaagaagaaatttgagtagagggagacatacacacagggagagtaccatgtgattatgagggcagagattagccaaggaatgccaaagactgccactaaaccatcagaagtgagaaacaaggcatagaacaggctttctctcatagccctggaagggaccatccctgctgacacctcaatctcagacttttagcttccaggactataagactataaatgtatgttgttcatggcacccagtttgtgttacttggttatggcagccctagaaaactaatacatgaactaa

SEQ ID NO: 582870 - DNA, 554 bp, Homo sapiens
atactcataacacacaatatagactattaaaaatgtgaataggattttaaaaatttatattgtagtaaaaagggggtcaacgctttaggaagacatagctattacaatcatgtatgcacagatatgagctaaattgtttcctctatatagatgctgcaattccaaccactgaatatgacctcattaggaaataggttctttacagctgatcaagttaagatacaatcagatgagcctgaattcagtatgactgatgtccttattaaaagaagaaatttgagtagagggagacatacacacagggagagtaccatgtgattatgagggcagagattagccaaggaatgccaaagactgccactaaaccatcagaagygagaaacaaggcatagaacaggctttctctcatagccctggaagggaccatccctgctgacacctcaatctcagacttttagcttccaggactataagactataaatgtatgttgttcatggcacccagtttgtgttacttggttatggcagccctagaaaactaatacatgaactaa

SEQ ID NO: 582871 - DNA, 439 bp, Homo sapiens
ctgactggtctgggggatacctaaaggactcatgaaaggcttttgtttttctgtgttgctagaatacagatcagataaggaatggacattatcgagagactctgcaaggagacctaacaaaccacagatgcttagggcaaaaattagagtttacacatatagtagatcatcttcagcacaggaagaaaagttggagaagagtatttggaaaactaagacattcaaaatcattcacgtacatgggagagtctagaaagtcacatgyatgcataggttaagccacatgctgacaaatgtcataagaagaccctacacttttaccttggccgatccctcccctcagtgcaagctctgtgcaagagtgaacttgaacttcactcagtgcaagagtgaacacacactttgtgccggctttaaagaacccagcacaaagccagtc

SEQ ID NO: 582872 - DNA, 408 bp, Homo sapiens
aaattattttaacaaatgttggtctataaagtcttttttcataagaagctttcactaaacaaaatctcatttcaacagattgtcccactggactttgaactctattatattttatatgtcatcataggttggattataaacaatttcatcttttataaaatattattgtatattttaattattaaaagatcaattttactgtgattaaatagytaatgctaccttcctgaactttcctaatacatagtataataatagtgtcctattagtgttttcccattaactttttgatatgaactgtttgattaacttaataagtataaatacaatactaacatgccaaagaaaataacttaaaaactgcataattcattttaaaagggagaacttttcaattttctccttggt

SEQ ID NO: 582873 - DNA, 408 bp, Homo sapiens
aaattattttaacaaatgttggtctataaagtcttttttcataagaagctttcactaaacaaaatctcatttcaacagattgtcccactggactttgaactctattatattttatatgtcatcataggttggattataaacaatttcatcttttataaaatattattgtatattttaattattaaaagatcaattttactgtgattaaatagttaatgctaccttcctgaactttcctaatacatagtataataatagtgtcctattagtgttttcccattaactttttgatatgaactgtttgattaacttartaagtataaatacaatactaacatgccaaagaaaataacttaaaaactgcataattcattttaaaagggagaacttttcaattttctccttggt

SEQ ID NO: 582874 - DNA, 567 bp, Homo sapiens
ggttggggttccctctcccacagtcagtttcccacaaagggcggtgtctgcagcaagcccctccaatgagccccaagctkggtttccctccactccaccctgtcccagtgcagagatctgacctcagaggtagacacactgtcccagaggtagtctaggaatggagatcctgtgcgctctcacacacagggaacatctaaatgccatcgtggaagggtggtcaccgttccaggcttggctggctggggccgatagtgtgatacatttgaccccctcccagccctggatgcagacaccaagagcagagagacctggcagtagtcatgagcgcaccaccccacatccccagcacaatccaaagcagcccctcatccccaccgtgaccaccacagcctgaatccaggcgccacctgtttctgacctgaactccctcacagcccctgcctgcactccctccctccaacatcgcctgcccttcagtcttccagaaagcagctagagggctctgtctgtccaactacagaacagcctgcctcctccttgccctgttggacagctcacaccctt

SEQ ID NO: 582875 - DNA, 567 bp, Homo sapiens
ggttggggttccctctcccacagtcagtttcccacaaagggcggtgtctgcagcaagcccctccaatgagccccaagctgggtttccctccactccacsctgtcccagtgcagagatctgacctcagaggtagacacactgtcccagaggtagtctaggaatggagatcctgtgcgctctcacacacagggaacatctaaatgccatcgtggaagggtggtcaccgttccaggcttggctggctggggccgatagtgtgatacatttgaccccctcccagccctggatgcagacaccaagagcagagagacctggcagtagtcatgagcgcaccaccccacatccccagcacaatccaaagcagcccctcatccccaccgtgaccaccacagcctgaatccaggcgccacctgtttctgacctgaactccctcacagcccctgcctgcactccctccctccaacatcgcctgcccttcagtcttccagaaagcagctagagggctctgtctgtccaactacagaacagcctgcctcctccttgccctgttggacagctcacaccctt

SEQ ID NO: 582876 - DNA, 567 bp, Homo sapiens
ggttggggttccctctcccacagtcagtttcccacaaagggcggtgtctgcagcaagcccctccaatgagccccaagctgggtttccctccactccaccctgtcccagtgcagagatctgacctcagaggtagacacactgtcccagaggtrgtctaggaatggagatcctgtgcgctctcacacacagggaacatctaaatgccatcgtggaagggtggtcaccgttccaggcttggctggctggggccgatagtgtgatacatttgaccccctcccagccctggatgcagacaccaagagcagagagacctggcagtagtcatgagcgcaccaccccacatccccagcacaatccaaagcagcccctcatccccaccgtgaccaccacagcctgaatccaggcgccacctgtttctgacctgaactccctcacagcccctgcctgcactccctccctccaacatcgcctgcccttcagtcttccagaaagcagctagagggctctgtctgtccaactacagaacagcctgcctcctccttgccctgttggacagctcacaccctt

SEQ ID NO: 582877 - DNA, 567 bp, Homo sapiens
ggttggggttccctctcccacagtcagtttcccacaaagggcggtgtctgcagcaagcccctccaatgagccccaagctgggtttccctccactccaccctgtcccagtgcagagatctgacctcagaggtagacacactgtcccagaggtagtctaggaatggagatcctgtgcgctctcacacacagggaacatctaaatgccatcgtggaagggtggtcaccgttccaggcttggctggctggggccgatagtgtgatacatttgaccccctcccagccctggatgcagacaccaagagcagagagacctggcagtagtcatgagcgcaccaccccacatccccagcacaatccaaagcagcccctcatccccaccgtgaccaccacagcctgaatccaggcgccacctgtttctgacctgaactccctcacagcccctgcctgcactccctccctccaacatcrcctgcccttcagtcttccagaaagcagctagagggctctgtctgtccaactacagaacagcctgcctcctccttgccctgttggacagctcacaccctt

SEQ ID NO: 582878 - DNA, 556 bp, Homo sapiens
tacaggactaacactgagacctggttatgtaatggtgtagtactgagtatcatccccaaatagtgaggtttcattccaagaagactatgcatgtatctcatttgggaaaacagcttttgcaggtgtaaattaaggagcttgaaacagggagatggtcttagattaatcaactgggacttaaatgcaaactcaagtgtcctaaaaaaaacaagaggtagagagagatttagcatagactgaagtggagaaggcagtgtgaacacagagacagagattgcagtgatgtgtccacatcccgggagagagaagccaccagaagctggaagagctaaatcagactgctccctagagcttcagaaggagccagaactgatgactccaagatcttagcccagtgaaactgatctggacttctgaactatgagagattccattcctgttgtttgaagctaccacatttttgagaacttrttacagtagcccgaggacactaacacaaatggggctccgggaaaatccagactaaagttgttgtgttggtttgcaatctccttgc

SEQ ID NO: 582879 - DNA, 599 bp, Homo sapiens
cttttgcaggtgtaaattaaggagcttgaaacagggagatggtcttagattaatcaactgggacttaaatgcaaactcaagtgtcctaaaaaaaacaagaggtagagagagatttagcatagactgaagtggagaaggcagtgtgaacacagagacagagattgcagtgatgtgtccacatcccgggagagagaagccaccagaagctggaagagctaaatcagactgctccctagagcttcagaaggagccagaactgatgactccaagatcttagcccagtgaaactgatctggacttctgaactatgagagattccattcctgttgtttgaagctaccacatttttgagaacttattacagtagcccgaggacactaacacaaatggggctccgggaaaatccagactaaagttgttgtgttggtttgcaatctccttgcttaactttctgatactagaygtaaatagattgttgaaaaattttgtgattgaagaaatgtacatgaaacctacagtgtacagagaagcatctgttagttataagataaatattgataattttagttgaaaatgacatatgactgttaatatctcac

SEQ ID NO: 582880 - DNA, 576 bp, Homo sapiens
agcacatggctgatttgcataaaagtcacttggtcagcagttgttgaagctgaacttggaatctaggtctgtctgaccttaactatgttccttccacagagccacgttcattccatagaggaacccaccacctataaaaccaggaaagagacaaagccagaagtgcagggtggatttcttaacacaagctcactgcracctctagtcctcatcacgctgacactaagcttaaacccagacccttctacagttttgtctacaaagcacaatttgcccaaagcctttacaaacaccaacagcctttctttcagatatggcagcagggtcacatcttacacggccctgaccacattttgtctcctctgccatccccatctctctgactcagtcctcgcttgcagccataaaaaaggatgagttcatgtcctttgtagggacatggatgaagctggaaaccatcattctcagcaaactatcgcaaggacaaagaaaccaatcactgcatgttctcactcacaggtgggaattgaacaatgagaacacatggacacaggaaggggaacatcacacaccagg

SEQ ID NO: 582881 - DNA, 576 bp, Homo sapiens
agcacatggctgatttgcataaaagtcacttggtcagcagttgttgaagctgaacttggaatctaggtctgtctgaccttaactatgttccttccacagagccacgttcattccatagaggaacccaccacctataaaaccaggaaagagacaaagccagaagtgcagggtggatttcttaacacaagctcactgcaacctctagtcctcatcacgctgacactaagcttaaacccagacccttctacagttttgtctacaaagcacaatttgcccaaagcctttacaaacaccaacagcctttctttcagatatggcagcagggtcacatcttacacggccctgaccacattttgtctcctctgccatccccatctctctgactcagtcctcgcttgcagccataaaaaaggatgagttcatgtcctttgtagggacatggatgaagctggaaaccatcattctcagcaaactatcrcaaggacaaagaaaccaatcactgcatgttctcactcacaggtgggaattgaacaatgagaacacatggacacaggaaggggaacatcacacaccagg

SEQ ID NO: 582882 - DNA, 576 bp, Homo sapiens
agcacatggctgatttgcataaaagtcacttggtcagcagttgttgaagctgaacttggaatctaggtctgtctgaccttaactatgttccttccacagagccacgttcattccatagaggaacccaccacctataaaaccaggaaagagacaaagccagaagtgcagggtggatttcttaacacaagctcactgcaacctctagtcctcatcacgctgacactaagcttaaacccagacccttctacagttttgtctacaaagcacaatttgcccaaagcctttacaaacaccaacagcctttctttcagatatggcagcagggtcacatcttacacggccctgaccacattttgtctcctctgccatccccatctctctgactcagtcctcgcttgcagccataaaaaaggatgagttcatgtcctttgtagggacatggatgaagctggaaaccatcattctcagcaaactatcgcaaggacaaaraaaccaatcactgcatgttctcactcacaggtgggaattgaacaatgagaacacatggacacaggaaggggaacatcacacaccagg

SEQ ID NO: 582883 - DNA, 576 bp, Homo sapiens
agcacatggctgatttgcataaaagtcacttggtcagcagttgttgaagctgaacttggaatctaggtctgtctgaccttaactatgttccttccacagagccacgttcattccatagaggaacccaccacctataaaaccaggaaagagacaaagccagaagtgcagggtggatttcttaacacaagctcactgcaacctctagtcctcatcacgctgacactaagcttaaacccagacccttctacagttttgtctacaaagcacaatttgcccaaagcctttacaaacaccaacagcctttctttcagatatggcagcagggtcacatcttacacggccctgaccacattttgtctcctctgccatccccatctctctgactcagtcctcgcttgcagccataaaaaaggatgagttcatgtcctttgtagggacatggatgaagctggaaaccatcattctcagcaaactatcgcaaggacaaagaaaccartcactgcatgttctcactcacaggtgggaattgaacaatgagaacacatggacacaggaaggggaacatcacacaccagg

SEQ ID NO: 582884 - DNA, 415 bp, Homo sapiens
gtgcagggtggatttcttaacacaagctcactgcaacctctagtcctcatcacgctgacactaagcttaaacccagacccttctacagttttgtctacaaagcacaatttgcccaaagcctttacaaacaccaacagcctttctttcagatatggcagcagggtcacatcttacacggccctgaccacattttgtctcctctgccatccccatctctctgactcagtcctcgcttgcagccataaaaaaggatgagttcatgtcctttgtagggacatggatgaagctggaaaccatcattctcagcaaactatcgcaaggacaaagaaaccaatcactgcatgttctcactcacaggtgggaattgaacaatgagaacayatggacacaggaaggggaacatcacacaccaggg

SEQ ID NO: 582885 - DNA, 527 bp, Homo sapiens
ccatcattctcagcaaactatcgcaaggacaaagaaaccaatcactgcatgttctcactcacaggtgggaattgaacaatgagaacacatggacacaggaaggggaacatcacacaccagggcctgtcgtggggtggggggagggatagcattaggaggtacacctaatgtaaatgacgagttaatgggtgcagcacaccaacatggcacatgtatacatatgtaacaaacctgcacgttgtgcacatgtaccctagaacttaaagaacaataataataataataaaaagaatrggtcttgtacatctaatttgccctacaaatgttaaaacagcaaacccgcatccccttcctcttctcatgtgctgtgagggatgacctccaggctctcagataccaagactgtacaagacctaacccagagaattactcaagacactttctacgtaagaagaattgtggtgctagctcccctcatagaaaaatgttttctgtctcttgttgaaattgacagcaaacacaaaaac

SEQ ID NO: 582886 - DNA, 527 bp, Homo sapiens
ccatcattctcagcaaactatcgcaaggacaaagaaaccaatcactgcatgttctcactcacaggtgggaattgaacaatgagaacacatggacacaggaaggggaacatcacacaccagggcctgtcgtggggtggggggagggatagcattaggaggtacacctaatgtaaatgacgagttaatgggtgcagcacaccaacatggcacatgtatacatatgtaacaaacctgcacgttgtgcacatgtaccctagaacttaaagaacaataataataataataaaaagaataggtcttgtacatctaatttgccctacaaatgttaaaacagcaaacccgcatccccttcctcttctcatgtgctgtgagggatgacctccaggctctcagataccaagaytgtacaagacctaacccagagaattactcaagacactttctacgtaagaagaattgtggtgctagctcccctcatagaaaaatgttttctgtctcttgttgaaattgacagcaaacacaaaaac

SEQ ID NO: 582887 - DNA, 299 bp, Homo sapiens
catctaatttgccctacaaatgttaaaacagcaaacccgcatccccttcctcttctcatgtgctgtgagggatgacctccaggctctcagataccaagactgtacaagacctaacccagagaattactcaagacactttctacgtaagaagaattgtggtgctagctcycctcatagaaaaatgttttctgtctcttgttgaaattgacagcaaacacaaaaacacagaactatttgggagaacagaggacagtgatacactagggaagtaaaacacaccccttccccttgcattggtt

SEQ ID NO: 582888 - DNA, 432 bp, Homo sapiens
gcaggaggtttgtgcacaggctgcactaccttggtctggccactggtagtcgtgcatgagaactactccctggagtatttctcagtccactgacactgatgtaattggctccacttcccctgctgttgagccaggccgacacgccctgggcaaaggcatctgtgtgaagtattgaggtgcaaatcagtrcttaagatatgtttggaggcaaaatactttttcatctacatgggcagtgtcttggcagaagatggagattctctctaaatggatgtgagacagggtggctggcatctgggtcaggatgatgccctggtgcatggcaagaacatgcattgggcagcagctgccctcgctaaggagagaggttcactgacctggcttttcccccctcacctgctctccagaaagccagactctagggcagatgct

SEQ ID NO: 582889 - DNA, 379 bp, Homo sapiens
ggtattaccagtcagctctccatgctggagaaccataagaaattataccaaaggcaggaaaggggatagaatatggggatcatcacgccaagaataaggtgcagcccatttagcccctgggtcttaaagagacccatagctctggataatggcagatctatgcgtgacacagttatcatctttgtgcatcttcagagaattgtttttccttttactcctaggaacaatgtcttaagtttgttagtaaattctattgaatttattaaagatgcttctcataaattctttttatattcatttcaaraaagaagcaatttcacactgacagagacattgttattatagcactaaatacttttacactcatcaaattcctttg

SEQ ID NO: 582890 - DNA, 591 bp, Homo sapiens
attaaggttggagttcttttgttggttttggggtttctggatttggctgctaaatatgattagatcccaaaatgctaaggactctacttttaatagtgtagagaatattgacagttcttggcatgaaaggtttaaagagctatgcaaaacaaattcatttgacactaatgaatcatcsctcgtgagaggcaaggagtttagcgactctgtacctaatacccttgacaaacaccttgcaaaatagatttgtgaggacagcacctgcatctttgaagagccctgtaaaggctcttctctgtatgtcagatctaatggtgagaactgcagtcactcagttacaaaagttaaatacaatttggaataattggatcctgaagtggcaggggccaagtggtagcactcaaccctcaaaggcacggtgggcgtagctaccgtaatgggcagaaaagacaaagcagcaatctgaacagtctgactcatgtagagctctggcattggctaactaatcacagtgttcctagaagtgaaactgacaggaagactaatgcattcctacttaatttacgtaaggaggaaacttaaggtcaaaca

SEQ ID NO: 582891 - DNA, 591 bp, Homo sapiens
attaaggttggagttcttttgttggttttggggtttctggatttggctgctaaatatgattagatcccaaaatgctaaggactctacttttaatagtgtagagaatattgacagttcttggcatgaaaggtttaaagagctatgcaaaacaaattcatttgacactaatgaatcatccctcgtgagaggcaaggagtttagygactctgtacctaatacccttgacaaacaccttgcaaaatagatttgtgaggacagcacctgcatctttgaagagccctgtaaaggctcttctctgtatgtcagatctaatggtgagaactgcagtcactcagttacaaaagttaaatacaatttggaataattggatcctgaagtggcaggggccaagtggtagcactcaaccctcaaaggcacggtgggcgtagctaccgtaatgggcagaaaagacaaagcagcaatctgaacagtctgactcatgtagagctctggcattggctaactaatcacagtgttcctagaagtgaaactgacaggaagactaatgcattcctacttaatttacgtaaggaggaaacttaaggtcaaaca

SEQ ID NO: 582892 - DNA, 452 bp, Homo sapiens
gaaggagaaatttccagatgtgcggttatatactgattcatggrctgtagccaatggtttggctggatggtcagggacttggaagaagcatgattggaaaattggtgacaaagaaacttggagaaagagtatgtagatggacctctctgagtggtcaaaaactgaagatatttgtaccctgtgtgagtgttgaccaacaagtgacttcagcagaggaggattttgataatcaagtggataagatgacccgttctgtggataccactcagcctctttcctcagacacccctgtcattgtccaatgagcccatgaacatagtggccatggtggcagggatggaggctatgcatggattcagcaatgtggacttccactcaccaaggctgaactgtctgtggccactgctgagtgcccaatttgccagcagcagcagcagagactaacagtgaac

SEQ ID NO: 582893 - DNA, 327 bp, Homo sapiens
aacatagtggccatggtggcagggatggaggctatgcatggattcagcaatgtggacttccactcaccaaggctgaactgtctgtggccactgctgagtgcccaatttgccagcagcagcagcagagactaacagtgaaccctttgtatggcgtcatttcctggggtgatsgaccagctacccggtagcaggttgattatattggaactcttccaccatggaaaggagagaggtttgtcctcattggaacaggcacttactcaggatatgggcttgcctacctgcatgcaatgcttctgccaagactaccatttatggactcaagga

SEQ ID NO: 582894 - DNA, 549 bp, Homo sapiens
tgtcccaggatcatttattgaaaagactgttgttttcccagtgtatgttcttgatgcctttgtcagagatgagttgtttgtaaatgtgtagatttgtctgygatctctattctgtccactgtcctatgtgtctgtttttatgccagtagaagtatattggcaataattagtacagaaaatctgaaacaatgaaatgacaaaagtgaattatactgatataattcattatgctcactaaatgcaatagcatacagctaggaaaacaatgtagtgcacacggtattaaaatacaacacaattcaatatacacagtgctcacagtggccatcgttagagtgttgaagaaggggatgtagtcagcaaaagttgtacaggtgacttcaaaagtaatcataagcacttatgattacttttggcttaatttcttaaaccaagactggagacacaggtgttcattatgtgcttattatatatataaaatcaatattttataaatatattgtttctgttcagtatttaataaagtaaatcaatagaaaaggttaaaaa

SEQ ID NO: 582895 - DNA, 549 bp, Homo sapiens
tgtcccaggatcatttattgaaaagactgttgttttcccagtgtatgttcttgatgcctttgtcagagatgagttgtttgtaaatgtgtagatttgtctgcgatctctattctgtccactgtcctatgtgtctgtttttatgccagtagaagtatattggcaataattagtacagaaaakctgaaacaatgaaatgacaaaagtgaattatactgatataattcattatgctcactaaatgcaatagcatacagctaggaaaacaatgtagtgcacacggtattaaaatacaacacaattcaatatacacagtgctcacagtggccatcgttagagtgttgaagaaggggatgtagtcagcaaaagttgtacaggtgacttcaaaagtaatcataagcacttatgattacttttggcttaatttcttaaaccaagactggagacacaggtgttcattatgtgcttattatatatataaaatcaatattttataaatatattgtttctgttcagtatttaataaagtaaatcaatagaaaaggttaaaaa

SEQ ID NO: 582896 - DNA, 549 bp, Homo sapiens
tgtcccaggatcatttattgaaaagactgttgttttcccagtgtatgttcttgatgcctttgtcagagatgagttgtttgtaaatgtgtagatttgtctgcgatctctattctgtccactgtcctatgtgtctgtttttatgccagtagaagtatattggcaataattagtacagaaaatctgaaacaatgaaatgacaaaagtgaattatactgatataattcattatgctcacyaaatgcaatagcatacagctaggaaaacaatgtagtgcacacggtattaaaatacaacacaattcaatatacacagtgctcacagtggccatcgttagagtgttgaagaaggggatgtagtcagcaaaagttgtacaggtgacttcaaaagtaatcataagcacttatgattacttttggcttaatttcttaaaccaagactggagacacaggtgttcattatgtgcttattatatatataaaatcaatattttataaatatattgtttctgttcagtatttaataaagtaaatcaatagaaaaggttaaaaa

SEQ ID NO: 582897 - DNA, 552 bp, Homo sapiens
gtctgtttttatgccagtagaagtatattggcaataattagtacagaaaatctgaaacaatgaaatgacaaaagtgaattatactgatataattcattatgctcactaaatgcaatagcatacagctaggaaaacaawgtagtgcacacggtattaaaatacaacacaattcaatatacacagtgctcacagtggccatcgttagagtgttgaagaaggggatgtagtcagcaaaagttgtacaggtgacttcaaaagtaatcataagcacttatgattacttttggcttaatttcttaaaccaagactggagacacaggtgttcattatgtgcttattatatatataaaatcaatattttataaatatattgtttctgttcagtatttaataaagtaaatcaatagaaaaggttaaaaagcaatgcacacatatttcaaatattttttgctccaaattatataaacattgcatagttattgccctgggcctggcaaggtgactcacacctctcatcctagcactttaggagactgaggcaggacgatagct

SEQ ID NO: 582898 - DNA, 552 bp, Homo sapiens
gtctgtttttatgccagtagaagtatattggcaataattagtacagaaaatctgaaacaatgaaatgacaaaagtgaattatactgatataattcattatgctcactaaatgcaatagcatacagctaggaaaacaatgtagtgcacacggtattaaaatacaacacaattcaatatacacagtgctcacagtggccatcgttagagtgttgaagaaggggatgtagtcagcaaaagttgtacaggtgacttcaaaagtaatcataagcacttatgattacttttggcttaatttcttaaaccaagactggagacacaggtgttcattatgtgcttattatatatataaaatmaatattttataaatatattgtttctgttcagtatttaataaagtaaatcaatagaaaaggttaaaaagcaatgcacacatatttcaaatattttttgctccaaattatataaacattgcatagttattgccctgggcctggcaaggtgactcacacctctcatcctagcactttaggagactgaggcaggacgatagct

SEQ ID NO: 582899 - DNA, 552 bp, Homo sapiens
gtctgtttttatgccagtagaagtatattggcaataattagtacagaaaatctgaaacaatgaaatgacaaaagtgaattatactgatataattcattatgctcactaaatgcaatagcatacagctaggaaaacaatgtagtgcacacggtattaaaatacaacacaattcaatatacacagtgctcacagtggccatcgttagagtgttgaagaaggggatgtagtcagcaaaagttgtacaggtgacttcaaaagtaatcataagcacttatgattacttttggcttaatttcttaaaccaagactggagacacaggtgttcattatgtgcttattatatatataaaatcaatattttataaatatattgtttctrttcagtatttaataaagtaaatcaatagaaaaggttaaaaagcaatgcacacatatttcaaatattttttgctccaaattatataaacattgcatagttattgccctgggcctggcaaggtgactcacacctctcatcctagcactttaggagactgaggcaggacgatagct

SEQ ID NO: 582900 - DNA, 552 bp, Homo sapiens
gtctgtttttatgccagtagaagtatattggcaataattagtacagaaaatctgaaacaatgaaatgacaaaagtgaattatactgatataattcattatgctcactaaatgcaatagcatacagctaggaaaacaatgtagtgcacacggtattaaaatacaacacaattcaatatacacagtgctcacagtggccatcgttagagtgttgaagaaggggatgtagtcagcaaaagttgtacaggtgacttcaaaagtaatcataagcacttatgattacttttggcttaatttcttaaaccaagactggagacacaggtgttcattatgtgcttattatatatataaaatcaatattttataaatatattgtttctgttcagtatttaataaagtaaatcartagaaaaggttaaaaagcaatgcacacatatttcaaatattttttgctccaaattatataaacattgcatagttattgccctgggcctggcaaggtgactcacacctctcatcctagcactttaggagactgaggcaggacgatagct

SEQ ID NO: 582901 - DNA, 555 bp, Homo sapiens
tgtgtctgtttttatgccagtagaagtatattggcaataattagtacagaaaatctgaaacaatgaaatgacaaaagtgaattatactgatataattcattatgctcactaaatgcaatagcatacagctaggaaaacaatgtagtgcacacggtattaaaatacaacacaattcaatatacacagtgctcacagtggccatcgttagagtgttgaagaaggggatgtagtcagcaaaagttgtacaggtgacttcaaaagtaatcataagcacttatgattacttttggcttaatttcttaaaccaagactggagacacaggtgttcattatgtgcttattatatatataaaatcaatattttataaatatattgtttctgttcagtatttaataaagtaaatcaatagaaaaggttaaaaagcaatgcacacrtatttcaaatattttttgctccaaattatataaacattgcatagttattgccctgggcctggcaaggtgactcacacctctcatcctagcactttaggagactgaggcaggacgatagct

SEQ ID NO: 582902 - DNA, 555 bp, Homo sapiens
tgtgtctgtttttatgccagtagaagtatattggcaataattagtacagaaaatctgaaacaatgaaatgacaaaagtgaattatactgatataattcattatgctcactaaatgcaatagcatacagctaggaaaacaatgtagtgcacacggtattaaaatacaacacaattcaatatacacagtgctcacagtggccatcgttagagtgttgaagaaggggatgtagtcagcaaaagttgtacaggtgacttcaaaagtaatcataagcacttatgattacttttggcttaatttcttaaaccaagactggagacacaggtgttcattatgtgcttattatatatataaaatcaatattttataaatatattgtttctgttcagtatttaataaagtaaatcaatagaaaaggttaaaaagcaatgcacacatatttcaaatattttttgctccaaattatataaacattgcatagttwttgccctgggcctggcaaggtgactcacacctctcatcctagcactttaggagactgaggcaggacgatagct

SEQ ID NO: 582903 - DNA, 602 bp, Homo sapiens
acatctccagccatttaagggtaaaaacagaaaacgtatgatgtgtttacktactgttttatactcctaacgcatgaagagaagatccttttattcattgcctatacttttatttctaaactttctgtaacactttatcttatatccagcatagaattgagatttgctttttgatttaatctgacaatattttttcctctaataagagtcaagcccacttacttttaatgataaattgtgtttggttatattttgattacagtatattatgctatgatttatatgcacatatctgtcttttgctgtcttgtttgtttttattgcttttgttttgatgttgtgatatttggaagagttaaacttttattctgatgactaccttatgtaatttcataaaatcatcgctttctttagacagtagctaatgtctctagactaagaacaatggtattagctgtattctctttcttgtccttcctatgtgatttttcatcccacaatttgatttaatcatattaactttgattcccctggtgccattaagtatgcttacatttctataaacaatatcctttgactcccaggcattacagatgagcagt

SEQ ID NO: 582904 - DNA, 602 bp, Homo sapiens
acatctccagccatttaagggtaaaaacagaaaacgtatgatgtgtttacgtactgttttatactcctaacgcatgaagagaagatccttttattcattgcctatacttttatttctaaactttctgtaacactttatcttatatccagcatagaattgagatttgctttttgatttaatctgacaatattttttcctctaataagagtcaagcccacttacttttaatgataaattgtgtttggttatattttgattacagtatattatgctatgatttatatgcacatatctgtcttttgctgtcttgtttgtttttattgcttttgttttgatgttgtgatatttggaagagttaaacttttattctgatgrctaccttatgtaatttcataaaatcatcgctttctttagacagtagctaatgtctctagactaagaacaatggtattagctgtattctctttcttgtccttcctatgtgatttttcatcccacaatttgatttaatcatattaactttgattcccctggtgccattaagtatgcttacatttctataaacaatatcctttgactcccaggcattacagatgagcagt

SEQ ID NO: 582905 - DNA, 602 bp, Homo sapiens
acatctccagccatttaagggtaaaaacagaaaacgtatgatgtgtttacgtactgttttatactcctaacgcatgaagagaagatccttttattcattgcctatacttttatttctaaactttctgtaacactttatcttatatccagcatagaattgagatttgctttttgatttaatctgacaatattttttcctctaataagagtcaagcccacttacttttaatgataaattgtgtttggttatattttgattacagtatattatgctatgatttatatgcacatatctgtcttttgctgtcttgtttgtttttattgcttttgttttgatgttgtgatatttggaagagttaaacttttattctgatgactaccttatgtaatttcataaaatcatckctttctttagacagtagctaatgtctctagactaagaacaatggtattagctgtattctctttcttgtccttcctatgtgatttttcatcccacaatttgatttaatcatattaactttgattcccctggtgccattaagtatgcttacatttctataaacaatatcctttgactcccaggcattacagatgagcagt

SEQ ID NO: 582906 - DNA, 602 bp, Homo sapiens
acatctccagccatttaagggtaaaaacagaaaacgtatgatgtgtttacgtactgttttatactcctaacgcatgaagagaagatccttttattcattgcctatacttttatttctaaactttctgtaacactttatcttatatccagcatagaattgagatttgctttttgatttaatctgacaatattttttcctctaataagagtcaagcccacttacttttaatgataaattgtgtttggttatattttgattacagtatattatgctatgatttatatgcacatatctgtcttttgctgtcttgtttgtttttattgcttttgttttgatgttgtgatatttggaagagttaaacttttattctgatgactaccttatgtaatttcataaaatcatcgctttctttagacagtagctaatgtctctagactaagaacaatggtattagctgtattctctttcttgtcctycctatgtgatttttcatcccacaatttgatttaatcatattaactttgattcccctggtgccattaagtatgcttacatttctataaacaatatcctttgactcccaggcattacagatgagcagt

SEQ ID NO: 582907 - DNA, 416 bp, Homo sapiens
tattagctgtattctctttcttgtccttcctatgtgatttttcatcccacaatttgatttaatcatattaactttgattcccctggtgccattaagtatgcttacatttctataaacaatatcctttgactcccaggcattacagatgagcagtcagtaaaatcattctgagaaatactttctctttccttttcttccatttttcttagttgtatcatttctatattgccagagcacstacagttgcatttctttctgtcagctttatccagcatttgtttttgtcttttatttgaagttaaatatattccttgctcactacaacactgggggaagggaggtttctgttgtcattgttgtgcttgtacagttgtttagttaaaaacattggcgaaaacaaaaactgtatgtagatg

SEQ ID NO: 582908 - DNA, 453 bp, Homo sapiens
agctgtattctctttcttgtccttcctatgtgatttttcatcccacaatttgatttaatcatattaactttgattcccctggtgccattaagtatgcttacatttctataaacaatatcctttgactcccaggcattacagatgagcagtcagtaaaatcattctgagaaatactttctctttccttttcttccatttttcttagttgtatcatttctatattgccagagcacctacagttgcatttctttctgtcagctttatccagcatttgtttttgtcttttatttgaagttaaatatattccttgctcactacaacactgggggaagggaggtttctgttgtcattgttgtgcttgtacagttgtttagttaaaaacattggcgaaaacaaaaactgtrtgtagatggaatggagataagacagaaaatgagagagactgatgatgag

SEQ ID NO: 582909 - DNA, 681 bp, Homo sapiens
attgttgtgcttgtacagttgtttagttaaaaacattggcgaaaacaaaaactgtatgtagatggaatggagataagacagaaaatgagagagactgatgatgagtgtgcctattctagactgggaggcrtgctacactgagtagtgtctcaaggccgcaggaaaggatggttgattgtgagcaggtggactttccactggaggagagaagtcctgcgctcaacaacctgtgcagaaccagaaactggtaatgcttcaaatcaacttacagacctggaggtagaaatttaagaaaactcgtttagcacctagttacctagaaaatattagcaactatttgctgagcatctgtcagtctgcctgtagcatggaagacctgagtacaggggaaactggattagtaacagtgggtcagaaaattatataatattcaaccaaaattcctgctttacatacacagcacctggtatttccagaactagaaggtaaagaaattatttgtgcttgaacttgcagaaaactgccttttcccttcttctcttgcatcttaacctggagcttcccttttcttgagcctcagtgtgcttcccaactcaatttataattgacttcctgcagtttctccttaggacagggctttgttttgggggtggttaatttgtagggttcataggaaacaga

SEQ ID NO: 582910 - DNA, 681 bp, Homo sapiens
attgttgtgcttgtacagttgtttagttaaaaacattggcgaaaacaaaaactgtatgtagatggaatggagataagacagaaaatgagagagactgatgatgagtgtgcctattctagactgggaggcgtgctacactgagtagtgtctcaaggccgcaggaaaggatggttgattgtgagcaggtggactttccactggaggagagaagtcctgcgctcaacaacctgtgcagaaccagaaactggtaatgcttcaaatcaacttacagacctggaggtagaaatttaagaaaactcgtttagcacmtagttacctagaaaatattagcaactatttgctgagcatctgtcagtctgcctgtagcatggaagacctgagtacaggggaaactggattagtaacagtgggtcagaaaattatataatattcaaccaaaattcctgctttacatacacagcacctggtatttccagaactagaaggtaaagaaattatttgtgcttgaacttgcagaaaactgccttttcccttcttctcttgcatcttaacctggagcttcccttttcttgagcctcagtgtgcttcccaactcaatttataattgacttcctgcagtttctccttaggacagggctttgttttgggggtggttaatttgtagggttcataggaaacaga

SEQ ID NO: 582911 - DNA, 681 bp, Homo sapiens
attgttgtgcttgtacagttgtttagttaaaaacattggcgaaaacaaaaactgtatgtagatggaatggagataagacagaaaatgagagagactgatgatgagtgtgcctattctagactgggaggcgtgctacactgagtagtgtctcaaggccgcaggaaaggatggttgattgtgagcaggtggactttccactggaggagagaagtcctgcgctcaacaacctgtgcagaaccagaaactggtaatgcttcaaatcaacttacagacctggaggtagaaatttaagaaaactcgtttagcacctagttwcctagaaaatattagcaactatttgctgagcatctgtcagtctgcctgtagcatggaagacctgagtacaggggaaactggattagtaacagtgggtcagaaaattatataatattcaaccaaaattcctgctttacatacacagcacctggtatttccagaactagaaggtaaagaaattatttgtgcttgaacttgcagaaaactgccttttcccttcttctcttgcatcttaacctggagcttcccttttcttgagcctcagtgtgcttcccaactcaatttataattgacttcctgcagtttctccttaggacagggctttgttttgggggtggttaatttgtagggttcataggaaacaga

SEQ ID NO: 582912 - DNA, 681 bp, Homo sapiens
attgttgtgcttgtacagttgtttagttaaaaacattggcgaaaacaaaaactgtatgtagatggaatggagataagacagaaaatgagagagactgatgatgagtgtgcctattctagactgggaggcgtgctacactgagtagtgtctcaaggccgcaggaaaggatggttgattgtgagcaggtggactttccactggaggagagaagtcctgcgctcaacaacctgtgcagaaccagaaactggtaatgcttcaaatcaacttacagacctggaggtagaaatttaagaaaactcgtttagcacctagttacctagaaaatattagcwactatttgctgagcatctgtcagtctgcctgtagcatggaagacctgagtacaggggaaactggattagtaacagtgggtcagaaaattatataatattcaaccaaaattcctgctttacatacacagcacctggtatttccagaactagaaggtaaagaaattatttgtgcttgaacttgcagaaaactgccttttcccttcttctcttgcatcttaacctggagcttcccttttcttgagcctcagtgtgcttcccaactcaatttataattgacttcctgcagtttctccttaggacagggctttgttttgggggtggttaatttgtagggttcataggaaacaga

SEQ ID NO: 582913 - DNA, 479 bp, Homo sapiens
tcccagggccattaaacatttttttctttcctttccttcttccaaaaaaattggtgattcgcctgggtccctgtggtttaacctcacaaaaggtccatgatgacaccctgttacattgttttgtcatagttaataccttgttatcccagttgctcagtcagtttttgtgagagattcagggatattaataaaactgtgctgctgctgctgctaacatcttgcayaaaagccctattaattaaaatgtttattttgcatgtgattttgaacttgtaatttttattcaaagtttttcaacagagatccagaaaagaccctcgttatatttttagttttgtgcattgcaacactttttagtgaaaaaaaaaaatacatgagaacaacacaagtgattttaaaagaataaacctacaatccattaattataaaatgaaatactatgcaggtgttaagaatgagggaatcaataagaacttgtg

SEQ ID NO: 582914 - DNA, 620 bp, Homo sapiens
tcctttccttcttccaaaaaaattggtgattcgcctgggtccctgtggtttaacctcacaaaaggtccatgatgacaccctgttacattgttttgtcatagttaataccttgttatcccagttgctcagtcagtttttgtgagagattcagggatattaataaaactgtgctgctgctgctgctaacatcttgcacaaaagccctattaattaaaatgtttattttgcatgtgattttgaacttgtaatttttattcaaagtttttcaacagakatccagaaaagaccctcgttatatttttagttttgtgcattgcaacactttttagtgaaaaaaaaaaatacatgagaacaacacaagtgattttaaaagaataaacctacaatccattaattataaaatgaaatactatgcaggtgttaagaatgagggaatcaataagaacttgtgtggggtaactataaacttaaaaaaaaagaattaatgctcatgtgaccatattatcgttaaaaaaatacaagcatacttgcacacaccttcaagcaaaatgggtacaagcatttaaaaatatttaaattaagtaaatggcccaataatttaacttcgtataattctatgt

SEQ ID NO: 582915 - DNA, 620 bp, Homo sapiens
tcctttccttcttccaaaaaaattggtgattcgcctgggtccctgtggtttaacctcacaaaaggtccatgatgacaccctgttacattgttttgtcatagttaataccttgttatcccagttgctcagtcagtttttgtgagagattcagggatattaataaaactgtgctgctgctgctgctaacatcttgcacaaaagccctattaattaaaatgtttattttgcatgtgattttgaacttgtaatttttattcaaagtttttcaacagagatccagaaaagaccctcrttatatttttagttttgtgcattgcaacactttttagtgaaaaaaaaaaatacatgagaacaacacaagtgattttaaaagaataaacctacaatccattaattataaaatgaaatactatgcaggtgttaagaatgagggaatcaataagaacttgtgtggggtaactataaacttaaaaaaaaagaattaatgctcatgtgaccatattatcgttaaaaaaatacaagcatacttgcacacaccttcaagcaaaatgggtacaagcatttaaaaatatttaaattaagtaaatggcccaataatttaacttcgtataattctatgt

SEQ ID NO: 582916 - DNA, 580 bp, Homo sapiens
tggatatccatatgcagaagaatgaaactagacctctgcctctcaccctatacaaagatcaactcaaagtatctcaaatacccaaatataagacccaaaatggtaaagctactagaagaaaacataggggagatccttcaggacattgctctgggaaaatattttatgaataaggcatcaaaagcacaggcagcaaaagaaaaaataaacaaatgggatcacatcaagctaaaaatcttctgcacagcaaaggaaataataaagtgagtgaaaaggcaatctacagaatgggagaaaatataaactcatctggcaggaaattaatatcaagaatatacaaggaattcaaacatatcaacagcaaagaagcacaacaatctaattaaatataaacaaatgctctgaacagacatttctcaaaagaagacatacaaatgaccaacaartatatgaaaaaatgttcaacaccactaatcagcaaggaaatgctaatcaaagccacagtgaggcatcatcttactccagttaggatggctattatagaagagacaaaaataacaaatgctgacaaagacgtgaa

SEQ ID NO: 582917 - DNA, 469 bp, Homo sapiens
gatatgctaattgccctgatctgatcaccatctacatgtactgaaacatccccgtagagccatgaatatgtataatctttgtcaatttaaaaagtaaaaaaaaaaaaaaattaatcttggagaatgcatttgaagracttgtactcaagaaatcaacttaagaacctgagtctccttggaatttgtgttttctagaccagtacttctccaaattaaagcaaatttaggctgggcatggtgtcccatgtctataatctcagcactttggaaggccgaggagggcagatcacttgaggtcaggagttcaagaccagctgacccaacattgtgaaaccctgtctctactaaaaatacaaaaattagccgggcatgatggcatgtgcctgtaatcccagctactttggaggccgaggcaagataatcgcttgaactggagaggtggaagttgcagtgagccgagattgcacca

SEQ ID NO: 582918 - DNA, 469 bp, Homo sapiens
gatatgctaattgccctgatctgatcaccatctacatgtactgaaacatccccgtagagccatgaatatgtataatctttgtcaatttaaaaagtaaaaaaaaaaaaaaattaatcttggagaatgcatttgaaggacttgtactcaagaaatcaacttaagaacctgagtctccttggaatttgtgttttctagaccagtacttctccaaattaaagcaaatttaggctgggcatggtgkcccatgtctataatctcagcactttggaaggccgaggagggcagatcacttgaggtcaggagttcaagaccagctgacccaacattgtgaaaccctgtctctactaaaaatacaaaaattagccgggcatgatggcatgtgcctgtaatcccagctactttggaggccgaggcaagataatcgcttgaactggagaggtggaagttgcagtgagccgagattgcacca

SEQ ID NO: 582919 - DNA, 469 bp, Homo sapiens
gatatgctaattgccctgatctgatcaccatctacatgtactgaaacatccccgtagagccatgaatatgtataatctttgtcaatttaaaaagtaaaaaaaaaaaaaaattaatcttggagaatgcatttgaaggacttgtactcaagaaatcaacttaagaacctgagtctccttggaatttgtgttttctagaccagtacttctccaaattaaagcaaatttaggctgggcatggtgtcccatgtctataatctcagcactttggaaggccgaggagggcagatcacttgaggtcaggagttcragaccagctgacccaacattgtgaaaccctgtctctactaaaaatacaaaaattagccgggcatgatggcatgtgcctgtaatcccagctactttggaggccgaggcaagataatcgcttgaactggagaggtggaagttgcagtgagccgagattgcacca

SEQ ID NO: 582920 - DNA, 252 bp, Homo sapiens
gctctcaggtgatactgatgctgcttatttttgcccaggttttgagtcacaaggttctaaattattgttttgaagtcctacatgagtaatcacttggrgagctcaattaacacccaggaacagactaattattaataaaccagaatcttcagtattaggcttcaatcattggcaattttttttttttgacacacagtctcccactgtcgcccaggctgaagtcctgaggccagaatgagattaggacatggt

SEQ ID NO: 582921 - DNA, 252 bp, Homo sapiens
gctctcaggtgatactgatgctgcttatttttgcccaggttttgagtcacaaggttctaaattattgttttgaagtcctacatgagtaatcacttggagagctcaattaacacccagsaacagactaattattaataaaccagaatcttcagtattaggcttcaatcattggcaattttttttttttgacacacagtctcccactgtcgcccaggctgaagtcctgaggccagaatgagattaggacatggt

SEQ ID NO: 582922 - DNA, 607 bp, Homo sapiens
cagatcatagaagggcgtgtatgctgtcctaaggagcttaaacttcaacttcagttcatgggagccaatgacaagatctgagcaggggaaggatgtggctagaggggcattttagacagacaagatcctctgtggattacacctaggctaagcaacgggttaaagttgttgtcttaagacaatagtccaggtaaaagataataaagttttaaattaggatgttagtaggaatgaggaagagggatggrtttcagaaatagtaaggaaatgtattagcaggacttgattagtgattgacttggggaaggaggggaagatagagttcaggatgactccgagactgtctggtgtcggtggctaatgactgaagctattaatagagggaggaaatgcagaccaaaagcaggcccggggtgagagatgataaatttgaattttaacatgttgagtttggacatccaggatgaaataaccacaaaacatttaaatatacgaatctgaaaaggtaagcatcataagcatatgagctattggtaaaattctgatacttaatgaagtcttgcagggaggcagtacagaggcaagcaatgggctggggataaaacat

SEQ ID NO: 582923 - DNA, 607 bp, Homo sapiens
cagatcatagaagggcgtgtatgctgtcctaaggagcttaaacttcaacttcagttcatgggagccaatgacaagatctgagcaggggaaggatgtggctagaggggcattttagacagacaagatcctctgtggattacacctaggctaagcaacgggttaaagttgttgtcttaagacaatagtccaggtaaaagataataaagttttaaattaggatgttagtaggaatgaggaagagggatgggtttcagmaatagtaaggaaatgtattagcaggacttgattagtgattgacttggggaaggaggggaagatagagttcaggatgactccgagactgtctggtgtcggtggctaatgactgaagctattaatagagggaggaaatgcagaccaaaagcaggcccggggtgagagatgataaatttgaattttaacatgttgagtttggacatccaggatgaaataaccacaaaacatttaaatatacgaatctgaaaaggtaagcatcataagcatatgagctattggtaaaattctgatacttaatgaagtcttgcagggaggcagtacagaggcaagcaatgggctggggataaaacat

SEQ ID NO: 582924 - DNA, 607 bp, Homo sapiens
cagatcatagaagggcgtgtatgctgtcctaaggagcttaaacttcaacttcagttcatgggagccaatgacaagatctgagcaggggaaggatgtggctagaggggcattttagacagacaagatcctctgtggattacacctaggctaagcaacgggttaaagttgttgtcttaagacaatagtccaggtaaaagataataaagttttaaattaggatgttagtaggaatgaggaagagggatgggtttcagaaatagtaaggaaatgtattagcaggacttgattagtgattgacttggggaaggaggggaagatagagttcaggatgactccgagactgtctggtgtcggtggctaatgactgaagctattaatagaggkaggaaatgcagaccaaaagcaggcccggggtgagagatgataaatttgaattttaacatgttgagtttggacatccaggatgaaataaccacaaaacatttaaatatacgaatctgaaaaggtaagcatcataagcatatgagctattggtaaaattctgatacttaatgaagtcttgcagggaggcagtacagaggcaagcaatgggctggggataaaacat

SEQ ID NO: 582925 - DNA, 607 bp, Homo sapiens
cagatcatagaagggcgtgtatgctgtcctaaggagcttaaacttcaacttcagttcatgggagccaatgacaagatctgagcaggggaaggatgtggctagaggggcattttagacagacaagatcctctgtggattacacctaggctaagcaacgggttaaagttgttgtcttaagacaatagtccaggtaaaagataataaagttttaaattaggatgttagtaggaatgaggaagagggatgggtttcagaaatagtaaggaaatgtattagcaggacttgattagtgattgacttggggaaggaggggaagatagagttcaggatgactccgagactgtctggtgtcggtggctaatgactgaagctattaatagagggaggwaatgcagaccaaaagcaggcccggggtgagagatgataaatttgaattttaacatgttgagtttggacatccaggatgaaataaccacaaaacatttaaatatacgaatctgaaaaggtaagcatcataagcatatgagctattggtaaaattctgatacttaatgaagtcttgcagggaggcagtacagaggcaagcaatgggctggggataaaacat

SEQ ID NO: 582926 - DNA, 614 bp, Homo sapiens
taagcatcataagcatatgagctattggtaaaattctgatacttaatgaagtcttgcagggaggcagtacagaggcaagcaatgggctggggataaaacatagggaaatattatttaaataaagatgaaagaaaaggagcccacaaaggaagctgaaaaggcatagtcaaaaaaagaggcttgccaaagtgccacctttgaagctctgctgttacactttataaggaaacttttggttacctgagattgcatgcatttataaaagtttctattattaggaagacaataataatgrtaaggttctttctcattgttgtcagtgtaatttatttaattatagaacctagttccaggatgcttaatctgaagtatatacttggggcaaaatgaattataacttaataataatctggaatttttctctctaacttgacatattttaattcttgctagattttcaaaatgtcatacctcgaaccaccaccagatggctatgagaatgttacaaatattgtgccaccatataatgctttctcagcccaaggcatgccagaggtaaaataaaatacatttgtaacccaagtctttaaatggttcttttgctatataaaacc

SEQ ID NO: 582927 - DNA, 614 bp, Homo sapiens
taagcatcataagcatatgagctattggtaaaattctgatacttaatgaagtcttgcagggaggcagtacagaggcaagcaatgggctggggataaaacatagggaaatattatttaaataaagatgaaagaaaaggagcccacaaaggaagctgaaaaggcatagtcaaaaaaagaggcttgccaaagtgccacctttgaagctctgctgttacactttataaggaaacttttggttacctgagattgcatgcatttataaaagtttctattattaggaagacaataataatggtaaggytctttctcattgttgtcagtgtaatttatttaattatagaacctagttccaggatgcttaatctgaagtatatacttggggcaaaatgaattataacttaataataatctggaatttttctctctaacttgacatattttaattcttgctagattttcaaaatgtcatacctcgaaccaccaccagatggctatgagaatgttacaaatattgtgccaccatataatgctttctcagcccaaggcatgccagaggtaaaataaaatacatttgtaacccaagtctttaaatggttcttttgctatataaaacc

SEQ ID NO: 582928 - DNA, 614 bp, Homo sapiens
taagcatcataagcatatgagctattggtaaaattctgatacttaatgaagtcttgcagggaggcagtacagaggcaagcaatgggctggggataaaacatagggaaatattatttaaataaagatgaaagaaaaggagcccacaaaggaagctgaaaaggcatagtcaaaaaaagaggcttgccaaagtgccacctttgaagctctgctgttacactttataaggaaacttttggttacctgagattgcatgcatttataaaagtttctattattaggaagacaataataatggtaaggttctttctcattgttgtcagtgtaatttatttaattatagaacctagttccaggatgcttaatctgaagtatatacttggggcaaaatgaattatawcttaataataatctggaatttttctctctaacttgacatattttaattcttgctagattttcaaaatgtcatacctcgaaccaccaccagatggctatgagaatgttacaaatattgtgccaccatataatgctttctcagcccaaggcatgccagaggtaaaataaaatacatttgtaacccaagtctttaaatggttcttttgctatataaaacc

SEQ ID NO: 582929 - DNA, 568 bp, Homo sapiens
gtggtctgctcacctgggcctcccaaagtgctgggattacaggcgtgagccaccacgttaaaaagggaaacttcctatttgccctctaaaggtttgcagaaaatgaatggacaaaacataaattaatagaagaaagaggcaaaaaaaaattctgtaaaatgtaggsgaaaaatcacagggtctcactcagttacccagcatgaagtgcagtggtgtgatcatggctccttgcaaccttgaattctcaagcacaagtgattctgccccctaagcctatggagtagctgggatcacaggggcatgccaccatgcccacatacatgggtatttgctggagaggagatggagactctctgtcctggatgtgagacaggtggctggcatctgggtaaggatgacattccctcattgctaaagagtaaaagaggaaagtgtcatggatagtgcaagcagggacatgccctgacctagtgaggtccagaggcttatattgtccttcataggagagtgggaagaagcgagtgtatgcaacccaggggaaataaatgacctaaaataaaagaaatag

SEQ ID NO: 582930 - DNA, 568 bp, Homo sapiens
gtggtctgctcacctgggcctcccaaagtgctgggattacaggcgtgagccaccacgttaaaaagggaaacttcctatttgccctctaaaggtttgcagaaaatgaatggacaaaacataaattaatagaagaaagaggcaaaaaaaaattctgtaaaatgtaggcgaaaaatcacagggtctcactcagttacccagcatgaagtgcagtggtgtgatcatggctccttgcaaccttgaattctcaagcacaagtgattctsccccctaagcctatggagtagctgggatcacaggggcatgccaccatgcccacatacatgggtatttgctggagaggagatggagactctctgtcctggatgtgagacaggtggctggcatctgggtaaggatgacattccctcattgctaaagagtaaaagaggaaagtgtcatggatagtgcaagcagggacatgccctgacctagtgaggtccagaggcttatattgtccttcataggagagtgggaagaagcgagtgtatgcaacccaggggaaataaatgacctaaaataaaagaaatag

SEQ ID NO: 582931 - DNA, 568 bp, Homo sapiens
gtggtctgctcacctgggcctcccaaagtgctgggattacaggcgtgagccaccacgttaaaaagggaaacttcctatttgccctctaaaggtttgcagaaaatgaatggacaaaacataaattaatagaagaaagaggcaaaaaaaaattctgtaaaatgtaggcgaaaaatcacagggtctcactcagttacccagcatgaagtgcagtggtgtgatcatggctccttgcaaccttgaattctcaagcacaagtgattctgcccsctaagcctatggagtagctgggatcacaggggcatgccaccatgcccacatacatgggtatttgctggagaggagatggagactctctgtcctggatgtgagacaggtggctggcatctgggtaaggatgacattccctcattgctaaagagtaaaagaggaaagtgtcatggatagtgcaagcagggacatgccctgacctagtgaggtccagaggcttatattgtccttcataggagagtgggaagaagcgagtgtatgcaacccaggggaaataaatgacctaaaataaaagaaatag

SEQ ID NO: 582932 - DNA, 526 bp, Homo sapiens
atcacagggtctcactcagttacccagcatgaagtgcagtggtgtgatcatggctccttgcaaccttgaattctcaagcacaagtgattctgccccctaagcctatggagtagctgggatcacaggggcatgccaccatgcccacatacatgggtatttgctggagaggagatggagactckctgtcctggatgtgagacaggtggctggcatctgggtaaggatgacattccctcattgctaaagagtaaaagaggaaagtgtcatggatagtgcaagcagggacatgccctgacctagtgaggtccagaggcttatattgtccttcataggagagtgggaagaagcgagtgtatgcaacccaggggaaataaatgacctaaaataaaagaaatagatcatcagaagtgtagacgtattagtcagggttctctagagtgacagaattaaaggactatatacatatatatatgaaggggagtgagatggttaataatgactgtcaacttgataggattgagggata

SEQ ID NO: 582933 - DNA, 526 bp, Homo sapiens
atcacagggtctcactcagttacccagcatgaagtgcagtggtgtgatcatggctccttgcaaccttgaattctcaagcacaagtgattctgccccctaagcctatggagtagctgggatcacaggggcatgccaccatgcccacatacatgggtatttgctggagaggagatggagactctctgtcctggatgtgagacaggtggctggcatctgggtaaggatgacattccctcattgctaaagagtaaaagaggaaagtgtcatggatagtgcaagcagggacatgccctgacctagtgaggtccagaggcttatattgtccttcataggrgagtgggaagaagcgagtgtatgcaacccaggggaaataaatgacctaaaataaaagaaatagatcatcagaagtgtagacgtattagtcagggttctctagagtgacagaattaaaggactatatacatatatatatgaaggggagtgagatggttaataatgactgtcaacttgataggattgagggata

SEQ ID NO: 582934 - DNA, 526 bp, Homo sapiens
atcacagggtctcactcagttacccagcatgaagtgcagtggtgtgatcatggctccttgcaaccttgaattctcaagcacaagtgattctgccccctaagcctatggagtagctgggatcacaggggcatgccaccatgcccacatacatgggtatttgctggagaggagatggagactctctgtcctggatgtgagacaggtggctggcatctgggtaaggatgacattccctcattgctaaagagtaaaagaggaaagtgtcatggatagtgcaagcagggacatgccctgacctagtgaggtccagaggcttatattgtccttcataggagagtgggaagaagcgagtgtakgcaacccaggggaaataaatgacctaaaataaaagaaatagatcatcagaagtgtagacgtattagtcagggttctctagagtgacagaattaaaggactatatacatatatatatgaaggggagtgagatggttaataatgactgtcaacttgataggattgagggata

SEQ ID NO: 582935 - DNA, 514 bp, Homo sapiens
attctcatccttgccctcataaagatacaggtctacagtctttgaaacctttgggctagataagttgtgaaatttaattacccaattttaggaaggtggtaaggcatatctactatgtgtatgtgtagcaccccagtggagtcctacacatgtggagtcctaccccagtggagaccaaacatgttaatatttccacagmaaatattcacagtaagagggatagagaaagattataggtagttgcatattgattcatatcagtcttttcttccaaatgagctacaatgactcatttttgagagctgtttgggttttggaagtggagataaggcatggttatgtcttgttgacccaataatgactggggaggccctgtgcaaagacttacccttggctgctcttgtcctcacagtgattctatgaatgaggtcctctagccactgtcatgtcacaggtgaggaaaccaaagttggaggatgaaggtaaattttctgatgtcgtgcagctggtaaat

SEQ ID NO: 582936 - DNA, 514 bp, Homo sapiens
attctcatccttgccctcataaagatacaggtctacagtctttgaaacctttgggctagataagttgtgaaatttaattacccaattttaggaaggtggtaaggcatatctactatgtgtatgtgtagcaccccagtggagtcctacacatgtggagtcctaccccagtggagaccaaacatgttaatatttccacagaaaatattcacagtaagagggatagagaaagattataggtagttgcatattgattcatatcagtcttttcttccaaatgagctacaatgactcatttttgagagctgtttgggttttggaagtggagataaggcatggttatgtcttgttgacccaataatgacyggggaggccctgtgcaaagacttacccttggctgctcttgtcctcacagtgattctatgaatgaggtcctctagccactgtcatgtcacaggtgaggaaaccaaagttggaggatgaaggtaaattttctgatgtcgtgcagctggtaaat

SEQ ID NO: 582937 - DNA, 589 bp, Homo sapiens
tagcttttttatcaggatggaaaataagaggatgattggctgtgataagaattcacaaccttattgaagatcacagtgtcaaggtgccaaatcttttaaaaggaacctgctaaatctttttattgaaaggctaattcaactgatatttggcataaatgtattataggaggtaatggcaggaagaaatgaacctagattttgtgggaataaayataaagtatcttagattatgtgtaggaagtagagagagattaagatgagtaggtataagttactagacatcttgtttctggcaactaggtgatactcactgaggaatccataggtttctgtaaagaacagacaataacatggtaaatttccatttgctaattaaatggctacctttatttgctatgaattataattgctaatgcttttaatattcttaaaacagcttacatgaattttttagctatgacccctttctgactgtatagaatttgccagggtagaagaggaggattttgacttactccaggcagaaagttagaacaaagtttctttcctcctcccctctgattattgtcatcctgcaaaactggaagcc

SEQ ID NO: 582938 - DNA, 283 bp, Homo sapiens
aaaaatctctaatagacactcctgatcccagactgcataaartctcaaaggtaaagccaagtgaatctgaacttaaaataagaagaaatatcccatgagcaaaagttaacagatacaacgaagaatgggattagatgtctaaaaacctcagctaatagaaccactagatagacactataaaatatttattttcaaagggactagagacaatttttaaaaattggagacatgagaagaagaaattacttgaaagtattgtaaaataattaaatagaacatctag

SEQ ID NO: 582939 - DNA, 283 bp, Homo sapiens
aaaaatctctaatagacactcctgatcccagactgcataaagtctcaaaggtaaagccaagtgaatctgaacttaaaataagaagaaatatcccatgagcaaaagttaacagatacaacraagaatgggattagatgtctaaaaacctcagctaatagaaccactagatagacactataaaatatttattttcaaagggactagagacaatttttaaaaattggagacatgagaagaagaaattacttgaaagtattgtaaaataattaaatagaacatctag

SEQ ID NO: 582940 - DNA, 283 bp, Homo sapiens
aaaaatctctaatagacactcctgatcccagactgcataaagtctcaaaggtaaagccaagtgaatctgaacttaaaataagaagaaatatcccatgagcaaaagttaacagatacaacgaagaatgggattagatgtctaaaaacctcagctaatagaaccactagatagacactataaaatatktattttcaaagggactagagacaatttttaaaaattggagacatgagaagaagaaattacttgaaagtattgtaaaataattaaatagaacatctag

SEQ ID NO: 582941 - DNA, 283 bp, Homo sapiens
gtagtagatatgaggaaattatttaagagcatagcacacacacaaaaaaaaagaggtggaaaatgagatttagattatggaaaagayctaaaacacaactaatggtagtttcagaaacataattgaaagaatgaagaagacataatatttgagaagaaaactggcttcaaattttacagaattgattagggtttttattgatttggacacaggaagtcaaatgagttctaatcaggattaagtaaaaatagatacttagataaaatgttgagaaactatagac

SEQ ID NO: 582942 - DNA, 186 bp, Homo sapiens
ggaatcgaatataccatgcttctgtgatgacagttatttcatgctggttgtcacartttgacatgaaaaactaatgaaaaaatgtttttaactgtttctaaaaaaacagtgtccaaaacagttttacattcgaaatatgaaaaagatgtctttgtgttccttaatctgatgagattttcacactct

SEQ ID NO: 582943 - DNA, 186 bp, Homo sapiens
ggaatcgaatataccatgcttctgtgatgacagttatttcatgctggttgtcacagtttkacatgaaaaactaatgaaaaaatgtttttaactgtttctaaaaaaacagtgtccaaaacagttttacattcgaaatatgaaaaagatgtctttgtgttccttaatctgatgagattttcacactct

SEQ ID NO: 582944 - DNA, 427 bp, Homo sapiens
  misc_feature 407, 408, 409, 410, 411, 412, 413, 414, 415, 416, 417, 418,419, 420, 421, 422, 423, 424, 425, 426, 427: n = A,T,C or G
gaagagagaacacagcaaagtagtagatatgaggaaattatttaagagcatagcacacacacaaaaaaaaagaggtggaaaatgagatttagattatggaaaagacctaaaacacaactaatggtagtttcagaaacataattgaaagaatgaagaagacataatatttgagaagaaaactggcttcaaattttacagaattgattagggtttttattgatttggacacaggaagtcaaatgagttctaatcaggattaagtaaaaatagatacttagataaaatgttgagaaactatagactaccaaaggcaaaaataaaatcttaaataatctagacagagaaagagagattaatcataattgaataaamaatagagcagattctcaattcttatcagcaacaannnnnnnnnnnnnnnnnnnnn

SEQ ID NO: 582945 - DNA, 409 bp, Homo sapiens
ttaaagaaagaatcatctattgctccaactgctctttactaaaggtaatttgtctttttaacctcatcaggctccttttaagctctcaaactgaccttatttttttttacagattgaatgcattaagtcaatttattatttatgatgaatttatttatgtatttatttttgctatcacaagtagaaaaagcctataagttgcyatgccaaaaacctgcctctagatggcaaacaaaccccgcaatacacaaaagagagccaaattcttagaaaccctgggaaaggaagagggctactgtcccattaacaacttggagcccttaaggcaagaatgaggtggaacatctgggaggagacaccagggtgcggagtagtggggaacctgctctgtgctctgagactgaaagcc

SEQ ID NO: 582946 - DNA, 331 bp, Homo sapiens
acactaagccatgagctcatctttaaaaagttttattaaaagattttcagctgttccaaatgggacttattagtggaatgtgttttaaaggatcatatcagatgaatgaaaggtatttgatcctttctttccttaataataaaatgatggtttggaaaaataggctacagtctaaccacagtgctattattaggctttcttgttaaacataggtctaagccyaagtatgtcaatacaacaaatacttactgtttcatttctagtaatgaaaaaaaaaacaagtctttctggcataaggatgattttcatctggttattttgaaacattttt

SEQ ID NO: 582947 - DNA, 608 bp, Homo sapiens
aaaagcctataagttgccatgccaaaaacctgcctctagatggcaaacaaaccccgcaatacacaaaagagagccaaattcttagaaaccctgggaaaggaagagggctactgtcccattaacaacttggagcccttaaggcaagaatgaggtggaacatctgggaggagacacmagggtgcggagtagtggggaacctgctctgtgctctgagactgaaagcccagccttgcctctcaccactgccttgactgtgtccccatctgctgtgaagtgaatggtgtcttctaaattcatgctgagccctaattgctgaaaagtgtaagacatgcaatgggattatgtgcatcttcccgacaccaacatgatgctcaggaaggagacttcttgctttctcttaggattcttttactaaccaagattttgcctctactgcatatttccctttgctgattgtccctcccttttgacagaagatggcccagggcattcactactaagtctcaacctcttacccaaagccctcagtctagtgttgctctttccttcatgctatttttgtttctttcttttcttgtaatcatcttggcaataaaataatcactttt

SEQ ID NO: 582948 - DNA, 537 bp, Homo sapiens
gtctcgaactcctgacctcaagtgagccacccgcttctgcctcccaaagtgctgagattacaggcgtgagtcactgttcccggccaagattctgttttgatagaacacttgtgtctctctcaccttgtatttagaaaagttagaaagtaaaggataatgtatatagaaagctttttgaagactcttaagaagttcataaatayggggcactatgactatgcatatgaaaatatttcctatcagttggcagttaccacctcttatagtggcatggaacctcttgagttaaaccaaggctcagtgagatttggtgatttagatagtgtcattttatgaacaagggagaccctactcaggtcttttattttattatacttctctttagtattcactccagttaaagaactctttcaaaagacctcatgcctggtctcatggagattcaaaggtgtttgagtccttccttattatgcccttggaagatactttgaggaccccagtgatgaatccgaagaactctgtctccattatccctgg

SEQ ID NO: 582949 - DNA, 537 bp, Homo sapiens
gtctcgaactcctgacctcaagtgagccacccgcttctgcctcccaaagtgctgagattacaggcgtgagtcactgttcccggccaagattctgttttgatagaacacttgtgtctctctcaccttgtatttagaaaagttagaaagtaaaggataatgtatatagaaagctttttgaagactcttaagaagttcataaatacggggcactatgactatgcatatgaaaatatttcctatcagttggcagttaccacctcttatagtggcatggaacctcttgagttaaaccaaggctcagtgagatttggtgatttagrtagtgtcattttatgaacaagggagaccctactcaggtcttttattttattatacttctctttagtattcactccagttaaagaactctttcaaaagacctcatgcctggtctcatggagattcaaaggtgtttgagtccttccttattatgcccttggaagatactttgaggaccccagtgatgaatccgaagaactctgtctccattatccctgg

SEQ ID NO: 582950 - DNA, 537 bp, Homo sapiens
gtctcgaactcctgacctcaagtgagccacccgcttctgcctcccaaagtgctgagattacaggcgtgagtcactgttcccggccaagattctgttttgatagaacacttgtgtctctctcaccttgtatttagaaaagttagaaagtaaaggataatgtatatagaaagctttttgaagactcttaagaagttcataaatacggggcactatgactatgcatatgaaaatatttcctatcagttggcagttaccacctcttatagtggcatggaacctcttgagttaaaccaaggctcagtgagatttggtgatttagatagtgtcattttatgaacaagggrgaccctactcaggtcttttattttattatacttctctttagtattcactccagttaaagaactctttcaaaagacctcatgcctggtctcatggagattcaaaggtgtttgagtccttccttattatgcccttggaagatactttgaggaccccagtgatgaatccgaagaactctgtctccattatccctgg

SEQ ID NO: 582951 - DNA, 608 bp, Homo sapiens
aaaagcctataagttgccatgccaaaaacctgcctctagatggcaaacaaaccccgcaatacacaaaagagagccaaattcttagaaaccctgggaaaggaagagggctactgtcccattaacaacttggagcccttaaggcaagaatgaggtggaacatctgggaggagacaccagggtgcggagtagtggggaacctgctctgtgctctgagactgaaagcccagccttgcctctcaccrctgccttgactgtgtccccatctgctgtgaagtgaatggtgtcttctaaattcatgctgagccctaattgctgaaaagtgtaagacatgcaatgggattatgtgcatcttcccgacaccaacatgatgctcaggaaggagacttcttgctttctcttaggattcttttactaaccaagattttgcctctactgcatatttccctttgctgattgtccctcccttttgacagaagatggcccagggcattcactactaagtctcaacctcttacccaaagccctcagtctagtgttgctctttccttcatgctatttttgtttctttcttttcttgtaatcatcttggcaataaaataatcactttt

SEQ ID NO: 582952 - DNA, 608 bp, Homo sapiens
aaaagcctataagttgccatgccaaaaacctgcctctagatggcaaacaaaccccgcaatacacaaaagagagccaaattcttagaaaccctgggaaaggaagagggctactgtcccattaacaacttggagcccttaaggcaagaatgaggtggaacatctgggaggagacaccagggtgcggagtagtggggaacctgctctgtgctctgagactgaaagcccagccttgcctctcaccactgccttgactgtgtccccatctgctgtgaagtgaatggtgtcttctaaattcrtgctgagccctaattgctgaaaagtgtaagacatgcaatgggattatgtgcatcttcccgacaccaacatgatgctcaggaaggagacttcttgctttctcttaggattcttttactaaccaagattttgcctctactgcatatttccctttgctgattgtccctcccttttgacagaagatggcccagggcattcactactaagtctcaacctcttacccaaagccctcagtctagtgttgctctttccttcatgctatttttgtttctttcttttcttgtaatcatcttggcaataaaataatcactttt

SEQ ID NO: 582953 - DNA, 608 bp, Homo sapiens
aaaagcctataagttgccatgccaaaaacctgcctctagatggcaaacaaaccccgcaatacacaaaagagagccaaattcttagaaaccctgggaaaggaagagggctactgtcccattaacaacttggagcccttaaggcaagaatgaggtggaacatctgggaggagacaccagggtgcggagtagtggggaacctgctctgtgctctgagactgaaagcccagccttgcctctcaccactgccttgactgtgtccccatctgctgtgaagtgaatggtgtcttctaaattcatgctgagccctaattgctgaaaagtgtaagacatgcaatgggattatgtgcatcttcccgacaccaacatgatgctcaggaaggagacttcttgytttctcttaggattcttttactaaccaagattttgcctctactgcatatttccctttgctgattgtccctcccttttgacagaagatggcccagggcattcactactaagtctcaacctcttacccaaagccctcagtctagtgttgctctttccttcatgctatttttgtttctttcttttcttgtaatcatcttggcaataaaataatcactttt

SEQ ID NO: 582954 - DNA, 561 bp, Homo sapiens
tataagactgaggattgggcctaggttgtggtaaattggcaagataatggatgctacmctgtcaagagccctctgaagagaaaagtctgccacccttcaccaggtagaaactcctggcagtgccacattttccagtttgacaccctgtgataccctgaaaagacagacatttgactcttttcaaataatattttaacatattttaagatgcaaaggcattgtgtcagacttttttcttaagaatatatttcattaccactcagaagttagcttccaaaagaaataagtgtgtgcaaatgtttatgatagtggtgtagagaagtttttaaaataaatatgcatcttttatggtaataaaagcacattatgaagaattttttaggtccagttcacagattccttatgcctggggaaaactttattagaaaattagataatttctaatttgattaggggaagtctagtgggaaaactttttaactgagcggtccaattcgaaacatgaatatctgtgctggaagcttctgttgaaatttacttaagtcacatctaagaccctct

SEQ ID NO: 582955 - DNA, 610 bp, Homo sapiens
tctttatatgacacctagatctttttttgttgcacttttaagctgtgtaggaaacacactgcccacatgttcatacaacacagagcgrttatccacttagttcctaaaaagttgtatttggttatggggtttgatcccacttgtccagggtttaggtcagctactgaagattaggatatctgggtacctcttactggagaatccattcctgtttccatttcattcctgggggcaatattcaatctggtgtggccctctgtattataaaatgtttcccagattgtgtttatatgaaatacaaatcgaagaagaagcatggtgttaattgccgtgtaaaaaagattccagagtcaagagcttgagaagttctattccttccttcataggttcagttgtttaacccagcatttttcaaacatattttactcctagaacctgtttttcctcagacatatttaagaaaaaagcattttgtagaacacatttggacaaatgatactttatatcattgctttgttttttaaattttagtttgactcaattttacagtttcaggattttgtttctgtttcaggttttaagcttttcttttgtaaatagttactttcct

SEQ ID NO: 582956 - DNA, 610 bp, Homo sapiens
tctttatatgacacctagatctttttttgttgcacttttaagctgtgtaggaaacacactgcccacatgttcatacaacacagagcggttatccacttagttcctaaaaagttgtatttggttatggggtttgatcccacttgtccagggtttaggtcagctactgaagattaggatatctgggtacctcttactggagaatccattcctgtttccatttcattcctgggggcaatattcaatctggtgtggccctctgtattataaaatgtttcccagattgtgtttatmtgaaatacaaatcgaagaagaagcatggtgttaattgccgtgtaaaaaagattccagagtcaagagcttgagaagttctattccttccttcataggttcagttgtttaacccagcatttttcaaacatattttactcctagaacctgtttttcctcagacatatttaagaaaaaagcattttgtagaacacatttggacaaatgatactttatatcattgctttgttttttaaattttagtttgactcaattttacagtttcaggattttgtttctgtttcaggttttaagcttttcttttgtaaatagttactttcct

SEQ ID NO: 582957 - DNA, 409 bp, Homo sapiens
ttcaatctggtgtggccctctgtattataaaatgtttcccagattgtgtttatatgaaatacaaatcsaagaagaagcatggtgttaattgccgtgtaaaaaagattccagagtcaagagcttgagaagttctattccttccttcataggttcagttgtttaacccagcatttttcaaacatattttactcctagaacctgtttttcctcagacatatttaagaaaaaagcattttgtagaacacatttggacaaatgatactttatatcattgctttgttttttaaattttagtttgactcaattttacagtttcaggattttgtttctgtttcaggttttaagcttttcttttgtaaatagttactttcctagtctgaaatctatacattatttcagtaatgaattc

SEQ ID NO: 582958 - DNA, 566 bp, Homo sapiens
aacacatttggacaaatgatactttatatcattgctttgttttttaaattttagtttgactcaattttacagtttcaggattttgtttctgtttcaggttttaagcttttcttttgtaaatagttactttcctagtctgaaatctatacattatttcagtaatgaattcattatgttaatttgcccatcattcatctaaagggaataaacgttgaattgtttttttaaattttgacttgtgtcacatatgagaatataaagtatatctgtacaataaaggaaaatraaacatcaaagtatctacctcaggttaagaagcagaacttggctgggcatggtggctcacacctgtaatcccagcactttgggaggcagaagtgggaagatcacttgaagccaggagttggagaccagcttgttcaataaaggaagacctcatctctaacaaccacaacagcaaaaaattagccaggcacggtggcacatgcttatagtcccagctactggtgcagcctcgaactcctggtctcaagccatcttcccacctcagcctcatgttctagtga

SEQ ID NO: 582959 - DNA, 482 bp, Homo sapiens
gttcaataaaggaagacctcatctctaacaaccacaacagcaaaaaattagccaggcayggtggcacatgcttatagtcccagctactggtgcagcctcgaactcctggtctcaagccatcttcccacctcagcctcatgttctagtgaactttgttatgcagtgtctcctattctacatgtgcaggagtatttttacagtatgtacctggagtggaattgcttggtcattgggcatgtgtgtgttcagctctattgagtggcatcaaactcttctccaaagcagttgtaccaatctacaccctcaccagcagtgaatagtcttcccattgttcttcctcaatgaaactagatattcacagccttttaggtttttcctagagtatgaagtggtatctctttggggttttaatgtgtatttccctgattagaattgtagttgagcatcttttattatgtttatgggccatttatgttttctct

SEQ ID NO: 582960 - DNA, 482 bp, Homo sapiens
gttcaataaaggaagacctcatctctaacaaccacaacagcaaaaaattagccaggcacggtggcacatgcttatagtcccagctactggtgcagcctcgaactcctggtctcaagccatcttcccacctcagcctcatgttstagtgaactttgttatgcagtgtctcctattctacatgtgcaggagtatttttacagtatgtacctggagtggaattgcttggtcattgggcatgtgtgtgttcagctctattgagtggcatcaaactcttctccaaagcagttgtaccaatctacaccctcaccagcagtgaatagtcttcccattgttcttcctcaatgaaactagatattcacagccttttaggtttttcctagagtatgaagtggtatctctttggggttttaatgtgtatttccctgattagaattgtagttgagcatcttttattatgtttatgggccatttatgttttctct

SEQ ID NO: 582961 - DNA, 482 bp, Homo sapiens
gttcaataaaggaagacctcatctctaacaaccacaacagcaaaaaattagccaggcacggtggcacatgcttatagtcccagctactggtgcagcctcgaactcctggtctcaagccatcttcccacctcagcctcatgttctagtgaactttgttatgcagtgtctcctattctacatgtgcaggagtatttttacwgtatgtacctggagtggaattgcttggtcattgggcatgtgtgtgttcagctctattgagtggcatcaaactcttctccaaagcagttgtaccaatctacaccctcaccagcagtgaatagtcttcccattgttcttcctcaatgaaactagatattcacagccttttaggtttttcctagagtatgaagtggtatctctttggggttttaatgtgtatttccctgattagaattgtagttgagcatcttttattatgtttatgggccatttatgttttctct

SEQ ID NO: 582962 - DNA, 482 bp, Homo sapiens
gttcaataaaggaagacctcatctctaacaaccacaacagcaaaaaattagccaggcacggtggcacatgcttatagtcccagctactggtgcagcctcgaactcctggtctcaagccatcttcccacctcagcctcatgttctagtgaactttgttatgcagtgtctcctattctacatgtgcaggagtatttttacagtatgtacctggagtggaattgcttggtcattgggcatgtgtgtgttcagctctattgagtggcatcaaactcttctccaaagcagttgtaccaatctacaccctcaccagcagtgaatagtcttcccattgttcttcctcaatgaaactagatattcacagccttttaggtttttcctagagtatgaagtggtatctctttggggttttaatgtktatttccctgattagaattgtagttgagcatcttttattatgtttatgggccatttatgttttctct

SEQ ID NO: 582963 - DNA, 321 bp, Homo sapiens
agtctcaacctcttacccaaagccctcagtctagtgttgctctttccttcatgctatttttgtttctttcttttcttgtaatcatcttggcaataaaataatcacttttttctttctacctattaaagatgttaccttagttaattacagtggtttccttcagaatggtaaatggtctttcaaaatgatgtaaagagatctaaatccgtgtgctccagaagttgaatgaagctctgtctascacgggtgccagtgactctcccagagtgctccatgcagctggacccacagagtccctctgtgctgtcatatcacccactg

SEQ ID NO: 582964 - DNA, 255 bp, Homo sapiens
tccgtgtgctccagaagttgaatgaagctctgtctaccacgggtgccagtgactctcccagagtgctccatgcagctggacccacagagtccctctgtgctgtcatatcacccactgccttctgtgaatgagatattctgattrgaatcctggtggatgctatttgagccagtgcccccacaactcctatgaaagccgaggaccacaggcccctgaagacaatcacaggtctctagactcacagctcctgaccgt

SEQ ID NO: 582965 - DNA, 511 bp, Homo sapiens
aaaatgtgttggctccctaaccaacacacacacacacacacacctacactcccaaattctttcctcctgtatgaaaaaacttaaggctgggcacagtggctcatgcttgtaatccagcactttgggaggctgaggcagcaggattgcttgatccaaggaatccaagaccagcctgggcaacatgatgagaccctgcctctacaaaaagaaaaggaggaaaaaattagctragcatgccaatagtcccagctactagggaggctgaggtgagaggattgcttgagcccaggaggtcaaggcggcagtgagctgtaatccagccactacactctagcctgaatgacagagcaagactctgtctcaaaaatgaacaaagaaagaaagagagagagagggagggagggaaagaggaaggaaggaaggaaggaaggaaggaaggaaggaaggaaggaagcaaggaaggaaggaaggaagaaaaggaaggaaggaagtttacagagtttttgagttg

SEQ ID NO: 582966 - DNA, 495 bp, Homo sapiens
gaattctactggggctgggagatatgatggttttggtggaaatgaagcagaggtgctgtcacaccagaaatagcctccaaaactctgctcacagtgaggtcctcctgcccattgcaccatgcaaacaaagcttacataactctcatttgagcaatcaagaatcttgcttcaaattgcaggtttcacaactgcatagttgatttctagccgcctgcattgcatttggtctgactgtcagaggctggagaagaaaccaggtcaactccaagaatttgagaaaacaataatcatttcttgagaactcattaaatgggccacgtcctgagatttgaagccaagtctgttgatggaatagagggagggtaaaaattaggaatgtcttcacagaggaactttgagatgaggttttaaaggatgaatagggaagygcaggaaagcagggggaggaataattcctctaagcagagggaaaacatgtttaaaggtggagcggca

SEQ ID NO: 582967 - DNA, 621 bp, Homo sapiens
tataatctttgtctccaagacatgaccctttccatcaagtcccycaaaacattatcacagtttcattgtctccccactgtaggaagatctattatcaaaagaagtttctgatctctggtctcatgatagagttagttaccatttgtcttccaccaccattatttccagagattccttctgcttaactggtatttacatttacacttgaaaggaaatgtgcttgaaacctgttgtgatgtcccagaatggaaagtctccaaaaggtagacctgtgatagcttcaccctctttcttcaattgttattcattcattcatttattcatttaatcaatcagcaatagtctaaggtctgcactatgtatagctccctgcaggcactgctggattaatggaaatgaatcagaacagctcctggccttggggcgctcacagaataaggaaacagatgacccctgtgagaacagctatgcagggaaagctacacatggtaagaaacatacagaagtgggtgagcacaaaggaaaagaatgtgcctgaagggaaagcttcaaagagatacaaagttcagaccctccaccattccactcctcattttaaagtgcacccatccctttagctaa

SEQ ID NO: 582968 - DNA, 563 bp, Homo sapiens
attttcagaggaacacttatgatcatctttttgagatgggtatcttcttaatgattttgcacattctacagatttctctgtggtttgtgtatacatgatgagtcagattttaggattggaaaggaccattttctagttgttctcaaccattttccccctactcaacacacctgaggaaaacaaccaactcctaaaggtaaccactggagtggttcccaaaatggtggtagttcaaaattccagtgaaggattgggaggctacagagtgacataagtagtttgatgaagtcctctaaatcattctggtatccggcygggtgcagtggctcatgcctgtaatcccagcactttgggaggcctaggcaggtggatcacctgaggtcagcagtttgagaccagcctggccaacgtggcaaaatcccatctctactaaaaatacaaaatattagctgagcgtggtggtgggcgcctgtaatctcagctactcaggaggctgaggcaggagaattgcttgaaccggggaggtggaggttgcagtgagctgagatcgcaccactgcactc

SEQ ID NO: 582969 - DNA, 527 bp, Homo sapiens
aaatgaccttggtagtttgatagcaatatcattgaatctgtaaattgctttgggcagcatggccattttaccaatattgattctgcctattcatgagcatggattgtttttccatttgtttatatcatctatgattactttcagcagtgttttgtagttctccttatagagatctttcacctccttggttagatatatttctagatttttttatgcatgtggctatggtaaatgggattgcattctctatttgactctcagcttaaacattgttgctatacaaaaatgctagatttttatatattgattttgtgtgctagtactttactgaagttattcatcagttctaggggctctttggcagtaccattaggctatttgaggtatagaatcatattgtcagtgaaaaragataatttgacatcttcttttcctgtttaaatgccttttatttatttgtcttgcctgattgctctggctaggacttctagtactatggcaaataagagtggtgagagtgggtatcc

SEQ ID NO: 582970 - DNA, 630 bp, Homo sapiens
agagtaaacagacaacctacagaatgcaatattttcaaactatgcatctgtcaaggtctaatatccagactctataagaaattaaacaaatcaataaacaaagagcaaataacgccactaaaaagtgggcaaaggacatgaataaacacctctcaaaagaagacacacaagcagccaacaaacatgaaaaaaatgctcgacatcactaaccatcagataaatgcaaatcaaaactacaataagatacatctcacatgagtcaaaatggccattactaaaaagtcaaacataaaaaatgctggtgaggttgcaaaaaggaatgcttatataatgtgggttatttcagccactctggaaagcagtttggagatttctcaaagaaattaaaagagaattaccattcaacmcagcaatctgattattggtatacacccaaagaaaaataaatcattctaccaaaaagacacatgtacccgtatgttcactgcgatgctattcacaatagcaaagacatggaatcaacctaggtccccattaacagtggattggatttttaaaatgtggtaatatacatcatggaatactacaaattaatgcaggaacagcaaactaaatattgcatgttgtcat

SEQ ID NO: 582971 - DNA, 576 bp, Homo sapiens
  misc_feature 473: n = A,T,C or G
gttttcaattgtgtatgtgtrtgtttctgataagaagctattttttttacctcagtatctcctatgataaagcaggatagttatgtcacgggatccttggggtgatgcttcaccagccagaaacctctgtggccagtggagctttgcccaagttttgctcaggtctgctgggcccactcggctgggcacggctgtatttggcttgtgctactggcctggatcccagtgcctgctaacggcatgcagagtgcgaggggtgtgtgagtgagcaagcgtgatgtccagccactgcacacaggcagcgaggctggctgcggcagggtggatagcaccaggtgcctgcatgagtgctggctccctgtgaggctgtggctgtaccaggtgtactgtaagcagcttccacagctggcatcagagaatgcagtggtgcccagaagctcggagatgccaggaactgcagagccccaaagagngtgtcacagtgctggcttgcgaagcttctaggtctgggctccccaaaggtctgtagctcttctcttcttgttgcctgcaacatggcaagcaacaggagtattt

SEQ ID NO: 582972 - DNA, 576 bp, Homo sapiens
  misc_feature 473: n = A,T,C or G
gttttcaattgtgtatgtgtatgtttctgataagaagctattttttttacctcagtatctcctatgataaagcaggatagttatgtcacgggatccttggggtgatgcttcaccagccagaaacctctgtggccagtggagctttgcccaagttttgctcaggtctgctgggcccactcggctgggcacggctgtatttggcttgtgctactggcctggatcccagtgcctgctaacggcatgcagagtgcgaggggtgtgtgagtgagcaagcgtgatgtccagccactgcacacaggcagcgaggctggctgcggcagggtggatagcaccaggtgcctgcatgagtgctggctccctgtgaggctgtggctgtaccaggtgtactgtaagcagcttccacagctggcatcagagaatgcagyggtgcccagaagctcggagatgccaggaactgcagagccccaaagagngtgtcacagtgctggcttgcgaagcttctaggtctgggctccccaaaggtctgtagctcttctcttcttgttgcctgcaacatggcaagcaacaggagtattt

SEQ ID NO: 582973 - DNA, 591 bp, Homo sapiens
ataccgggagtagggagaggccaagcagcagaagcaggcacttacaagcctatgggggtaggggaggccttcctgggctcccaagagtgcagagatgtctgtgtctgcagcaatggcatgggtggctgcagttgtacccagagggcagggcctctgcttgctcccagcccccaagagcacaggaatgcccagatccacagccatagcttaggtggctgcagtwgcacccagggagcataagattccaaccctgcaaattcagaaggggtcagagcttccacctgttcctggctcccattggctccatgaaccatgcagcccctgctactcctcccacactacagccagcatcatggcagtggcctctctagatgggatgcctaccactgccatcagttatagagtggcaagagaagatgaaattcatttcctagaacatgcaatgttaccatgcaactctctcattgatttaagattcaggacaaaaaacagacacctaataaataatacttctttaagaaatgccttttagattttctgatgttaaaggatcaataagtaatatatacatgaaattaggataagagatgc

SEQ ID NO: 582974 - DNA, 607 bp, Homo sapiens
tctattgtatttacccatttctagtagattattttcttcatgctactcccaatctgttctatactacctattttgggtttctgtttaggtgggacttggcatatgttgagtgcttagcatatagtgaacactcaatacatgttgattttacaaattaatctatggaattattatgtccccttactcttatggtagcacaaccataaataattgttctgagttacattttaggataaaaaaattagcattaagttattaatgacagataatgtgatgtctcaccatcattctttctacagtaatcttattttacagggaagaaaacttaacatggtaattaatcttatagaaatttcatccccttaggcagattgaggtttaaggagatcctactggtatcttcagtaggatcacattacccagtataggagaggaaaaataattttctcctcccagttcttwgctgggactccctgtaacataagatggactaacaaggcaaaaacaaatggttgaattacatgtatacttcctgtatacatgggaaataacccaaagaaatgagtaaatatgtagagtacgtttcaaagagtttacttatacttca

SEQ ID NO: 582975 - DNA, 654 bp, Homo sapiens
ttaacatatgcaagtcaataaatgtgatacatcacatgaacagaattaaaaacaaaaatcataaatgcaggatatccagtgaacaccatcaatgggatcartcaagaaccttatcaacattaagcaaccaggaaaaagttctccttcactgccagatccaaaacttccctcatccagtgagaaacaccaaggtggctgaggtagcattagcaagaaaaatctaaccacaacaagaagcccaacacagaagcctctttgatcctgtgggtctaacactcccctcccttgcccatctaaaaaaaactaatgtggccaaagtgtattggtagagagaatcttgtcacagcaagaacccagactggaaagttttctagatctttcagacagctaactgtgccacagcaagggagcctcactgttttcatatgttttaggttcccctatcactctgggagaatgctcatggcctagtccaggaatcagctcctatcttctcatttagaaacagaaggcacaagtaggatatccagtgataccagataaaccaaaaagcttaatgtaacactgcaaagcatctaaaaattaaactgttattagagccttaaccctcaaaaacagatcaggtactgtgcgctgaacctaaacagagtgact

SEQ ID NO: 582976 - DNA, 654 bp, Homo sapiens
ttaacatatgcaagtcaataaatgtgatacatcacatgaacagaattaaaaacaaaaatcataaatgcaggatatccagtgaacaccatcaatgggatcaatcaagaaccttatcaacattaagcaaccaggaaaaagttctccttcactgccagatccaaaacttccctcatccagtgagaaacaccaaggtggctgaggtagcattagcaagaaaaatctaaccacaacaagaagcccaacacagaagcctctttgatcctgtgggtctaacactcccctcccttgcccatctaaaaaaaactaatgtggccaaagtgtattggtagagagaatcttgtcacagcaagaacccagactggaaagttttctagatctttcagacagctaactgtgccacagcaagggagcctcactgttttcatatgtttkaggttcccctatcactctgggagaatgctcatggcctagtccaggaatcagctcctatcttctcatttagaaacagaaggcacaagtaggatatccagtgataccagataaaccaaaaagcttaatgtaacactgcaaagcatctaaaaattaaactgttattagagccttaaccctcaaaaacagatcaggtactgtgcgctgaacctaaacagagtgact

SEQ ID NO: 582977 - DNA, 497 bp, Homo sapiens
catatccgagtcaattatcaagaaattaatgttttccaggacacaaaatggactatgttacaaaactgtaggccactgacaacaggaggtagccagaaggtagccacttttagtcctcagggcaaaaccagaaatctataygggcaaatcaatactaatatagtaccaccaagagtaggcaataggtcctatgtatataaactgaggaccattcctgatgtataatgattatacaaactgatagggacaatctgctccaaggtccaatattcttaaccagtactgagaaaagcaatcacctaacatctctctccataacatatttagcaaacaactcactcgggagaaagagagtttaggtgttcaagcttgtttaagcaaccctggttgaatataggtgctattcatttagatctgtggctgttaatttacatgattccattaatatttctttctttcaacttcctctaaagctaagaaagaaagctgcattaaaa

SEQ ID NO: 582978 - DNA, 652 bp, Homo sapiens
caagtttgataatataggtaacattaacagttgaggtgggtcacaggacttagcatacaagtcctgtggccttatttttaacttacggtgtttttaatagtggcccaattccattcctttgtctgagatctgtagaagtttggaagtattttacagaatagtctttgtagtcctaaaatgtcttaaatttctgtttcatatttctcacatccagttcaaggccccacccctattataactctggccccaacatgttacagaatattaaaatggattagtgtttattttctaaaggaattagaaactaggaattaaacattagggataatcctgaccctccttaagtctgaatgaattcctgatagctgtgggcatcagtgtatttacagggatccctaaataaaaattaatttcagaatcccattcatcttcaggtagttttcatcatggctgtgataggaggaagagatgaccytgagatttgctttctgaaattaggctgaaatttgctttctcaacttaggtaatcaaatgtatgatattacaaatagtaaaatgacacagaaagtatatgtgtaagaagtgaatcagaaccaatcatggtgactcacgcctataatcccagcactttgggatgccaaggtgggtagat

SEQ ID NO: 582979 - DNA, 568 bp, Homo sapiens
acattgacccagatataccataatgaccctggccatatgtagctgtaatattgatttacttgcagtccccagtatacacaatgctctttcagactttacactttctttcctttcctgaaatatattcttcttctctattggtaaacacctacttattcttcaaggctcaaattattatctcctttatggagtcttccttaactaactcctgtttccacctaaacataattagcgtcttcaacctcttggtacacttcacccctttgtacacacatctgctatatcataagttggtaattagtcttctttttaagtacacttctccccagggcaaagtctgtctcactcatttyggaatttgaaatattccaaaatattctagtatttatggggagtctcaatattttcaaatatatgtagatattttaaccaaatatattggatttttcctcctccttctcttcctccttttcttcttttgcttatcctcctcttccattttcatttttagataattttaatgtctttccatatacttttacttataattcttgtgttagatttattt

SEQ ID NO: 582980 - DNA, 568 bp, Homo sapiens
acattgacccagatataccataatgaccctggccatatgtagctgtaatattgatttacttgcagtccccagtatacacaatgctctttcagactttacactttctttcctttcctgaaatatattcttcttctctattggtaaacacctacttattcttcaaggctcaaattattatctcctttatggagtcttccttaactaactcctgtttccacctaaacataattagcgtcttcaacctcttggtacacttcacccctttgtacacacatctgctatatcataagttggtaattagtcttctttttaagtacacttctccccagggcaaagtctgtctcactcatttcggaatttgaaatattccaaaatattctagtatttatggggagtctcaatattttcaaatatatgtagatattttaaccaaatatattggatttttcctcctccttctcttcytccttttcttcttttgcttatcctcctcttccattttcatttttagataattttaatgtctttccatatacttttacttataattcttgtgttagatttattt

SEQ ID NO: 582981 - DNA, 569 bp, Homo sapiens
tcaattaaactctttctttacagcaatgccatggtctcagtgagttgattttgtctatgcagctatcaggaagaacatgtcaggtgattacattgccaccaaagtctcacagttatgtgtttaataggtgaaacttctggagagagaatggcttgactctctcaggcctgagtctggataccagtttggttccatgtgttctcaccrtaacaacatggcatgtagccatttatactgccattttgtatatgaggggaggaaaattattagaaaaggagagttgagcagaaaatgcaaaatatgtacaccacagaatgtctagcagaagttacatagtggccaggtgtgctggttcaggcctgtaatcccagcactttgggaggccgaggtgggcggatcatgaggtcaggagattgagaccaacctggctaacatggtgaaaccccatctctattaaaaatacaaaaaattagctgggtatgttgggacatgcctgtagtccccgctacttgggaggctgaggcaggagaattgctggaacgcaggaggcggaggttgcagtgagctga

SEQ ID NO: 582982 - DNA, 569 bp, Homo sapiens
tcaattaaactctttctttacagcaatgccatggtctcagtgagttgattttgtctatgcagctatcaggaagaacatgtcaggtgattacattgccaccaaagtctcacagttatgtgtttaataggtgaaacttctggagagagaatggcttgactctctcaggcctgagtctggataccagtttggttccatgtgttctcaccgtaacaacatggcatgtagccatttatactgccattttgtatatgaggggaggaaaattattagaaaaggagagttgagcagaaaatgcaaaatatgtacaccacagaatgtctagcagaagttacatagtggccaggtgtgstggttcaggcctgtaatcccagcactttgggaggccgaggtgggcggatcatgaggtcaggagattgagaccaacctggctaacatggtgaaaccccatctctattaaaaatacaaaaaattagctgggtatgttgggacatgcctgtagtccccgctacttgggaggctgaggcaggagaattgctggaacgcaggaggcggaggttgcagtgagctga

SEQ ID NO: 582983 - DNA, 569 bp, Homo sapiens
tcaattaaactctttctttacagcaatgccatggtctcagtgagttgattttgtctatgcagctatcaggaagaacatgtcaggtgattacattgccaccaaagtctcacagttatgtgtttaataggtgaaacttctggagagagaatggcttgactctctcaggcctgagtctggataccagtttggttccatgtgttctcaccgtaacaacatggcatgtagccatttatactgccattttgtatatgaggggaggaaaattattagaaaaggagagttgagcagaaaatgcaaaatatgtacaccacagaatgtctagcagaagttacatagtggccaggtgtgctggttcaggcctgtaatcccagcactttgggaggccgaggtgggcggatcatgaggtcaggagattgagaccaacckggctaacatggtgaaaccccatctctattaaaaatacaaaaaattagctgggtatgttgggacatgcctgtagtccccgctacttgggaggctgaggcaggagaattgctggaacgcaggaggcggaggttgcagtgagctga

SEQ ID NO: 582984 - DNA, 577 bp, Homo sapiens
tcactctgacacccaggctggagtgcagtggcgcgatctcggctcactgcaagctctgcctcccgggttcacgccattctcctgcctcagcctcccaagtagctgggactacaggcgcccgccaccaagctggctaatwtttttttttgtatttttagtagagacggggtttccccgtgttagccaggatggtctcgatctcctgacctcgtgatctgcccacctcggcctcccaaagtgctgggattacaggcgtgagccaccgcacccggcccatactattgttttgtattttctatccttttatctctttatgtctcacttctgagcatgttattctgaactatattccagttttataattctttcattagctatatctaatcttttaaatgtacttaatgtgttcttaattttagttattataatttttctattaaaaaatttccattggcttctttcttaattataatttctaattctctagtggaatctctgaacataagaacagttattttaaagtagtgcttggtaattttaatatctgatctcctggaggactatttctgctgtttcg

SEQ ID NO: 582985 - DNA, 328 bp, Homo sapiens
taaaaatacaaaaattaggcaggcatggtggtgcacgcctgtagtcccagctactcgggaggctgaggcaggagaatccttgaacctgggaggcagaggttgcagtgagccgagatcatgccactgcactacagcytgagcaacagagtgcaactttgtctcaaaaaaaaaaaaagaaactatgaaaccattttccaggtgtctgtatcatattccacttctaccagcaatgtataatatgagagctctagttgttctgcatcttcatcagcacctgctgttgtcagatactagttttattttagccatttgaatagttgtatgatgg

SEQ ID NO: 582986 - DNA, 576 bp, Homo sapiens
ctttacctgaatctcctgtccaaagacggagattgaatcttccactcttaatgagaaacaagggtttaaaaaacagcccaaatgaagtttagaccttcaatcagagtgggaggtggtccaatttcaggagaactccctcagtacactccataggacttctgaagacagagaatttgtgctggtaacaagcaccgctttcagagagaaacaccaggtggttgcagggagtcactctgaatcatactgactacactakacatgttgacctaaaaggaagaaactgaggcaaaattaatataagtagagagtttacttgggccaagcttcaggattgcaacccaggagcataggttcaacttgccctgaatatacacttgattagcagcagttacaagtgcatttggggtttttttttgttgtttgtttgtttgtttttgagatggagtttcgctcttgttgcccaggctggagtgcaatggcatgatctcagctcattgtaacctccacctcctaggttcaagtgattctcctgcctcagcctccaaagtagctgagattacaggtgcccaccaccat

SEQ ID NO: 582987 - DNA, 345 bp, Homo sapiens
aatatagatgctaaaatccttaacaaaatactagctaaccaaatccaacaacatatcaaaaagataatccaccatgatcaagtgggtttcataccagggaygcaggaatggtttaacatatgcaagtcaatagatgtgaaacaccacatgaacagaattaaaaacaaaaatcatatgatcatctcaatagatgcagaaaaagcatttgacaaaatccagcatctctttatgattaaaaccctcagcagaattggcatacaaaggacataccttaatgtaataaaagccatctatgacaaacccacagccaacataatactgaatggggaagagttgaaagaattc

SEQ ID NO: 582988 - DNA, 345 bp, Homo sapiens
aatatagatgctaaaatccttaacaaaatactagctaaccaaatccaacaacatatcaaaaagataatccaccatgatcaagtgggtttcataccagggatgcaggaatggtttaacatatgcaagtcaatagatgtgaaacaccacatgaacagaattaaaaacaaaaatcatatgatcatctcaatagatgcagaaaaagcatttgacaaaatccagcatctctttatgattaaaaccctcagcagaattgrcatacaaaggacataccttaatgtaataaaagccatctatgacaaacccacagccaacataatactgaatggggaagagttgaaagaattc

SEQ ID NO: 582989 - DNA, 562 bp, Homo sapiens
ttcctttcaacatttgtggaatcattcatgtctcttattctcaacaatggcaatttaagtctccttactttttctcccaatcaatttggctagagatttagtcattttattaatatctcaaaaaaccagattctgtttttatttcccgttctctaattcgttgacttccactctgatttttattacttccattcttcttctactttgggcttcatttttaatttatttccccactttctgaaggtggaagttgaagtcattgatttgagatatttctacatttataatatatatttttagtgctaagtgtatttattttagttgcaacttacacattttgatatgatgatatgtgttttcttatctactgttttaaaaataaagttttttagacagggtctcactctgttgctcagactggagtgcaatgtcatgatcatagctcatggcagcctcaacctcctgggctcaagcagtcttccagcctcagcctcccaaaaagctggaactacaggcacatgccaccatgccaggctaatwttaaaaataatttgtggagaag

SEQ ID NO: 582990 - DNA, 625 bp, Homo sapiens
gttttaaaaataaagttttttagacagggtctcactctgttgctcagactggagtgcaatgtcatgatcatagctcatggcagcctcaacctcctgggctcaagcagtcttccagcctcagcctcccaaaaagctggaactacaggcacatgccaccatgccaggctaatattaaaaataatttgtggagaaggagtttcactatgttgtccaggctaatctcaagcttctggcctcaggtgatcctcctgccttggcatcccaaagtgctaggattccaggcatgagccaccacacccagcctaaagaatactttcaattttccctttcaaatccmctttgactgattggttatttataagtatgttatttggtttccaaacaattgaaatactctggagatatttatgttattgatcattaattttatctcattttagccagggagcatgttactattttgcatggcttagtttcttttgaatttaccacttattttaatgccctgcatatgatctatcttggtaacattttcatgtgtacctgaaaaggatatgtattttattgcttttggatggtgtattctaaatatgtcaattaggtcagtaggttgataatataattg

SEQ ID NO: 582991 - DNA, 625 bp, Homo sapiens
gttttaaaaataaagttttttagacagggtctcactctgttgctcagactggagtgcaatgtcatgatcatagctcatggcagcctcaacctcctgggctcaagcagtcttccagcctcagcctcccaaaaagctggaactacaggcacatgccaccatgccaggctaatattaaaaataatttgtggagaaggagtttcactatgttgtccaggctaatctcaagcttctggcctcaggtgatcctcctgccttggcatcccaaagtgctaggattccaggcatgagccaccacacccagcctaaagaatactttcaattttccctttcaaatcccctttgactgattggttatttataagtatgttatttggtttccaaacaattgaaatactctggagatatttatgttattgatcattaattttatctcattttagccagggagcatgttactattttgcatggcttagtttcttttgaatttacyacttattttaatgccctgcatatgatctatcttggtaacattttcatgtgtacctgaaaaggatatgtattttattgcttttggatggtgtattctaaatatgtcaattaggtcagtaggttgataatataattg

SEQ ID NO: 582992 - DNA, 590 bp, Homo sapiens
tagggtttggctttgtgtccccacctaactctcaccttgaattgtaatccctataatccccacatgtcaagggtgggactaagtagaggtaattgaatcatgggggtggtttcctccatgctattctcgtgataatgagtgagttatcatgagatctgacrgttttataagtttccggcatctcccctgcttgcactcactccatcctgctgctctgtggagaaggtgcctgcttctattttggcttccaccatgattgttaagtttcctgaggcctccccagccatgtggaattgtgagtcaattaaacttctttcctttataaattacccagccttaggtacttcttcatggcagcatgaaaaagaactaattcaggtggtttccttttccttgtggctctcttttggtgggggaaatccccctgaaggcagtcatcagaaccacctggagagctttataatgtcgtagagtctcagggacttgttctggagatcagagtgggtctgggatatcactgtgttgggaaacatgtggggaggggtctgggatctcaattataagagcatcagttaggtctgggatatgct

SEQ ID NO: 582993 - DNA, 587 bp, Homo sapiens
tgcctttcccggtccactgactcaaatgttaatctcctttggcaacaccctcacagacacacccaggatcartactttgcatccttcaatccaatcaagttgatactcagtattaaccgtcacaggctggttccatcttttctcatctatagctcacttttgaggaaccataatcaatctcaaaacacaaatgttaccattgttggatattattttaaaaattaaattcatttgaggcaaaagattgccttgaaagtgtctacattcaatttatcttgctttctttcccaccttataaaagttaaatctgatataatagactcttctgtttgatttctggatgaaaattagaatgagaatcagagaaatgtggaattgtttgaagagtttgatgcatgacattaaaacaattctcaaagcccatttgctcaagatgaagaatgctgctcaatgcattacttacagacagttcaggtgcatccttttggagctgtcttgtcatatatctgactccaccactagaatactcctgtgattctggtttctgaatccatgcagagacccacactcaggcacaactggattcc

SEQ ID NO: 582994 - DNA, 587 bp, Homo sapiens
tgcctttcccggtccactgactcaaatgttaatctcctttggcaacaccctcacagacacacccaggatcaatactttgcatccttcaatccaatcaagttgatactcagtattaaccrtcacaggctggttccatcttttctcatctatagctcacttttgaggaaccataatcaatctcaaaacacaaatgttaccattgttggatattattttaaaaattaaattcatttgaggcaaaagattgccttgaaagtgtctacattcaatttatcttgctttctttcccaccttataaaagttaaatctgatataatagactcttctgtttgatttctggatgaaaattagaatgagaatcagagaaatgtggaattgtttgaagagtttgatgcatgacattaaaacaattctcaaagcccatttgctcaagatgaagaatgctgctcaatgcattacttacagacagttcaggtgcatccttttggagctgtcttgtcatatatctgactccaccactagaatactcctgtgattctggtttctgaatccatgcagagacccacactcaggcacaactggattcc

SEQ ID NO: 582995 - DNA, 566 bp, Homo sapiens
ctccctaattcattcgatgaagccagcatcaccctaataccaaaaccaggaaaggacataaccaaacaagaaaactacagactgatatccctgatgaacacagatgctaaaatctttaacaaaatactagctaaccaaatccaacaacataccaaaaagataatccagctggatcaagttggtttcataccaaggatgcagggatggtttaaaatacacaagtcaataaatgtgatacaccacataaacagaaataaaaacaaaaatcacttgatcatctcaatagatgcagaaaaagcatttaacaaaatgcagcatccttttatgattaaaactctcagcaaaattggcatacaagggacgtaycttaatgtaataaaagccgtctatgacaaacccacagccaacattatactcaatggggaaaagttgaaagcattccctctgagaactggatcaagacaaggatgcccactctcaccactcctcttcaacatagtactggaagtcctagccagagcaatcagagatgagaaagaaataaaaggcatccaaattggtaaaga

SEQ ID NO: 582996 - DNA, 524 bp, Homo sapiens
ttatatgaatgcaatcatgcagtgtataaccttttgagatgggactttttcattcagcttaattccgttaagacttatccaagtcgttgcctaaatcaatggttcattcttttaaattgataagtagtatttcatggtttcagtgtaccaaaatttgyttaatcattcattgttgaaaaacatctggatcattctcatttacaggatattacaaataaagctgatatcaacatttacatacaggtttctttgtgaatgtatgttttcatttctctagaataaatgctcaagagtgtaatttctaggttgtatgctagttgcatgtatagctttataagaaatgagcaaactatattccagaatgcctataccagtttacatgcccaccagcaatatatgagtgactcagtttctctccattcttgtcagcatttgtgttgtcactattttttgttgcagccatttggatagatgtgtagtaatatcttattatggttttaatttgcagttctcaaatggcaata

SEQ ID NO: 582997 - DNA, 505 bp, Homo sapiens
taacattaaatacctaggagttaattaatcaaagaagtgaaagatctctacaatgaaaactataaaatactgatgaaagaaattgaagaagacaccaaaaaatggaaagatatttcatgctcatgaattggaagaatcaatattgtcaaaatgtccatactacccaaagcratatacatatttaatgcaatctctatcaaaataccaatgacattcttcacagaaataggaaaaaaatcctaaaatttatatggaaccacaaaatacccagaatagccaaaactatcctaagcaaaaaacaaaacaaaacaaaaaaactggaggaatcatgtttcctggcttcaagttataaaaaacagcatggtactggcataacaacagacacatagaccaatggaacagaatagagaaccagaaacgaatccacacacctacagtgaactcattttcaacaaaggtgctaagaacacacactggggaaaagacagtctctttaataaatggt

SEQ ID NO: 582998 - DNA, 532 bp, Homo sapiens
gcactccagcctgggcgacagagccagactctgtctctaaataaataaataaaatacataaaaatcacttataaactctgctctccagaaataattgttacattttttggtgtgtttcaaatattttagttttaaaatctgagtatgtgcatcatcacttttgcaaatcttcaactttattgaagaataattgatgtacaacaaactgcacataacgtttagacaatttagtaagttttgcatgtgcacacacctatgaaacaaccaccacaataaatatacaaacatttccattatccccaaaatatccctgtgtagcccctctctccctagacctccatgctgttttctgacactatagattagattgcattttctagaattctatgtattattcctttttatctgtcttatttcacccgcataatgattttgagactcatgcaggttgttccatatatcaaacgcatgtcattccattttattgctaagaagtattctataatatggatrtgccacaatttgctaatcc

SEQ ID NO: 582999 - DNA, 525 bp, Homo sapiens
ccagctccattcatgttgatgcaaagggcatgatttcattattttgtaggctgtgtagtgttccatagtgtatatgtaccacattttctttatccagtgtaccattgatgggcatttagattcattccatgtctgtgattcatcacgtaagcagaaataaaacaaaaaccatgtaattatctgaatggatgtagaaragtctttccataaaattcaacatcccttcatgttaaacgcccttaaaaaaaataggcattgcaggaacatactttcaaataacaaaagccttctatgacaaacccataaccaacatcatactgaatgggcaaaagctggaagcattctccctgaaaactgggacaagacgagaatgtcctctctcatcactcctattcaacacagtactggaagttctagtcagagcaatcagacaagagaaagaaataaaaggcgtccaaataggaagaaagaaagtcaactgtccctgtttgcagatgatatgattctatacctaggaaaccccaa

SEQ ID NO: 583000 - DNA, 593 bp, Homo sapiens
cctcctctgaagaaaaggcagttctgccaaaaaacctccctggatctccagactgctagaccccctgaagattttagattcgcaagtctccactatcagggccaattccttcaaatagatctgtctttctgtctatgtcttcctctttctctctttctctctccatacgtatttatatattatttgttctatttctgtggagaaccgtcaccaataaaacactcttgtttacaagaatggactcaattatatgaaagtatctcctaccttcaaccatagtctacagctgcagctgccactgactatggaatgatacacatgcaaaatatttgtgctttggtgaagggcatgctttatggactctctggaagaacattaacatagggtgagttctctattctcacawggtaaaatttattttaacatgctccagcctttaagcttactgacatcttcctatatattttgacaacacatttctagcatttccaactcattttctataggccattgtcatgtctgaattttaagaaatggtcctgaagggatttattatcaactataggtatcatttttattatattaaaaacaaa

SEQ ID NO: 583001 - DNA, 528 bp, Homo sapiens
atacacatgcaaaatatttgtgctttggtgaagggcatgctttatggactctctggaagaacattaacatagggtgagttctctattctcacatggtaaaatttattttaacatgctccagcctttaagcttactgacatcttcctatatattttgacaacacatttctagcatttccaactcattttctataggccattgtcatgtctgaattttaagaaatggtcctgaagggawttattatcaactataggtatcatttttattatattaaaaacaaaattatgagaaagtgtccctttgtccataaacatatcctccagggctttattctgtctctggtcaacacctctcacttcttttcaacaccctcaatatctactctcatcatgttccctcaattcctgctggtatgtagtattgaagtcctgcaactattttagtaaacaagctaatgcatcctatagctgggattacttttctctactcaaactgtgcaaaaaccagacagccaatggcttatatgcc

SEQ ID NO: 583002 - DNA, 652 bp, Homo sapiens
ctataataaccagaaattagatagcagtataaacactattgcttgcggaaagtatgcatgcttaaaataaaaatacgtggatataaacatgatatttaaaagggcttagcaaaaacagtatgatcagctatatacaaagtgatttatatctaaagctaaatattttagcatttgcattccattttccacacttcatagttctgccatgatgctacttgcctcttaaagtttcacatcatagtaaatcagctggatgcttcagcaaataaggaaaatgaaatttaaagttctttttttcagatgataaactattctgatttaagaatgaatataattttatgggttttctgagtataaaaggcaaagatctcaagtatagtctagggtttgtaaagcttaacaatttttttatgttttatttggaatatttattaattrttttttatagtttatcattaatgtatttcagagtaattataaagttaaaaagtcaaaatataatggtaatgacatagtttttgttactgatagggacaaaatttcattgttattatcacttactaggtaggaaaaacaggctatggagttaattctaacattgagttccagctcttccaccttggagaaattacttaacctctctaggccaaaa

SEQ ID NO: 583003 - DNA, 586 bp, Homo sapiens
gttcgttttctctgcccagtttttaaattaggctgttttcttcatattgagcagtwtgagtttcttgtagattccgggtattagttctttgtcagaggcatcatctgtaaatgttttctccaactctgtaggttgtctgtatattctgttgattctatctttttctgtatagaagttttatggtttaattcccatttgtctattttttgttttgttgcatttgcttttagggtcttcttcatgaattatttacctaggctgatacccagaatttttcctaggttttcttctagaatttttatagtttcaggtcttaaatttaggtctttaattcatctggagttgaattttgtatatggtgagagtcagggatccagttttgttcttctgcatatggttagccagttttctcagcactatttattaaatatggtgtcctttccccattgtttatttttgttgactttattgaagatcagttagttgtagggatgaggctttatttctgggtgctctattctgttccattgatttgtgtgtctacttttgtatcagtaccatgctgttttagttattatagccttat

SEQ ID NO: 583004 - DNA, 586 bp, Homo sapiens
gttcgttttctctgcccagtttttaaattaggctgttttcttcatattgagcagtttgagtttcttgtagattccgggtattagttctttgtcagaggcatcatctgtaaatgttttctccaactctgtaggttgtctgtatattctgttgattctatctttttctgtayagaagttttatggtttaattcccatttgtctattttttgttttgttgcatttgcttttagggtcttcttcatgaattatttacctaggctgatacccagaatttttcctaggttttcttctagaatttttatagtttcaggtcttaaatttaggtctttaattcatctggagttgaattttgtatatggtgagagtcagggatccagttttgttcttctgcatatggttagccagttttctcagcactatttattaaatatggtgtcctttccccattgtttatttttgttgactttattgaagatcagttagttgtagggatgaggctttatttctgggtgctctattctgttccattgatttgtgtgtctacttttgtatcagtaccatgctgttttagttattatagccttat

SEQ ID NO: 583005 - DNA, 432 bp, Homo sapiens
ttggttattactttagtgatttaatgatctagtccacatcagaatatgtactctaaactcaaggtcaagttatttttctttgtacctactacctccaacaaaaaggcacagtcttgtgtggaacttcttggattttggaggaagaatatatcatgtttaagaatattgttttagcctattagttrgataattcttaaggctgtcagttttgaggttcatagaaaaagaactcttaggaatagatttagctctgttgctacttgaccatgagacctagaagattctatgttaataaccatactgtagagtttctatgaagtgatgagacatgctctttaaaacgtagtcatcatatattaatagattcagtgggtatatatgcagatatgtcacatggatatattgtggaaagctgagatttgggcttctaat

SEQ ID NO: 583006 - DNA, 515 bp, Homo sapiens
cacaattgaatataaataaaccttataaaggaatgaaatttagatatatgctacaacttgaatgaaccttgtggacagtgcactaggtgaaataagcaagacgcatttcacttatatgaggtacctagaaaagtcaaatttatggagacggaaagtagaacagaggttacaaggggcgaagaggaggaaakaaataaatgaggagttactgcttcatgaggacaaagcttaagtttaagacgataaaaaagttctaggcataaaaaatagtgatggtgagcaacaatgtgaatattacttaatgccactgaactttacacttaaaaatgattcagatggtaaatatgatggacactttattttaccataagaaaagtcttcaaaaataactttctttgtagctaaagaaaaacaacaagatatatttctgtgtaatttttattatttgattgtttgaccctgtctctgtatacccttgagagcaagaaatgtagtttatatttgcaaaatcacct

SEQ ID NO: 583007 - DNA, 515 bp, Homo sapiens
cacaattgaatataaataaaccttataaaggaatgaaatttagatatatgctacaacttgaatgaaccttgtggacagtgcactaggtgaaataagcaagacgcatttcacttatatgaggtacctagaaaagtcaaatttatggagacggaaagtagaacagaggttacaaggggcgaagaggaggaaataaataaatgaggagttactgcttcatgaggacaaagcttaagtttaagacgataaaaaagttctaggcataaaaaatagtgatggtgagcaacaatgtgaatattacttaatgccactgaactttacacttaaaaatgattcagatggtaaatatgatggacactttattttaccataagaaaagtcttcaaaaataactttctttgtagctaaagaaaaacaacaagatayatttctgtgtaatttttattatttgattgtttgaccctgtctctgtatacccttgagagcaagaaatgtagtttatatttgcaaaatcacct

SEQ ID NO: 583008 - DNA, 515 bp, Homo sapiens
cacaattgaatataaataaaccttataaaggaatgaaatttagatatatgctacaacttgaatgaaccttgtggacagtgcactaggtgaaataagcaagacgcatttcacttatatgaggtacctagaaaagtcaaatttatggagacggaaagtagaacagaggttacaaggggcgaagaggaggaaataaataaatgaggagttactgcttcatgaggacaaagcttaagtttaagacgataaaaaagttctaggcataaaaaatagtgatggtgagcaacaatgtgaatattacttaatgccactgaactttacacttaaaaatgattcagatggtaaatatgatggacactttattttaccataagaaaagtcttcaaaaataactttctttgtagctaaagaaaaacaacaagatatatttctgtgtaatttttattatttgattrtttgaccctgtctctgtatacccttgagagcaagaaatgtagtttatatttgcaaaatcacct

SEQ ID NO: 583009 - DNA, 511 bp, Homo sapiens
gataggaaacagcactaactttcagctcccattcggataaacagagcagcctctggagacccacaatgtgaacttttgctccaagaactatmgcgggaacataccaggaaagccaagagaatccacagaccctttgaaggaggtggatagccactgcaggctctgtgggagagccaagaaactgtgagtcagcttgcttttctaacttgtataagatcatatacaagccaggagtgagagtgagagtatatataagatcatatgcaagccactcagtgggagtgagaccagcctttcaggccgcgggctgcgtgggagctgggagagttctgtgactggccgctttcccccacttccctggcaacctgtgtgatgcagcaaaggcagccaatacccccaggaacataactccattggcatgaaaaccacacccccattccctacagaagacacctcaagccccaccaaaggagaatctgagctcagacacgcctaactctgccatcacctg

SEQ ID NO: 583010 - DNA, 511 bp, Homo sapiens
gataggaaacagcactaactttcagctcccattcggataaacagagcagcctctggagacccacaatgtgaacttttgctccaagaactatagcrggaacataccaggaaagccaagagaatccacagaccctttgaaggaggtggatagccactgcaggctctgtgggagagccaagaaactgtgagtcagcttgcttttctaacttgtataagatcatatacaagccaggagtgagagtgagagtatatataagatcatatgcaagccactcagtgggagtgagaccagcctttcaggccgcgggctgcgtgggagctgggagagttctgtgactggccgctttcccccacttccctggcaacctgtgtgatgcagcaaaggcagccaatacccccaggaacataactccattggcatgaaaaccacacccccattccctacagaagacacctcaagccccaccaaaggagaatctgagctcagacacgcctaactctgccatcacctg

SEQ ID NO: 583011 - DNA, 576 bp, Homo sapiens
catttttttttctgtatttttttagtagggacggggtttcactgtgttagccaggatggtctcaatctcctgacctcgtgatccgtcagccttggcttctcaaagtgctgggattacaggcatgagccactgcacccggccacctgatggtctttctytacccaacctggtagccaaagatgaagggcataatcccttggaagctctgtggccccaccttaccctagggcaagcttgtatcctccctatacaacagcagctgatgtaatcttgaaagcgccacctcctggctggaggccaaccaacagaaaaccagtgtgcttaacaaaaatacaaccaaggaccgtcataaagttcgcttaacttcccctgttacctccacagaagcagctgctggtatccatggctgagagacctgaagacagatcacatcacaggtctctttgcagacactacccattaccagcctggagcccagtagctctgctgggtggctagatccagaagagaaataacaatcactgcagttcagatctcaggaagccctatccctaggagaaagggtagagcaccaca

SEQ ID NO: 583012 - DNA, 283 bp, Homo sapiens
agacatcacatgtcggtaggttccgtgatgccccacaagccgcaaaaccagcaagtttttatttgggattttcaaaagggkagggagtgtacgaatagggtgtgggtcacagagatcacgtacttcacaaggtaatagaatatcacaaggcaaatggaggcagggcgagatcacaggaccacaggactggggcgaaattaaaattgctaatgaagtttcgggcaccatcgtcattgataacatcttatcaggagacagggtttgagagcaactggtctgacca

SEQ ID NO: 583013 - DNA, 283 bp, Homo sapiens
agacatcacatgtcggtaggttccgtgatgccccacaagccgcaaaaccagcaagtttttatttgggattttcaaaaggggagggagtgtacgaatagggtgtgggtcacagagatcacgtrcttcacaaggtaatagaatatcacaaggcaaatggaggcagggcgagatcacaggaccacaggactggggcgaaattaaaattgctaatgaagtttcgggcaccatcgtcattgataacatcttatcaggagacagggtttgagagcaactggtctgacca

SEQ ID NO: 583014 - DNA, 283 bp, Homo sapiens
agacatcacatgtcggtaggttccgtgatgccccacaagccgcaaaaccagcaagtttttatttgggattttcaaaaggggagggagtgtacgaatagggtgtgggtcacagagatcacgtacttcacaaggtaatagaatatcacaaggcaaatggaggcagggcgagatcacaggaccacaggacyggggcgaaattaaaattgctaatgaagtttcgggcaccatcgtcattgataacatcttatcaggagacagggtttgagagcaactggtctgacca

SEQ ID NO: 583015 - DNA, 283 bp, Homo sapiens
agacatcacatgtcggtaggttccgtgatgccccacaagccgcaaaaccagcaagtttttatttgggattttcaaaaggggagggagtgtacgaatagggtgtgggtcacagagatcacgtacttcacaaggtaatagaatatcacaaggcaaatggaggcagggcgagatcacaggaccacaggactgggrcgaaattaaaattgctaatgaagtttcgggcaccatcgtcattgataacatcttatcaggagacagggtttgagagcaactggtctgacca

SEQ ID NO: 583016 - DNA, 599 bp, Homo sapiens
atttaaaaaaagcggggagaaaatgcaaatacacacagtcagaaaatgacaaaggggactttacccctgaccccagagaagtacaaaaatcactcagagactattgtgaacatctctgtgctcataagctaaacaacccagaagaaatggatgaatgcctgacacacacaacctctcaagactgatccaagaagamattaaatccctgaatagatcaataatgagttctgaaattgaatcaataagaaaaagtctacaaaccagaaaaggcccaggaccagatagattcatagccaaattctagcagatatataaagaagagttggtaccattcctattgaaactatttcaaaacattgaaggggaaggactcctccccagctcattctatgaggccagcttcatcctgataccaaaacctggcagagacacaacatcaacaacaaaacctttaggtcaatatccttgaatatcaatgcaaaattcctcaacaaaaaactggcaaatcaaatccagcaggacatcaaaaagcttatccaccacggtcaattaggctttatccctgggatgcaaggctggtttaacacatgcaaatcaat

SEQ ID NO: 583017 - DNA, 616 bp, Homo sapiens
gtgacagaaataaaggactctgccttgtccatgaagctggttttgtcatatggttttggggagaaagaggaaaggtgtgtttctaaaggccactcatgtatgtaatagatgtaaacgtcaaaagtctgtgttaactgccacccctctctctctatcttgtggagacctctgccccttaaagctcctgcctacagaccctccaaagccctgccttccccatcctcactgttgtcattcattgtcatcctaccccacccccacatggtgaagccccagcacctgctcactgcatcctcttcaycccagatccagttgtcattcttggtccttcaccatctacaggatgcacgtgctccctggcccctcatgcctgaagctccatctccaggcaccttggctcccactctgtagaggttgccctcccatctcgtggcctattctgtcaccagggacagctttggtcccaagatgaagtcccatagccaagttgaaccacaagcaggtgtccacctacttatggaagctgactgaaaccattcttccacctcatcacaattttcagcccaccaaacctaaaacttatatcctacttgttcaggccatctactgtttgttt

SEQ ID NO: 583018 - DNA, 614 bp, Homo sapiens
gcatccattacctaacagctacagtgactctggcccttcactgtgaaagccaatgtcttccatgaattagccagttactatccaggattctataccactcttctgcagttaaaaaaacaaaaagccttccattcattcattatacataatctatgtctagtctcccctatataggtatgttccatgatctcctcatcttttccaatgtaaagtctcagtatttatataaataaatgttaagaaaaatgccagttgtcactgctgtgaagttacagaaggtattgtctcacttctctgatgacatattctcgaaattttatattgcccagagataattctgctctatytggtatttggctaatgttggctaatgacttggttaacctctagtaatttcatgttcaatattttctctcaattgtattaattttggagaactagtgaacataaatactacatattttattttagcacagcttagtgttcaatattaaaatacatagactggcaaaaaattaatgtaataactttttaaattgacaatttaattgttctacatattatctttcatttttaattattatatttatagtataaatgtccttatatatcat

SEQ ID NO: 583019 - DNA, 448 bp, Homo sapiens
ccatcatattagcttttagcatattgagaacttaaggagatgatagggaaatatttttaatattattagattattttggctatagcagattttccacatggagaatgatttkaaaaatattaatttttatctggtctataagacagtagtattattcaatacatattaatatgatcgctatagatttctatattcttttggttaaaaaacccagtcaaacaacaaagggctgtcaacttttcacagtcccttgtctttgacagccctaaaaattttgcagatatcaaagatctttcatagtgccttacttccttcacattttaaatataggaaaactgagtgccagagacaacaccagaacaagtctcaagttcatcttcccctgtatacaccattgctcattggcaatgaatgtaataacttaaaaactactgcatatgtgtctttg

SEQ ID NO: 583020 - DNA, 448 bp, Homo sapiens
ccatcatattagcttttagcatattgagaacttaaggagatgatagggaaatatttttaatattattagattattttggctatagcagattttccacatggagaatgatttgaaaaatattaatttttatctggtctataagacagtagtattattcaatacatattaatatgatcgctatagatttctatattcttttggttaaaaaacccagtcaaacaacaaagggctgtcaacttttcacagtcccttgtctttgacagccctaaaaattttgcagatatcaaagatctttcatagtgccttacttccttcacattttaaatataggaaaactgagtgccagagacaacaccagaacaagtctcaagttcatcttcccctrtatacaccattgctcattggcaatgaatgtaataacttaaaaactactgcatatgtgtctttg

SEQ ID NO: 583021 - DNA, 559 bp, Homo sapiens
ctggtctcgaactcctgagctcaggcaatctgcctgccttggcctcccaaagtgctagtattaaggcataagccaccatgcagagcctctcatttttctggtattrcatttcctctttatagctagaatttgcagtaaatgaatacaatgttctagacaatgaatcaaaatatatgaagacaaataattatctttctaaatataaaaattaaaaactgcccattagttctaattttaagtgttatacgaatgcatgcaagaagctcagtcttcaaaatacccttgacatgacaattacgactcaagaagttacagctggaagaaacagaaagtttccttgcacaaataccactccacagtggcagtgatcatgattttgtcctagggcacccagacaatcttgctatttgctgttgcagagtcctgaaattttggcatggcatttatttctgggaaagattagagtcagaatactgtatgactgtttagatagcattatgtgttacaatgtaaggtaaaagtataaacgggataataacatgtaccattagaaaaacag

SEQ ID NO: 583022 - DNA, 559 bp, Homo sapiens
ctggtctcgaactcctgagctcaggcaatctgcctgccttggcctcccaaagtgctagtattaaggcataagccaccatgcagagcctctcatttttctggtattacatttcctctttatagctagaatttgcagtaaatgaatacaatgttctagacaatgaatcaaaatatatgaagacaaataattatctttctaaatataaaaattaaaaactgcccattagttctaattttaagtgttatacgaatgcatgcaagaagctcagtcttcaaaatacccttgacatgacaattacgactcaagaagttacagctggaagaaacagaaagtttccttgcacaaataccactccacagtggcagtgatcatgattttgtcctagggcacccagacaatcttgctatttgctgttgcagagtcctgaaattttggcatggcatttatttctgggaaagattagagtcagaatactgtatgactgtttagakagcattatgtgttacaatgtaaggtaaaagtataaacgggataataacatgtaccattagaaaaacag

SEQ ID NO: 583023 - DNA, 559 bp, Homo sapiens
ctggtctcgaactcctgagctcaggcaatctgcctgccttggcctcccaaagtgctagtattaaggcataagccaccatgcagagcctctcatttttctggtattacatttcctctttatagctagaatttgcagtaaatgaatacaatgttctagacaatgaatcaaaatatatgaagacaaataattatctttctaaatataaaaattaaaaactgcccattagttctaattttaagtgttatacgaatgcatgcaagaagctcagtcttcaaaatacccttgacatgacaattacgactcaagaagttacagctggaagaaacagaaagtttccttgcacaaataccactccacagtggcagtgatcatgattttgtcctagggcacccagacaatcttgctatttgctgttgcagagtcctgaaattttggcatggcatttatttctgggaaagattagagtcagaatactgtatgactgtttagatagcattatgtgttacawtgtaaggtaaaagtataaacgggataataacatgtaccattagaaaaacag

SEQ ID NO: 583024 - DNA, 634 bp, Homo sapiens
gaatggatcaagcagagcaaatmatcagtgagctcaaagacaggctatttgaaaacacaatcagaggagaaaaagaaaaaaagaatgagagagaacaaatagaacctgcaaatagagaaaattatctgaaaagacaaatataagaattattaatgttcaacaggcaactgagcaatagtgagggaaagaaagaaacaaataatcatagaaaacttctcaaaacttgagaaacatatacacatccaggtgcagaaacgtcagagaacaccaaacagatccagcccactaagataatctcaaagcacgtaataaccaaactctgcaaaataaaggacagagtggattctaaaatcagcaagagaaaagaagcaaataatatataaaggagctccaattcatctaaaaatggacttctcaacagaaaccatacaggccagaaagaagcagaatgacattttaaaaatgtattaaggaaaaaaaaagtgccatacaaaagtactgtattcagcaattctgtccttcaaatatgaaggagagagaaattttttcccaaacaatacctgagagaattaatgaaccacaggacctattttacaagaaatgtgaaaggcaattcttgaatctaaaagaaaaa

SEQ ID NO: 583025 - DNA, 620 bp, Homo sapiens
ttagtgtatgacactgctcttaaggtactacccaatgccgagtaaattataaggaaaagagatttaattgactcacagttctgcatggctgggaaggcctcaggaacttacaaccatggcagaaggtgaaacaggcatgtcttacatggcaacaagcaagagagaaagtctgtgaatggggaactgtcaaacatttataaaaccrtcagatcttgtgagaaatccctccatcactatcatgagaccagcatgggggaaaccgcccccttgattcaattgcctttcaccaggtccatccctcacatgttgggattatggggatcacaaacatgtggggattatggggattacaattcaagatgagatttgtgtggggacacagagccaaaccatatcacaacaatatacaatccggagaggacagtgtcttcaatcaacagtggtgggaaaactggattaccatctgcaaaacactaaatgtagactctgatcactcactgtattaaaaaaaatgtaaaaattatttaaagacttaaacctacgactggaaactatgaaactactagaagaaagcattgcagaaatgctctagagtattggtctgagcaaagttttttttg

SEQ ID NO: 583026 - DNA, 571 bp, Homo sapiens
tatatacacaatggagcattattcagccgtaaaaatgaatgagatcctgtcatttgcaactacatggatagaactggaagatattatgttaagtgaaataagcctggcacagaaagacaaaattcacatgtttccactcatgtgtggaatctgaaaaaacaaaacaactgaactcatggaratagagagtagaataatagttatcagaggctaggaagtgtagcgcggggttgggggagtggcgatggttattgggtacagaaacataggtagatagaatgaatatgatctatatttaatagcacaacagggtagctatagtcaataataatttattgtacattcaaaaataactaaaagagaatatttggattgtttttaacacaaagaaagaatacattcttgaggtgatggatacccaatttacctaatgtgattattaggcattatatgcctgtatcaaagtatctcatgtatctcataaacatatacatctactatgtccccacaaaaataaaaataaaaaataaataaataacaacaaaaatcaatagttttctattattgtgtc

SEQ ID NO: 583027 - DNA, 349 bp, Homo sapiens
ttgaccccttctagcctcagtttcttcatctgttaaatagagataatatgtcagcgggatctgaggataaattgtaataatgcagcctaagcccatagtgagcacagtgcctagcacatagtaaatatttgacacacagcacatagtaaacagtgttagacactgttactattttatgattatgtgaacttagggaagaggaaccatactaagtgcctcagttcagagctgaaatgagtgtcaggtggcattactggaagtaggatggtagtaagcaccatgaratcagtcactatcttagctcccatctgactacttacgcccatgcctaaattcatttatcaataaa

SEQ ID NO: 583028 - DNA, 585 bp, Homo sapiens
gttttgttgatttgtttcctawttttaagctgaggaattctggggtacttactgccacttctgttgatcactattttcaaccgaactctatgtttacattttatattctagttcctatttagctattaccctacctcctcccattttcacataactaaatcaacagtctaaacaatcaactctttccagtaaaatttccaaccccaatcctgtgctttcttagagttaaaccatggaaattccacaatctaatcctactctaatgtttgcccttctaaagtcatgaacaatttgttgatagttgatataaactacgtgcctacacagctgaaaaatcgtgtatttctaaaacacttgtaatcatgtttcactcattttttatttttgcttgtgctattgtttctttggaaaaggctgaatcataaattcaaagttctatttttcagtaatttgtttaaccatgtatatattggctttttaagattcttgagtttattaaagataaaatgaaggtaaacaaataatattaaatgtcagtcagttttgatctgcctgcttgtaagagaggaaactagttttgactgg

SEQ ID NO: 583029 - DNA, 454 bp, Homo sapiens
ggcagcctgacagaacagcacagtggagccagaagcaccaaaatggcacagattgggaggaacctgggggttctcactgccatgctgtcctgcagggtcaggcagacagttttgtctacctccacacttgcctgcctctcagctgatgctgtgagttcctcgaaggagctcaactccgcagaaagagggggtaccccagagctctgctgaggagctgcgagcagcagcagttgcctactaggcctctgctgtggtcttggggaggacgctgggaggggaggtctagccgctgcccctcccacacaggttttcctggggagccactgagattctccatagtgtggcagaatctggaagaagaggttgccttccttttccaggagctccagaaaggaagggggcaaccaccccacgctgcatggctttggtccckgccatgccacttgttagctct

SEQ ID NO: 583030 - DNA, 549 bp, Homo sapiens
cttcttgtagttaagaggtcttcaaggtcatgctacagattttcaaattatttcttgtgaaaatatgcatcttgatagtctactgaaagtttataatgtatttgataaacatttgttgtggcacctcaatcaaaatttccaaattagtatattgttgcagaggaaattctacattgagagataacttgtactttcgaatatcctcagaaagggaatccattaagtccaggaagaggaaagaaaaggagaaaaaaamctgaagattcattaccatccactgcgtcctgggcactgtgctcggtgttctaagcatgcagtgggaatcatgcctgcatggagctcaggtttgggtatgctgctgagggaaaacaggtgacagatactctactacacaggggctctatttgtaattaaagcataggcatggtcttagtctgtttttggttgctataccaaaatacctgaggctgagtcatttataaagaaaagaggtttttacataagcataaaatgcaaaagagaaaagtaaaaaagaaaaaaaagaggttt

SEQ ID NO: 583031 - DNA, 639 bp, Homo sapiens
tatgcaaatcaaatacagtggtaaataactttctaaaacaaattaaacattattttcttatcttttaaaggtgaccacctgggactggacragagcagagaaaacattctcagtttatgagattatgtgcaagatcctcaaggtatgatcaatatgtagtcagtatttgaatggcttttcctcagcaaatagtgcctctgggctcataagcagctcatgaaaacaaatcattcatggaatgaaagaagagacacgataaagacaaatgaaagagaaagaaaataaactggacaaaaaagagaaaatatagaatgcacagaagtgcactggcactcagctatctgcttaaataacttgcaagcagactctgcagtcccaccgtgggtgagggaacagggagaagctcctcaggagttcactggggaagaagaaaattcagttgaaagtagtctgaatttaaacgttggttgttaccatgtttttttttttaattctttttttctgaataaaatgcaaaagagaaagatttgggtgagacctggaattagaaaatatagaaaatatcaggaaaaatgcaaagaaaagttttgctgttttgttcttaatctcatggcttgaccatctttttgcatatgtaaa

SEQ ID NO: 583032 - DNA, 639 bp, Homo sapiens
tatgcaaatcaaatacagtggtaaataactttctaaaacaaattaaacattattttcttatcttttaaaggtgaccacctgggactggacgagagcagagaaaacattctcagtttatgagattatgtgcaagatcctcaaggtatgatcaatatgtagtcagtatttgaatggcttttcctcagcaaatagtgcctctgggctcataagcagctcatgaaaacaaatcattcatggaatgaaagaagagacacgataaagacaaatgaaagagaaagaaaataaactrgacaaaaaagagaaaatatagaatgcacagaagtgcactggcactcagctatctgcttaaataacttgcaagcagactctgcagtcccaccgtgggtgagggaacagggagaagctcctcaggagttcactggggaagaagaaaattcagttgaaagtagtctgaatttaaacgttggttgttaccatgtttttttttttaattctttttttctgaataaaatgcaaaagagaaagatttgggtgagacctggaattagaaaatatagaaaatatcaggaaaaatgcaaagaaaagttttgctgttttgttcttaatctcatggcttgaccatctttttgcatatgtaaa

SEQ ID NO: 583033 - DNA, 542 bp, Homo sapiens
aagcagaatttttcatattaagagaatgaggcatataatatgtaatccatcatttgttcctgacactgaatcatttgatggctgaacacaagcamagattataagtaatttgaaaatacttcatttagtgtgtgtgatgcattctgagagtctgctgttctttcagtgaagcaacatctttgttatttattaaaatgggcattcactgtgctgggccctttcctatgttatctctgatccctgcaagagctatgcaatagctagagttattgcaatttcccagtatacaataaaggaagcaccatacacgttcaccacatttcatagctaagaagtagaaatcacaactaagtctgtcattttccacatatatttcttcttttattctgacctacctttttagtgatttccctaaccaaacatcagactcatttattgaacatgattataaataaactcttattgctaatgcctgacttctttcttaaaatagaggaaagacttagagtcccatttagaataagacactaaacccaggaaag

SEQ ID NO: 583034 - DNA, 542 bp, Homo sapiens
aagcagaatttttcatattaagagaatgaggcatataatatgtaatccatcatttgttcctgacactgaatcatttgatggctgaacacaagcacagattataagtaatttgaaaatacttcatttagtgtgtgtgatgcattctgagagtctgctgttctttcagtgaagcaacatctttgttatttattaaaatgggcattcactgtgctgggccctttcctatgttatctctgatccctgcaagagctatgcaatagctagagttattgcaatttcccagtatacaataaaggaagcaccatacacgttcaccacatttcatagctaagaagtagaaatcacaactaagtctgtcattttccacatatatttcttcttttattctgacctacctttttartgatttccctaaccaaacatcagactcatttattgaacatgattataaataaactcttattgctaatgcctgacttctttcttaaaatagaggaaagacttagagtcccatttagaataagacactaaacccaggaaag

SEQ ID NO: 583035 - DNA, 598 bp, Homo sapiens
aataatattaacattttaagggcttaaaatatatatttaaaattgctgtactaaaattttacaacgtcatcaacaatgttatgtaaatattttttccacataaccttactagctttagttaatataattttcagtgatctttactaatataatgatgaaamaaacagtctctgtaatattaatgcagtcttcttgatttctaatgaggttgaacaggttctcctatggttgttaacaaaaataattgtttttccttttttaaaaaataacatctttctgcaatattttttgtattttgtgtatttttttcaacttttattttagatacaggaggcaaatgtgcaggtttgttacatgggaattttcatgatgctgagattcaaggtatggatcctgccactcagactgtgagcatagtacctgatagacagtttttcaacagacaaccccctccctacccctctagtgttcttcagtgtttattgttctcatatttatgttattttatgctcaatgtttagctctccttacaaatgagaacatgtggaatttggttttctgttttgcatttaatttgcttaggattatggcctccatc

SEQ ID NO: 583036 - DNA, 598 bp, Homo sapiens
aataatattaacattttaagggcttaaaatatatatttaaaattgctgtactaaaattttacaacgtcatcaacaatgttatgtaaatattttttccacataaccttactagctttagttaatataattttcagtgatctttactaatataatgatgaaacaaacagtctctgtaatattaatgcagtcttcttgatttctaatgaggttgaacaggttctcctatggttgttaacaaaaataattgtttttccttttttaaaaaataacatctttctgcaatattttttgtattttgtgyatttttttcaacttttattttagatacaggaggcaaatgtgcaggtttgttacatgggaattttcatgatgctgagattcaaggtatggatcctgccactcagactgtgagcatagtacctgatagacagtttttcaacagacaaccccctccctacccctctagtgttcttcagtgtttattgttctcatatttatgttattttatgctcaatgtttagctctccttacaaatgagaacatgtggaatttggttttctgttttgcatttaatttgcttaggattatggcctccatc

SEQ ID NO: 583037 - DNA, 368 bp, Homo sapiens
attgcaacaaagaatatatacaaatggccagcaagcacacaaaaagatgaccaacatcactagccattagtgaaatgcaagtcagaaccacaggagttaccactttacattcattgggatggcaaaaatcagaaagaaaacaaacaaagttgttgatgaggatgtggagaacctcataaatgraagagtaaccctttctttcacattgctggtataattataaaatgatgtagcctctgaaaaacatttggtggttccacaaaaagttgaacataagttaccatatgatttaacagtgcagcttctcagtatatacaccaaagaattgaaagcagggacttaaacagatacttgtacaccaatgttca

SEQ ID NO: 583038 - DNA, 604 bp, Homo sapiens
tttaacatagtaataaagtactagccagaacaattaggcaagagaaataaaccaaagtcatccacattggaaaacagaaagtcaattrtccttgtttgctgatgatataatcatgtatctcaaaaaatctgaagactacaccaaaaaacttttattttcgatgaataaattcaataaagtttcacaatacaaaattaacatacaaaaatcagtagcttttctacacagcaacaataatgcagttgaaaggagggcaatcttatttataataacttccaacaaaacccggaaatacattttagcaaggaggtaaaagagctctaccagataaacttgcatactcggttaaaagaaattatagtgacacaaacatatgacaaaacagctcatacttatggatcaatagaattaatattgttaaaatggccatatttcccaaaacaatttacaatttcaatgcaatgtctatcaaagtaccaatgtcatatttcacagattagaaaataaattctaaaattgatatggaaccccaaaagaccccaaattagccaaagcaatcataaacaaaaataacaaagctggaggcatcacattacctgacttc

SEQ ID NO: 583039 - DNA, 607 bp, Homo sapiens
tctgagtaaatgatcccatttgtaccagtctgaaaactgagaaagatcctttacacctttgtcacccttatacctcctaccactgtcagatcctatatgttctaaccctaaaatattttaaaaatatgttcactatgtgtatctttgctaccaccctactggttcaaatcaccatgatctcttctataatgatttatttcatttggcttgcatcatcaaatacccttctcgaatcattsatatattcatatgacaatcagcaaatactccctctaagtgtaaatcagtagatgttgttcctctctttcaaaactcttccaaggatcccaatatgaaaaacagggggctaaattcttgccatcacctcaaaaactttttatattctcatctagccttcctgtccaacttgatccctatctatgctcattaagtgacagttttatactttcccctcctcaaatatgctaagcagttgaactggcttgttcctttagtctgaaatgtccttctctcatattttttatggtaagcttcttgtccttcatgctcttctcatcctattaaaaacagaacccttttccctaaagtagttctccatcacactagc

SEQ ID NO: 583040 - DNA, 607 bp, Homo sapiens
tctgagtaaatgatcccatttgtaccagtctgaaaactgagaaagatcctttacacctttgtcacccttatacctcctaccactgtcagatcctatatgttctaaccctaaaatattttaaaaatatgttcactatgtgtatctttgctaccaccctactggttcaaatcaccatgatctcttctataatgatttatttcatttggcttgcatcatcaaatacccttctcgaatcattgatatattcatatgacaatcagcaaatactccctctaagtgtaaatcagtagatgttgttcctctctttcaaaactcttccaaggatcccaatatgaaaaacagggggctaaattcttgccatcacctcaaaaactttttatattctcatctagccttcctstccaacttgatccctatctatgctcattaagtgacagttttatactttcccctcctcaaatatgctaagcagttgaactggcttgttcctttagtctgaaatgtccttctctcatattttttatggtaagcttcttgtccttcatgctcttctcatcctattaaaaacagaacccttttccctaaagtagttctccatcacactagc

SEQ ID NO: 583041 - DNA, 410 bp, Homo sapiens
gctgagaaacctggccaatgaacaatataaacaattatatggtaatattagagaaagggaacaggtactattagacacaattgagacaagatgagagcctgagcacaggcaaagctgagggctgtggatattagtttgtgggaattgatttgagaaaacagctctgaaacagagatatgacttgaatattaattgaaagtgaaggaaggttgtaaaagaatatgtcagatcagaatggygctatcataatagaaaggaattccaaaagagatcagatatttggggagaaaacatactctattaggtttggtgtgttttaaagtttaaaaaaatcagaaagacattagaaagaaatgtgtatcaaatatctaaggtagattgtgaaaaagaaaatttggctctctctgaga

SEQ ID NO: 583042 - DNA, 572 bp, Homo sapiens
cctgttcttttcctaaaattggatcaattatattaacaaaaatcagcatgaaagataaaagtgattagaaattgctttttgaaaagcagcacacattattcataatatcagttcataatcccagatgatccaagtgctagatttgagtggtatttttaggatatttagtaagtacagaaaatataataggtcytgaaatgaatgcaaagatgtggtagaatcaacttctgtaaaatgaccaattactgtctcctaaaaataatctgaattgtatggctataattttaatagtttttcattttgaaagtctcttcaacttttttgtgaaaatatattcctttttcaaggaaaaattataactctagtaactagcttaattaaatcttttttctttttccatttaactcccctccccatacagataacacacagaaaaaaattaaagcaggaaaacaacctcatagtttgactattatttagtgttccaattcaaggcaaaaggctatggaagaatgacataaagcaatatgctgatttcctctgctgctttctagtccacaaaataatcaaca

SEQ ID NO: 583043 - DNA, 543 bp, Homo sapiens
agtggccagttctatgtgttgtaaaaatggtgacagcttaaagtgcaatraaatataatttcacaagttatttcagcaaaatagttttatttttaaggatattaatatgtttatttattctgtgaaataaaccaaagagattttatgtgctaataatgaatggagagtattaggaagaaggacacataaggtactggactgatgtgtgtttgtgtatcatatatatttggctttggattgacagcagagcaacagagacataaaaggatcagttaaccagactcttggaacactcactaacctaggaagcagagttattaggttagggttctgcctctgttgcaatttgaaattggaaaagtataggctgggtgcagtggttcatgcctgtgatcccagcactttgggaggccgaagccagcagatcacaaggtcaggagattgagaccatcctggctaacacggtgaaaccctgtctctactaaaaccacaaaaaattagccaggtgtggtggcgggtgcctgtaatcccagctacttggga

SEQ ID NO: 583044 - DNA, 707 bp, Homo sapiens
tctttcctttctactcttatttattgtattctttgataacacatttttaccacytgttgtcctaagtactaggatttacaagtggggaaaataatcctggctctcatggaatttatatcttttggaactaccggaactggaatgaagaatattaaaatttaagatgctcttagacatccaagtagctatgaattgttgcaatttgaacattttagtctagttcaagggatagatccaaactagagataaaattggcaagtcaatactatatgtttgttatttgaagccacaagagtacattttatctctttcctaaatgacaaaaaaggaaagaaccctagaaaatggtccttttcaccattttaaggatcaagggaggcatcagaaatggacgctaaaatgtgccagaaagtaagaagaaaattcagaatatttcaataactaggaagaaaacagtaaggagaaatttgaatcctcctatttggtcataatggatgaaagcaaaaattaactattggattgaacaatggaggttgctgatcttgccaagagtacattaggtggagttatgatggcaaaatactgattaaaattggtgcaaaagagaaaaattgagatactaaatataggtaactccaaaagttttgctttcaaggcaaaaattgggacaatagctggagaaagaatttaggtcaatactgaataca

SEQ ID NO: 583045 - DNA, 376 bp, Homo sapiens
gaccattgtactgttgcagagagggaatgagataggggatagacagctatctttgatgaagaggaagtaaagacattgagaaacccagcatgttaggaggggcatctacatagatttttgatgggattgttgtagagaatatctgagtgagattgttttttaaaaaggagctaaataacacgcgtactttaataagtttagattctctgcaaaatattctgcacatgagtataaaacatcctttcccatgttgatacatttctgtgaaaagctttgtgcattccagtagtgtgggcttgtgtgtttattgttttctcatcctccaagtgccaacgkgtcttatagttctcagagaactataagatatcccatatgc

SEQ ID NO: 583046 - DNA, 610 bp, Homo sapiens
tttaggtgccatcaatacctatgtctgatgccaaactaaacctaagtgattaagtcatttgattaaaaggcctgtcttttgtgttgtctaatactgaggagaggaagaagtgatgactcataaccatgagattgctagtcacraagatgagtcagggccagttttcttttccattgatcatataaaacatgaacacatgtgtactttgcagtcctagaaactttcattaattatgaaaagttagaaaattttgtttacagtatttataaactctcaaggaatattatggaagcttcactcccatgatgtaattaaggatgaaaacgatgtgtatgtgtggccaaaatctgaaaaacaataaaataaaaatgatttaggtctctttcaacccagtctccaggaatgcctctgactaaatttcttcatctgtaaaatgggatattgctagtcatcatctataagactgttgtagggactaaataagataacatatgtgaagagcttagcagtgcctgagccccactgtgcagccaatgcatttattcagagatcctgagtgccaaggtttaagttcagctgatgatttgcggcagtacacactctgggctgt

SEQ ID NO: 583047 - DNA, 514 bp, Homo sapiens
catgattataagaacctctaaaaacatgaataatttaaatgagataagattaataaatataatgctcttcatactcttttttctcatatatgtttttctctagaaagaaaaacacaaataaagcatatctgttgatgtaattgttatccttgtgttttttagaaggaattggtgtgtaggggtaaaacaggaaagcgaagaagatattaaactygcaacaagaaaaagttagaaacttcgatcacaaatgctgagttcccaaggttgtaaattttcagttcactttgacttttcccagactctttggtcaaaacaaacaagtaacaaactaaacagtttttctatcaccgttgcaaacctgatatgaaatcagagagtaggtatgtgttcatggcagttcaagaatatatcacgaggttaggtgcatgtgcctataagaatagaaagtggttcttcagagatgtgtgtacttagatcagacatgatatctatctaaaaaaaagaatgatgctga

SEQ ID NO: 583048 - DNA, 424 bp, Homo sapiens
catatctgttgatgtaattgttatccttgtgttttttagaaggaattggtgtgtaggggtaaaacaggaaagcgaagaagatattaaacttgcaacaagaaaaagttagaaacttcgatcacaaatgctgagttcccaaggttgtaaattttcagttcactttgacttttcccagactctttggtcaaaacaaacaagtaacaaactaaacagtttttctatcaccrttgcaaacctgatatgaaatcagagagtaggtatgtgttcatggcagttcaagaatatatcacgaggttaggtgcatgtgcctataagaatagaaagtggttcttcagagatgtgtgtacttagatcagacatgatatctatctaaaaaaaagaatgatgctgagctaagatggaggggagacctccacagcccaga

SEQ ID NO: 583049 - DNA, 599 bp, Homo sapiens
agaaaatgcaattagcatgacattattaggtcaggtagtcaattgtttgcttatttttatatttggacttatctatctatatacacacataagtgtgtggatatataaatgcatacacacttctaaattgtatacatacttatattgtacatatatgtgtatatatatactctctttacatatatgtatgtgtgagkgtatatgtatatatccacacactactaaatttttggcttttagtgtatgtgattattgattgtaaaagtagtgagaaatatgaatttctagtaagataaaagaatcaaataatcaatttgaattttatgcattttgagcacctagcaataatactggctttttagggcccaggaatcaatcactatttaccaaaggaaacaaaatgaaacatcaagtcaatagtttcctaagagctggagacaacacttctaaaaagaaatgcacaaatacaaaaaaaatttctcccccaaatttgtaatatgataatagaaggaacttaacaatttttttgtggtgatattatcaaaatagtttttttccaactactaaccttaattactttatttcctccccgaaggaaa

SEQ ID NO: 583050 - DNA, 499 bp, Homo sapiens
agagttaaaccttaattatttctattgtttcctattgcattaaattttcaaattaaatctagtttttattttgcatttttatcatccctgacacctacccaattgcacatttactactcatcctcatttcccacaaagtgctaggactaagagaacagaaaagtgagcttgaaacacagccarataaaaagtcagcaagacaatgcccttaaagacatctcatctgtggcgactcttcatttgatctttgtttctcgaagtgtccttctctcctgctttgctcctaggaaatgcttttaaacataaaatatgtaattacattccattctcttagtaaatgtgtgagtcagttagaaagcaaacatatataatagggagatgggatctgcccaggctggaggtttgtatcatttccaaagctgatgtttctattctgaaaacagagtatctcagcctggggagaaattcagaggttacatggatctcacaccaatctgag

SEQ ID NO: 583051 - DNA, 499 bp, Homo sapiens
agagttaaaccttaattatttctattgtttcctattgcattaaattttcaaattaaatctagtttttattttgcatttttatcatccctgacacctacccaattgcacatttactactcatcctcatttcccacaaagtgctaggactaagagaacagaaaagtgagcttgaaacacagccagataaaaagtcagcaagacaatgcccttaaagacatctcatctgtggcgactcttcatttgatctttgtttctcgaagtgtccttctctcctgctttgctcctaggaaatgcttttaaacataaaatatgtaattacattccattctcttagtaaatgtgtgagtcagttagaaagcaaacatatataatagggagatgggatctgcccaggctggagrtttgtatcatttccaaagctgatgtttctattctgaaaacagagtatctcagcctggggagaaattcagaggttacatggatctcacaccaatctgag

SEQ ID NO: 583052 - DNA, 600 bp, Homo sapiens
ctttgtacagaaaatgtacagacttttttgctatcattattccctaaaaaaatacaatacaacaaccatttacatagtatttacatttattargttataagcaatctaatgatgatttgaagtatatgggaggatgtgcatatattatgtgcaaatactatgtcattttatatcacagagttgagcatgcacagattatggtacccctggtgggtcctggaatgaatccctcacagataccaagggaagctataaaacagcatttcctttaccaggtaaaaacgtattgaaaacaaacatatttattggcaaaaataattaaaacattcttctggaaatcaacaacaagtaaaaaaatgtctgttaccaggacttctatttaaaattgtacaggaggcctctgctaatgcaaagaacatgaaatatgagtgtaacatctaatgaagaagaaatttttaaatgtgatatttaaaggaggatgactatgcacataaacgattgcacagattctacagatcaataactgaaattagtaaataattttagcagattttctgttagaaagccacaatgcaaacactaattttatttctatagacc

SEQ ID NO: 583053 - DNA, 578 bp, Homo sapiens
gatgtgcatatattatgtgcaaatactatgtcattttatatcacagagttgagcatgcacagattatggtacccctggtgggtcctggaatgaatccctcacagataccaagggaagctataaaacagcatttcctttaccaggtaaaaacgtattgaaaacaaacatatttattggcaaaaataattaaaacattcttctggaaatcaacaacaagtaaaaaaatgtctgttaccaggacttctatttaaaattgtacaggaggcctctgctaatgcaaagaacatgaaatatgagtgtaacatctaatgaagaagaaatttttaaatgtgatatttaaaggaggatgactatgcacataaacrattgcacagattctacagatcaataactgaaattagtaaataattttagcagattttctgttagaaagccacaatgcaaacactaattttatttctatagaccagccccaaattagaaatttaaagtttaactactacatatatataaatttatatacatttataaattaaccacaccatatatatgtgtggtgtgtgagtatcagaaaacat

SEQ ID NO: 583054 - DNA, 466 bp, Homo sapiens
ctgtgatgcacacatatcccatttcctatataagcctttcatattttggtgtttctaaatacttcaactgaaacttaccaaatgcttgctacaatcacagtgttgttccaattattttaatgaatactttatatctactgctgtaggtatacttataccaatccgtgtttttaagttctatttaattcacacctaaggaaataataaagcagatatttcaataaacttacccaatatcatacaagtaatagatatcagaacttagatttaaacagtgaactagaacatttaggtctttttttccccttttcatcatttccttataaatatgggaattgttgtaaagtyagtatttaatgtattaatatgtgctcccccatactagagctaagaaaaacaagcagttatgtggcaaacttctttttaaaggcttacaagtcttgttatttaccttaagaattgacac

SEQ ID NO: 583055 - DNA, 232 bp, Homo sapiens
gtcactaggattaagtaaatgtctggctacctaaaaaaaaakatttctaaattcataaattggattatttaaattattaaaataaacatatactgaagttcctgtaacagcaacttattctttatatttttgtgaagatattttctattattatagaaaattaagaaaccatatgtgcattgtgagctgaataaaattgcatttgttttggttgtcatacagcattttacaa

SEQ ID NO: 583056 - DNA, 601 bp, Homo sapiens
gactgctatttcaaaaatgtgtatcgaagagacctacacttaggaaaaaaatccaaatttactatttggcttatgtagctctgtataaatcattgcctgcataaatcatcatttgtgtcttatgcacacaattttgtttcagtacctaccactgaccaagaagacctttgttgaaattttcacttactggcctttgtggatctagagattatttttttcctagttccttctcagttttcatggttcctgtcaatgtcatctcctcagagaagggtmctctaatcaccccgattaagatagagcccttcctctagtgtcttttctccaagtactagtttattttcttcatagcacttaccaccaacaacaatagcaacaaaaagtctccaattattctgtattgtttgcatattttttccccaagtagaattcaagatacagaatggaactatattttccttgtttagttctatagttttaatgcctaataaaagttccagtctattatttaaaaaatagtatccccatcctaaagggggagggtgaaagaaaagttcagagagagtaaagtctttaaactaaatgtttgtgtttctccacg

SEQ ID NO: 583057 - DNA, 568 bp, Homo sapiens
gctgtccaacttggctgcaaattgggagttcctacaacctattcctcaagctcaataatttgctataaccattcacagagctcaaagaaatatttaattgatgttgacctatgtattatacatataataaggattataatatcatagatgatacaaatgaacagccagatgaagagggacacagggcaggcctggctgggttctgtgcacagrcgcttgtgagtctgtgtagtgggggtgcagctcccttctggcacgttaatgcattcaccaacctggaatctctctgaaccctttcagttagggttttctatggggtttctgttacatagtcagagttgattaaatcactagccattagtgatttactcaatctccagtcactcaaccatttccagtctgggtggggctgaacgttctaatcttctggtcatatgtttggttcctctggcaaccagtcctcaatctaaagctatctctgggtttttacccaccagacatctcattagcataaactgggatgtgcatgaaagaggtctcttataaattataaaagacacgcttatca

SEQ ID NO: 583058 - DNA, 537 bp, Homo sapiens
tagacattttaatttttatattatgtgagttttgccaattttggcttttataacttttttatttggtcaatgaatgtcgcatttcaattattttgtaagcrgtctgttagacattagcccaatactactcatatagacagtttatttcctcaatgggaaaaggaaataaaaccagatatttaacaaaaataacaaatttgacccttttttagaagtgaaaaaattcttataaatagaatttggaagggacttttattttcctaccatagtgccaatatacagagctaaatttaagaaaaagaaaatgactcttgttcagccaaagccaactttccaagggaaaaattctttaaatattcaagggtttttcagtacgtatttagtttttcagaaataaaaatattgagcatactaactgaaaatgtatttgacattttaagtgagattttccatttttttcagagaacacatcaatttcttactccaagaaattttgaaaatgtatttttaaatttttgacttaatgtggagactctt

SEQ ID NO: 583059 - DNA, 537 bp, Homo sapiens
tagacattttaatttttatattatgtgagttttgccaattttggcttttataacttttttatttggtcaatgaatgtcgcatttcaattattttgtaagcagtctgttagacattagcccaatactactcatayagacagtttatttcctcaatgggaaaaggaaataaaaccagatatttaacaaaaataacaaatttgacccttttttagaagtgaaaaaattcttataaatagaatttggaagggacttttattttcctaccatagtgccaatatacagagctaaatttaagaaaaagaaaatgactcttgttcagccaaagccaactttccaagggaaaaattctttaaatattcaagggtttttcagtacgtatttagtttttcagaaataaaaatattgagcatactaactgaaaatgtatttgacattttaagtgagattttccatttttttcagagaacacatcaatttcttactccaagaaattttgaaaatgtatttttaaatttttgacttaatgtggagactctt

SEQ ID NO: 583060 - DNA, 537 bp, Homo sapiens
tagacattttaatttttatattatgtgagttttgccaattttggcttttataacttttttatttggtcaatgaatgtcgcatttcaattattttgtaagcagtctgttagacattagcccaatactactcatatagacagtttatttcctcaatgggaaaaggaaataaaaccagatatttaacaaaaataacaaatttgacccttttttagaagtgaaaaaattcttataaatagaatttggaagggacttttattttcctaccatagtgccaatatacagagctaaatttaagaaaaagaaaatgactcttgttcagccaaagccaactttccaagggaaaaattctttaaatattcaagggtttttcagtacgtatttagtttttcagaaataaaaatattgagcatactaactgaaaatgtatttgacattttaagtgagattttccatttttttcaragaacacatcaatttcttactccaagaaattttgaaaatgtatttttaaatttttgacttaatgtggagactctt

SEQ ID NO: 583061 - DNA, 554 bp, Homo sapiens
catttttttctttgcttccatcatctgttgtaatttatgagatgatgtacaatagaagactatttattttcagagttaaaggattctgctgagaaaataacatatatgtttttactaaacagctattttctacaaaaatgtaatatgtagataactgaaaaatacaaaatctatgttgataattttcatgccaaaacatcacattgatgagtgccttttatgaccaagtataacagatacagctgaccctttctgaaataaatctttttctcttctttgttggctcacaaataaactaccattttcacctcctttgtgtttggggatgaacttatgatggctggcccagccattacattttccaagggatctctctcattgtttttccccttcagcagactagatagtgatatccagtgtgaacgaagcyttatgttgataatggtagagctttgagcaccctggatccctaaatgcctggagtagaataaacactctcaaccattgatctaagccatgttgcgatgcccaataactaaacaaacaaacatata

SEQ ID NO: 583062 - DNA, 545 bp, Homo sapiens
tcaatattgaattattcaaatgctggtaaattctatccgggcaaatttaaatagtcatttcagtattttactcttctagctgtgacaggtgggggcggtggaggagtaccaagagtgtcagtacccaggaagtcatctctcccctacagagacaaccatccctgcttgttcccactgagaatcccacatggcaactcagtcctagcacccaggaccacccaggtgcttaatgctcattagcatctctgggctacttctttgcccctttcaggggtttgggaaattcagttaatctctaccagctctcttgagctgcaagagactggggaagagggcggttccctccaatcctctttgttgtttatgtaatactgccatttattttytcttgctgctagggtatggtggtgtttcatggacagaacttgtttccccaggttctaactagggagtacattatgttctctctgcttttgactattaaatgtatttgattccttagctgtattgtctagacctgattcagggatcaggagcatttttca

SEQ ID NO: 583063 - DNA, 433 bp, Homo sapiens
tctggtaatatattttaaactttgcttctaacaaaacttttctgtggcattgaactttttttgctgattaggtttataagtgatgtatgtgaattcatccctatacattagctcttgaacaattgaaggtgcaagtcacttttgagtacttctattttaatggttattttatactggaaaatgttatttttatgatatttacttgagaacaagcaaactggataccagytctattatatattctgaatattttcagaattttactttatttttgtctggtagactagcatttcatcaataagcatgctttgctttaattagggttaaaatggattaatttgctttaaaatgagctattttcaagacatcatgttaaaaatatatttcttttagaataaaatctaaaaataagaaagacttatgctccagcagc

SEQ ID NO: 583064 - DNA, 577 bp, Homo sapiens
ttttttatagttgtcttcggtttacccacaacactacatagccttttaaaagaaaacgtaatacagtaatagttccaaaaccttaagataatgatttagggagtttcctatataatataccaatttacctaactatattttaaaattttgatttttcacttgtgatcttaaatgaaaaatattcctgcaaaagtgtaaaatgcttaaatatatattgaacagaaggatatcctctcttattgctaaatttaattttaaatatggaaatgcatgacatttattattaacaaattataaatataaagatgactgtaccatggcagtatcagtaatttttagggaaaatacttattattcatgtttatattcttgtgatatttatatataatatgtattaatactataatttattataatttattcattgatgaatttgcttctttctgtctatttcattctgagccttttttattcttgctgccctggagcagtaggtgtttctcaatggttctttaytgaccatttgtttctcactcccctgttcagctcatcaactttcatggttatcactcatgta

SEQ ID NO: 583065 - DNA, 638 bp, Homo sapiens
ctgagcaagagcattattggatatattatttttaatctcatcataattgaattaaataatctgaacacaacagctgtccagaaataagcatatagtatgttttaatgaygaataacctccactgatataccaggtttcacaaatgatctttctgttgcctttctttcaatcttttaaacaaattatctttttatatataaatcaaagtagtgtgtatagtacgaagttcaaactcacacaacaaaatttattcgttttctctcctgaaagcctttttctttttttatgaaagccacataccatctgtttgtatttactacaggtttttgtcattgtagtaaaagaaaagcaaattgtgtgttctgttgtactgcatgcacactgtctctgtcatgtaagtgtcgctgggagagaggtagctgtttattgacatggcgggacaatacactaggaaatcctgtcctctgtccagttgcacttttgttcccacaagaacctcacacctgtctctttctacctgcctctctctttctacccgcctctctctttctacctgcctctctcttcctccttcctccttaaatgtaacctggtggagaaatgtagccttcaggacagtgaaactgttgacatactgt

SEQ ID NO: 583066 - DNA, 538 bp, Homo sapiens
agataagaattgacaacaatactgtgctctaagcttttcctgatttataagtatgtatagccattttcattttcctacacagttatttactaattatgagactttaataaaaatttttctaagtatgyttttttctaaaatttgacaagtaaaggtcttgtagtgtttattaagttgtctttatttgttccttccttaattcataccatagattctattttaattgcacatttaatgctttcattgtttttattctttaaccctttctccaattttcctccttcccctaattccttggtagtcttttttttttaaattattattatactttaagttttagggtacatgtgcacaatgtgcaggttagttacatatgtatacatgtgccatgctggtgtgctgcacccattaacttgtcatttagcattaggtatatctcctaaagctatccctctcccctcaccctaccccacaacagtccccagagtgtgatgttcctcttcctgtgtccatgtgttctcattgttcatttcccacc

SEQ ID NO: 583067 - DNA, 646 bp, Homo sapiens
ttttatcagcagcatgaaagtggactaatgcatattcaaagcaaatgaaatcagtaagtcgaagagatatctgcactcccatgttgattgttgcattattcacaataatcaaattatgaaatcagcttaagtgttcatcaatgggtaaataaagaaaatgtagcttaaataattaatatataattatatataattacacaagtaatcttcacacacttaaaatattctgtcatttgaggaaaaaaatgcttaacctgggagacactatgttaagtgaaataacctagaaacagaaagacaaatgccacatgatcttactcatctagaatctaaaaaagtacaccttatgggtagataatagaatggtggttatcaaaaggttgagtgctgcatgggagtgtttgggttgatggtcataggayacgacatttcagataggaggaataagttcaagggagctattgcacaacacgattactatatttaacaatatattttattcttgaaaactgatgaaagagtaaatgtgaagtattatcacaaataactataaagtaatagagatgttagatagaggtaatcatttcataatttacacatacttcaaaacaatctgttgtaaatggcaaatacatgcaattttaac

SEQ ID NO: 583068 - DNA, 616 bp, Homo sapiens
cttcacatacattcttgacaactcctgactaccttaggaggatctaggtccatctatttaggacaaatggctcataaaactaaatataaattgaaaatttatacaacatctaagaggaaactcaagaaaaaatcttaaagacatttgcttaagtaaacattgttttatttcatttaagatgaaatgaaaccaccaaaaatatacataaaagaaaaattttgataagttctacttcattaacatgagaatcttcttctttttaaatatacaagtaatagaattaaaaaagcaagctacgggccgggtgtggtggctcacgcctgtaatctcagcactttgggaggctgaggcaggtggatcacttgaggtcaggaaatcgagaccatccttgccaacatggtgaaaccccatccctactaaaaatacaaacattagctgggcatggtggtgtgcrtctgtagtcccagctacttgggaggctgagacaggagagaattgcttgaacgtgggaggcggaggctgcagtgagccaagatcacaccactgcactccatcctggcaacagagcgagattccatttaaaaaaaaaagctacagcctggaggagaaaagattt

SEQ ID NO: 583069 - DNA, 593 bp, Homo sapiens
ttttataataatatcattttataaattaaattataaataaattaaattaagttattttaattagagtttgtaaaaaatgatcaagatgacctggactaaaataaattcaataaagaactaaaccaatatcctaatttgcacattccagggagataattcttattttgtacaattgatgatgagtttggatcattaaaaatattctggcagatttttcaaaaggtgatttaatacctgtctttgtctttttctactgctcgaataaaatacctaagaatgggttgtttataaaggaagacatttatttctcakagctgtggaggctgagaagttcaagatcaaggtgctggtaggcttgatgtttgatgagggccttgttttctctttccaatgtgatgtctcgttgcatcctcctgaggagtcaaatactgttttctcacatatcagaaagtagaagtgcaaaaagggcctaacatggttcccttcagctcttttataagacaataacctcattcatgatgactgaaccctcatgacttaatcacttccccaaatgcttcatctcttaatactgccacagtggagataaagca

SEQ ID NO: 583070 - DNA, 468 bp, Homo sapiens
ttctgataatgaatatatacatatatattttctcatctatattctggtaatgaatatagctatttaaaatgatttaaatgatagtttttgttcataataactgacattgttatttaagttaaattagatataagctatgtaatccctgatggatgcaaaatcaagattgaaatagaggcacaatccaaatcgagtagaaaataaaatgtgttcaaccataaagattaaagtcaatactttcattttatgttgacattaatttacgtaccattcaasctctgtaacttttgcatttacaaaatgactttttctattgctcttagaaattaagagcaatagaaactacagtccgagaaaaattagctaacaataaagtttaataaaacatccatttctactccgcagtttacacatacacataagcacattcacaaatatgtaaagatttaataacaatactaataacaa

SEQ ID NO: 583071 - DNA, 468 bp, Homo sapiens
ttctgataatgaatatatacatatatattttctcatctatattctggtaatgaatatagctatttaaaatgatttaaatgatagtttttgttcataataactgacattgttatttaagttaaattagatataagctatgtaatccctgatggatgcaaaatcaagattgaaatagaggcacaatccaaatcgagtagaaaataaaatgtgttcaaccataaagattaaagtcaatactttcattttatgttgacattaatttacgtaccattcaacctctgtaacttttgcatttacaaaatgactttttctattgctcttagaaattaagagcaatagaaactacagtcygagaaaaattagctaacaataaagtttaataaaacatccatttctactccgcagtttacacatacacataagcacattcacaaatatgtaaagatttaataacaatactaataacaa

SEQ ID NO: 583072 - DNA, 650 bp, Homo sapiens
ttgcaacttttctgaggttccaaactgtttcaaaataaaaagtttaaaactgytgtgagaacatattaataaattacaatactttcttgaatagtatcttttttatggagacaaggttattttaatctaatgtatacaaagtgacttaagatatatgtattaaagataaaataaattcagtactatatacctacaataaaattagttttctgagggcaaagtttttgtcaggctgggtgtggtgtttcatgcctgtggtcccagcactttgggaggctgaagtgggaggactgcttgagcctgggaggtggaggctatagtgagcctagatcactccactgcactccagcctgggcaacagaacctgtctcaaaaaaaaaaaaaattgtcaggtttgttcatcattgaatctatggaaagcacaatacttttcgtacattcagtataatactttccatacattaggccttaaataaaaacttgccaattaactgactaaataaatgagtgtctttccccaaggcaaaataattacaacattcctttggaaattttgcaagccttctaaaggataaggcagtgttgccttcttctctccccttcgtgggcacacactccattactctcatgcttaggtaaggagaattctt

SEQ ID NO: 583073 - DNA, 560 bp, Homo sapiens
agtactaaaacaactctatcttgtgggggagcatttgtatccagagtctcagagaaagtctaggatcctttgccctcttcttacttttttctccatcagcaaacattattttaggatagaaaaaaataaaatctccatttaaatagtccatagatctttcaatgtcagtatatccacattgaaactcatagtctttgtcccgaaacatgattcttttccatttatttatttgatcattagcaattaactcatccaataaatacctgtggagtctttgtcatgttgtcaatattgcactgggtsgtgttgagaaacagtttgctaagcattgtttcctatgccttcacaaatttgcagtctggtagaagatgcctcctctgaggaatctgacatttgagctgagacttgaaggatgagtaaatattaactaggtgaaggcaggagcagaagagaattaactcctggcatcctgccaagcaggagctgaggcagaaccaattacagtatgccagaagaaatgaaaggtggctagtgtctctggagtgccaggtgtaagggaa

SEQ ID NO: 583074 - DNA, 560 bp, Homo sapiens
agtactaaaacaactctatcttgtgggggagcatttgtatccagagtctcagagaaagtctaggatcctttgccctcttcttacttttttctccatcagcaaacattattttaggatagaaaaaaataaaatctccatttaaatagtccatagatctttcaatgtcagtatatccacattgaaactcatagtctttgtcccgaaacatgattcttttccatttatttatttgatcattagcaattaactcatccaataaatacctgtggagtctttgtcatgttgtcaatattgcactgggtcstgttgagaaacagtttgctaagcattgtttcctatgccttcacaaatttgcagtctggtagaagatgcctcctctgaggaatctgacatttgagctgagacttgaaggatgagtaaatattaactaggtgaaggcaggagcagaagagaattaactcctggcatcctgccaagcaggagctgaggcagaaccaattacagtatgccagaagaaatgaaaggtggctagtgtctctggagtgccaggtgtaagggaa

SEQ ID NO: 583075 - DNA, 590 bp, Homo sapiens
gccaacactctgagagacatacaattattatcaccatttatacagccagaaaccaagggaggttaggtattttagactgattttagactgcatatattctaattaagaaagctcaatttgaaagtacagggaatccaaattagagtactttttttttttttttgagacagagtcaagctctgttgctcaggctggagtgcagtggcgtgacctcagctcactgcaacctctgcctctggggtccaagaaattatcctgcctcagcctcctgagtagcagggattacaggcacatgccaccatgcctggctaattcttgtattattagtactgatgggtttcaccatattggtcaggctggtctcaaactcctgacctcrttatccacctgcctcagaatcccaaagtgctggaattacaggcgtgagccaccgtgcctggccagaacacttattcttttagccactagcatccatcttcattgtcttggcaatggaaacccatgatagaattttaggcagaggagtaggagtaatcctcataccctgttcccctctgtcagtttaccagcacctttatacttaacagcgg

SEQ ID NO: 583076 - DNA, 367 bp, Homo sapiens
gtctaaactcttctccatcagcagtgcgaatcatctccttcagtagcaaggccgattaggtcaaatcatacttaaacaccgtaagctcctttccaytgcacgtagaataaaatcttcatccttcactctgttagaatctctgtaggatccgttcattgactctgacttcagcccaattttctgccaatctccctttcactcattaagctccagagatatcagccttgtctccatttttcaaacatcaagcatgttcccaatttatcgtcatagaccatgctctgtctttactaaaatgctacctctccgtgcccaccacattttcctactggcactcattcatctatcaggtctcaacacacaatta

SEQ ID NO: 583077 - DNA, 367 bp, Homo sapiens
gtctaaactcttctccatcagcagtgcgaatcatctccttcagtagcaaggccgattaggtcaaatcatacttaaacaccgtaagctcctttccattgcacgtagaataaaatcttcatccttcactctsttagaatctctgtaggatccgttcattgactctgacttcagcccaattttctgccaatctccctttcactcattaagctccagagatatcagccttgtctccatttttcaaacatcaagcatgttcccaatttatcgtcatagaccatgctctgtctttactaaaatgctacctctccgtgcccaccacattttcctactggcactcattcatctatcaggtctcaacacacaatta

SEQ ID NO: 583078 - DNA, 519 bp, Homo sapiens
gattatcaaaatactttagctatacttactgccatctataccaaggatttattaaatagtataacggacatttgtaaatatttttcacttctaggatgagtaataagttagatgtgaatcagtaaaagtattgggaagtcacttccatgattatgcaaagtagagaaaacaaaggatcccasgtaaataggtcctcatgcctgtaattcctatgggttatgcgctgacactgattagaaggttcatcaaattttgctgctagagtattgttacttgtgactcatatcaaccttcaagatttggggaagacacaacacttggaattcattgagcctctataatcgttttataattttttttttgcctaaatgacaataacatttcccaggacagcagaatttattctgagagttgttttcattataacatatcatctgacagtagggagactgataacgcttgcacatgtcctacaactgaagaattactacaaaaagacatctaatgattgtggatgac

SEQ ID NO: 583079 - DNA, 563 bp, Homo sapiens
aattgactatatgcatgattataggtgttatctaggcactgtgtttaaaatgataatttaaaatgtttgttttaaattgcagtacaagaggaatatgtaatacttcaatatatcgtcaaggtaattattgcgtaaaataatgatagtaaaatggatttatttaacatatgaattaaataagataatagtgaggcagtaaaataggttctgggggcaggggacatgaggccaattcacacttcagcggtaacaggaaatatcctctccatagggcatacaccgtaaataactttgtaaatttacttcatcctctccatttgcatagggtgtaccagaagtaaccaatggaatcctctaggaggtattaaaactcccaaaaattctgtaacgggactttgaacccatatgttcaggcccactcgcacattgtggagtgtactttcattttcaataaaactcttcattccttcctcactttgtttgtgcgttttgtccaagtctttgttcaagacgccaagaacctggacaccctycattattaacaatagtacaagatgaaagct

SEQ ID NO: 583080 - DNA, 570 bp, Homo sapiens
tttgcctgacagtggttttcacaataagttttgggcagaatgtggaaatgaatttttccttcagcaatatcaaaatggtatatttscaggtatttataatcttctttaggggcaggagtggaacacttttactcctgtagactccatgctcttcttcttttttaaatatttatttaattttaaaaataattgacacaataattgcacatatttatcaggtacaatgtgatatttcaatgcatgtatatattatataatggttaaattagggtgatcaccatatccatcacttttaaaatgtatctttctttgtaatgacaacattcaaaatctttactaaaccaattttattttgcttgtgtagacacaacgtgaaaatgatacattatctctttttatgtgtttctgtactcaacttgctagtattttttttagatttctagaatctatatttgtgaatgagattaacctgtgattttctttcctcatactgtacctggcttgttttgttatcaaaacataaaatgtgttggtagtttttcctattgttaatctgccggccagtgtaat

SEQ ID NO: 583081 - DNA, 535 bp, Homo sapiens
gtgtgtgcgcgcgcctcatctttttttacctgtgtctcctatgtcatgttttaaatatttcatctaggtttttttttccataaacattatgcgtgaatttttcagttctaatttctagtttgcttattttttattaaaatatgcttaattccttaatcagatcttcattgttatttgtttttgtaatttataaatcatacttttctattttggaagtttttttttaatattcattttacaagtctgatacctgaaatatctatgttatgcttttgccatttcttgtttctgctgcttctcaatcatggtgacttatttccctatgtgtttcacaatttctgttttctatctgcttayatcatttaacctgagtttttccgtataagttttgcttaatgtctgcaagttttttgtggttgctatcaaattggataaatttttaactgtgtttctcacttaagatttttgataatactcagacaccaagaaattggattgaaagtttgcatttgggaaagattatgataaccagttc

SEQ ID NO: 583082 - DNA, 510 bp, Homo sapiens
tcagtcaggttaacagcacccccatgatgttcttkcaccatggggttttttgtccactcagaagaatttaatttagtccttgctttcaaaaggactaactgagacagtcagttgtgaacagttttatttgttcatgacattagtttatcaacctcaggagtgtgaatgacatctggaggtgttctccgtggaaaatccaagagctgaggtcaccccctgctgtctcataatcagcattatcaggtgtgatcctagtcgcagcagtcactttgaacttgatgtgttcacagcagtttagaaaggtagtgcagggaggtggtgatggtggtgtgtgtgtgtgtgtgtgtgtgtgtgtgtgtttatgtgtgtctttccccagaatgaacagaaaactgtcagaagctgatctggaaaataaagatcattaatgtcttggcctgaccctaccttcaccccaccacacacatctccccaggtgtcagctggggctttgtttgtttgtttgcccac

SEQ ID NO: 583083 - DNA, 514 bp, Homo sapiens
gactaggctttcatcaaccaagaggaagggttttttcattaattctttgaacaaatgcttcatgaatatctgatatatatgaaacagatgtataacacccttcttgattatcagtagctaacactagaaagctaagacataaatatcaattattaaaatgcaaagtagtacaagccataaaattggtactaggggactgctataaaagtctggaggtgggagagatgttctgaaattaaggtaatcagaaaataattaagagacagtaatctttgaggtggtttttatagtaaattaagcaaggaaaacaacgagtagtattctagacatattccacctatagttatacaaaactgtaattcctattcaaggaatgtcggctccttacttcgatagaattaagatcaatgtctgtgagcaccagaaaatatgtgttgaatgaattgactaaatcaattaatctgaaaasgtaaactggagccaatctacagagtcatttaaagacaggactaaa

SEQ ID NO: 583084 - DNA, 577 bp, Homo sapiens
acaaacaaatcgatgtataaatttgacaattaagatgaactggaccagttcttcaaaaagcataccctatcacaattcactcaatatgaaatagataaagttaatagtcctgtaactacttgagatattaaatttgtaatttaaaaattccttgcactaaaaattccaaggcccagatagtttcagaaaagcattatataaatattttaagaaggaataactaattctacacaatttcatgcagaaacaaaagtagggggacaaattcaaactcattttatgaagttaatattaccctacttctaaagcaagggatagagagtacaaacaaaaaatctayagatcaatgttcttcattaatatagatgcaaaattattatacacaaagagttataggctgggagcagtggctcacacttgtaatctcagcactttaagaagccgatgcaggcaaatcacttgaactcaggcatttgagaccagcctgggcaacacagtgaggcctcattttagtgagatctctatttttttaataaagaaattaaaatttataaaaaaaaagaaaaaaatgaattat

SEQ ID NO: 583085 - DNA, 592 bp, Homo sapiens
tatagatgcaaaattattatacacaaagagttataggctgggagcagtggctcacacttgtaatctcagcactttaagaagccgatgcaggcaaatcacttgaactcaggcatttgagaccagcctgggcaacayagtgaggcctcattttagtgagatctctatttttttaataaagaaattaaaatttataaaaaaaaagaaaaaaatgaattatataccatcaccaaatggggtttattccagtcatggaaggctaaatcaatattcaaaattcaataaatgtaacccactatattaacactataagaaagaaaaaaaaatctcaagattatatcaattggtatagaaaaagcatttgacaaaattcaacactcattcataatttttgttaagaaatgtcagaaaaatagaaatagagtagaatttcctatataaagaggatttacaaaaaacaaagcaaaacaaataaactcaataaaacctaccagtcatatacttaaccatgaaaaaatgaatgcttttattctaccaggattgtgaaaaaatatgtccaaactagtcactcttatttgacatagtactggtaatt

SEQ ID NO: 583086 - DNA, 630 bp, Homo sapiens
cttgaaactcctactgttcaagtatagttctgtagaaattgcttcatttctcatccttcattgaaggacgaaatttgtagtgcccacagttggctgtttatgtctccaaacaccagactggcttgatggccaagaccaaacatcaatcctctttggctttcatatctggaaaaacattcctgatcgctggttcctccacctagtgaccagtttcaccttccgttcccaaatatttcaattcactaaaaactcttagtcataaataaaaactcctaactgatcacctgaaaactcctttttttgtaagtccacagtcaatctgtcaatgatttctattaattctaagtaagatcaatcagttttctttaaaaaaaaattaattcctaatgcacaagggcaaagtgtaataatgcggttcttgatagaacacatttgtttccttataggtctctgttcttctgtgtatgacctcttccagtatatattttttgttggtcagataaactcatcattttaaaatgcgaatcagatagctccactccwtgcttaaaaacaaggggtgcttgctttttaacatgtaccataaaaggccctgtttgatcctatcccatcaagtttctctagatttta

SEQ ID NO: 583087 - DNA, 596 bp, Homo sapiens
atgccagacaccactggaacctgagaaacttaattggcattacaggttttggcaacttcctgagtttaactcagcttactgtgcacacatcttagagaggcatctttgagctcgttactttctgatcatcaaattcggtcaacttatgtcctcagtaaagtggaccagaataatagttyaatgtaatgtcagcctgactataatatggcaagaagcaagaatattgacacagccccaaagtgagtgaagttgcacttttgtctcagctagtaaaaagaaaatgcttctgctgttctttgcaatagttacatagaaatgtgtcctggtgttcggtgctataatacatttcacctgcaactgaagtcaccatctaattaagtttattacaattaataattcttatctatgattcagcaaacttttgtccaagccaaagaggcagaaaacgggaaaggagagatgccatccttccatttccaagtctttgattgcgccaatgatctctgaaattccacgaagataatatattatgaatagctcattattctggtagggagaaattcctggaatttacattgacccttcctcaaataata

SEQ ID NO: 583088 - DNA, 627 bp, Homo sapiens
aaatagtttttagagacagtgaatggatctaaacaacagacaatagcttgtaaatgattctctttggacactgaatgtgatcaaattatggaaggtgagaggtagaactgcaatttaaacaaaggttgtcttgttatgcggataaagtctcttagtatctctgggcttctctcagaagaatagattaaaagtctgtctgggcatgatgacaacttttagtctcttcttttctctggtggtcagtccaacatgcttatttgataagattcctgtggagaagtttttaagacaattgcatttcttttggaagaatgaatgattgtaaatgaattatttaattcaattatctaatctaatctctttgcaattcttcaaattgcctgacttgtaaatctttatagcagtattcagcaaattgcattttgtggaaattcaagtttcccaagctacattttttgtttttggcggggggaggaacttttcctcagtcaggtaaaggaactcccagaaagaccccttcctacttttgggagaggggcaagagaagattagaaagtccttggttctgagcttytaaaaccttctgattttctttcactcaaaagtgctcagcatgccaaagcatca

SEQ ID NO: 583089 - DNA, 582 bp, Homo sapiens
attcacgtgatcttgtttgtaaataaaatattgtggggtaatttcccattcatctcagtctgtactgtgtgtcatttattgggtcaagaccaattttggggtttgttccttaacctggagtctcagtacacatgcacacagcaaattttgttaccacactcatgcagaatagygtctaaggcttcataaatcttgtgtgttattccatttacatccagaatgggcaaccaatttctagaatatatctctaggatgatgaatagaatttttctaatcctaattcatgaatgagagatagctttatcctgacagttttctttgctttatgtagagaataacgtcctgctacttaaccatctgtggggcttgagacttgcaatcttgatagcccctatttcttactctgcctttgggatacctctttgtttatggcagatcatgttcttgctcttgagctcacctacacttctcttttcataatttatccattacttatgtatgttttaggcggtaatggttttgttcggcctccattgggtgtaaaattcagacaggacttactttttttctcatataaaacat

SEQ ID NO: 583090 - DNA, 592 bp, Homo sapiens
agtataacatcctttaaagcttttgctctgaaatgacaataaccattccatcaaattcttcagcatctaaaacaccacagggcaatacccaatttcacaggggtgggaaggaacaatattactgatactagaaaggggtagggaagtgctgggaggagaagagtggggtccctggagagatctccactcctgggcctgtgcccacatacctaggtgaggacaggcactcccgtttttgtgcycaaatgttgcattttctaagaccaccctgacctgccacactcccactctgtgcctataaaaaccctgagactctagcaggcagagacacaagcagctagacatcgagaggaacacaccagcagaggaaaacacaagcaactggatgtcgagaggagcatgctggcagaacacactgagacaccaggcagattctggcaggctgaccggcagaatgacacagagttgttggccagggtagtgggaggagagcccagctgctggtcagcccgactccaggtgaaaaccaccttccactccatcccctttctggtttggttctctatccatctgctgagagctaccactactc

SEQ ID NO: 583091 - DNA, 623 bp, Homo sapiens
cagacagcaacaaacatacctcatgacataaagaagacactttcattaaaagtctgacattatttctacaattaattttatataagtttcagcacacaagtaaaaataaatacaatcacaaggagtcaacatcagatgattgaaatttaagaaaaaaatacaatcagtgccacaagaaattcagacatgaagttattagaatcagttgttaaaataagtatactcgtatgtttcagaaaacatgcaaatttggcaaaaaagtagaaactgcaagcaaagaactaaacaaaaattatctccaaaacaacaaaatattgaaaaaatcaaaaattcagtaaattaacttaccaaaaaatccaatacatctgaataattagttcactagagaaagaagagattatgtaaaayaaaatgtaaagaaacaaaatatatatatataaaagagactgtaaaagacatggggatacagtgaggggttttaagaaatgcgtaattagaatcccagaataagaagagacaaagacagagcaatacttaaaagagaaaatgggtaaaaataacattatcatgaagcaaaaagctaatgcaattaaaaggtaaaaatatcaatttgcatgacccta

SEQ ID NO: 583092 - DNA, 585 bp, Homo sapiens
atttacaaatctgtgtgacacagatagaaaacacttgccattttctcctaaattttataattctaagaagtttctatttttgtgtaagtaaagagaaaataaaaaatttaactaaagtaaaattagattcaactcatggctccagattttgatggtagagttctcataatataacccatttcattttataaagctgttattttataatgtcataacaatattttgtttcacagttgtttgaaggttgtacagcttttaaaatttactataaatttatgggttttgtattctgaactgttattacatagatctcagatgtcacatggttgggaaaaaatattttcagaatatttgggccctgtatatttgcacaaaatgcttcctgtatcattgacaccttatgtgtcacttaagacacagctaaagtaccataattccttagctgtccccatctccakttagctttaggtcccttctttgtaaatctcctacacctggtatgttaccaggtacataacacatgttcaatataggttttataatgactgaataattctcttaacttttatttactttaaaatatta

SEQ ID NO: 583093 - DNA, 680 bp, Homo sapiens
tagaaaactgtagtgtagaacacattatgatatatatttgctttattttcttatagtggtggattaaatataataggtcacatattatggcttagaaaatattttgagtatcataaatattctgttctccaaacactctgtaagatagactgcaaattttcttatttccattttaaaataaataataataaaagctcagtgacttgacctttgttacactattggtaaagtaaaaccagaaaccataccatacatatatayttcaaaactttaagccatactgcttgtacaatatattttattctagcacagatgcccaaagtaaagcaaacatttttgttttatttctcccagttctaaaatactgggtttgctgatttttaatttctacacaaatataactggtgaagatatgtttcccaaagaccttttttgatttggttggctgattactatcatttgaggatcttaatttacctccttaaaaaaatctttgataaggttggttgttggagtgggttataggatgtggtcggggtagccatagagaaaataaaaaaagattcatattttcactgacctctttacacattttgctgcaagattatatttacacagttctaaagaaagttttgagcgttgtatgattgaggctaataaatgaactttgttttttttct

SEQ ID NO: 583094 - DNA, 556 bp, Homo sapiens
ttccaatttaccacactttttcattattcatgtatatgtatatccttcctggctattattggcactgattttcagatgcttttttgaaaaatgccatgagaaagaccagataacaatatccctgaaaaaatatttaaactgaaatcatatatatcaaagaagcaatctcaaataggcagatagattactatcatattttgcttaagcagtgtactttcttttcaagaagaaggttttgttcacagaattctattttgcattgttccatttttgctttagtgctattgtrggtaatattgctaggtactaatgagcttgtcactataactgaattcaatcagtctttttatcccttgttctaagattctattgtgaaaatctagtaagttgtgtgatgtcataggtgtaacactttgtgcaagtaatagccaggatttttcaacacaggccatccatttcattaactatatgggacagataatataaataaggaaggaagaatctttctaccattttctctctgaactggcgtacaacacactagaccatgtgtaca

SEQ ID NO: 583095 - DNA, 583 bp, Homo sapiens
aattacctggtctcaggtagttctttatatcaatgtgagaatggactcatacagataccatctcaaaccagtcagaatggataatattaaaaagtcagaaaagaacagatactggcaaggttgtggagaaaaaggaatgcttttacactgttggtaggagttgtaaattacttcaactattgtggaagacagtgtggtgattcctcaaagacctagaggcagaaataccatttgacccagcaatcccattacttgctatacccaaaggagcataaaatattataaagataaatgcacatttatgttcactgaagcactatttacagtagcaaagacatttaaccaacttaaatgcccttcaatgatagacaggayaaagaaaatggggtacatatacacgatggaatactatgcagtcataaaaaggaacaagatcatgtcctttgcaggaatatggatggagctggaagccattatccttagcaaactaacacaggaacagaaaaccaaatgctacgtgctctcacttataagtgggagctgaatgatgaaagcacatggacacataatgtgggggacaaca

SEQ ID NO: 583096 - DNA, 558 bp, Homo sapiens
atgaaacacaaattttgtagatacatatttaagtcagaaaagttattttttatatggatgaatggatcagttatctatcatgtatgtgcacattctgctcttccaggaaaggaacagaacagatagagaatttagttactatcaaggttgcagttatatgaaatatgtttaatagaaaaatkggagcaaggactgtgtataaatgtataaatggccaagggcaatgaagagtacaaaatggaccaagcatgaataatatctagaaaagatcagcacagaaatggctaatgagatagaaaaaaatgggtcaagtcaattcattacagactttaaggaagtaaaaatatttttggaatgtaggcactaaaaaaagacaaattagaaagtgttggaaaaaggtaagtgttgattaaagtgggatgcttgaaactgagatttttttatagttctacagctactgacaatcacgaagcttagaatataacaatgggagtttctgactgagtgacttggagcaacaggctattggaactagagaagtcaaagagtggaggtatt

SEQ ID NO: 583097 - DNA, 631 bp, Homo sapiens
agtgatgttgagcactttttcatatacaatatctgttggctatttgtgcatcttcttttgagaaaggtcaattcaggttctttgctcatttttaaatcaggttttttgtttttgtttgctattgagttgcatgagttcctcacatattgtggatattaacccctaattaaatatatggtttgcaaatattttctgacattccatgagttgcctttttactatgttgattaatttatttgctgtgagaaactttgtagtttgatgtagtatgatgtatttaattttgcttttattgcctatgctttttgtatcatatccaaaaaatcattgccaagagcaatgtcatgaaactttttccctatgtttttgtccaggagtcttatggttttagatcgtacatttaagtcttcaaaaaaatttgagttgaatttggggaaggggtaaaaaaaacawccctggggtttggtttgttttttggggggtttttttttttttttttttttgcatgcagatatccagtttcctcagctccatttactaatgacactattccttctattccttccctattgtgtattctaggtaactctgaccatgtgcatgtgggtttatttctgggctttctattctg

SEQ ID NO: 583098 - DNA, 596 bp, Homo sapiens
aaaacagagattgcatctataatacccacatcttggtttctaatgccattcccagaaatggaaacaaataaactgaaaaacaaggatccttagagaaatggctgatccaggaccgggataggaaatataccatatgaacctggaacatctcttagtacctgaaagtgaggacatgctcaacaaaaaccgaaacccattgataggaacatgtcaaagggggaatgggaaccaatggaaagagctcccaatggtcaaatttgaaacaacttgagcaaacaaaatacataaagtagtattggattataaaccaaaatgtaaaataaatattcatgaatctgtacttacatgaatatgaatcccaaataatttatgtattctactctcaaggaagtggatcataactctccactccataagtgtgtgctgcatatagtaactcccttctcaagagtgcattatggtagccaggcgcggtggctcatgcctgtaatcccagcactttgggaggccraggcaggtggatcaactgaggtcaggagtttgagaccaacctgaccaacatggagaaatcctgtctctactaaaaatacaaaatt

SEQ ID NO: 583099 - DNA, 596 bp, Homo sapiens
aaaacagagattgcatctataatacccacatcttggtttctaatgccattcccagaaatggaaacaaataaactgaaaaacaaggatccttagagaaatggctgatccaggaccgggataggaaatataccatatgaacctggaacatctcttagtacctgaaagtgaggacatgctcaacaaaaaccgaaacccattgataggaacatgtcaaagggggaatgggaaccaatggaaagagctcccaatggtcaaatttgaaacaacttgagcaaacaaaatacataaagtagtattggattataaaccaaaatgtaaaataaatattcatgaatctgtacttacatgaatatgaatcccaaataatttatgtattctactctcaaggaagtggatcataactctccactccataagtgtgtgctgcatatagtaactcccttctcaagagtgcattatggtagccaggcgcggtggctcatgcctgtaatcccagcactttgggaggccaaggcaggyggatcaactgaggtcaggagtttgagaccaacctgaccaacatggagaaatcctgtctctactaaaaatacaaaatt

SEQ ID NO: 583100 - DNA, 452 bp, Homo sapiens
gtctctactaaaaatacaaaattagccaggcatggtggcacatgcctataatcccagctactagggaggctgaggcaggagaattgcttgaaccygggaggcggaggttgcggtgagccgagattatgccattgcactccagcctgggcaacaagagtgaaactccgtctcaaaaaaaaaaaaaaaaaaaaggtattatggagaggagtgggggagtacctttacagtggagaagcccgacaaccataccacggccaggtggccatggctaacatcatcagtgataagtcgtattgatagtatacatctttgatatgatgcaatgagaattacattttacctctatggtcttcctctgccgaaaccccactcctgagaaaacaacagacaaattctacaaaatacctggtccatactccttaaaatttcaagtcatccaaaacaaacaaaca

SEQ ID NO: 583101 - DNA, 564 bp, Homo sapiens
  misc_feature 535: n = A,T,C or G
ggcaactgtaatgcattggtaagcgttcatgtatctaaacatagaaaagatacagtaaaaattatagcattataatcttatgaaaccattgtcataaatgtggtccatgattaatcaaaccattgttatgtggtgcctgactctactttcactgcattatgggtaaggagttagtatgattcatggtcaaaatataataaactatactggtggaatgctagctgcctaaagacagtataggtacagtagttaagtatgtatttttagatgccagattgtttggttttaaattctgactacctttcacaagatgtataactttggtcaagacccttgagctccctaatctttcgtttcctcagctataaaatggagatartaatacttataagtctgttgtaagaatgaaataatatagatcaagtagcttagataggcatttatatagaacaccgtaagcaatcagaagacaccagatattatttctaaagtagatgcagtaggacacaggtatacatgtgtgtgatctgtgtangatccactaattatgtttcacaaagtaat

SEQ ID NO: 583102 - DNA, 615 bp, Homo sapiens
gctataaaagttttaatattttccaaccctgaccaataaatactttatagacagggagactaaaggaaagaatttagtaaggttggaaggacaaagagttataagagatgtgatatataatcattttattgttttgttgttttagtagacctggatttggatctaaactcgatttttttatttgtaaaattaacacacaataatgctgactcttttggtgtgcagtkttatgcacgttaacacatatataaatttatagaaaacgctaccgacatcaaaatacaggagagttgcatcaccctaaaaatactcttatgctactccattatggtcatactctccatcaactcttaacccccatggtaacaatgaatatgccttcatcactataggcttttttttttaaatttcaatagttttgggggaacaggtggtgtttggttacatggataagttcttcagtggtgatttctcagattttggtatacccatcatctgagcagtgtacactatacccaatgtgtagccttttatccctcacctgcgcccacccttttctctgagttcccaaagtccattgtatcattcttatgcctttgtgacctcataacttag

SEQ ID NO: 583103 - DNA, 615 bp, Homo sapiens
gctataaaagttttaatattttccaaccctgaccaataaatactttatagacagggagactaaaggaaagaatttagtaaggttggaaggacaaagagttataagagatgtgatatataatcattttattgttttgttgttttagtagacctggatttggatctaaactcgatttttttatttgtaaaattaacacacaataatgctgactcttttggtgtgcagtgttatgcacgttaacacatatataaatttatagaaaacgctaccgacatcaaaatacaggagagttgcatcaccctaaaaatactcttatgctactccattatggtcatactctccatcaactcttaacccccatggtaacaatgaatatgccttcatcactataggcttttttttttwaatttcaatagttttgggggaacaggtggtgtttggttacatggataagttcttcagtggtgatttctcagattttggtatacccatcatctgagcagtgtacactatacccaatgtgtagccttttatccctcacctgcgcccacccttttctctgagttcccaaagtccattgtatcattcttatgcctttgtgacctcataacttag

SEQ ID NO: 583104 - DNA, 676 bp, Homo sapiens
tcatatgaaaaaaagctcaatatcactgattattttgttctgggtgggtcctttttcttagagctcccaagatggtgatggtctgctcccaagatggtggtggccactcccaagacggcagcaagccttttgttctctgacctgaggtttgtggcctcatggattccaaggaatggaaccttgggccatgtcgtgagtgttgtagctctattagaagccgtgggtcacggaagagaactgtggaacccagcgactagtgttcagctcaattaggatgaacctgggcacttagccacgcaggaacaatggcgagcctgtagcccaaatgggagtggtatgggcgcctcactggatcagaaacgcagcggacaccttgctggatccagaggggtggaagtcaacagcgggtctgcaacgctggcaaacagcagtggtggacagtgagcgaaagctcagctcgagccagaacaaacatggaccagaagagtgtgcagttgcaagrtttaatatagtgaaaacagagctcccatacaatgggaagggacccaaagggggttgcccactcccagctcggatgcctggggtttatatcccaatcattgtccctccccctgtgctctcagatgatagatgatttgactacttctttacctcctgcttttagcctaattgatat

SEQ ID NO: 583105 - DNA, 526 bp, Homo sapiens
aaaaatgagaagaaaaacaacaaaaatatggacaacaacatgattaataagtgctacttgtttcactggttctaccactgctcctaacgaggagtaaagtagaaagatctcaggagcaggaaccagggtgactgggatccagccccagccctgctcctcttacctgcatggtcttgagaaagtcacatttccctccagacctgtttcctcatgtataaaattcctacaacacattttatcatctatgaaatgcagtaacccctatcctgttccgccagccaccttgtgaccttgggctttctgagccacggtttccttatttgcagaaaggggattacttgcaccccaacttacccataggcaaaacaccaggccatgacaggctcccctggacatactgtttctaggctgtattactgacagtaactaatgccgacttgccwcaactgtcctggtattttccctgtatttcttttttttttttaagaggtgggtcttgctatattgcccaggctggtctcgaatt

SEQ ID NO: 583106 - DNA, 606 bp, Homo sapiens
attgcaacaaaaacaaaaattgacaagtcagatctagttaaacaaaagagcttctgcacaacaaaagaaatgatcaaccaagtaaacagacagcctgtcagaatggaagaaaatatctacaaactatgcatctgacaaaagtctagtatccagaagctataaggaatgtaaacagttcaacaagcataaatgaataaccccattaaaaagtgagtgaatgacattaacagacactcctaaaaagaaaacatacaagaggccaacaaacatgaaaaaaattatcatcgctaatcttcagagaaatgcaactcaaaatcacaargagatgtcatctcataccagttagaactgctattattaaaaagtcaaaaagcaaaagatgctggcaaggatgcagagaaaaggcaattattatatactgtcggtgagaatggaaattagttcagccactgtggaaagcagtttggtgatttctcaaagaactttaaacagagctatcattcgacctagccctcccattactaggtatatatccaaaacaaaaccaatctttctacccaaaagacatatgcacttgaatgttctttgcatcactattcacactag

SEQ ID NO: 583107 - DNA, 595 bp, Homo sapiens
ttgatggtggagcaacagaattgagagatttaggactgctaaaaatttaatgaagaattttatgtgaaaaagcccaattcaggcttatacaraaagaaatacatgtcatattaaaatcattgttaattttgaatgtccaatacagtagtcaatctgtatcttaattaaaattaatacagtatgttacaattagatctggtcagctggaagaatatgaaagatggagttacaaaagagagaaggcttaaacaggcaggaatatattgtataatttcatttacgtgaaatgtacagaataggcaaatctagagagacagaaagtagaatagtggtttccaggaactaggggtagttactgctaaagggttcaaggactgagcatggtggttcatgcttgtaatcccgactgtttgggaggccaacttaggaggattacttgaagctggaagcttgagaccagcctgggaaacaaagagagacttcatctctaccaaaaataaaaataaaaaacttagctgggtgtggtgacttgcacctgtagtcccagctacttaggaagatcgcttgaggccaggagtttggggctgcagtgaac

SEQ ID NO: 583108 - DNA, 595 bp, Homo sapiens
ttgatggtggagcaacagaattgagagatttaggactgctaaaaatttaatgaagaattttatgtgaaaaagcccaattcaggcttatacagaaagaaatacatgtcatattaaaatcattgttaattttgamtgtccaatacagtagtcaatctgtatcttaattaaaattaatacagtatgttacaattagatctggtcagctggaagaatatgaaagatggagttacaaaagagagaaggcttaaacaggcaggaatatattgtataatttcatttacgtgaaatgtacagaataggcaaatctagagagacagaaagtagaatagtggtttccaggaactaggggtagttactgctaaagggttcaaggactgagcatggtggttcatgcttgtaatcccgactgtttgggaggccaacttaggaggattacttgaagctggaagcttgagaccagcctgggaaacaaagagagacttcatctctaccaaaaataaaaataaaaaacttagctgggtgtggtgacttgcacctgtagtcccagctacttaggaagatcgcttgaggccaggagtttggggctgcagtgaac

SEQ ID NO: 583109 - DNA, 561 bp, Homo sapiens
tgacttgggtattgttaaaagcattcagttttatatattcacaaaattatggtttggaattgcaactatgtttagaaggaaagcagagtataaaagtttggaaaattagcagcctgatgatgtgataggaaaaaaaaaaaacattttctaaggagaaattcaagctggttgcaaaaatttgcataagtaatgaggagccaagtgttaattgccaagacaatggggaaaatgtctccagggcatatcagaagtcctcagggcagcccctcccatcagaaacctggaggcataggagggaaaaatggttttgtgggctgggcccagggccttgctgctgtgtgcagcctagagacttggtgccctgtgtcccaaccactccagccatggctaaaaggggccaacatagagctcaggccattgtttcagagggtgcaaaccgtaagcattggcagctttcacgtggttttgagcctgtgggtacacagaagtcaagaattgaggtttgggaacctccacctatatttcagaggatgtayggaaatgcctggatgtccaggcaga

SEQ ID NO: 583110 - DNA, 572 bp, Homo sapiens
gttcttataattttagccaatctggtgaggatgaagtgatatttaattgtggttttaccttatagtaccaataccttgtagtttatagtctaatggcatcttttggagaattgaagatcttaatttaaatgaagttgaacttgtctatgttttttaaatgattggagttttctgtgtccggtttaagtaatcttccttacctcaaggtcatgaagatattctcttatattttcctctggaagctttattattttctctttcatgtttacctctttcaaaagctggaggccattatcttagcaaactaatgcaggaatagaaaataaaatactgcatgttctcacttattaattggagctaaatgatgagaacacatggacacagagaggggaacaacacatactagggccaactggagggtggaggttagaggaaggagaggatcaggaaaaataactaatgggtactaggcttagtacctgggtatattagtcagggttctctagagaaacagaactaataggatatatatatatatatatatatatgtatgtatrtatatgtatatgtat

SEQ ID NO: 583111 - DNA, 572 bp, Homo sapiens
gttcttataattttagccaatctggtgaggatgaagtgatatttaattgtggttttaccttatagtaccaataccttgtagtttatagtctaatggcatcttttggagaattgaagatcttaatttaaatgaagttgaacttgtctatgttttttaaatgattggagttttctgtgtccggtttaagtaatcttccttacctcaaggtcatgaagatattctcttatattttcctctggaagctttattattttctctttcatgtttacctctttcaaaagctggaggccattatcttagcaaactaatgcaggaatagaaaataaaatactgcatgttctcacttattaattggagctaaatgatgagaacacatggacacagagaggggaacaacacatactagggccaactggagggtggaggttagaggaaggagaggatcaggaaaaataactaatgggtactaggcttagtacctgggtatattagtcagggttctctagagaaacagaactaataggatatatatatatatatatatatatgtatgtatgtatatrtatatgtat

SEQ ID NO: 583112 - DNA, 608 bp, Homo sapiens
gattaaataatttaaatactggaaggatcttagaagtattctcatcgaactttattattttacaatgaggagactgcaacttaggatgtttaagtgattaaggttcaactaccaggtaatgacagaaactgaatttgaataaagtttcagttagtgttttgttctccatgatgtttgcacataattaaacagtaccttgtattatggcatggttgatttttgtatgtaggattttaaaaatctttatagtagagtgtaaaatttatacatattggaaattgtaggtccttaaagtcaactgcagcagcacgtatataataggtacccaataaaattttattgaattgaatcattaaaaggataatatcccataaagtggmcaggtctagatgttttaactggagaatcttgtgaagtatttaaggaagaaatcatactgattctacacaaactttttcagaaaacagataggagagaacttctacccaactcattttaatgaagccagacaaagctgacaaagacatcacaagaaaactatagaccaatatccttcatggacacagatgcaaaaatccttaacaaaatattaatctgagtctagcaac

SEQ ID NO: 583113 - DNA, 467 bp, Homo sapiens
catcgtgttacgcacctgtagtcctggctacacaggaggccaaggcaggaggaattcgaggctactgtgagctatgatcatgccactgcaactccagcctgggtgacagagtgaggctctgtctccaaaatatatacatatatataaatatatatacacacatatatatatacatatatatatacacacacatatatatatatatagaatttaccatatggtccagtaattccactcctagatggaagagaagtaaaaacatgtttgtccacacaaacacatayacaggaatgttcataatagcatttttcataatgggcaaaaaatggaaacattccaagttctatcaatttgtgaatggacaaacaaaatgtgttatgcctatagaatgaaatagtatttggcaataaaaaggaacaaagtactgatacatgctacaacatgaatgaacttcaaaatatgcttta

SEQ ID NO: 583114 - DNA, 573 bp, Homo sapiens
agaaaacatataggctacaagagaggaagagagtggtaggaataagggtaccagagagcacacatctttgttaaagagatacacatccgtctaaaagtagtagccacagacaaatggtttcattggggttaaattatctgatcctccaaggtaagccagaaatcttgattcttatgagatatttccaatttttaaaaagtagataataatttaaatctttttaaacattgtataaagaagattcctgaaggctgggtttggaccatgggccagaagtttatgcctttggtttaaatagtaggcctaggaatattttccacaatccatcatctccttctgatttgtttcaaggaaagctgtgttgtgaactctgaggacatcgatgccaccctaataacttgtgacaaatcagaaggaaagaagatagcaaaagtgaggaccttgagcaggtacacaagtgctgaaggaaaggacaggtaaatgtggcaatccaagatgagcgtggaaaaccytaaggattttgtaaactactttacaagactaacttaagatgcatatgaaaatcaaggtgtg

SEQ ID NO: 583115 - DNA, 410 bp, Homo sapiens
tcaggcagtaggactgatatctgaattaacacctcttcrcgctacaccacacataaacttgaaagtataagtctaaggttattatgcttattacacacagtttcaaaagaagcacgcataaggtatgtttttaatgaatcgtacagctaaagagcagttgttatagatcagttactgtggatctcaccaatacctatcaagtagaccagatgcataagctaacacgtgaaaggcagtccatgtaggaatcatacttaacttaaaataactagctgtggggaaaaaaaaagatttttctaatgtatctttaaaaatttacatctcatatcaatattacctttaaattctgctgagatattgaccaaataataattattttcaagaatagtcattttctctcgttttgaatt

SEQ ID NO: 583116 - DNA, 410 bp, Homo sapiens
tcaggcagtaggactgatatctgaattaacacctcttcacgctacaccacacataaacttgaaagtataagtctaaggttattatkcttattacacacagtttcaaaagaagcacgcataaggtatgtttttaatgaatcgtacagctaaagagcagttgttatagatcagttactgtggatctcaccaatacctatcaagtagaccagatgcataagctaacacgtgaaaggcagtccatgtaggaatcatacttaacttaaaataactagctgtggggaaaaaaaaagatttttctaatgtatctttaaaaatttacatctcatatcaatattacctttaaattctgctgagatattgaccaaataataattattttcaagaatagtcattttctctcgttttgaatt

SEQ ID NO: 583117 - DNA, 501 bp, Homo sapiens
ttacagaagattttatgaagattaactgtaattatgtatgtaaaacaactagcatagtgcccgatacaaagatactcaataaaaattgctggtacaataaggatttaaggcaatatgtaggttgggcagtaggatcttagagtgattgtgctactataggtggctgcttttcctatccagatgaaagttgaggtttggttaaaattttggggttctcatgaaaaccagtgtacaactgattcctgttggactatattgagatgagttggcagcaaacasgataattctttatgcaatcagttgaggatggggtgtcacaaagatcccttttagcttctaaatttgagaaacagaccataaaatggttaccctcttcaactgcaactagtaagaaccaaacataaatgaatgagattagccacctatgggaggaagaagaacacttgtgaatatggtcttgagaagccttcagtgtctcccacactaatcaaggtaacaaag

SEQ ID NO: 583118 - DNA, 524 bp, Homo sapiens
agatggttgggatgtgggtagtagattgtttgatttgcctattaaaggcatatgaaaaggatgctggaaggggagtctttttttttaatctctaagaattgcctaactttggaaagggcagtctttccagagtcagcaagtccctagatgtcaaagcatcaaaagtacagaaaataaaaagacaggatgtaatataacatctcatgctgccaggtagcaggaaaaaaggaataagatacatgttctcaatggagttgacatcacccccaaggaggtgaaaattggctctggggtattgggagaaatgaaagaaaatgttactttccatgtataacggcacagaaatacataaatagatatatacagatwaacaatacaaatgcagtatcaaaatttccattggcagtggtctcaaaagtctccttcgtcgaggcagcaggagggtgatactgcaactaaccggttgcgcaacagggcaatcctcgcatacacagatgtaagtatatggtaacatgaaacaagaa

SEQ ID NO: 583119 - DNA, 565 bp, Homo sapiens
ctgcccatggcacatagaataaaatcaagaccctgagtcttcttcctgttcctgccacctctccagccctctcctatctcctccccttggcctactctatttcagccactctggcttccttttgttttgttggactttcaaacctttttccacaacagggcctttgcacttgctgcttcagtctggaatgattttcctctgcacctccccaaattagaccatcctttaggtctcagctaaaatggtgcttccaacagagagctctttcctgacccctttataaagtggacttccctgctcttctccaccttagcctcytattatttcttgttgtgggaagtcagggaccccaaatggagggactggctggagcttcagcagaggaacataaattgtgaagatttcatggacatttatcagttcccaaataatacttttataatttcttatgcctgtctttaatctcttaatcctgttatattcataagctaaggatgtacatcacctcaggaccactgtgataattgtgttaactgtaccaattgattttaaaacatgtgtgttt

SEQ ID NO: 583120 - DNA, 565 bp, Homo sapiens
ctgcccatggcacatagaataaaatcaagaccctgagtcttcttcctgttcctgccacctctccagccctctcctatctcctccccttggcctactctatttcagccactctggcttccttttgttttgttggactttcaaacctttttccacaacagggcctttgcacttgctgcttcagtctggaatgattttcctctgcacctccccaaattagaccatcctttaggtctcagctaaaatggtgcttccaacagagagctctttcctgacccctttataaagtggacttccctgctcttctccaccttagcctcttattatttcttgttgtgggaagtcagggaccccaaatggagggactggctggagctkcagcagaggaacataaattgtgaagatttcatggacatttatcagttcccaaataatacttttataatttcttatgcctgtctttaatctcttaatcctgttatattcataagctaaggatgtacatcacctcaggaccactgtgataattgtgttaactgtaccaattgattttaaaacatgtgtgttt

SEQ ID NO: 583121 - DNA, 578 bp, Homo sapiens
catcccttgtcctggagtcatccttctccaaggcagcaccctcctgatgaacccggctggttcctgggaactcactgtgtctggaggctctctcccaccccatgtgaaggaagcatcatcctcaatcaatgttgccacacttctgacctcttgaatgctggcaatgtccgtccattctcatgactaagtgagcttggagtgtaycagtcaaggaaaagggaggagaaaggagaaaccaaactttgagtagcaattgtctacagtgtgtggcttagagaatcaagctgacacaggccagagaatacaggcctcagcaaggactatgaggttggacaaggcttcacagaatttctggcactggagctgggcctcctgacagctttctctccaagcaattatgggccacctaaagaaatgagactgcaggaaatataagaatatttttgaagaatatgaatgatcataagaaaagggcgaactatgagaatggcctctgacgatggctggcaggagaagcgggtggatgtaggaaaggctgcattaattcactgtctttctacaagtgcttagggagccat

SEQ ID NO: 583122 - DNA, 615 bp, Homo sapiens
caatatcccaaaggcacaagccatggctccgcctccatatcttggacacaaaagttagagcataacctgcgcactctgagcccacttcccaggaaacacatcagtccattaaaggaatcccaccatgaggaatgcagagccaatcaatactttgaatgaagaagcccctcttacagactatttccttttctcattttccattctctactctcctaaccaaaccatgtccaaaatgctacctggagaaccccacgctcagcccagctgacctttgatcatcataaagctagccacaaaactgtctatttctccaaaggaaaaatgtacatgcatctaactcgaggctttctgctggaagttcagggtcgatgcaggaagacaaggactcaaaggctttggcatattccatgtcttctatctggtccaacagtgtagagatgatgctgccagcttcaaacaaggcccaggtccaggagygttattgttaagtacctgggatgtgctcattagaatactgctaagcctaaggccaggcacggtggctcatgcctgtaatcccagccctttgggaggccaaggcaggcagatcacttgaggtcacaagttcaagaccag

SEQ ID NO: 583123 - DNA, 583 bp, Homo sapiens
gagaaggaggaggggtgcccttgtagagagggggagtaggtgtctcactggaactcttcttaagaatccagggtgaagggctgccaggaaagggtttgtctcagaccctaaggtaggatggccagatgggaagaggactcctgagagctccagcctcctttgcttctgttactcaggcaaatttttcttcagaagatgaagtcttggtctatcatgaattttcagggcaaacagttctgcttcagatgctggcatggcagcagggctctgggcccctgtctcgccacccagacaccctgtaggtgttccgtggtgaggctgcttcctgaaggcatctcctgaaggggttggcaggtgttctgccatcatggcctgatacacaagaggagtcctaatcagctgttggtcagtgatatcgcactgctaatatcccctggacctggggagctcagaccctgtgctgaggccatcactgacttggacatgcaccgaagttcctatgagttgcttggagtataaatttccatgtcctgcctatcctarttttgatccaggatgtctggggaggggtctaggaatctgc

SEQ ID NO: 583124 - DNA, 542 bp, Homo sapiens
tatatatatacgtatgtatgtatgtatgtatataaacatacagactgggtgtggtggctcacacctgtaatcccagtgactcaggaggccaaggcaagaggatcgcttgaggcaggagtttgggcctgggcaacatagtgagactttgtctttacaaaaaatttgaaaaactagccaggcatggtggaggacgcctgtagtcccagctattcgggaagccgaggtgggaggatcacttaagcacaggtgttcaaggttatcgtgagctactgcacttcagcctgggcaacagagtgagaccttgtctctaaaaatatatacacatatatccttttgtgtctggcttctctcacttagcataatgtttttgagattcatctatatcttgttgcatctatcaataactcatttcattgctgagtagtattccattatgtgaatataccatactttgcttatgaatttacyatttgatggacatttgaattgtttccagtttttgcctattataattaaagttgtcattagcaatcacatgcaag

SEQ ID NO: 583125 - DNA, 625 bp, Homo sapiens
gctgaattaggagtggggctggtttcaaaagaagaggataacttgggaggaggaagggattctctaaggtttggactyttgctatcgagttgttaatgcgctcttcagctgtcccagctgggtctgtccatcaatgaagaatgtgaggaatgcatgactggtgcagacttctatgtgaaatagatgaagtttccttttcccctggccctggggggtagggactagcagagaggatggggcttcttgcccctacatcccctggtaagcagtcagcatccagcatacttgctccctgtcaaaaaagaatctgatgctcactcatcctcaaatagaaatttttaaatttctttcattaagtaatgtttttgagcactgactaatggtcctggcaatctaagtcctggggatactgctgtaaacaattcaacaggctcccatgaatgtacattctggtggtggaaataaaagcaggcagcccggtgaggtggctcacgcttgtaatcccagcactttgggaggctgaggcgggtggataacttgaggtcaggagttcaaaaccactctgtccaacatagtgaaaccccatctctattaaaaatacaaaaattagccaggcgtggtggtg

SEQ ID NO: 583126 - DNA, 523 bp, Homo sapiens
cgtggctaattttttgtattattagtagagacggggtttcatcgtgttagccaggatggtcttgatctcctgacctcgtgatccacccacctcggcctcccaaagtgctgggattataggcrtgagaagtgctatttttatcacagacacttagtagataggttatatagtttagggtaaagatttctgacctattttcaaccactgaatctacttttcatctggataataatgaattaaagataaacattttaaaatctactctgtgttttattttggctccataagctattcccctccagagccccacctgtttgcatgaatacaccatgcaggagtgtctgcctttagaagtggttaggccatgctgatgtggaataggagtacagtgaataaagatcaaggcttctaaagcagaaaaatttaagcacgcacaattatgaaaaagatgggtctactttacttcaaatccatcagccacaaccacgttatgatacccttcatatgcagaaacttaataaat

SEQ ID NO: 583127 - DNA, 596 bp, Homo sapiens
tatgtacatgtatatatatgtttatatatgtatgtatagactaagataattcttggtctaaggttagtttaggcagacaaggaaagaattatctccatagtcagtaatagattatatgaagctaccacaatatcttcgccagagtgaagagaaagaaatctaattgcaattcctaataacagacatatccttgggcctggggtagtgtcggacaaagcaccttgtaactctctttctctgaatttcccaaggctatctggggtatgtggttcttggatctcacaaaaacaggctctgcagcagcacaaaaccattgcttagcctcgcaaaccaaaggatggaagtgctgcaaaagtcaactggaaagatcagtaggaagagactgagccagaccttctcatgctgatcttctccaccaaacacttgccaatgtctatctgcatccattctgtggagcmagcaccaggggaaggccagtgaaggaaacacttggcagacatcaatgctcagtcattcttacagaagaagtaggaagagcaacagcgggccttttgaaaagagcttgcacaagtggaactttttgtgacagtttaagg

SEQ ID NO: 583128 - DNA, 576 bp, Homo sapiens
ctccagcaagaacactctggggacagatgccagccatacaaggaactgctcttcttgacacacaaaagaaagcaagagtggcatagaggagatgcttcagcwcctatagtccagcactcagtaggactgtgcagaagagagctcaaccattaagaggtgcacctgcaggcagaggcctgtcacatgtcacagtcaacaaaagcacaaaagtgatggcaaacccttggggggtagccagccacatgctacagtgtgcacacccctgagcagtggagccgctggagatggagacactgggagagtttttaccccatcatgagaccaactcttagacagcaactggaactttacaaagctgtgtctagacctacgctacagactgaagtctctatcgcagttcccatgagcagtgaattggcagcacctcaacagacggctttgctttcccactctaatcacgatctgtatgacggtgataatggtcatttctttagagagcccatgtgattttttttcttgagggctcatcagtgttctttacttgaattgataccatatggtcatccaagtgctgtg

SEQ ID NO: 583129 - DNA, 576 bp, Homo sapiens
ctccagcaagaacactctggggacagatgccagccatacaaggaactgctcttcttgacacacaaaagaaagcaagagtggcatagaggagatgcttcagcacctatagtccagcactcagtaggactgtgcagaagagagctcaaccattaagaggtgcacctgcaggcagaggcctgtcacatgtcacagtcaacaaaagcacaaaagtgatggcaaacccttggggggtagccagccacatgctacagtgtgcacacccctgagcagtggagccgctggagatggagacactgggagagtttttaccccatcatgagaccaactcttagacagcaactggaactttacaaagctgtgtctagacctacgctacagactgaagtctstatcgcagttcccatgagcagtgaattggcagcacctcaacagacggctttgctttcccactctaatcacgatctgtatgacggtgataatggtcatttctttagagagcccatgtgattttttttcttgagggctcatcagtgttctttacttgaattgataccatatggtcatccaagtgctgtg

SEQ ID NO: 583130 - DNA, 576 bp, Homo sapiens
ctccagcaagaacactctggggacagatgccagccatacaaggaactgctcttcttgacacacaaaagaaagcaagagtggcatagaggagatgcttcagcacctatagtccagcactcagtaggactgtgcagaagagagctcaaccattaagaggtgcacctgcaggcagaggcctgtcacatgtcacagtcaacaaaagcacaaaagtgatggcaaacccttggggggtagccagccacatgctacagtgtgcacacccctgagcagtggagccgctggagatggagacactgggagagtttttaccccatcatgagaccaactcttagacagcaactggaactttacaaagctgtgtctagacctacgctacagactgaagtctctatcgcagttsccatgagcagtgaattggcagcacctcaacagacggctttgctttcccactctaatcacgatctgtatgacggtgataatggtcatttctttagagagcccatgtgattttttttcttgagggctcatcagtgttctttacttgaattgataccatatggtcatccaagtgctgtg

SEQ ID NO: 583131 - DNA, 576 bp, Homo sapiens
ctccagcaagaacactctggggacagatgccagccatacaaggaactgctcttcttgacacacaaaagaaagcaagagtggcatagaggagatgcttcagcacctatagtccagcactcagtaggactgtgcagaagagagctcaaccattaagaggtgcacctgcaggcagaggcctgtcacatgtcacagtcaacaaaagcacaaaagtgatggcaaacccttggggggtagccagccacatgctacagtgtgcacacccctgagcagtggagccgctggagatggagacactgggagagtttttaccccatcatgagaccaactcttagacagcaactggaactttacaaagctgtgtctagacctacgctacagactgaagtctctatcgcagttcccatgagcagtgaattggcagcacctcaacagacggctttgctttcccactctaatcacgatctgtatgacggtgataatggtcatttctttagagagcccatgtgattttttttcttgagggctcrtcagtgttctttacttgaattgataccatatggtcatccaagtgctgtg

SEQ ID NO: 583132 - DNA, 524 bp, Homo sapiens
ctctttttttttttttttttttgcctttattttctttgacacaccaacttccagaaakaatatatttaatttacaaaacgagctccaaaatacttcagtcattgaaaaatcttaaaatgtaatgggtgtaatataatacttttaatcgttgttcttaatgttaaactttaaagagagaagaacataagaatattcaagtgtcaatggattatactaaaaaagaaaaagaaaaaaaaacctcacctttattttctgataaacatactgtccttgatttccaaggcttggctgttgaaattgctgaagaacttccaccgtagatacctttttttgttttcacttggaaagtattcgcaagccatttttgcatcaggaatgcaggacacctaggtaaaatgtataaatgtgacataacataataattctctttgtcctcttcctgttagagtgcctgcgaatccctgaggaagcaggactgaattgcacaatctttagtcaaaggagcactggtctcagaaacagaa

SEQ ID NO: 583133 - DNA, 482 bp, Homo sapiens
tgtccattttcatgctgctgataaagacatacttgagactgggcaatttataaaagaaagaaatttaattggacttacagttccacatggctggggaagcctcacaatcayggaggaaggcaatgaggagcaagtaaggtcttacatggatggcatcaggttaaaatgagaaagcctgttcaggggaactcctcttttcacaatcatcatatcttgtgagacttattcactatcacgagaacagcatgggaaagacttgcccccatgattcaattacctcccactgggtcccacccacaacacgtgggaattcaagatgagatttgggtgaggacacagtcaaatcatttcacatggcttcatctgcgtaactttcatggctctgtgaccttgtgtttggtattcagtctatctaaaacatggttttctcactgggaaactaacaataagaatgcctactttgcaagactgttgcaaggatt

SEQ ID NO: 583134 - DNA, 542 bp, Homo sapiens
ttcagctgcctgttttggcagcacacagtttgggttctaaaatgcagaggctgacgtgttctttattccctcacgttcttccgtaagactggccattgtgcagcttttattctacttcatagctgcaccctgtattgttctggcactctggtttttacttgcagaagcaaaaatgaatatggccaaaccaaaatacaaccccattcccagaagacacacatcatccctgtggtggggctcagctgcagcaccactgcaaacaaagggcagtgcccgcagactccatgacccggacmtgatgtgtattggaatatacaagcatgtgagcacctagcttctctatttatttgagtaatcatactctatgtttgttcattttcagtgaataaaaatttacattgttaaagtgtattcataaataagtctcatttgatgcatctctcaggagaacccagttaaggttttaaatatatattttccaatttttctttaaaatttaatgcttatttaagcatatgtgtaatactacatgaatgcaaaaa

SEQ ID NO: 583135 - DNA, 406 bp, Homo sapiens
atattgtaaacaatctcttccaaccagaatttctgaatttttttatatacattgttttgttattttatttcrttagctaataataactttggggaaatttctctttgtagtaaccattttaactatggaaaaaatgaataattaaaaaacaggtggtgccgcttttctgacaaaccctacgtaaaatatgtacatatattattgagttaagtgaaactggctaaagacagaaatttgagtaccttctttagttgtttcatttgtatttaataaggggtagctttttatccattgcttttggcatgagagggagaaaaaggaagaggaggataatgagtaggaggaggaggtacgtggagagaagagggaggtaaatgagtgagaagcaattgaacagttgtcagtg

SEQ ID NO: 583136 - DNA, 587 bp, Homo sapiens
ctctcccaggagggaagagctgtgctgatggacaagaggacaggttggwcactgtgctgatggacaagaggacaggttggtcactgtggacttagctgactccaggtaccacatccagtgatctttgtcttgaatattagttacctgctcccttggagatgtggcttctctctccctatagattgtatggattttatgcttcttaccatttttgtttacgtggacatcatcatgcaagtccttacctgtgctctagatgttagaaaaatgagaaggcatgttcatcttggaaaaatgaagcctaaatcctagacaatctggggactggcagcccagctccattgcagagcctgagactgagtgctggggagttacatgggacgtcactcctcccccacaggtctgtccttcctaagctcccaatccaatgctcctaagagtaagcccgactccatcttgcctgtgaacaggaagtcagttgtttggtttcaggtggatttctgcatttcccttttgaagagagattcccagtcctctgagaaagggcaggcagctgaggaatagcacttgtcccagccctgccccag

SEQ ID NO: 583137 - DNA, 528 bp, Homo sapiens
tttactaaagtatttcataattttgctttgacgtcaggatcattggttttcagccttcatcaccagaatgacaaccttaaaaatgttaagcaggaatacctgagttaaggcaaggaatattggaaaaatgaagatttgtagctgtcggttacttagagagaggataaacgccatgctctaatttccatatgtattgtggactatttgaacattaaacatatctagaatatttactgggccaggactaagaagatgcagaagaaacgcaaaatttaaggggcattaaaaaaagtcaataatcaagataaacactattttaatgcaatttttagaaattaaaatagttgtaaggtatccatgactaataaaatataaaattgtaaaaaaagagacaggatcactattgctgatgtctccttttgcatcagtctctagcatagcttgaggcamcgtagcaccagagtgctatccttggagtaggttttctagactgagtctcaacaatcgttgttgtctggcttagagtta

SEQ ID NO: 583138 - DNA, 432 bp, Homo sapiens
cgttgttgtctggcttagagttactgtcaacctccagagcaggaggaagcctaggtggagaagatgctcaaataccttaaagtgttttgaagacacagtcttattatatttccaaatatatatatatayacacacacacacacacacgatatacacacacatatgtatacatatgcatatatattaccatttaagttgtgtatgttcttttagttttcaaaacacttacattaggcaggtgtttatttgtttaaacttatatacaatttctgtcaaatatctaatttttttcatagcgcatacaaagtttctgcaaacatggcctgatgacagccaagccatgagcctatacaaggcagtgctcagtctcaggactgagcaggaggcacagagacactgggtgctctgcatagagctgcaagcaactcagcc

SEQ ID NO: 583139 - DNA, 639 bp, Homo sapiens
aattctaattgtaggcatttactcaagagagatgaaaacatgtctacaaatagtcatagataaatgttcacagcagctttatttataaaagcaaaacacaagaaacaggcagtgcccatcaacaggaaaatgaatcaatggtgggtcagtcaagcaatggaatattactcagctatgaaaagcaatgagctcctaatacaggcaacagatcattggtacctcaggcttagggaaacttcaggctgagtgaaataactttacacaaaaaagtactaaatgtaagattccacgtatataaagttcaaaatcaagcaaatctaatcgatggtttaaaaaaataacctcccccgaaacccaaagcagaatagagattatcctggggaatgtgggatggggttacctggtgaactttctgtggttctaaggttgtataatgttctgtatctttagtttaggttatamaggtgtgcatttgccaaaactcagtgagctaacacttaggatttttgtttttcattgaatatcaattttatatctgaataaaaacaagtatcaacctccgaacatggaattttacaatctagtgtgaaatgtatgagagtaaaagaatgaaggatgaatggatagatgggtagctac

SEQ ID NO: 583140 - DNA, 550 bp, Homo sapiens
aaagaatgaaggatgaatggatagatrggtagctacgtgtaacacaaacataggaaaacgttattggtagaatataggtgatgggtatattggtgttgttaaattttcttgaactttgtggtttgttggaaatcatttgtgataaaatgtggggaacatactgatatgaagtaattgaagcttgatatataatagaaattgataaaagtagcctgggatgtcttacactagtacatagttttctaggttgcatgtataatattacaatgacctgagaacctgtggatgaaatcactggtcaaaatcaaagaattgtgaagatccaaacatacttaagattgtcaaatggaataagaaagttttagcaaagctggatactgtttaacatgacatttatcccaattaaagattgtgtatgactctgtattgtcttcattagtaatcatttgctgatttggggaatcctgtcatttttaatttagactgttttttgcctgacatagcccttttttttctgtaataggatttagttttcactctttcattcact

SEQ ID NO: 583141 - DNA, 550 bp, Homo sapiens
aaagaatgaaggatgaatggatagatgggtagctacgtgtaacacaaacataggaaaacgttattggtagaatataggtgatgggtatattggtgttgttaaattttcttgaactttgtggtttgttggaaatcatttgtgataaaatgtggggaacatactgatatgaagtaattgaagcttgatatataatagaaattgataaaagtagcctgggatgtcttacactagtacatagttttctaggttgcatgtataatattacaatgacctgagaacctgtggatgaaatcactggtcaaaatcaaagaattgtgaagatccaaacatacttaagattgtcaaatggaataagaaagttttagcaaagctggatactgtttaacatgacatttatcccaattaaagattgtgtatgactctgtattgtcttcattagtaatcatttgctgatttggggaatcctgtcatttttaatttagactgytttttgcctgacatagcccttttttttctgtaataggatttagttttcactctttcattcact

SEQ ID NO: 583142 - DNA, 510 bp, Homo sapiens
ttcctaggtaaaagtctattcttactaaatctaccactaaaatgactccatgtacccataagtgactattggaacattggtccgaattgcatatcattacatgcttttattcaattgtaaagccctatatagaattaagctctaactgacgaaaattggaaaaaaaatagtcaaataaggtttttagaattaagcgcaagactatgatatatcatggttgcatatactaataaacaaggaaatcgttttagaggaaactagcaaatcagtcagcatgtgataaactatcataagcataaagcattccagccaacattcttggcaagacactaaaagaggagatggaatgatgttgtcctagctcctcagaaaaatctttacagactggagacctattataacaaaccattcaaataaaagtagtatttgatgatttagttcaygctactatactctctggaatctaaaacatcattaattcaacctgttcgcttaattccggtgttttgg

SEQ ID NO: 583143 - DNA, 513 bp, Homo sapiens
atttatagatcttgtttcacctccatcttccccactagaatgtaagattattgtggacagagatttctgtcttcatcgctaattgatgtatcctccgtgttaataatgtggcttgcactcgattatactccacaagtgtctgttaaatgaacaaatgttccaggactgcaacagaatcctcttcgaattgtgctcattttgctcctctctttctctaacaccgtcccttctagcttgcaccccagastgcctctgttgctaatggaagctgtttcttaagtttctgcaatgtattgatgttcagcatagtttttggtgctatttatattagattactgttgttaaatatatcctggtcagtactggatttcagctagaagtgggaatccattcttagacacatatttgttatattttatacattccttgaaaagccagcaatgatgaggtgtgttttggaattgggctgtgccacttagcacatgccccacaagttagattacttaatgtcag

SEQ ID NO: 583144 - DNA, 607 bp, Homo sapiens
ctggagacagtgttgtggcagggatccaggttctcccagctgccggccacagggctctgcccaggtagcttaatgcctcttcccctcaatgtcctcatctgtatagtgggactggcaatagagcgtttggtggggtctccatgggaggaaagtacacgtgcacagggcttacccagcatagctctagctcatgaaaatcagtcaggtatcaacaccctgatctgggagggagaaagggaagggatgcttccagaaacacttgaagcctgagctggctggtcttaagagatgagcaggcctgaatctgtgcagcgtgggggttggccagagggtccttggaaagccatgctccagtcacctgtgggtcaaaggatgtgcagtgctcctcctctgctgggcccargttgagggtgggcgtggtgggtgaggctgagatgcaggcaggaaccccaaagccaccttccctgtcccatatccaaccacagccagtatggccagatgtttacacatgagacaaaaccccctttgcaccagcaataacttcacgaagtttaaggtggtagttttatttctggtgcccattacttgaggataagaggtaatagta

SEQ ID NO: 583145 - DNA, 607 bp, Homo sapiens
ctggagacagtgttgtggcagggatccaggttctcccagctgccggccacagggctctgcccaggtagcttaatgcctcttcccctcaatgtcctcatctgtatagtgggactggcaatagagcgtttggtggggtctccatgggaggaaagtacacgtgcacagggcttacccagcatagctctagctcatgaaaatcagtcaggtatcaacaccctgatctgggagggagaaagggaagggatgcttccagaaacacttgaagcctgagctggctggtcttaagagatgagcaggcctgaatctgtgcagcgtgggggttggccagagggtccttggaaagccatgctccagtcacctgtgggtcaaaggatgtgcagtgctcctcctctgctgggcccaggttgagggtgggcgtggtgggtgaggctgagatgcaggcaggaaccccaaagccaccttccctgtcccatatccaaccacagccagtatggccagatgtttacacatgagacaaaaccccctttgcaccagcaataacttcaygaagtttaaggtggtagttttatttctggtgcccattacttgaggataagaggtaatagta

SEQ ID NO: 583146 - DNA, 594 bp, Homo sapiens
gcagagattgtagtaactcagctkcaaggtagggaacacaagaactggggcttccacttagcaaaagagacaagtaaacattctctttagagtttcagaggtagaatgcctctgctgacaccttgatttcaaagtgctcgtttccagaatggcaagaaaataaatttctgttgttttaaggcacccagtttacggtactttgtcactgcagtgttaggaaattaataaagatgctggcactggaatgacagggactgatgtaacgataactaaaatataaacagtggctttgaagtaagtaattggtaggatcttggaagcattttgaggcatttggtagtaaaaaccctagattgccctgaagaaattgttggtaggaatgtggacattacaagtgaatcctgtgagtgctcagaaagaagtgaggaaagcggtaaagaaagcttctatgattttaaagaatacgtacatccgcaaaggcataagaatgatatacattggacttcggggactcgggggaaagggtggggggtggggaggcacaaaagactgcatattgggtacagggtacactgttcaggtgttgggtgcacc

SEQ ID NO: 583147 - DNA, 600 bp, Homo sapiens
aggcctcaatctttgctgttctgcagcctctgctggtgatacccaggcaaacagggtctggagtggacctccagcaaactgcagcagacctgcagaagaggggcctgactgttagaagaaaatctaataaacagaaaacaataacaacaacactaacaaaaagaagccccacacagaaaccgcatccaaaggtcatcaacctcaaagataaaaggtagataaatccacaamtatgagaaaaatcagagcaaacatgctgcaaattccaaaaaccagaatgcctcttcccctccaagtgactgcaactcctttccagcaagggcacaaaactggttggagaatgaaactgatgaattgacagaggaaggcttcagaagttgggtaataacaaattcctctgagctaaaggagcatgttctaacacaatgtaagcaagctaagaatctcgataaaaggttacaggaactgccaactagaataaccagtttagagaagaacataaatgacctgatggagatgaaaaacacagcacaagaacttggagaaacacacacaagtataaacagcttgaatcaatcaggcagaagagagggtatcaga

SEQ ID NO: 583148 - DNA, 600 bp, Homo sapiens
aggcctcaatctttgctgttctgcagcctctgctggtgatacccaggcaaacagggtctggagtggacctccagcaaactgcagcagacctgcagaagaggggcctgactgttagaagaaaatctaataaacagaaaacaataacaacaacactaacaaaaagaagccccacacagaaaccgcatccaaaggtcatcaacctcaaagataaaaggtagataaatccacaactatgagaaaaatcagagcaaacatgctgcaaattccaaaaaccagaatgcctcttcccctccaagtgactgcaactcctttccagcaagggcacaaaactggttggagaatgaaactgatgaattgacagaggaaggcttcagaagttgggtaataacaaattcctctgagctaaaggagcatgttctaacacaatgtaagsaagctaagaatctcgataaaaggttacaggaactgccaactagaataaccagtttagagaagaacataaatgacctgatggagatgaaaaacacagcacaagaacttggagaaacacacacaagtataaacagcttgaatcaatcaggcagaagagagggtatcaga

SEQ ID NO: 583149 - DNA, 543 bp, Homo sapiens
tgattgtttgtttgtttgttttgccttgaatatttgtcccagagagcactgggacgagatttactgccatgctagtggaggaagctttgcagccaatggctctagccaaggccccaagatcctgcaggccagttgagggcaagagtctgaggcctccacattcccaatccgcaaatcagttcctggctattgcctkgctcggtcactgctcatcccttcttcttccccaggtccgctttgcctgcagaattatgcctgccttgtctacccatgcatctgcctgactagcccctttccttgccaggcccacataccacccctgcctgagcacagcctgcctgagcttagctactcccaccattttcagactgtgccaccatgcctgagcctccgccttatgtacttctctcaattgagtcaagttccaccatccttccgaacctcagtgggctcctctgccaagaaacccatccaaacactctcctgctgcaccacctcacactgggttcccacagcctcaagaagcaaagacagatggcacag

SEQ ID NO: 583150 - DNA, 624 bp, Homo sapiens
agaattatcatgtttccaacacaaagaaaagatacatgtttgaggtgatgggcatccagttatgcagatttgaccatgacacattgtacacagggatccagatatcacatgyacccccaaaatatgtacaactattatatatcaataaaaaagtacaagaagaataaactgtgaaaagatcaagagtcaaaaacagaaaagaaaagaaagaaatagcctaaagctagaatgtggggtggatgcagggatgagggttatgccaggtttctctttgaccattgtatgctcataaggaggtttctatgctaagaatctctgtgtcaagatgcttaacttgattcataccctttggttaaggaagaaactaggaatttgagggacatgattaaaaacttcaattagggaccatttatagcatgtatttattttctttttgtaattctgctatcatctctgggcatcttcttccagatgttttggctggtcaccttgactctaatggagtcttcagattattagaagatgcaagaggagagcccaaaagttcttgttcctaacccttggatatgcctgataaggccttgtgaatccaaataccacattccttctttccagccatgaagt

SEQ ID NO: 583151 - DNA, 624 bp, Homo sapiens
agaattatcatgtttccaacacaaagaaaagatacatgtttgaggtgatgggcatccagttatgcagatttgaccatgacacattgtacacagggatccagatatcacatgtacccccaaaatatgtacaactattatatatcaataaaaaagtacaagaagaataaactgtgaaaagatcaagagtcaaaaacagaaaagaaaagaaagaaatagcctaaagctagaatgtggggtggatgcagggatgagggttatgccaggtttctctttgaccattgtatgctcataaggaggtttctatgctaagaatctctrtgtcaagatgcttaacttgattcataccctttggttaaggaagaaactaggaatttgagggacatgattaaaaacttcaattagggaccatttatagcatgtatttattttctttttgtaattctgctatcatctctgggcatcttcttccagatgttttggctggtcaccttgactctaatggagtcttcagattattagaagatgcaagaggagagcccaaaagttcttgttcctaacccttggatatgcctgataaggccttgtgaatccaaataccacattccttctttccagccatgaagt

SEQ ID NO: 583152 - DNA, 624 bp, Homo sapiens
agaattatcatgtttccaacacaaagaaaagatacatgtttgaggtgatgggcatccagttatgcagatttgaccatgacacattgtacacagggatccagatatcacatgtacccccaaaatatgtacaactattatatatcaataaaaaagtacaagaagaataaactgtgaaaagatcaagagtcaaaaacagaaaagaaaagaaagaaatagcctaaagctagaatgtggggtggatgcagggatgagggttatgccaggtttctctttgaccattgtatgctcataaggaggtttctatgctaagaatctctgtgtcaagatgcttaacttgattcataccctttggttaaggaagaaactaggaatttgagggacatgattaaaaacttcaattagggaccatttrtagcatgtatttattttctttttgtaattctgctatcatctctgggcatcttcttccagatgttttggctggtcaccttgactctaatggagtcttcagattattagaagatgcaagaggagagcccaaaagttcttgttcctaacccttggatatgcctgataaggccttgtgaatccaaataccacattccttctttccagccatgaagt

SEQ ID NO: 583153 - DNA, 624 bp, Homo sapiens
agaattatcatgtttccaacacaaagaaaagatacatgtttgaggtgatgggcatccagttatgcagatttgaccatgacacattgtacacagggatccagatatcacatgtacccccaaaatatgtacaactattatatatcaataaaaaagtacaagaagaataaactgtgaaaagatcaagagtcaaaaacagaaaagaaaagaaagaaatagcctaaagctagaatgtggggtggatgcagggatgagggttatgccaggtttctctttgaccattgtatgctcataaggaggtttctatgctaagaatctctgtgtcaagatgcttaacttgattcataccctttggttaaggaagaaactaggaatttgagggacatgattaaaaacttcaattagggaccatttatagcaygtatttattttctttttgtaattctgctatcatctctgggcatcttcttccagatgttttggctggtcaccttgactctaatggagtcttcagattattagaagatgcaagaggagagcccaaaagttcttgttcctaacccttggatatgcctgataaggccttgtgaatccaaataccacattccttctttccagccatgaagt

SEQ ID NO: 583154 - DNA, 510 bp, Homo sapiens
gttgatctaatcacctcccaatggccccacctcctaataccatcaccttgggggttgagattccaacacataaattttgggggaacacaaacattcagaccatagcagattaatttccagactctcagagaaatccttatcaaataaattaattcagaagaaaatccccaaactaattagtgtggatcctttttaccgttcctgtgagtcagagctgatgtgctcactgcctgtgtcccctcctgcccttgccccccgcrgggagataactgagccatgccttttgccacccactctccctgtcctctttgcatctttggctggcaaccccagagcactttccagatcctctgcatctctcttcaccagatctctggccattcctaattctacattctggacagttcctggcctgttgctcttgctctttgcaggaactgtggatgaagccttgccaggacacaggtcctcagtgcctgtcacccaacaagctggtggcccttcatttaa

SEQ ID NO: 583155 - DNA, 642 bp, Homo sapiens
ctagctctgattttgcaaaaccacagttaggatcctgagcctctgagacatgcctacactcccatttcaccctaatgggctttatgtgttactgacttttcttcagtgctcttctggttttgagatgtgatcattgagaaaggactctggggagaaaatccaatatgaaggccataagagtaatgaggtggaatcgattattcccaattccttgctcccttcaggttacaaaattgaatatccatgccctttgctttgtgcctccgtggtctttgtgaggagtatattccctgctccactgaagctggacctggtcacatgactttggtgaaagaaaggttaatagaggtgatctgagaaggtttgtatgtgatttcattgtttgccatgactgcttgggcttctggcatctgccatgtgaacacatgatagaagcttctcaagtggaagctagtacagttgtactgagagacatgtggagccgaccaagtacaaaccgcagcttggagtcaaacctagctgacccayggacccaggagggtagaaaacaaaagttgattgtgagattttgaagttgttaggtgcagttatgctatcagttatatagctgtcagttatggaattaaaactaatacaggtaac

SEQ ID NO: 583156 - DNA, 441 bp, Homo sapiens
ttgcccacgctggagtacagtggcacaatcatagctcactgcagccttgaaatcctgggctcaagcaatcctcccacctcatcctcctgagtagctggaactataggtacctgccactatgccaggctaattttttaaatttttatttctttagagatggggtctcactatgtcgcccaggctggtctcaaactcctggcctcaagcaatctgcccacctctgcttcccaaagcagaggatwacagacgtgagacactttgccctgccctgtcctctacctttatttcccaaagcatactgaaaaaatattctgttatcctctgggctagtctgttccctagagcataaggtaatgaggtaaggagaagagccttgtgtctctgcccacgcagccttgataactctttgatccagatatggaaggaatgtgtgaataagtg

SEQ ID NO: 583157 - DNA, 441 bp, Homo sapiens
ttgcccacgctggagtacagtggcacaatcatagctcactgcagccttgaaatcctgggctcaagcaatcctcccacctcatcctcctgagtagctggaactataggtacctgccactatgccaggctaattttttaaatttttatttctttagagatggggtctcactatgtcgcccaggctggtctcaaactcctggcctcaagcaatctgcccacctctgcttcccaaagcagaggattacagacgtgagacactttgccctgccctgtcctctacctttatttcccaaagcatactgaaaaaatattctgttatcctctgggctagtctgttccctagagcataaggtaatgaggtaaggagaagagccttgtgtctctgcccaygcagccttgataactctttgatccagatatggaaggaatgtgtgaataagtg

SEQ ID NO: 583158 - DNA, 509 bp, Homo sapiens
taaatgaatgaattcatgtaaagcgcttggcacatgatcatggctcatgttcactcttctatgttgcttttcacagggcagtgactcaaatactaaacatctctttctgaagaattatgttacatatsataaggtgtggaagaaagagagagaaagaaattaataccaccacagcttgtgtttcagcagagtaatagtattcaacagatgggactggagaaatcaaaaatgatcaaatcagggggacatgctttcccaaatgctaggacagattttgccctgagtctcatgagtaaggtcacattacagtagacaactgggcttctgggatcagtggggctgggcagcagcagctctgtggggttggggagggcttgattgatcttgaggttatactaaggccgagaggtttccttcctggagttggggctggctggcaggacccactttggtctcctgatatcttctcttgctcatagttctgcttctagcctggtgcttgtgtttct

SEQ ID NO: 583159 - DNA, 509 bp, Homo sapiens
taaatgaatgaattcatgtaaagcgcttggcacatgatcatggctcatgttcactcttctatgttgcttttcacagggcagtgactcaaatactaaacatctctttctgaagaattatgttacatatcataaggtgtggaagaaagagagagaaagaaattaataccaccacagcttgtgtttcagcagagtaatagtattcaacagaygggactggagaaatcaaaaatgatcaaatcagggggacatgctttcccaaatgctaggacagattttgccctgagtctcatgagtaaggtcacattacagtagacaactgggcttctgggatcagtggggctgggcagcagcagctctgtggggttggggagggcttgattgatcttgaggttatactaaggccgagaggtttccttcctggagttggggctggctggcaggacccactttggtctcctgatatcttctcttgctcatagttctgcttctagcctggtgcttgtgtttct

SEQ ID NO: 583160 - DNA, 509 bp, Homo sapiens
taaatgaatgaattcatgtaaagcgcttggcacatgatcatggctcatgttcactcttctatgttgcttttcacagggcagtgactcaaatactaaacatctctttctgaagaattatgttacatatcataaggtgtggaagaaagagagagaaagaaattaataccaccacagcttgtgtttcagcagagtaatagtattcaacagatgggactggagaaatcaaaaatgatcaaatcagggggacatgctttcccaaatgctaggacagattttgccctgagtctcatgagtaaggtcacattacagtagacaactgggcttctgggatcagtggggctgggcagcagcagctctgtggggttggggagggcttgattgatcttgaggttatactaaggccgagargtttccttcctggagttggggctggctggcaggacccactttggtctcctgatatcttctcttgctcatagttctgcttctagcctggtgcttgtgtttct

SEQ ID NO: 583161 - DNA, 509 bp, Homo sapiens
taaatgaatgaattcatgtaaagcgcttggcacatgatcatggctcatgttcactcttctatgttgcttttcacagggcagtgactcaaatactaaacatctctttctgaagaattatgttacatatcataaggtgtggaagaaagagagagaaagaaattaataccaccacagcttgtgtttcagcagagtaatagtattcaacagatgggactggagaaatcaaaaatgatcaaatcagggggacatgctttcccaaatgctaggacagattttgccctgagtctcatgagtaaggtcacattacagtagacaactgggcttctgggatcagtggggctgggcagcagcagctctgtggggttggggagggcttgattgatcttgaggttatactaaggccgagaggtttccttcctggagttggggctggctggcaggacccaytttggtctcctgatatcttctcttgctcatagttctgcttctagcctggtgcttgtgtttct

SEQ ID NO: 583162 - DNA, 621 bp, Homo sapiens
tgggttcagaacccttgggcgcaacctgtgttctgcttgtttggctgtatgggatggagagttaagaatggagctcagccctgagtcctgtgccagttgagcttcacaggtgactcttggcagccagtctgagtcatttgcattttcacagccaaagggctgctcacaagatgttctgtgcagatatttaagttgctggattccaaagcatccccagggcactcctggcccctcctcttccatatggccatgcagccaacttcacatttcttaatttatgaagatggcattcttggggattagatgctttttggagttayagtaataacaacatcaaggccagttctttgccttctttgccttcctgccctcccttgcttccctatctctccctgttcctttcctccttccatccttccttcttttttccctccctccctcgtttacaccctcccttcctcctttcttccttcctcttccttccctccctctttcccccctccctccctctctcctttcctccttccctccttccctctgttgtttcttccttctgtcaagcttttgaaatatttcagtttctggaagcaagacagagctcagtggccaggaagagcacag

SEQ ID NO: 583163 - DNA, 621 bp, Homo sapiens
tgggttcagaacccttgggcgcaacctgtgttctgcttgtttggctgtatgggatggagagttaagaatggagctcagccctgagtcctgtgccagttgagcttcacaggtgactcttggcagccagtctgagtcatttgcattttcacagccaaagggctgctcacaagatgttctgtgcagatatttaagttgctggattccaaagcatccccagggcactcctggcccctcctcttccatatggccatgcagccaacttcacatttcttaatttatgaagatggcattcttggggattagatgctttttggagttatagtaataamaacatcaaggccagttctttgccttctttgccttcctgccctcccttgcttccctatctctccctgttcctttcctccttccatccttccttcttttttccctccctccctcgtttacaccctcccttcctcctttcttccttcctcttccttccctccctctttcccccctccctccctctctcctttcctccttccctccttccctctgttgtttcttccttctgtcaagcttttgaaatatttcagtttctggaagcaagacagagctcagtggccaggaagagcacag

SEQ ID NO: 583164 - DNA, 621 bp, Homo sapiens
tgggttcagaacccttgggcgcaacctgtgttctgcttgtttggctgtatgggatggagagttaagaatggagctcagccctgagtcctgtgccagttgagcttcacaggtgactcttggcagccagtctgagtcatttgcattttcacagccaaagggctgctcacaagatgttctgtgcagatatttaagttgctggattccaaagcatccccagggcactcctggcccctcctcttccatatggccatgcagccaacttcacatttcttaatttatgaagatggcattcttggggattagatgctttttggagttatagtaataacaacatcaaggccagttctttgccttctttgccttcctgccctcccttgcttccctatctctccctgttcctttcctccttccatccttccttcttttttccctccctycctcgtttacaccctcccttcctcctttcttccttcctcttccttccctccctctttcccccctccctccctctctcctttcctccttccctccttccctctgttgtttcttccttctgtcaagcttttgaaatatttcagtttctggaagcaagacagagctcagtggccaggaagagcacag

SEQ ID NO: 583165 - DNA, 621 bp, Homo sapiens
tgggttcagaacccttgggcgcaacctgtgttctgcttgtttggctgtatgggatggagagttaagaatggagctcagccctgagtcctgtgccagttgagcttcacaggtgactcttggcagccagtctgagtcatttgcattttcacagccaaagggctgctcacaagatgttctgtgcagatatttaagttgctggattccaaagcatccccagggcactcctggcccctcctcttccatatggccatgcagccaacttcacatttcttaatttatgaagatggcattcttggggattagatgctttttggagttatagtaataacaacatcaaggccagttctttgccttctttgccttcctgccctcccttgcttccctatctctccctgttcctttcctccttccatccttccttcttttttccctccctccctcgtttacaccctcccttcctcctttcttccttcctcttccttccctccctctttccccsctccctccctctctcctttcctccttccctccttccctctgttgtttcttccttctgtcaagcttttgaaatatttcagtttctggaagcaagacagagctcagtggccaggaagagcacag

SEQ ID NO: 583166 - DNA, 574 bp, Homo sapiens
gtctttttagcacttaacctctgtattagtttgttcttacattgctaataaagacatatctgagactgggtaattaggaaagaggtttaattgactcacaattccacatggctgggaagcctcacaatcrtggtggaaggcaaatgaggagcaaagtcatgtcttacatgcggcaggcaagagagagtgtgcaggggaactccactttataaagccatcagatcccatgagacttattcactatcatgagaaccagccacgggaaagacctgcccccatgattcaattacttctcactgggtccctcccacgacatggtggaaattatgggagctaccaatttcaagatgagatttggggtgggacacaccaaaccatatcaacctcccaagccagtgatcagcccagactgcacagctttgaaaaaataatgactatggatttctggctttagaaaatacaaatcaaattaacattatgggtgggacatatatgaatatgatgatggtctttctgcagcctgaggaaagtggtcttgatggccagcaagacacactcctaatacttacaattc

SEQ ID NO: 583167 - DNA, 595 bp, Homo sapiens
gcacttaacctctgtattagtttgttcttacattgctaataaagacatatctgagactgggtaattaggaaagaggtttaattgactcacaattccacatggctgggaagcctcacaatcgtggtggaaggcaaatgaggagcaaagtcatgtcttacatgcggcaggcaagagagagtgtgcaggggaactccactttataaagccatcagatcccatgagacttattcactatcatgagaaccagccacgggaaagacctgcccccatgattcaattacttctcactgggtccctcccacgacatggtggaaattatgggagctaccaatttcaagatgagatttggggtgggacacaccaaaccatatcaacctcccaagccagtgatcagcccagactgcacagctttgaaaaaataatgactatggatttctggctttagaaaatacaaatcaaattaacattatgggtgggacatatatgaatatgatgatggtctttctgcagcctgaggaaagtggtcttgatggccagcaagacacactcctaatacttacarttcttacaatttcttcttaggagttctgggtgt

SEQ ID NO: 583168 - DNA, 432 bp, Homo sapiens
cactttgtccactgaacttcggagcaaccaaccagcttcattatgttccttgsttctccacatatggtcaaaggtattatgtagagagtcattaaactccctgcctctcacaagtggtgaatcaggagtgtcaaatgcatttattttgcctaactctaaacagttcacaccaaggactatcagtgttccccatactgttagaagtagagtccttagcattttggggtcaatcatattaagcagtcaactccagtaaccctaaaaccaacaaaagaactccatccttaatattctgttcctctagaaccactcctggtaccaaaacctgtattagggttctagaaggacagaactaacggaatatatatatatatatatatatatatataaatgggagtttgttaattattaacttacacgatcacaaggtcc

SEQ ID NO: 583169 - DNA, 432 bp, Homo sapiens
cactttgtccactgaacttcggagcaaccaaccagcttcattatgttccttgcttctccacatatggtcaaaggtatyatgtagagagtcattaaactccctgcctctcacaagtggtgaatcaggagtgtcaaatgcatttattttgcctaactctaaacagttcacaccaaggactatcagtgttccccatactgttagaagtagagtccttagcattttggggtcaatcatattaagcagtcaactccagtaaccctaaaaccaacaaaagaactccatccttaatattctgttcctctagaaccactcctggtaccaaaacctgtattagggttctagaaggacagaactaacggaatatatatatatatatatatatatatataaatgggagtttgttaattattaacttacacgatcacaaggtcc

SEQ ID NO: 583170 - DNA, 596 bp, Homo sapiens
cttattgcccaacatataatcaatttggtcaatgttttatgtgtactcaaaaagaatgtgcattctggagttgtgactgctgggttctatgcatgtcaattagatcaagtttgctaatcatgctgcttactaactttttgtgtgcttgctctaatagttactgaggaataggtgttaaaattgctcactatggttgtggatttatcaagtcctcctattattcttgtccatttttactggcactctggccaataaaatgcatatgagagaagaactttaaggtataaaaatggagaggtagagatgaaactaaccctatttgcagatgatattattgtttccctaggaaacccaaggaaatcaactttttaaaaaaagactactaaaagcaatragaaaactcagcgatgttatggggtagaaaacatataaagaagtcaataattagaagcaaaaagattataatggagagaaagagtccatttacattagccaaaactacaacaaccaaaaaagatattatttcttaggaataattttaacaataaatgtataagacatggacctaaaaagctgtttcaaatattccaggacac

SEQ ID NO: 583171 - DNA, 600 bp, Homo sapiens
cagcagtagctctgaaaagttgtctttttgtaagagaaatttacatttacaaaagaaattcccatttttaagggtgcctccctctctgcaccaggaggagaaagattactaaattatcagaaactcttcatcagtggagaaggcatccacttaaatctgcatagaaaatcttacccttggtttatggtgcttttcctggccattgcatcttaatagggccttttcctatacactcctttttttgtttcagagaaacaaaatatttaagcctaaagtctaatttgagatctacaggaggtgtgtgtgttattaaacatttgtttgcttttctcttgttaatctgtcttttattagagggagtcccagctaaaaactcacgtagaatggaggagaacgttgtttttccttcccacacatgtctcacactcacggcagaaagcmaggaagaagggaagggaaaaataacactggagtaagtgctgttggagaaccttgttcacaagtttcaagaagcctgtcaggcctggaattaacctgctcccaaaagagatcggttgaactatgtccccagataaaccctcagattcccgaatctccata

SEQ ID NO: 583172 - DNA, 596 bp, Homo sapiens
taatgcttttcttctgtggtggctgagaacacagactactggcaggtctggcttctctgacagtcctgccccaaggtcctggggcactgagcaaaaagagctctgcccatgcatactcaccacagggtgyctggacatgtgcacacacacatacttgcacctgcacacatatatgtccacattcacacaggcacacacattcacacatgcacacacacacactcacactcacacaggcacacacaatcacatgcacagctgctgaatgcagtgtccctgcagggtccagtctgagccttgatgccagcctgtcccttgggcccccaatccttcaaaaataccaagtagatcacagcccttctcctcccacagacaaaaacacgatttagaagccgtcatcaaattcctgcctgaggatacatatctctgggctgattaaataaacacagcttaattcaattaaagtggatcagaacctgcataaactctgctggcagccagaggagttgctcacgaatccttcatttttataaatgagtgatggttcgcctgctcaggggcttgcccagaaaatggaaggggcttctgcatagaca

SEQ ID NO: 583173 - DNA, 558 bp, Homo sapiens
  misc_feature 539: n = A,T,C or G
gtaatacagtagtgaagagcataccctctggagtcagactgcctggctgggaatcctgcctctgcctcttataagctgtgggacattgggcaagttatgtaacctctccaggccccagttttcttatttataaaacggaggtattaaaagtagtggcaaaacygcactcacttttgcaccgacctaatactatagtagctacctcatagggatgttaaaagtattataagagctttaagtgcttaacatagtccctgaatcctagtacagtcatgagtctcttgcattattcggtgattttgtcattgtgcaaacatcagagtgtacttacacaaacctagggagtatagcctactacacacctaggctatatggtacagcctactgctcctaggctacaaacttgtacagcacattattgcactatactaggcaattataagacaatggtaagtatttgtgtatctacacagatctaaacataaaaaggtaccataaacatatggtattataatcttatgggaccatcatcatatatntcgtctattgttgaccaaa

SEQ ID NO: 583174 - DNA, 558 bp, Homo sapiens
  misc_feature 539: n = A,T,C or G
gtaatacagtagtgaagagcataccctctggagtcagactgcctggctgggaatcctgcctctgcctcttataagctgtgggacattgggcaagttatgtaacctctccaggccccagttttcttatttataaaacggaggtattaaaagtagtggcaaaaccgcactcacttttgcaccgacctaatactatagtagctacctcatagggatgttaaaagtattataagagctttaagtgcttaacatagtccctgaatcctagtacagtcatgagtctcttgcattattcggtgattttgtcattgtgcaaacatcagagtgtacttacacaaacctagggagtatagcctactacacacctaggctatatgstacagcctactgctcctaggctacaaacttgtacagcacattattgcactatactaggcaattataagacaatggtaagtatttgtgtatctacacagatctaaacataaaaaggtaccataaacatatggtattataatcttatgggaccatcatcatatatntcgtctattgttgaccaaa

SEQ ID NO: 583175 - DNA, 599 bp, Homo sapiens
tttaaatctcagtgtaaatatctatgactactcaatccaaaccatctatcaatacttttctcccacaaatttattgcgtarcagattatgtgggtcattaagatagtttaatacacaatatatgcctggttacttcaactatcaagtatttaattggtactcaaatactcactgggaagcaattcaagaagtgatatctcttctaatgaatagcacacatattaacagcatcaaaatattttgctgtggggtaaacccaacttgaaaatgtatctaacacctccctcagctctgccttccacacataccttttgattctgcacaagaaaacttcagtggcagcacgttttactgttaaaaccttacagagacatattgacactcactgcaaaaaccatctccagtgatctttaaactattctaagcttcagaagaaaaataatctcaaataagattttagcctattcttcctgaaggatgtagatattgtcaatgcaatactttctctccaattttgttctacccagacacaagtaataactttccctttgtgctacttctattggaaaaaaatccaaagtttaaatcttgctgaactt

SEQ ID NO: 583176 - DNA, 607 bp, Homo sapiens
tttcccctatacatctggttatcaggcactataataaatactgggaatataagagtgattagatacattccctgccctccaggatctccttgtctagcaagtgagatagatatatgatcatatgatggaacacattagacgtatcaataaatatgtgtataaagatctatagaaacaaagacaaggcagatctcatggtgtgatggagccgtgatgaggaagacttcagatagaatgtgtctcaaagtatgagttttttttttttgaacagatggttcacaaaagaagatatattaatggccaataaacatatgaaaagatgttcaacatcattagtcatcagaaaattgcaaaataaaaccacaaagacatatcatttcactctcacttgattaggtaaaattatagaccaatcgtaccaatgctggcaaagacatagaactaccctagcctactggtggaaatataaaatgatacaatgactttggcagtttgttaaaaaaattacacatacatctaccaaaagaactagccatttcactsctaagcacttactcaagagaagtgaatacatatgttcataaaaaaacttgcacataaatgttca

SEQ ID NO: 583177 - DNA, 595 bp, Homo sapiens
aagctttattgcaatctagccatgagggcatgacagtgaatgtatgtatctgtctgttctaagtgacagcaaactgcttttgatgctcctttctagaagggattgaagagaatgcattttccaatttagtagtgttacaccaagtaccagagaccatgttgatctgctgtagtaaaaatactgcatctggaacagcagttgtggttggggttaatacttggtcatgatagtccaccataaaatgcatgacccaactggctttttctagaagacagactggtacactaaatggggatacgaagggactgccatcctagcctcctttatgtctttgagggtagccccaatctctgccattcttcctgtgatgaagcattgcttctcattttcttgtcagggcagagggkggcaatttcaaggttttcaccaggcttttcctataatacctcagtgaagagacaccacacatgctattttaacagaaaggacttaatgtaaggaattattaagtagttatttaaaaactggaaaggcaaagagagaacactaagatatctcagctaccacgcttacacctgggggaacaagggaagaa

SEQ ID NO: 583178 - DNA, 598 bp, Homo sapiens
tcagtcaaataataaattgttttcctgatttcactgaatagtctatctgtattctcttgtatctcaacttagtttccttaagattattattttgaattccttttctgtcattttgtttatttccttatgattgggtctgctacagaagaattattgtgtttctttggaagcatgatatttcttcgcttttttatgtttgatgtgttttaaagttgatttctatacatctggtggaatagtcgcttcttccaattatttatggagtaggtttcacagggaaagacttattccatatatatgggtcttgggtgttggttggagtgtgttggctttggttctaggtggacacagtcgtgtagtctctgtgtagtttcttcagctgcaatccacactagcaatgcttgtgagtgtctcagtggcmtaggctgagagagtttgtgatggtggtggtgtggctttgttgggggtgggctcactgggtcactgggctgtttctcaggttaggggcacatgtgtgcacacagcaggtcagccaacttggggtctggcttgttggggttgggaccatggggttattacactggcagggggcatgggc

SEQ ID NO: 583179 - DNA, 588 bp, Homo sapiens
catgtagttcagcctcctgggcagaagatagggtgtattagtcagggttctccagagggacagaactaatgggatatatgtatatatgaaaaggagtttattaaggagaattgactcacagagtcacaagatgaagttccaagataggctctctgcaagctgaagagcaaggaagccagtagtggctcagtccgagtcccaaagcctcaaaagtaaagctgaccgtgcagccttcaatctggggccaaaggcctgagagcccctggcaaaaccactggtgtacgtccaagagtccaaaggctgaagaacctgaagtctgayattcaagggcaggaagcatccagcatgggaaaaagaagaaagccagaagactcagcaaactgtcttattctaccttcttctgcctgctttttctagctgcagttgacagatgattggatttgtgcccacccacattgaggataggtctgcctctcctaatccactgattcaaatgttaatctcctctggcaacaccttcacagacacatccagaaacaatactttgcatccttcaatccaatcaagttgacacttaatattaagtca

SEQ ID NO: 583180 - DNA, 433 bp, Homo sapiens
tagcttctactttatgaattatgagagggaagagatctttccaaggaacatgtcagttctgaatgtacaatcaatgctctacyatttctgaaaaccttaatgtagatgtaaaagcaagattaggaaggtcttgccttccagatgcaccttactgcttcctctacttgtgtcatccactggtgccttggaattccaaagggcccaagtatgcctatgtaccagattgtgttcattaagttcagcaaccattgtatcacgcctacacatcctctgggcaggatgcatgtgaatgggaggggaccaagatgttcccatggtaacaagctgtacaaatatgaaaatggggagagtatctgtgaacaactatgaagagaatttgacaagagatgagggctcactgactaatctggggctctttttcatctttacttat

SEQ ID NO: 583181 - DNA, 433 bp, Homo sapiens
tagcttctactttatgaattatgagagggaagagatctttccaaggaacatgtcagttctgaatgtacaatcaatgctctaccatttctgaaaaccttaatgtagatgtaaaagcaagattaggaaggtcttgccttccagatgcaccttactgcttcctctacttgtgtcatccactggtgccttggaattccaaagggcccaagtatgcctatgtaccagattgtgttcattaagttcagcaaccattgtatcacgcctacacatcctctgggcaggatgcatgkgaatgggaggggaccaagatgttcccatggtaacaagctgtacaaatatgaaaatggggagagtatctgtgaacaactatgaagagaatttgacaagagatgagggctcactgactaatctggggctctttttcatctttacttat

SEQ ID NO: 583182 - DNA, 582 bp, Homo sapiens
  misc_feature 1, 2, 3, 4, 5, 6, 7, 8, 9, 10, 11, 12, 13, 14, 15, 16, 17,18, 19, 20: n = A,T,C or G
nnnnnnnnnnnnnnnnnnnnggtataatgaataatataattcttaagaaatcacacataataaaagatgtattataaaaatagttgtktcattggaaataagaggctgtaaactaaagaacttcagaatcatcgaagacatttttctataaaattttcactgatagagggaggatttttagctataaatatatggctacaacacctaacatcacctagtaaatccagcacatgaataaatctacattttgcgcaagagtaatggcctttatttcctattgccaccaatattatcagtagtaagagactctttcatgctcttttcagctttttcatctattaccatgttaagcaaagcaagaagccattccaacaaagcaactgtttcctccatggcttgtttcctttctctgtgggtactacatccttattgctatttattccctatcatgatagctttatcatctatctgtctgtgtaatgcaaatcatattcttaaaataacataccacttacatctacttcatatcatgagacactgaagagaaatgtctatattatgatacttcaacatctcgacaga

SEQ ID NO: 583183 - DNA, 582 bp, Homo sapiens
  misc_feature 1, 2, 3, 4, 5, 6, 7, 8, 9, 10, 11, 12, 13, 14, 15, 16, 17,18, 19, 20: n = A,T,C or G
nnnnnnnnnnnnnnnnnnnnggtataatgaataatataattcttaagaaatcacacataataaaagatgtattataaaaatagttgtgtcattggaaataagaggctgtaaactaaagaacttcagaatcatcgaagacatttttctataaaattttcactgatagagggaggatttttagctataaatatatggctacaacacctaacatcacctagtaaatccagcayatgaataaatctacattttgcgcaagagtaatggcctttatttcctattgccaccaatattatcagtagtaagagactctttcatgctcttttcagctttttcatctattaccatgttaagcaaagcaagaagccattccaacaaagcaactgtttcctccatggcttgtttcctttctctgtgggtactacatccttattgctatttattccctatcatgatagctttatcatctatctgtctgtgtaatgcaaatcatattcttaaaataacataccacttacatctacttcatatcatgagacactgaagagaaatgtctatattatgatacttcaacatctcgacaga

SEQ ID NO: 583184 - DNA, 582 bp, Homo sapiens
  misc_feature 1, 2, 3, 4, 5, 6, 7, 8, 9, 10, 11, 12, 13, 14, 15, 16, 17,18, 19, 20: n = A,T,C or G
nnnnnnnnnnnnnnnnnnnnggtataatgaataatataattcttaagaaatcacacataataaaagatgtattataaaaatagttgtgtcattggaaataagaggctgtaaactaaagaacttcagaatcatcgaagacatttttctataaaattttcactgatagagggaggatttttagctataaatatatggctacaacacctaacatcacctagtaaatccagcacatgaataaatctacattttgygcaagagtaatggcctttatttcctattgccaccaatattatcagtagtaagagactctttcatgctcttttcagctttttcatctattaccatgttaagcaaagcaagaagccattccaacaaagcaactgtttcctccatggcttgtttcctttctctgtgggtactacatccttattgctatttattccctatcatgatagctttatcatctatctgtctgtgtaatgcaaatcatattcttaaaataacataccacttacatctacttcatatcatgagacactgaagagaaatgtctatattatgatacttcaacatctcgacaga

SEQ ID NO: 583185 - DNA, 559 bp, Homo sapiens
ttcacgactatatctactgaaaatctgtgcttagctctgtcacttccactgtcttgaatctcaccaagccccttaacacatagctggtgaatataaattgaaaagttctttcttatactgaactaaaatcttcttttcaaatatccattcaatattccttatctatcttttgaagaaagccagaattaacacatttccccctcatgtgacaggtcttccccaaccttgaacattgccagcaacttccctgacaacaccatccaaacagagccgctcctcattatcctctactgaagccattgctgtttccttcgaaatgcctaccacaatttggaattgtktcatgtatgtctttttcataaaagaatgttaattgtaagaggggccacgccgagtgatcttatatatgcctgtggcctcagcccctggcacattctgggtacgcagcagccactgcaggcccaatccagccacagacatgttctacaagtgtgaggtaggaaaagcaaacattttcctgtatattcccaccactctcaatacttcacttctgacacca

SEQ ID NO: 583186 - DNA, 559 bp, Homo sapiens
ttcacgactatatctactgaaaatctgtgcttagctctgtcacttccactgtcttgaatctcaccaagccccttaacacatagctggtgaatataaattgaaaagttctttcttatactgaactaaaatcttcttttcaaatatccattcaatattccttatctatcttttgaagaaagccagaattaacacatttccccctcatgtgacaggtcttccccaaccttgaacattgccagcaacttccctgacaacaccatccaaacagagccgctcctcattatcctctactgaagccattgctgtttccttcgaaatgcctaccacaatttggaattgtttcatgtatgtctttttcataaaagaatgttaattgtaagaggggccacgccgagtgatcttatwtatgcctgtggcctcagcccctggcacattctgggtacgcagcagccactgcaggcccaatccagccacagacatgttctacaagtgtgaggtaggaaaagcaaacattttcctgtatattcccaccactctcaatacttcacttctgacacca

SEQ ID NO: 583187 - DNA, 653 bp, Homo sapiens
tacactccagcctgggcgacagaatgagactccatcgcacgcacgcacagacacacacacaaagtacaaactcttgcaatagaagatattttaaacctaggcaggctcaaaaatatttaatgagtgctctctatatgcaacgtactgagctagataccatgtcaggcgctttaaaggtggatgcaaatttgtgttaaagaattgggaaatggagttagatagaaaacttaagtcacaaaggcctctctttttctttttcaaacagttcctgaaattctatcttctttatagaaattttgttaaataagaaggggagggagtgctgttggaaatcttccatgagccatttccttagtggagatacccagactaaggcattaggccatatgatgagtgatgacaggagtgaaaatagtacctgaagctcccaacaaaaatgtaggaacattgatggttatttctgatttaactgtgcattgacaaatcttaatatcaygctgcctaatacctaacctagccttatatatggcatcagaatttccctctttgaaggcatcactatcagttctggctttttctggggatatgtcatctctaggacccagactgaaggccaagtagacagaaaggagaataaacccacaaggtattta

SEQ ID NO: 583188 - DNA, 516 bp, Homo sapiens
tgaaaatataagtaaatactgaacttgagttcaaaaagtcagctgtggaaatacaggttagggcaacatctgacattatagtgagtgtttaatattaatcaataaagcaaaacaagaagcagtaaaagctatagtgttacattttggccaacaatgtgatgtggtttctaacatagctaatgcgctcttatcctgtataatcttattaagagaataaagcattatatataaatataggtgtagtcatataaaawatagtcattatttgaactgagttgatatgagtgttaagtgaagcataggaggccacacatataatatagtaaatttgtcagtatatggcacttaataaatatggttttaattataacccttgttgttaaaaattggaaataacaattgcaatatataaaataagttaatgtcagagatatatggaactcctaataatagtaagaataataatagtaacaataacaatattactggtatacttgtgtagcaaattacagctta

SEQ ID NO: 583189 - DNA, 590 bp, Homo sapiens
ttactattttaacatttgcaaatatgctcctcaaagtaagagtaaataagacctaaatgctagtactttttagaatgtattaatatgtgattgtcaggaatacatatgcaaaagaaaaacacatatgcaaaacacaatactgtgtatatacaaatataataacaaacttcagttaagggcttagcctttctcacagttctaatgatgggtttgctagactgagcacaaacctttactaaacagtgctactcaaggaatattttatgaatattaatacttattaattaccagaagtattggtcagaatccaacagcaggactcaaaaaatagttggctcattcaaaaaaatggaataaatgctgacaaaaakacaatttacaagatttgggcaggattaggaaaccaataatggatggttgaatgacccaaatactctcaagaacaggaagctattaccacctctgggcctgaaagggcaaggagagagatgtattaacagaaccctgatgaagggtttgaccaaagaagcagtggtcttagtgaaaaacctagctactgacaattctcagcccagcagggaagaaacaga

SEQ ID NO: 583190 - DNA, 589 bp, Homo sapiens
tgaaaatgtgcagaactgtatgcataatatgctactttttatttaaaaagtggtggggggataatacatattctagacatacttacaaagaaactctaggaattcataggaaaataagaatagtagttacttgaatagtgaaaagcagttggatagaagacagtggtgagaagacttttcactgtagatatttttgttttaaaaatatgtttgaatcagaagaatgcgttgcctatttgatgcctaacagtgctccagcccacatatcttctctgaacctcaccctgtcctggagggatatttgttttgtgtgctattttggtaattaaaacatgatgtagttgttatgaacatctcattcaaaatgtcacctcttttgcctggaccagttcaacagagatgtgaacaatgaaactaaatttctccccacattaagaaagctctgggtgtttggtgcaagattttatccatgcacattttcactcaaccgacgagtagacatttactcagacattctaacgtgttggccctttgctgggtgtgtttggctttgtatttagacagatwgtgctactcattagtgagcatg

SEQ ID NO: 583191 - DNA, 529 bp, Homo sapiens
  misc_feature 441, 442, 443, 444, 445, 446, 447, 448, 449, 450, 451, 452,453, 454, 455, 456, 457, 458, 459, 460, 461, 462, 463, 464,465, 466, 467, 468, 469, 470, 471, 472, 473, 474, 475, 476,477, 478, 479, 480, 481, 482, 483, 484, 485, 486, 487: n = A,T,C or G
  misc_feature 488, 489, 490, 491, 492, 493, 494, 495, 496, 497, 498, 499,500, 501, 502, 503, 504, 505, 506, 507, 508, 509, 510, 511,512, 513, 514, 515, 516, 517, 518, 519, 520, 521, 522, 523,524, 525, 526, 527, 528, 529: n = A,T,C or G
ctgtctcctgggaggcctgactggagcccagggcatttgagggtcctgagctgcaggcactgtggggtcctctatgggggcatgagggcctgtggaagggggtttgctgagatggaagagtcacctgagcactcagcacaccttcccttgggccaggastggagggaggaacaactatcttggaataggttctggaggtgaaacttggaggacacctgccctctagtcatggggacaaagcctagcaaatgggacctgccatcctgggcacaatccaggctcttctgtgaatcagccaacatgcaggggcagccagccatgctggagcatgaggggggtctcaggagcaggctggccctgctcccagtcatgtccatgccacacgaaaccacatggaatttgctgcttagcccctgctcagatgctggttatacctggtgnnnnnnnnnnnnnnnnnnnnnnnnnnnnnnnnnnnnnnnnnnnnnnnnnnnnnnnnnnnnnnnnnnnnnnnnnnnnnnnnnnnnnnnnn

SEQ ID NO: 583192 - DNA, 529 bp, Homo sapiens
  misc_feature 441, 442, 443, 444, 445, 446, 447, 448, 449, 450, 451, 452,453, 454, 455, 456, 457, 458, 459, 460, 461, 462, 463, 464,465, 466, 467, 468, 469, 470, 471, 472, 473, 474, 475, 476,477, 478, 479, 480, 481, 482, 483, 484, 485, 486, 487: n = A,T,C or G
  misc_feature 488, 489, 490, 491, 492, 493, 494, 495, 496, 497, 498, 499,500, 501, 502, 503, 504, 505, 506, 507, 508, 509, 510, 511,512, 513, 514, 515, 516, 517, 518, 519, 520, 521, 522, 523,524, 525, 526, 527, 528, 529: n = A,T,C or G
ctgtctcctgggaggcctgactggagcccagggcatttgagggtcctgagctgcaggcactgtggggtcctctatgggggcatgagggcctgtggaagggggtttgctgagatggaagagtcacctgagcactcagcacaccttcccttgggccaggagtggagggaggaacaactatcttggaataggttctggaggtgaaacttggaggacacctgccctctagtcatggggacaaagcctagcaaatgggacctgccatcctgggcacaatccaggctcttctgtgartcagccaacatgcaggggcagccagccatgctggagcatgaggggggtctcaggagcaggctggccctgctcccagtcatgtccatgccacacgaaaccacatggaatttgctgcttagcccctgctcagatgctggttatacctggtgnnnnnnnnnnnnnnnnnnnnnnnnnnnnnnnnnnnnnnnnnnnnnnnnnnnnnnnnnnnnnnnnnnnnnnnnnnnnnnnnnnnnnnnnn

SEQ ID NO: 583193 - DNA, 549 bp, Homo sapiens
gtacatttctatgcacattatactataaatttctttttacgtttttatttcagttggggtattgtgttatttctaaaatcatatttgtgttagaatttatgtatttatattgctattgtttgaaagtattccccaaagtttatgtgttgtcaacccccagtgcaacagttttgggaggtagggtgtcataagagttgattaagtcacaaggactgctttcgtgactggattaatgttgttattccaggagtgggttagttatcataagagtgacttcgttacaaaacctttggccccctcttgatcttttgctctcaatacttcttgccctttcacctctgccatgggatgatgctgcacaaaagtcctcatcagatgccatgctcttggactcctggcctgcagaaccaccagccaaataaatttctgttcattataaattacccagtctgtatttttctgttatagccacaraaaatgagccaagaaagaagattggcactgagaagtaggtctgttgctataataaatacctgaaaatgtggaagc

SEQ ID NO: 583194 - DNA, 537 bp, Homo sapiens
tagatttaaaaatgccaagttgcaattttagacctttattattttaatttattacatgctgttaagatgatcattttaattcaaatagacttataggaggatttttctcttccaaaagaagacamaacttttagtggaaaatccaaggttgaaatagggagttaaatagaatttaaagcctgtagtataattttcaatacaacttttcattataagagtcactcaagacccttataaggaaaacaaaaagtaaagctgaatttttgaaaactgggttaaatacactgtattaatttcctaaggctgccataacaagataacacaaacttagtggcttgaaacgacagaagtttattctgtaacggttttggagtctagaagtccaaaatcaaggtgtcaccaggatcacgctccctctgaaggcactaatgaaaaattcttccttgcctctttctatgttctagtggttgccagtattttctggcatgccttggcatgtagctgtatcatttcaatctctgcctccatcttcacatg

SEQ ID NO: 583195 - DNA, 565 bp, Homo sapiens
ataaatcatatagatgagcactgttcgaaaagagctttctgaaataatggaattttctatatgtgagctatttaacatggtagccacgagccatatgtgtctattgagcacttgaaatgtaactagtgcaagtaagaaactgaatttggaattttgaaatttgaattaacttgaatttaaataactgcacacaactgacagctagctattggacaacactgctctagatgcttgacttgaacaaattgatgggtgacagttccatttsctgaagtggacaaaagtaagagaaagcagacatggaatgaaaatcaagagttctatttgaatcatggtgagtttgagatgccaatgcatatccatgtgaaaatatcatatagtatacagaatatgggactctgaggttcctgggaatatgaggaatatagcctaggtttgagaattattagaacatagatcatatagatcatatttataccttataaaacacaatgggcttacctagagagagtacacatagaacagagacctgtagcattctaacatatgataagcaagtaaaata

SEQ ID NO: 583196 - DNA, 500 bp, Homo sapiens
aagataacaaggcttatctctgttctttcttaggaacacaattatcaagaatcatttctgaattgattactcaacctgcgctaagccaagtttccttgttctctgaaccctctccacaaataaaactcaaatatttctgcttcaatcattcaggacctgctattttccagaaattaatctagtaatagaattcatggtaaaatttttcatagctttaaattatttctttcctaaatagacattttaattttaatctaatcttgattttattaaacctaaaacatccataatgaaggactttcaagttygaaaataaggttaataggagagcctttggggttaacagatggcacctgtcacataatgttgcttaccggttcaggtaaagctgctcctcctattcatattgaatcaaactatactttaaactccggcagggcatatttgtaaggagaccattaaagcctgctttgaatgatttcatgaacttcattacaaac

SEQ ID NO: 583197 - DNA, 597 bp, Homo sapiens
tgctaggggagggagagcatcaggataaatagctaatgcatgtggggcttaagtcctaggtgatgagttgataggtgcaacaaaccaccaggacacacatttatctatgtgacaaacctgcatgtcctgcacgtgtatccaacaacttaaaattaaattaaattaaatatgctaaatctactctctttgtgctctataaatggaacaacaaagcctgtattaccgtatttctgtctgcagcatgatatactgaatattttaagcccactattgagacctactgcttaggaaaaagagatttatttcaaaatattactgctcattgacaacgcacctgatcactcaagaactctgatgaaggtatacaagaagatgaatgtttctctcatgcctgcaaaacacattcattcgcaatcaatggatctaggagtcattttgactttcaagtcatactatttaagaaacactttcatacagctrtagctgctatagatagtgatttctctaaaggatctgggcaagtaaattttaaaacttctggaaagtattactactctagataccattaagaacatttatgactctcaggaagaggtc

SEQ ID NO: 583198 - DNA, 584 bp, Homo sapiens
ttcacattgtttcatatagacccacagaagtgtgtgtgtgtgtgtgtgtgtgtgtgtgtgtgtgtrtgtgtacgaaaatacaactacaaaagtatggctaggaatctgtggatactgtagataaagttgcttctagagcattaacattgattatctaacaacactctcaaaggcttaaatcaaagtacttttaattctaaaggacaaatggcagtggagattttttagaggttattgtcttgtggttttgaaaacagctgaaacagcttggagagggcagcaagggaatgacttaattgaccacctgcacaggcgtcctttctctctaccagatatgcccctggtgggattgactcacctgtcaattatctcagcgacctataaatttagcaagtataggaactcagactagagacagaatgagattcaaatagcttgactctcttgtcttgtatatatgtgtgtgtatctttcacttctaaatatattccaagagatatcttacagatagtgtccctgaataagtggcattatctgctgtgagtaagaacagagaccaacttttaggctagaatttaaatgga

SEQ ID NO: 583199 - DNA, 560 bp, Homo sapiens
aggaattcaaggccagcctgggcaacatggtgaaaccccatctctactgcatatgtacacaaaaattagccaagcatggtggtgcgtgcctgcagtcccacctacatgggaggctgaggtgggaggatcacttgagccccggggattgaggctgcagtaagccatgatcaygccatagcactgcagcctgggtgacagagcgagaccctatctcaaaaaaaaaaagaaaagaaaggaaaaaaaaaaaacctccagagacttttgaaaatgtccccgtatgccctagaaagtcatcctagcaatatttctcttgttccaatctggctttgactgaaagtcgatccttcaggtggctgagttctgaattggagaccccccgcgtggaggccagtcccgggtagggagtagctccgaaatgcatcccagggcactgaaggggagtgccggatctactttgggttctcactgtggtttgagacactacatgggcttctttagctaacagccgaggaagggcctctactccttcatccttacccacatcaaatgctaattctgat

SEQ ID NO: 583200 - DNA, 560 bp, Homo sapiens
aggaattcaaggccagcctgggcaacatggtgaaaccccatctctactgcatatgtacacaaaaattagccaagcatggtggtgcgtgcctgcagtcccacctacatgggaggctgaggtgggaggatcacttgagccccggggattgaggctgcagtaagccatgatcatgccatagcactgcagcctgggtgacagagcgagaccctatctcaaaaaaaaaaagaaaagaaaggaaaaaaaaaaaacctccagagacttttgaaaatgtccccstatgccctagaaagtcatcctagcaatatttctcttgttccaatctggctttgactgaaagtcgatccttcaggtggctgagttctgaattggagaccccccgcgtggaggccagtcccgggtagggagtagctccgaaatgcatcccagggcactgaaggggagtgccggatctactttgggttctcactgtggtttgagacactacatgggcttctttagctaacagccgaggaagggcctctactccttcatccttacccacatcaaatgctaattctgat

SEQ ID NO: 583201 - DNA, 622 bp, Homo sapiens
aaaaaaaaccctaatatgaaccaggtactgtagctcgtacctacaatcccagcactttgagaggccaaggcgggaggattgctggagctcaggagtttgagaccagcctgggcaacacagtgagaccctatctctacaaaaattgcaaaaattagccaagmgtggcggtgcatgtctgtggtcccagctactccggaggctgaggtgggaggatcgcttgggcctgggagacagaggttgcagtgagtcgtgattgtgccactgtactccagcctgggtgacagagtgagactctgtttcaaaacaacagcaacaacagcaaaaccctcattcattagaactgttttctcatattagtattattcatgtaatgttcttttgaaaataaacatttttttaggccgggcaaggtggctcatgcctgtaatcccaacactttgggaggctgaggcagggggattacctgaggtcaggtgttggagaccagtctggccaacatggtgaaactctgtctctactaaaaatccaaaaaattggctgggtgtggtggtgggtgcctgtaatcccagcttctcgggaggctaaggtaggagaatcacttgaacctgggaggcagaggttg

SEQ ID NO: 583202 - DNA, 622 bp, Homo sapiens
aaaaaaaaccctaatatgaaccaggtactgtagctcgtacctacaatcccagcactttgagaggccaaggcgggaggattgctggagctcaggagtttgagaccagcctgggcaacacagtgagaccctatctctacaaaaattgcaaaaattagccaagcgtggcggtgcatgtctgtggtcccagctactcyggaggctgaggtgggaggatcgcttgggcctgggagacagaggttgcagtgagtcgtgattgtgccactgtactccagcctgggtgacagagtgagactctgtttcaaaacaacagcaacaacagcaaaaccctcattcattagaactgttttctcatattagtattattcatgtaatgttcttttgaaaataaacatttttttaggccgggcaaggtggctcatgcctgtaatcccaacactttgggaggctgaggcagggggattacctgaggtcaggtgttggagaccagtctggccaacatggtgaaactctgtctctactaaaaatccaaaaaattggctgggtgtggtggtgggtgcctgtaatcccagcttctcgggaggctaaggtaggagaatcacttgaacctgggaggcagaggttg

SEQ ID NO: 583203 - DNA, 683 bp, Homo sapiens
  misc_feature 84: n = A,T,C or G
aacattgctgtaattcatgttccctatgcgtattagtgtatacctcactggaataataattggttgctatttatgtattggtgnatgctggttagaataaattaaggattggagaaagaatagaaaatgtttattgtacgcttgattggataatttgcttcaaattgctacttttgcgttcaatgtaggaactggagtttctgaatgctatatattttattctccccamataattgttttaaaacatttcttgcaaggcaggtttactaatgacaatttttttttcaatttttgtttgagagtctttatttcgccttcattttgaaggataatttcattggatatctaggttagtggttgttttctttcaacgaattacatatttccattcactctcctcctgcttgtatgacttctttttttttttcttttttttgacagagtctcactctctcactcaggctggagtgcagttgtgcaatcctgggctcactgcaacctccgcctcctagattcatgagattctcctgcctcagcctgcctagtggttggtattacaggcatgccccaatatgcctagtttttgtattgttagtaaagacgaggtttcaccatgttggccaggctgggcttaaactcctgacttcaagtgatctgcccaccttggcctcccaaagtgctgg

SEQ ID NO: 583204 - DNA, 615 bp, Homo sapiens
agaaaatgggccaaaaccttcttggcacarcaataataatggagtgtgtctttgtgggtgccacacctgggttgcatctctcagaggctggtgaaatctgtaagcacctacactgcggtgggaaaggcttggttcttatgcaggaagtgtcacttctcagaccacagtgctttgattcctgtggttctgcattcatcaggagcaggtgaggcaaagctctctgcttcagcccttcctgctcaaggccctgcctgagtcgctctttctctctggtacttctgcaaagttttttttgaaagctcctcttttcttcattgctctgtcctttcccagccagtactttaattcccccaaagctaaaactgactgtgtctctcccatctgcaccagcaattactctggccttgcttttatggtgctggggatggcaggatttcttcctgaaatatcgctcaccatccccaggcccatcaaattgcaggcggccatatttagaagggattcggagtgggaacaaggggtgtgcgtgagtgtggaagccaatattcccctgtctaatttatattttacatttctgtaaaatcatgcttagagtattttggtaatctctgcaga

SEQ ID NO: 583205 - DNA, 534 bp, Homo sapiens
gagacatcatagattgccgtcactacttctggaaaattaggaccctactcctttgtttataaaatgaaaataaaatcctgttccatccatggccctgccactgagctacagcactctcattccctgctggtcaccatctctacctctggatcatgccatctctgtcattgtagacttcagctctttgttcagttatctccattacccagattcttcccaggactccatgtgaatttgggattctgtatgaatgctcagcgcaatgtatgatccttttatcacctcaayaccctgcactacaatggccattttttccacccagcccttgactaccagtccttacagatgtaccgtccttatctctaactccagcctcttgatttcctaatgagcttgcttcattccttgggtcatcattgtggttggaccttagtgaggtttccagcccgctgagtcctgcctttctttctgtcattcttctccagagctctctcactccctcccccagctttgattctagagctcgtcatttaa

SEQ ID NO: 583206 - DNA, 479 bp, Homo sapiens
taaaagcagtgagaaaaatggcagaaagaaactgtcaaaatcaacattttcagaactctggaaattaatcagtggcctccaaccatctgaggagcatttattcaagataaatagctgagtcttggtgaggaataatgagcatgaagacatttgaatttgccgtttcctttgccctctyccccgttctgtggtggtctagggaaacatcagcctcacaacaatagtaggcatgaaaaccagcaatgtcatggccactcaaggggcagggagtatttgtagctcccctaaaaggtcccattcccaagagttcttagtatgttacccattgggcaaatccatagaaaagtcccattcactgggatggtctttggctcaaagatcccccagtgggaaaagctctatctccagggcatttgttgaagacaattagtggtctgacacagtaagaccagttggagcaaacaagaagctgttccaaa

SEQ ID NO: 583207 - DNA, 519 bp, Homo sapiens
  misc_feature 1, 2, 3, 4, 5, 6, 7, 8, 9, 10, 11, 12, 13, 14, 15, 16, 17,18, 19, 20, 21, 22, 23, 24, 25, 26, 27, 28, 29, 30, 31,32, 33, 34: n = A,T,C or G
nnnnnnnnnnnnnnnnnnnnnnnnnnnnnnnnnncaataccattactccggggtctatggcttcaacatatgaatctggaaggaacacaaacattcagatgataacatgtggaagatgcttggcaggtttcaaagagctcattagaagccaygtgaaggaatgaagaagtagaagaaaatgatacctgagaggtaaacagagtgaggatatggaaacttttgtagattttgtttacaatataatgagaagtttgggaaatataataaatctgaatgtatctttttaaaaagcttatgttgctgtgattgaacatatgcagagggcaaatagaaacagaaagtctagtaatatcgtcatgctgttgtcccagctgaaatttgaaggaggcttttactaacatggtactagctaaagtggtggggaaaaattattaacatttacagtctttgataaaaataaaacatctggataactggagaaatcaatagataaatttgaaatgatagcctttagatatt

SEQ ID NO: 583208 - DNA, 540 bp, Homo sapiens
tacaacagatgtgcagacatcaatgtaaggtcacaggaaacatgaaaaaatcaaggaaatatgacatctcttcaggaacactgtaatgctccaataacagattcaaacaaaaaatgttcacaaagtcctgaataaataattcaaaatagtaagccaaataaggatacagcaacaaagaaaactaccggcccatatctctgatgaacacagatgcaaaaatcctcaacaaaataccagcaaactgaatccaacagcacatcaaaaagataatatgccatgacaaagtaggaattatactaggaatgccaaaatggttcacaatatacaaatcaataaatgtgatacttcacattaacagaacaaagggcaaaaaccgtatgatcacctcaatagatctagaaaaaaatggaaaaaaaatcaatatcccttcatgataaaaactctcaacaaaatagaagtagaagaaacatacctcaaaataataaagactggccatarcaaacacacagctataattacattgaatggggaaaagctgaa

SEQ ID NO: 583209 - DNA, 530 bp, Homo sapiens
tactgtgacttctcttgatttgcccccagccccccaaaattaagtcctctatatcactattttattaagtaattaaaaataaagatcctatccttcctctaaaagttaggtaacccattgtttctatcaatttagaaaagattttaaaatgtcagaactttgaatgagtagcaaatttcgcatcaactagaattttctcatatttttgttcacacagatcatggcagatattagacttaagcaaacacataggcttcaagataattttgctgttgttgcctccctaagttatttttaggacatcatttttttttcaaaaagagttttggtttttgactttttttttcttttttactggactttaccaggagcaaagtacatttaaaatacacttagaggtggagtgtggtggctcacrcctgtaatcccagcactttgcaaggccaaggtaagcccatcgcttgagcccaggagttggagaccatcctgggaaacatggtgaaactttgtctctacaaaaaatacaaaaa

SEQ ID NO: 583210 - DNA, 532 bp, Homo sapiens
acactgttgatgggaatgtaaaatggttcagctgctatagaaaacagtacagcgttttcttaaaaattaaaaatagaattactatatgatccagtaatctcacttccggttatcgatattcagaaaattgaaatcaggatctcaaagaaatatctgtaccttcatgttcatggcagcataagacataactggcaagatacagaaaacaatctaaatcaacctaaagckacagatgaattgatagagaaaatgtggcgtatttacagtggtatattattgagccttaaaaaataaggaaagcctgccatttgcaacaatatggatgaatctgaaggacattgttaagagaaacaagccagtcacaggaaaaatgctgcatcttccactcacatgaagtatctgaaatattcaaactcaaagaagcagagagtagaatgatagttgccaggagctgatggaaggaagacataaggagtcacttttaatgagtgtaaagtgtcagtaatgcaagataaacaagttctacagatct

SEQ ID NO: 583211 - DNA, 541 bp, Homo sapiens
acactgttgatgggaatgtaaaatggttcagctgctatagaaaacagtacagcgttttcttaaaaattaaaaatagaattactatatgatccagtaatctcacttccggttatcgatattcagaaaattgaaatcaggatctcaaagaaatatctgtaccttcatgttcatggcagcataagacataactggcaagatacagaaaacaatctaaatcaacctaaagctacagatgaattgatagagaaaatgtggcgtatttacagtggtatattattgagccttaaaaaataaggaawgcctgccatttgcaacaatatggatgaatctgaaggacattgttaagagaaacaagccagtcacaggaaaaatgctgcatcttccactcacatgaagtatctgaaatattcaaactcaaagaagcagagagtagaatgatagttgccaggagctgatggaaggaagacataaggagtcacttttaatgagtgtaaagtgtcagtaatgcaagataaacaagttctacagatctgctgtacaa

SEQ ID NO: 583212 - DNA, 541 bp, Homo sapiens
acactgttgatgggaatgtaaaatggttcagctgctatagaaaacagtacagcgttttcttaaaaattaaaaatagaattactatatgatccagtaatctcacttccggttatcgatattcagaaaattgaaatcaggatctcaaagaaatatctgtaccttcatgttcatggcagcataagacataactggcaagatacagaaaacaatctaaatcaacctaaagctacagatgaattgatagagaaaatgtggcgtatttacagtggtatattattgagccttaaaaaataaggaaagcctgccatttgcaacaatatggatgaatctgaaggacattgttaagagaaacaagccagtcacaggaaaaatgctgcatcttccactcacatgaagtatctgaaatattcawactcaaagaagcagagagtagaatgatagttgccaggagctgatggaaggaagacataaggagtcacttttaatgagtgtaaagtgtcagtaatgcaagataaacaagttctacagatctgctgtacaa

SEQ ID NO: 583213 - DNA, 551 bp, Homo sapiens
gaaaagaaaatacaggctttataatgaaaagtttctggaaaatgtaaccacttttgagactatgtcatgtcaaaatttttgccatgtcacgtctattaactgcaggaaaggttgaacaaaaaattttaagacacttctgctgtctcaagtttttaaaaatctacttagagacacaaattttaaacaaacattgaaaactacaatatatatgaacacattctttttttaaataactatttattgaatacctacactatgccaggagctgttctaggtattgggaatacagctgtagacatgatttctgcaaacatgaagatgatttcctagtggtgaaatgcaaatcgaagaaaagyaaacaagtaaagccttttaagtgatagatagttgctgggcttgttactctaagaccatgtagtgatggaagaccctatgacaaggaggtaggcgagtagagctctgtacacagtgagggaatgagctttgtgaatatctgctggaaaaatttggccacatagggaacagaaatataggaaaccttatgcagaatt

SEQ ID NO: 583214 - DNA, 551 bp, Homo sapiens
gaaaagaaaatacaggctttataatgaaaagtttctggaaaatgtaaccacttttgagactatgtcatgtcaaaatttttgccatgtcacgtctattaactgcaggaaaggttgaacaaaaaattttaagacacttctgctgtctcaagtttttaaaaatctacttagagacacaaattttaaacaaacattgaaaactacaatatatatgaacacattctttttttaaataactatttattgaatacctacactatgccaggagctgttctaggtattgggaatacagctgtagacatgatttctgcaaacatgaagatgatttcctagtggtgaaatgcaaatcgaagaaaagtaaacaagtaaagccttttaagtgatagatagttgctgggcttgttactctaagaccatgtagtgatggaagaccctatgacaaggaggtaggcgagtagagctctgtacacagtgagggaatgagctttgtgaatatctgctggaaaaatttrgccacatagggaacagaaatataggaaaccttatgcagaatt

SEQ ID NO: 583215 - DNA, 594 bp, Homo sapiens
agccagaatcacctctctgtttcttcccatgatgtccttgctggcactggcttcatgacaactctcctttctcctctgaaacatagttctagttatagtctcagaaattgtcacctttcctatcatacactaggtccttcagaacattgtggtcctagatataaaagtcaccacccactaactaatattatcactttattgccttccagatgttaaagtaagacacacaaaaaactcatcttgtgataatctaagtcaatacaacaagtagaaataggctttgaattacagatgaagcaaaaggatgagaagtggtaactagtaattttttttttttttttttttttgagacagagtttccctcttgttgcccaggctggagttcaatgrcacgatctcggctcaccggaacctccgcctcccaggttcaagcgattctcctgcctcagcctcccgagtagctggaattacaggtatgtgccaccattcctggctaatttttttgtatttttggtagagatggggtttctccatattggtcaggctggtcttgaactctgacctcaggtgatccgcctgtcttggcctcccaaa

SEQ ID NO: 583216 - DNA, 594 bp, Homo sapiens
agccagaatcacctctctgtttcttcccatgatgtccttgctggcactggcttcatgacaactctcctttctcctctgaaacatagttctagttatagtctcagaaattgtcacctttcctatcatacactaggtccttcagaacattgtggtcctagatataaaagtcaccacccactaactaatattatcactttattgccttccagatgttaaagtaagacacacaaaaaactcatcttgtgataatctaagtcaatacaacaagtagaaataggctttgaattacagatgaagcaaaaggatgagaagtggtaactagtaattttttttttttttttttttttgagacagagtttccctcttgttgcccaggctggagttcaatgacacgatctcggctcaccggaacctccgcctcccaggttcaagcgattctcctgcctcagcctcccgagtagctggaattacaggtatgtgccaccattcctggctaatttttttgtatttttggtagagayggggtttctccatattggtcaggctggtcttgaactctgacctcaggtgatccgcctgtcttggcctcccaaa

SEQ ID NO: 583217 - DNA, 572 bp, Homo sapiens
ctatatactacgtatggtaatgctcagaaagagaaggatgagttattggcgtgcattggaaatttaaactcattctcaatccccatttttcaaaccagaaaggaagtacaaatgacctcaggttaaagatcaaatcaaaagtgtagctgcaatacacttggttgagacctttgaaagatttwgtcagtgagtggtataacctcccagctagaaaaagaaaggaatacataaaaaaaataagattagtattacactagcctggccacccaagtagaaagaagcttaccttaaaaggaattgtaagtgtggtttttaggtcatagcaaggacccaaataagaaatttgcaatgtttttaagggaattgtcctgccatctgaaattgaaagagactaagtttaacaccaagacaggactgtacggttttaactttctatcttttgtagtcagaattagaaagctcttcagctacaaatttaagatattttttaatgaaaatgatcctttcaaagattatagccatgggctaaagataattatggactacatttgatgttcttaaacatattagtc

SEQ ID NO: 583218 - DNA, 703 bp, Homo sapiens
tacttaagaacatttaattgagaattgtgtatcttattttcagcacttttaattggaggtcattgcaatttacatttgaaactaattgcaattgattccaggtttkttttttttttttcttttggaactgagttgcttcaagtaacagaacacgtatcattggcttaatggaagttgtccagcagcagatggcaaggattgacattacagactagaattttgtaaccttataatgcagtagcaaaatatggtaaatctttcctgttacctgcatatggcaaatcaggcactggtaaagtagtagaataagaagcagttataagatattgctacagtttaattgtatttctccaaaaatcgtaagttgaagccctaatccgtggtgcttcagactatgactatattttgacatatggtccttaaaggaggtaattaagttaaaatgaggttattatggttggccctaatccaatatgattgatgcccttataagtcaggaggaatttaggacatatgcagggggaaggctatttaaagacacagggagaagatggccatctaaaagccaagaacagagacctcagaagaaataaaccctgctgacaccttgatcttggaattctagcctccaggattttaataaaatgaagatatattgtgcattaactactcttgccaccattaggtaagtttataagaaaga

SEQ ID NO: 583219 - DNA, 578 bp, Homo sapiens
ggaagcttagcaggaggtaaggatatacctcaggtctttttccaggattgtcattattagttctcagtgaaacaatggaagccccactgggtaaaatatataatttaagttgctacttcataccaacgccctcttttacaattacttctagctaggaataacacaaataagagagttgggtgtgaatgacacctaaaccacatagatytccagtctttaagacggagataataagatgattggcagtgttggaaggaaatcttccctggatttcttggtgatttgacatggtctggaccgcccaagcaatagacattgtcaaattataatgatagaacacgcatcctcttcttttcccccacaactacctcctcttgggttctaagggtggtagatatgaagtctttgtctcctttttcaccagagacatctgttccttcttcaaaagatatgagagcctttctattatctgcatgattcaatgtttacattcttggttgtagaatttcttctcttccaccaacagaagatctttgtacattccagaataaaagataagcaccttttataagtccaga

SEQ ID NO: 583220 - DNA, 589 bp, Homo sapiens
tctatttattgaggtatattgcaggtcaaatactataatagttcatttaatttccaaactatcatacaagtagttcataataatgtatagagttgaatactgacctctttcaaattttaccacccagaatatgtgagggtgacattatttcagacaagaatgtctatagatctaattaaagcaaataccttgagctgagataatcctagactaggttgggcctaacatccaataagagtatctttgtaagagacagaagatgggaagacatacagagacacactgaggggaaggccatgtggagaaggaagaagagattggagttatgtttctaacaagccaaggaacatgagggttagctaagccaccagaagataagaaagaggcastgaacagactctctgagcctccaaagggaaccagtccggctaacacttcattttggccttctggccttcagaactttgagacaatacatttttgttgttttaaatcacccaatgtgtggccatttgttacgacagccccaggaaagcaatacagattttgttaccaggaagtaaggtgctgctgtaacaattaactgcaa

SEQ ID NO: 583221 - DNA, 612 bp, Homo sapiens
attttgctgataaaataactcagctgaaaatgtgccaacctttaaataaagaagaaataactactcaggtgctgaaggcagtgtagccactgccaagcatggaggagagaggcatggactgcattctcccagaaaggaccaaccctactggtaagtagatttcagatttacagtctctgaaactgtgagagaatgattttctgttgttttaagatacccagtgtgtgataattattatggcaatcctaggaaactgatatatagaatattcactttacatgtgggtgcaacaacccttgagaagtctaaataacatcatcatggtcacacaattattgggtaataaagtcagcttttgcaccmaaggagtctgctccagagaattaatcaatcaatgcaatatctcatgggacattttacttttttagaaagttcaaaatgtaattatggactgaagagacaatcaattgattcatttagtttgtggtcattcctatcaatgttctccagatacagaattttcaggcaaccacaatccttgcaggagctgtagcatgaatatgaccagtatacaaaccataatatttatgaccagaaccaaagtatcaccaa

SEQ ID NO: 583222 - DNA, 588 bp, Homo sapiens
attcaaaacataataatcaactgggcacagtggctcacgcctataattccagctctttgggaggccaaagcaggtggatcacctgaggtcaggagttcaagaccagcctggccaacatggcagaaccccatttctactataaatacaaaaattagccaggcgtggtggtgggcgcctgtaatcccagctactcgggagactgaggcaggaaaatggcttgaacctaggaggtggaggctgcagtgagccgagatggygccacttcactccagtctgggtgaaagagtgaaactgtctttaaaaaaaataaaaaataaagaaaaaatcataacaatcaatttacttacaagttagaggcaatttattttctaaggccagcttatgtatctcaaattgttttgacctccacagtaacttgattctatagcactggacatcaaagctgaaaaatatgtaaagaaaatgctttaagaatatgcaagactctctgtattctgtgcatcattaattcagccttcccagaatatttggttgacacatctctatgaaactttgaaatctctcacatattataattcataaccaaag

SEQ ID NO: 583223 - DNA, 593 bp, Homo sapiens
aaatgggtggttaaaacaagataaatatattctctcacaatgttagaggctggaagtcttaaatcgaagtgtcagcaaggccatatttccttaagtgacctagtagagattctgtaccttgccatataaagtttctggtagtcattagtgttcctgacttccttggcttatggccacttcactctaacgtttcctttttttggtaaaattgtctccttttctcctttgtgtattctcttattctgtctgtctcaaatttccctctacctttgtcttggaaggacatgtcattggattttggactcactcaaatcatccggggtgatctccttattttaagattttaactttgttaattctgtgaagacgttttccctaagaagtgacgttcccagtttccattaattaggacatattagagacattgttggggaatatcattcaatctgatccatrtaagaggtatctatgtgagaaaaaaaataggctgcctggaggtgaccgagagagtagcctgactacagtgaaaaatctcttcctaatgactaggggtggttgagaagtttgtaataagtgttgtaaactgtagaaca

SEQ ID NO: 583224 - DNA, 484 bp, Homo sapiens
gcaacagccaacgttaactctgctttgtactttcctacaatccaggattcacaatgcattctgctgtgctttaaacaattttcacatgtctttctttggtcaataatgacttgaatgagatgaagcatggatacctctctggcctcactgttggagttgtaaaggaacaactaaataatgcttatttaactacatttraatagtgcttaccatgtgccaaatatggctaagcactgacgaatgttaataatattaatttaaccctcaaaaacttatcttcattttacagatgaatacgttgaggcagggtgagtatttgtgttttgcccaaagtcacaaaattactaatggtacagaagcagttgagaaacaaaagtagggaacgaacaggtgggggtcaagtgttagctttattaatgactgatgaaagattggtggatgggatgtaagtgtaatatgtgatttccttatagtcacactagag

SEQ ID NO: 583225 - DNA, 520 bp, Homo sapiens
ttaccagtgaactatctgaacaagtaatcaagaaaacaatctcacttacaatatctacacaaaaaattacctaagaatgcatttaaccaaygaggtgaaatatcgctataatgaaaatgataagacattgaaaaaataaattgaaaaggacacaaataaatgaaaatatcttccaagtttataaactggaagaattaatattgttaaaatatccatactatccaaagtgacatagaggttcaacacaattcctattaaaatgttaataaaattcttcacaaaatagaaaaatatccaaaaatttctatggaaccacaaaatatcacaaggaaccaaaacaaccttgagaaaaaagagcaaagctggaggcatttcactacctgacttcaaaatgtactacaaagctatagtaatcaaaacagcataatcctagcataaacacagacacatagaccaatggaacagaataaagaacttggaaatatatttacacatttacagtcaaatgatttttgacaaa

SEQ ID NO: 583226 - DNA, 520 bp, Homo sapiens
ttaccagtgaactatctgaacaagtaatcaagaaaacaatctcacttacaatatctacacaaaaaattacctaagaatgcatttaaccaatraggtgaaatatcgctataatgaaaatgataagacattgaaaaaataaattgaaaaggacacaaataaatgaaaatatcttccaagtttataaactggaagaattaatattgttaaaatatccatactatccaaagtgacatagaggttcaacacaattcctattaaaatgttaataaaattcttcacaaaatagaaaaatatccaaaaatttctatggaaccacaaaatatcacaaggaaccaaaacaaccttgagaaaaaagagcaaagctggaggcatttcactacctgacttcaaaatgtactacaaagctatagtaatcaaaacagcataatcctagcataaacacagacacatagaccaatggaacagaataaagaacttggaaatatatttacacatttacagtcaaatgatttttgacaaa

SEQ ID NO: 583227 - DNA, 471 bp, Homo sapiens
cccttttatatccaatttctttaatcatctccaaagatagaaagaggactaaagctggaggrgagagaataagtgaatggcaggaaagttttcctttcactgccccgtcctggtgattcagcagggcaccctgtgggcatactgctgtttgaagcttgtcctttctctaaggtagctctgtgttacttcttcagagctgcatcctctgttctcacatcacctggatagcttacctgcagttcctctacataagcaaatgtgtccttcaatagacaaatctcttgctgtttataattaatatttaagcctcttggcatttcatggtacacttctagcatctttccactgatgtctcttcgcctccctcaaatgatccatctgtatctcaaggttccctgaaaaacactcactcactcttagttttgagaaatgctggacaaacaggcaaccccattcaggaaacctctatta

SEQ ID NO: 583228 - DNA, 553 bp, Homo sapiens
ttctgtgaagctggcatgtacttcccagttgttcaaaagaaccaaagactcttctccctgggagatcctgtgcttgcctgagagtagagctttcactggtgggggtattgggtcctcattcacagatgaagcaaaaccattttaactgcaagtatccagaagactaaggctgaaatcaggaaattctaatctaaattttggaggcccagaacatcagactaaggaaggggaccttttctatcaaagcattaagaatcttatgaatcattacagatgatttgatgatttgtttagaaacctaaataaaacaaaataaaatttctgcaaattttcagaggaaaaagagtcatgatcccatcaataacttagtaggtggatctrgtgatctttgataaaattgatttcagggatgggtgaaactggttacacagactggttatatttagtcattagatgttctttagacataatattagatattacatgcacttagaaattatatccattgttttatttcattcaaccaatatttattgaacaactactatgtgcc

SEQ ID NO: 583229 - DNA, 553 bp, Homo sapiens
ttctgtgaagctggcatgtacttcccagttgttcaaaagaaccaaagactcttctccctgggagatcctgtgcttgcctgagagtagagctttcactggtgggggtattgggtcctcattcacagatgaagcaaaaccattttaactgcaagtatccagaagactaaggctgaaatcaggaaattctaatctaaattttggaggcccagaacatcagactaaggaaggggaccttttctatcaaagcattaagaatcttatgaatcattacagatgatttgatgatttgtttagaaacctaaataaaacaaaataaaatttctgcaaattttcagaggaaaaagagtcatgatcccatcaataacttagtaggtggatctggtgatctttgataaaattgatttcagggatgggtgaaactggttacasagactggttatatttagtcattagatgttctttagacataatattagatattacatgcacttagaaattatatccattgttttatttcattcaaccaatatttattgaacaactactatgtgcc

SEQ ID NO: 583230 - DNA, 578 bp, Homo sapiens
ctcttgctgtttataattaatatttaagcctcttggcatttcatggtacacttctagcatctttccactgatgtctcttcgcctccctcaaatgatccatctgtatctcaaggttccctgaaaaacactcactcactcttagttttgagaaatgctggacaaacaggcaaccccattcaggaaacctctattaactctgtcartagaacaattaccagccctaatctctcagcctttggattacttaagtttaacatcttcactgtgtccttgacatcaggagacacatgtcagttctccaagcagtcacaccaaagctgctctctctaggtttgattcgacggtcatctgcagcactttcaaagaggtttcctctcaatccccacacccctaactacttcaacttcaaaccctttctaacttttagtagatgacgtgccaagtttccaagccagtatttaaccaatacacatgctagtctttttgggtggttatattttaaaatgtggggataattgttttacattctgttcaacaacaacaacaacaaaatgagactgaaaatcttccactgaaaa

SEQ ID NO: 583231 - DNA, 578 bp, Homo sapiens
ctcttgctgtttataattaatatttaagcctcttggcatttcatggtacacttctagcatctttccactgatgtctcttcgcctccctcaaatgatccatctgtatctcaaggttccctgaaaaacactcactcactcttagttttgagaaatgctggacaaacaggcaaccccattcaggaaacctctattaactctgtcaatagaacaattaccagccctaatctctcagcctttggattacttaagtttaacatcttcactgtgtccttgacatcaggagacacatgtcagttctccaagcagtcacaccaaagctgctctctctaggtttgattcgayggtcatctgcagcactttcaaagaggtttcctctcaatccccacacccctaactacttcaacttcaaaccctttctaacttttagtagatgacgtgccaagtttccaagccagtatttaaccaatacacatgctagtctttttgggtggttatattttaaaatgtggggataattgttttacattctgttcaacaacaacaacaacaaaatgagactgaaaatcttccactgaaaa

SEQ ID NO: 583232 - DNA, 481 bp, Homo sapiens
gatcacggctcactacaacctccgccttcyggtttcaagtgattctcctgcctcagcctcctgagtaactgggattacaggcacccaccaccatgcccggctaatttttttgtatttttagtagagacgaggtttcaccatgttggccaggctggtctcaaactcctgacctcgtgatctgcccacctcagcctcccaaagtgctgggattacaggcataagccacacctggccaaccactgtattttctaatattacatctttatttgatattttgtactctgattgtaatttttttttttgaaatttactaaatattagttttaccaactttctaaaaatgaacacgttcattcaacaaatattagttgagtatctattatatgccagtctccattgtaagcgctaggaatacagcaatggggaaagaaggaaagtaataattattaaaatgctctccataatgcattagatgatatta

SEQ ID NO: 583233 - DNA, 356 bp, Homo sapiens
agagtctttcagatgaaaattaagcagctctttgcaagcagctctttgcaagcacctcagaggagaacccctcaccctgatgaatcagrcacacaggcggatccaagacaattggctgcgcgcatgtgaacaagcctatggtggaaatgcagtgctttgtttggggtggtttaatcaccaggagggagaagcttctaaagcagcattcagaggtggctgttgcctgggttttctggaagggggaggcggtgaggatgagggcttccatttcatctgcaggccccttgcagaaggagctggggaaagctttgcagccatctgcacactgtttgccatcttgtctggctgggcagccg

SEQ ID NO: 583234 - DNA, 356 bp, Homo sapiens
agagtctttcagatgaaaattaagcagctctttgcaagcagctctttgcaagcacctcagaggagaacccctcaccctgatgaatcaggcacacaggyggatccaagacaattggctgcgcgcatgtgaacaagcctatggtggaaatgcagtgctttgtttggggtggtttaatcaccaggagggagaagcttctaaagcagcattcagaggtggctgttgcctgggttttctggaagggggaggcggtgaggatgagggcttccatttcatctgcaggccccttgcagaaggagctggggaaagctttgcagccatctgcacactgtttgccatcttgtctggctgggcagccg

SEQ ID NO: 583235 - DNA, 356 bp, Homo sapiens
agagtctttcagatgaaaattaagcagctctttgcaagcagctctttgcaagcacctcagaggagaacccctcaccctgatgaatcaggcacacaggcggatccaagacaattggctgcgygcatgtgaacaagcctatggtggaaatgcagtgctttgtttggggtggtttaatcaccaggagggagaagcttctaaagcagcattcagaggtggctgttgcctgggttttctggaagggggaggcggtgaggatgagggcttccatttcatctgcaggccccttgcagaaggagctggggaaagctttgcagccatctgcacactgtttgccatcttgtctggctgggcagccg

SEQ ID NO: 583236 - DNA, 356 bp, Homo sapiens
agagtctttcagatgaaaattaagcagctctttgcaagcagctctttgcaagcacctcagaggagaacccctcaccctgatgaatcaggcacacaggcggatccaagacaattggctgcgcgcatgtgaacaagcctatggtggaaatgcagtgctttgtttggggtggtttaatcaccaggagggagaagcttctaaagcagcattcagaggtggctgttgcctgggttttctggaagggggaggcggtgaggatgagggcttccatttcatctgcaggccccttgcagaaggagctggggaaagctttgcagycatctgcacactgtttgccatcttgtctggctgggcagccg

SEQ ID NO: 583237 - DNA, 617 bp, Homo sapiens
ctgcactccagcctgggcaacagagcgagactctgtctcaaaaaataaaaaataaaaaaattttaaaaaaacagatgtataattcagtaaagcttcaggacacaaagtcaacatacaaaaatcagtgatgtttctatataccagtaacaaactaactaaaaaagaaaccaaggaagaaattctatttacaatagctacaaaaataaaatacctaggaataaacttaaccaaggatggggaaaaaaaaaaaaacctctacaatgaaaaccacaaaacactgataaaataaattgagaagacacaaacaaatggaaaagcatcttatgctcgtgggttggaattactaatactgttaaaatgaccatactacccaaagcaatctagagattcagtataatccctatcaattatattcttcacagaaacaggaagaaaaaaacaaccctgaaattcatatggaaccacagaagaccccaaatagccaaagcaatactgagcaaaaagaacaaagctagaagcctcacacwtcctgatttaaaagtatactggaaagcagctgggcgtggtggctcacgcctgtaatcccagctcttggggaggccaacgcgggtggatca

SEQ ID NO: 583238 - DNA, 487 bp, Homo sapiens
tccaaaaaaaaggatatcagtctatcaacgggatatctgtacccccatatatactgcagcactatttacaatagccaagatatggaatcaatctaagtgtcaatcaatggatgaatggataaagaaaatgggaatatacgcacaatagaatagtattcagccataaagaagaatgaaatcctgtcattttcagctaaatggatggaattaaaggtcataaagttaggtgaactaggccatgcacagaaagaaaactattgcatgttctcacttatatgagcrgtttatgctcctggaaatcaaagtgggggccatgtttcaggtcagcagggtcagggatagagaccgcagttatggacttgtgtgccctggagctatataaaattgatatcatggagataaagagtagaatgatagttaccagaggccgggaataggaggggtttgaaaagaagttgattaatgggtataaaaatatataatagaa

SEQ ID NO: 583239 - DNA, 487 bp, Homo sapiens
tccaaaaaaaaggatatcagtctatcaacgggatatctgtacccccatatatactgcagcactatttacaatagccaagatatggaatcaatctaagtgtcaatcaatggatgaatggataaagaaaatgggaatatacgcacaatagaatagtattcagccataaagaagaatgaaatcctgtcattttcagctaaatggatggaattaaaggtcataaagttaggtgaactaggccatgcacagaaagaaaactattgcatgttctcacttatatgagcagtttatgctcctggaaatcaaagtgggggccatgtttcaggtcagyagggtcagggatagagaccgcagttatggacttgtgtgccctggagctatataaaattgatatcatggagataaagagtagaatgatagttaccagaggccgggaataggaggggtttgaaaagaagttgattaatgggtataaaaatatataatagaa

SEQ ID NO: 583240 - DNA, 487 bp, Homo sapiens
tccaaaaaaaaggatatcagtctatcaacgggatatctgtacccccatatatactgcagcactatttacaatagccaagatatggaatcaatctaagtgtcaatcaatggatgaatggataaagaaaatgggaatatacgcacaatagaatagtattcagccataaagaagaatgaaatcctgtcattttcagctaaatggatggaattaaaggtcataaagttaggtgaactaggccatgcacagaaagaaaactattgcatgttctcacttatatgagcagtttatgctcctggaaatcaaagtgggggccatgtttcaggtcagcagggtcagggatagagaccgcagttatggacttgtgtgccctggagctatataaaattgatatcatggagataaagagtagaatgatagttaccagaggcygggaataggaggggtttgaaaagaagttgattaatgggtataaaaatatataatagaa

SEQ ID NO: 583241 - DNA, 487 bp, Homo sapiens
tccaaaaaaaaggatatcagtctatcaacgggatatctgtacccccatatatactgcagcactatttacaatagccaagatatggaatcaatctaagtgtcaatcaatggatgaatggataaagaaaatgggaatatacgcacaatagaatagtattcagccataaagaagaatgaaatcctgtcattttcagctaaatggatggaattaaaggtcataaagttaggtgaactaggccatgcacagaaagaaaactattgcatgttctcacttatatgagcagtttatgctcctggaaatcaaagtgggggccatgtttcaggtcagcagggtcagggatagagaccgcagttatggacttgtgtgccctggagctatataaaattgatatcatggagataaagagtagaatgatagttaccagaggccgggaatagraggggtttgaaaagaagttgattaatgggtataaaaatatataatagaa

SEQ ID NO: 583242 - DNA, 326 bp, Homo sapiens
tcttcctcctggaacccctactagaccctgacatacccattcagtcacaggcagaaagggaagcagagggtaaggagacctggctggctgtgccagatgcagatcttacctgtcctgcttagaacaytcaaagctcaattggttaaacaaaaaaaggaaaaagacagtaaggagtataacactccccagatgcaacttaatctaacactctatactttaaattttctaaacatacatagaaatcagaccactacttctgcagaacattttactggtaaaaagaacagcccacatgagggaaaactgatttggtggaaagacaacaa

SEQ ID NO: 583243 - DNA, 326 bp, Homo sapiens
tcttcctcctggaacccctactagaccctgacatacccattcagtcacaggcagaaagggaagcagagggtaaggagacctggctggctgtgccagatgcagatcttacctgtcctgcttagaacattcaaagctcaattggttaaacaaaaaaaggaaaaasacagtaaggagtataacactccccagatgcaacttaatctaacactctatactttaaattttctaaacatacatagaaatcagaccactacttctgcagaacattttactggtaaaaagaacagcccacatgagggaaaactgatttggtggaaagacaacaa

SEQ ID NO: 583244 - DNA, 326 bp, Homo sapiens
tcttcctcctggaacccctactagaccctgacatacccattcagtcacaggcagaaagggaagcagagggtaaggagacctggctggctgtgccagatgcagatcttacctgtcctgcttagaacattcaaagctcaattggttaaacaaaaaaaggaaaaagacagtaaggagtataacactccccagatgcaacttaatctaacactctatactttaaattttctaaacatacatagaaatcagaccactacttctgcagaayattttactggtaaaaagaacagcccacatgagggaaaactgatttggtggaaagacaacaa

SEQ ID NO: 583245 - DNA, 326 bp, Homo sapiens
tcttcctcctggaacccctactagaccctgacatacccattcagtcacaggcagaaagggaagcagagggtaaggagacctggctggctgtgccagatgcagatcttacctgtcctgcttagaacattcaaagctcaattggttaaacaaaaaaaggaaaaagacagtaaggagtataacactccccagatgcaacttaatctaacactctatactttaaattttctaaacatacatagaaatcagaccactacttctgcagaacattttmctggtaaaaagaacagcccacatgagggaaaactgatttggtggaaagacaacaa

SEQ ID NO: 583246 - DNA, 471 bp, Homo sapiens
ttttttgacctaatttatcacagagggatggaggttcatttgctttaatgagcaatgcagaatgccattaagaaagcatattaaattaatctggattgctgggagggagttaaatctgtttagatgtgcaccagtgtgactataatagtttggtctmaacccatttctggcctgcggctgcaggagattgactcccagcttgctttcatttgaaagatcccagcaacaagcacatttggcatttccagccaaacccactttgtgcagcgaaggaaaagttgaggagtgcctctgttgttttcccccaaatcatttggcagaaatgtggctgggagcttcattgctgattttttcagttttaatattgctgtggaaagcctgtaccaacactcagccatgttattcatccacagctccagtctgggctgtgatttgtttttcctttgagtgacacaatcttattttccatta

SEQ ID NO: 583247 - DNA, 471 bp, Homo sapiens
ttttttgacctaatttatcacagagggatggaggttcatttgctttaatgagcaatgcagaatgccattaagaaagcatattaaattaatctggattgctgggagggagttaaatctgtttagatgtgcaccagtgtgactataatagtttggtctcaacccatttctggcctgcggctgcaggagattgactyccagcttgctttcatttgaaagatcccagcaacaagcacatttggcatttccagccaaacccactttgtgcagcgaaggaaaagttgaggagtgcctctgttgttttcccccaaatcatttggcagaaatgtggctgggagcttcattgctgattttttcagttttaatattgctgtggaaagcctgtaccaacactcagccatgttattcatccacagctccagtctgggctgtgatttgtttttcctttgagtgacacaatcttattttccatta

SEQ ID NO: 583248 - DNA, 471 bp, Homo sapiens
ttttttgacctaatttatcacagagggatggaggttcatttgctttaatgagcaatgcagaatgccattaagaaagcatattaaattaatctggattgctgggagggagttaaatctgtttagatgtgcaccagtgtgactataatagtttggtctcaacccatttctggcctgcggctgcaggagattgactcccagcttgctttcatttgaaagatcccagcaacaagcacatttggcatttcyagccaaacccactttgtgcagcgaaggaaaagttgaggagtgcctctgttgttttcccccaaatcatttggcagaaatgtggctgggagcttcattgctgattttttcagttttaatattgctgtggaaagcctgtaccaacactcagccatgttattcatccacagctccagtctgggctgtgatttgtttttcctttgagtgacacaatcttattttccatta

SEQ ID NO: 583249 - DNA, 537 bp, Homo sapiens
actggctcaaaacaagtatgtgattccattctgactgttctactgagggaaatcccccttcttctcatgcagagctgatgagrgtaagttgtattaataggacatatgctcaggttttctgaaaaatacttttatctagaaatgcataggaatatgctggtgcctgaatgtaccatctgggggcctggagattgactcacctgcctccagagctagcgctcacacttactactgagaggcctgaggaaacacctgcctacccaccaccagaacctgcacacgtcacctggagaactagagatcagcctgccacacacaccacccaggagcccagtggcacacctgcccacctggcccagtgctgccactgccagcaaccaaagaagccacctggaggcccagggattggcccatgcagacaggctatcatcagtgcccacatacactgcccatggtccctagtattgacacacctggtctaccaccactaccactgatgctgaaggacaagacttccaggcatccccatcctcagca

SEQ ID NO: 583250 - DNA, 537 bp, Homo sapiens
actggctcaaaacaagtatgtgattccattctgactgttctactgagggaaatcccccttcttctcatgcagagctgatgagggtaagttgtattaataggacatatgctcaggttttctgaaaaatacttttatctagaaatgcataggaatatgctggtgcctgaatgtaccatctgggggcctggagattgactcacctgcctccagagctagcgctcacacttactactgagaggcctgaggaaacacctgcctacccaccaccagaacctgcacacgtcacctggagaactagagatcagcctgccacacacaccacccaggagcccagtggcrcacctgcccacctggcccagtgctgccactgccagcaaccaaagaagccacctggaggcccagggattggcccatgcagacaggctatcatcagtgcccacatacactgcccatggtccctagtattgacacacctggtctaccaccactaccactgatgctgaaggacaagacttccaggcatccccatcctcagca

SEQ ID NO: 583251 - DNA, 683 bp, Homo sapiens
aacagaatatctacaagcatcaaggccatccagaaaaacatgacctcacaaatgaactaaataagtcaccagggaccaatcctgcagaatcagagatatatgaaattttagacagaatattcaaaatagctgttttgaggatactcaaattcaagaaaatacagagaagaaattcagaattttatccaataattttaacaaatggattggaattattttaaaaaattaaggagaaattctagagtagaaaatgcaattgatatactgaagaatgcatcaaaatctcttaatagcagaattaatcaagcagaagaaagaattagtgaacttgaagacaggctatttacaaatacacagtcagaggaaacaaaagaaaaaagaataaaaaacaacraagcatgattacaagatctagaaaatagctaagggcaaatctaagagttattggcctaaagagcaggtagagagacagataggggtggaaagtttcttcaaagggataataacagagaagttcccaatcccagagaaagatatcaatagctaagtacaaggaggctgtatagcacttagaagactgaatccaaagaagactacatcagggcatttaataattaaattcccaaaggtcaaagattaagaaatgattctaaaagcagcaagagaaaagaaacaaataacat

SEQ ID NO: 583252 - DNA, 505 bp, Homo sapiens
ttccaggcaccactggggtatgggggagaaaaaaaaacaaactcctgcagctaacttggtgtctgcccaaatggccacccagttttgtacctgaaacctggggccctggtgatgtagagggaatatcctggtctgcaggttgcaaagaccatgggaaaagtgcagtatctgggctggagtgcactgttccttaggtacagtccctcatggcttccactgggtaagggagagaattcccccaccccttgagcttcctgggtgaggtgatgccccaccctrcttcagctcacccttcatgggctgtacccactgtccaagcagtcccaatgagatgagccaagtacctcagttggaaatgcagaaatcacccaccttctgcattgatctcactgggagctgcagactggagctgttcctattcagccatcttgccagccccttctggttcatttttattttacaattaaaccttggaaccaatgagagttttgggacagagaaagcc

SEQ ID NO: 583253 - DNA, 643 bp, Homo sapiens
aaggctggtcttcaggagatatttaactttgtcagtctctttggggaattctcagtgtttttcactgagggggcaagaatcctcttgtgcttttcactaggggagcatgtacatcacaaagttcaaacattcacaactttgattgtaacccaagggggcagttaatcatcacagtttaatatataaaccttgtagcacatttgacatcaaactagccaatgctcaagggtcaatttccccttcataattctggaaaattatacccttactaccacgctaagatggtatatgttatgagaattctgttggttgatattctctaagtggatcaagaaaaatactattaaaataagagaataggtatgaagtttcaagtttgagaagctgaaaaagttctggagatggatgttggtaatggttgaacaaccatatgaatgtacttaattcaactggactttacacttaaaagagttaaaatgataaattttawgttatgtacagtttgtcactataaaaacataagagaatagcagtaagagcttgatataaagaaatggtagttattttccaattttaaatgtagaaaatcaagagacacatgacaaaagaaatatctagggtcaggtgctcagttagtagtagt

SEQ ID NO: 583254 - DNA, 601 bp, Homo sapiens
cttcttattccccaggaaatgactaatgcctgggcgaagccagtattctccacttctgccaattctgaatgggcaaatgcaacctggaaaaggccagtgcacatcttcattcacctttgaacagctctattctctctggagtttcagtcactttaatcctcattatttcttctgtcctctaattcctttagaaatacaacttttgtaatttattcagctattcttattgtttcagtagaagccctggtctacttagaagcaraagtgaagttttttaatctgataaaggttattttcaaaattctacaagtatacatcatgctaatgctgcagtttcaaaaacttacatcctgagatcaaaaactagagtaggatgtcatttatcaccacatctcttcagtattatattgaaggactttgaaagtgggtagagaatcctgaggaagaagagagttggaagattcatcctgcaggataacaagacatattaagacttaatacattgttgtactaccagaaggaaagaaaaaataaaccaatggaatagattagaaaatccagaaacagatgcatatgaatagaattaacttatttacagcaa

SEQ ID NO: 583255 - DNA, 596 bp, Homo sapiens
ttttttttttggagactgagtctcactttgtcacccaggctggagtggagtggcccaatctcagttcactgtagtgtccacttcccagattcaagctatcctcctgcctcagcccctcaagtagctgataatacaggttcacaccaccacgcctgactaatttttggatttttttgtaaagatggggtttcgccatgttgcccaggttggtcttgaactcctggactcaagcaatccccctacttgatcctcccaaagtgctgggattataggcataagccatcatgctcagcccttttcttcatctttaaggagtcattcaggctttggagctcctgtggggttggtggaagccattgttgtacctacatctcttttccaacttgccttctgcttactcctgctatccttgtttcttacaggtgacaatctcaagagatgtccccagtaaatcttttgaatacaaatcttcatctaagagtatgtttcttggtgaatttgacttacaaaatatgarttatatgaaacaggcagcacttaatcataaacatatctgactcacttttcatctaagattaaaaatatcatttttgtca

SEQ ID NO: 583256 - DNA, 398 bp, Homo sapiens
aactggggttctggtttttacccagattcagacaatggggaatttcttagaaaaaggagaatggtcttcagatggggtacacccactcattccctcccagaccaatactacaattggacttgtggatgtcagaataatggccctcaaagatgcttatatcctaatccctgaaacctgtgagtatactacacatcgtaacatatgtaggatacatactacatggcaaacggaaattaaggttgcaaatggattgaaggtggcaagtcagctgatcttaaaatagattatcctggattctctgggcaagcctaacataatcataagggtctgtaaaagtagaaaagagtcagaaaggaaggtcasagtgattgtcacatgaggagctctttgaaggtgga

SEQ ID NO: 583257 - DNA, 586 bp, Homo sapiens
tatatatcatataggtgaattatatatttttaatccattcagcyaatctgtctgtttcattgtggagtttaatccatttatatttaaaataattattgatagtgaagatttattattaccattttatttattgttttctatacatcttgtagcttttttgtccctcttttcctttcttgtttcctgactttgtgttttgttgattttttgtagccatatgttcgattctcttatttccttttctgggtattctataaattgtatgtgcatgattaccattgcaattacataacgcatcttaaaatacaaaattctgttttaatctaataacagattaatttaaatcacataaaaatctccaccccacactctttatgttatcgatgttaaatttttatctttatatactgtatacttattaacattaatttgtaatttaatggtttttgtcatttaaattctatgtaccaaacttactgtagtacaagttagtacatttgtccatgtttttacctttgccagaaaactatattttttgtaaagctgcaagtttctagctaccaaattttcatctcaaattgaagga

SEQ ID NO: 583258 - DNA, 643 bp, Homo sapiens
tcatcacatggcagcaggaaggagaaatgccaagtgaagaaggcaaaagccccttataaaaccaacacatcttgtgagaactcactatcactagaacagcatgggggtaactgccyccatgattcaatcacttcccaccgtctccctcccatgacacatgaggatttggggaactccaaatcaagatgagatttgggtggggacacagacaaaccatatcagaatctcagtgaacttcagcaaaacacagagaaacaattcagaaatttataaaagaaattacacaaatttaaaaaatgaaaataatcaaacagatgttgtggagctacaaaacacaatgaataaagtgaaaaatgcagtagagagaatcaacagcagaattaatcaagcagaagacaaaatcagtgagcttgaagttgagttatttgaaaatatacagaggaggaaaaataaatattaatgaaaaagaatgaagaaaacttgtgagatctggagtatagcatcaagcaagcaaatattcaggtcactggagttcaagaggaagtaaaaaaaagaataaggagtagacagattattgaaagaaataataacagaaaaccaatcaaaaatgaaaaaaaaaaagatgtaaatatttaggaagagg

SEQ ID NO: 583259 - DNA, 650 bp, Homo sapiens
  misc_feature 621, 622, 623, 624, 625, 626, 627, 628, 629, 630, 631, 632,633, 634, 635, 636, 637, 638, 639, 640, 641, 642, 643, 644,645, 646, 647, 648, 649, 650: n = A,T,C or G
cttcacatggtggcaggagagagaagtgyggagcaaagggataaaagccccttataaaaccatcagatcttgtgagaattcactcactaacatgagaacaacgtgagggtaaccacccccatgattcaattacctcccaccaggtccctcccatgacatgtggggattatgggaactacaattcaagctgaggtttgggtgaggacacagccaaaccatatcaaccaccctcttttacctcacctaaggctatttctttttattattattatgatttttgagacagaatcttgcttttatgcccagactggagcacagtggtgtgatttcagttcaccgtaatctccaccttctgggttcaagtgattctcgtgcctcagtcgcctgagtagctgggattagaggcatgtaccaccacacccagctaattttttgtatttttagtagaggcagggttttgctatgttgaccaggcttgtctcaaactcttggtctccagtgatccacccaccttggcctcccaaagtgctgggattacaggcatgatccactgtgtctggcctaaggttatttcatttttgttctatcaaatatgttatactataatctttttgagtgttnnnnnnnnnnnnnnnnnnnnnnnnnnnnnn

SEQ ID NO: 583260 - DNA, 523 bp, Homo sapiens
tggcctcccaaagtgttgggattacaggcatgagtcactgcacytggcctggttttctaatttctgtttagaattttttgtctctaacactttttatagtttctaatttcttgtcaaagattttatatccttgaacataaaagcatcatcattttatatttccaatctctaatagctccctctctactaaaatattatttcctgcttctaagtatcatccctcctatccaaaaaggagcctctttttttttttgaagtctttttttttttcattatacattaagttttgggatacatatgcagaacgtgcaagtttgttacataggtatacacgtgccatggtggtttgctgcacccatcaacccatcatctacattaggtatttctcctaatgcttgtggggttaggggaagaacctcttttttaatcatccttttcctttaagcatcacctatttttatctcactgttaaaatttgtaaacctataatttatattaaccacatttgtttatttctcaaata

SEQ ID NO: 583261 - DNA, 523 bp, Homo sapiens
tggcctcccaaagtgttgggattacaggcatgagtcactgcacctggcctggttttctaatttctgtttagaattttttgtctctaacactttttatagtttctaatttcttgtcaaagattttatatccttgaacataaaagcatcatcattttatatttccaatctctaatagctccctctctactaaaatattatttcctgcttctaagtatcatccctcctatccaaaaaggagcctctttttttttttgaagtctttttttttttcattatacattaagttttgggatacatrtgcagaacgtgcaagtttgttacataggtatacacgtgccatggtggtttgctgcacccatcaacccatcatctacattaggtatttctcctaatgcttgtggggttaggggaagaacctcttttttaatcatccttttcctttaagcatcacctatttttatctcactgttaaaatttgtaaacctataatttatattaaccacatttgtttatttctcaaata

SEQ ID NO: 583262 - DNA, 523 bp, Homo sapiens
tggcctcccaaagtgttgggattacaggcatgagtcactgcacctggcctggttttctaatttctgtttagaattttttgtctctaacactttttatagtttctaatttcttgtcaaagattttatatccttgaacataaaagcatcatcattttatatttccaatctctaatagctccctctctactaaaatattatttcctgcttctaagtatcatccctcctatccaaaaaggagcctctttttttttttgaagtctttttttttttcattatacattaagttttgggatacatatgcagaacgtgcaagtttgttacataggtatacacrtgccatggtggtttgctgcacccatcaacccatcatctacattaggtatttctcctaatgcttgtggggttaggggaagaacctcttttttaatcatccttttcctttaagcatcacctatttttatctcactgttaaaatttgtaaacctataatttatattaaccacatttgtttatttctcaaata

SEQ ID NO: 583263 - DNA, 556 bp, Homo sapiens
tataccatayataaataccatatatataccatatataaataccatatatataccatatacatatcatatataccatatatatacacaccagatgtaccatatatgtaccatatatataccacatatatgtaccatatatataccacatatatgtaccatatatataccacatatatatacatcatatatatgccatatatgtatataccacatatatatatgatggactactactcaggcatataaagtaatgaattaatggcatttgcagcaacctcgatgagattggagactattattctaagtgaagtaactcaggaatggaaaaccaaacactgtatgttctcacttacaagtgggagctaagctatgaggatgcaaaggcgtaagaatgtcacaatggactttggggactcaaatggaaagggtgagaagggggtgagggattaatgacaacaaataggtttcagtgtatactgttcaggtgatgggtgcaccaaaatctcagaaatcaccactaaagaacttagtcatgtaagcaaacaccatctgttcc

SEQ ID NO: 583264 - DNA, 577 bp, Homo sapiens
atactatttggtactaggcactcagtagatatttgttgaatgaataattaaacaaacagaagtttttaatgttattgtagtttaattggtaggtattttatggttagtgttactgtgccttattgaagaaacaattcaatgtcctgcatttatagagatattgtcctaaagttatgccttttacctttaattaatttgttcattttcatcttctgtaataattttcgtcttcttatataagaagacaaataattttagcatttttattaaatctttcctcttttcaccccttgttacaatgaaatctctattttattgcttctatagctgcataggtttgcttctggtttctctattctttaccactggataaatttgatttcagagtgtcattaccacaatctcttattcataacaactttatgataaacaaccttgatatgtgcttaaaaatacttctatctttttcttcagaaatgctttggccattcttatacttgycttcttttatttttagaatttgtcagcacactcaaaaatcctattagattttatttaatctatagataaaataggg

SEQ ID NO: 583265 - DNA, 514 bp, Homo sapiens
tcctccagaatactgctgaattttttaaaagcataaccatcactcaactgaaaaataaatttgtcagcataaaacaacttttatttccttcattcatccaatcatttattcagccatccctcaacccccttctcagtgccaggtattccattaaaaactggacacaaaaggataaataaaacataatccttgccttaaagcaccttccaatctgagaagattcgtaatctgatgtaatatcaagattacagccgaaaatcccaaactgctgaacaccgcaatctaagttataatttcttgagagtcatattgccacagtagctaacatttattgagtgyttattgtgtcttcctatagagtgaaccaaatactcattatcacaaagctagtaattccagcctctgtgtgtgtgtgtgtgtgtgtgtgtgtgtgtgtgtgtacagagtcctcattctagactgtcacacaaaattaaccctgagatccatggaaacatggaatagggtggctaaa

SEQ ID NO: 583266 - DNA, 549 bp, Homo sapiens
gattacaataccaaagctagcatgatataaacatcatcataaaagaaagttaaatgactgttattttaatgatggatggaaggactgttttctacactgtatcaagcagtacatcaaattgcagcagcaacaacaacaaaataaggataaggaaggtaaataaacaagasagtacattctgcacactagacagaaaagcatttgggattaagagcggtgaagaaggggatgggaaagcatatatgaagactgaatctcacatgtctgagctcagacaggcaagtccttctaaatcaatcaaaaatttcatcccctcccaaagacacttaccagttgaaaatagcagctgctaaataagtttgggcagaacacgtgaatgaccatatattatcatttctttgattgctttgtgagacccaataaaatcacattcagatgactgattcaggttccaactaaaatctcccaagggtgagcaaaagggattttttttttttgacagggttttgctctgttaccaggctagagtgcactggcatgatcatagct

SEQ ID NO: 583267 - DNA, 405 bp, Homo sapiens
gctttggcttctgcaaactctaaactctgtcttcttgacccagcaagatgtacaagttttatttgtgttctctttctctggagtacagcctgtaaactcttcagtcatggactggtgcagtaatggaattcacctcatttgtttctcttggagattgctgtcctatattgcctkttatccagcatctaaaatttgttgcttcatgtatttttgtttttctagttttttaatatgggagggtaattctggtttctgttatttcttcatgaccaaaagtggtttacctttttttttaaagttattaatacaaagataatttttacctttaagttagagcagattttctacactttgttatatcctatacagttttattttatatattatgagcagaatatatagtgg

SEQ ID NO: 583268 - DNA, 596 bp, Homo sapiens
ataagggttacatgaacacaarcaactgttgataccatgacattgtttatctgataatgaaaacagttgctaagtgactaatgggtggatagtatataccgcatggatatgctggacaaaaagaagatttatgtcctgggcaggatgaatcagaatggctagagatgagatatcatcattctactcagaagagtgtgaaatttaaacataaaatgattatttctggaattttcaagtagcaatactgaatcccttctttttaacatgtatttattcagtgtttattgattcattgattcattcattcatttatttatacaatttcctagtatttttctgtgacattattttgtgaatgactgtttggtagaatggcaaaatgaatgagatacaattattttttggacattgattgttatgataaatatgattagtgtgactatgtcctaaaatgtaatattgctacctggctaatattttatatgggttaaaatttaataccaagaatattttaaatttcagaaagacagaagtttataccatttatctcaaatgttaacagaatgatgttcacataaatttatcaacacaaaaac

SEQ ID NO: 583269 - DNA, 558 bp, Homo sapiens
acccaatattgttagaatgctacgaattaaccaaagttttgcaaaaacccaaggaacatttattcaagagcaaatggttgaatcttggtaagaacaaatgaaattcacggtatttcacctgtgctattattgtgctattattccaatctcctcaatctcatgatactcaaaaaaacaacaatcttgaaactacagaagctattttttaaaatcagcctagtagacactggaragagcagtcactcaaaagcccagttcccagattttgtcataatttgacctatctggcagttccctagggtcctccgctcacatagcttattcatatcttacatgacaaaattcacttcctgtgatgagttttttacgctatgcatttgctgaaacaagtagaaatgaatatttaacatcatagctaccggaaacaaggatacagagtaaacaagaaagtgattaaaacatttaaaaagaaaagctgaggaaacagatatctatagaaggctttgaaaagctccaacagattcctcagaaattagatgtccatgcacatgagcaggg

SEQ ID NO: 583270 - DNA, 497 bp, Homo sapiens
atgttctaacccaacatgaagaagctaagaaccttgataaaacattagaggaattgataactagaataaccagtktagaaaggaacataaatgacctgatgaagctgaaaaacacagcaagagaactttgtgaagcataccgaagtatcaacagctgaactggccaagtggaaaaaagaatatcagagtttgaaaaccacgtttactgaaataagacatgcagacaagaatagagaaaaaaagaatgaaaaggaatgaacaaagcctccaagaaatatgggacttcataaaaagactgaacctacaattgattggagtaccagaaggagacagggagaatggaaacaagctggaaaacacacttcaggatattatccaggagaacttccccagcctagcaggacaggccaacatgcaaattcaggaaatacagagaacaccattaagactctccaggagaagatcaaccccaagacacataatcatcagattttttc

SEQ ID NO: 583271 - DNA, 497 bp, Homo sapiens
atgttctaacccaacatgaagaagctaagaaccttgataaaacattagaggaattgataactagaataaccagtgtagaaaggaacataaatgacctgatgaagctgaaaaacacagcaagagaactttgtgaagcataycgaagtatcaacagctgaactggccaagtggaaaaaagaatatcagagtttgaaaaccacgtttactgaaataagacatgcagacaagaatagagaaaaaaagaatgaaaaggaatgaacaaagcctccaagaaatatgggacttcataaaaagactgaacctacaattgattggagtaccagaaggagacagggagaatggaaacaagctggaaaacacacttcaggatattatccaggagaacttccccagcctagcaggacaggccaacatgcaaattcaggaaatacagagaacaccattaagactctccaggagaagatcaaccccaagacacataatcatcagattttttc

SEQ ID NO: 583272 - DNA, 497 bp, Homo sapiens
atgttctaacccaacatgaagaagctaagaaccttgataaaacattagaggaattgataactagaataaccagtgtagaaaggaacataaatgacctgatgaagctgaaaaacacagcaagagaactttgtgaagcataccgaagtatcaacagctgaactggccaagtggaaaaaagaatatcagagtttgaaraccacgtttactgaaataagacatgcagacaagaatagagaaaaaaagaatgaaaaggaatgaacaaagcctccaagaaatatgggacttcataaaaagactgaacctacaattgattggagtaccagaaggagacagggagaatggaaacaagctggaaaacacacttcaggatattatccaggagaacttccccagcctagcaggacaggccaacatgcaaattcaggaaatacagagaacaccattaagactctccaggagaagatcaaccccaagacacataatcatcagattttttc

SEQ ID NO: 583273 - DNA, 518 bp, Homo sapiens
ggtgttatcaccactaacttgtgttcttgaagtatttaaagaaatatcctctcaggggaaaaaaatgcacgtggttacctttggccttaagtgtgattatgtggggaaaccctgtgactggtcatctgttggcagcattttagtacaacagccccataaagaagacagcacwgttaatgttagtttggtagctcaacagtcacttcttcctgttgcttgctgtagcaagtcatgcatggtggtatgagaaatcatgtgagggagaaattaatatgggctgaattttggctttttacaaatttaatgaaagcaaacccacagaccaaagaaactcaacaaactctgaaaacaataacatatttcacaacaaagaacattaccatggacaaacaaagtcatttaattacgataaagactttaataatgataaagatgataaaggggaaaattcctcaaaaggacaatattactacacatgcgtgtgcttgattaaagatctccaaaatacatgaagcaaa

SEQ ID NO: 583274 - DNA, 584 bp, Homo sapiens
tatcttttctatttatctctttatatctccatgcatccctgtatctgcatctgtatctgcatgtagacaagatggatatccatctgtctatatcttgacatacatatacatataactagatagagagggttatttttatctttgcacagattagtaaacatgtatttccaagatttcctcaatgagggtagaattaatgacactgcagcagcaawgtgcacacatgataggtagatcttagtttctaaatacctaactccaataaaagaaaacagagctgcttggttggtctcatggctgaggcaggaaaaatacacgatgaacctgaagcattctgtagtttcagcaagttaagaaagtgctcaaaaaagagagacgtcaaaagagtatagaaactgccctgaaatagctccaaatggcagaagtgggaacaatttgaaaaataaaataaataatgatagaatcgagttgtaattcaaagactaaagtatttttaaatccagatgcaaatgaacaaataattgaataggagagaaaggtcagctcttcctgagagggggattccaattaatgcatgtaaaaag

SEQ ID NO: 583275 - DNA, 465 bp, Homo sapiens
ctttaaaggggaaaactagtaacttcagattggaaagtctagaaagtaccacctcagtcaagtgatcaaggtcaacacaaacataggacatatgcatttcatgtagcccctttacaaagcactgagaagggtccatgacctccattgyattcttccagtaaattataatcttaatgaaatcataggaaaatatcagacaacccagtttgagaaacagtctaaatataattgaccaacactcttctaaagtatcaaggttgtggaaaacaagcaacatctgtggaactgtcacagagtaaagaagaatcaaaagatacagcagccaagtgaaacacagaccctggtataggaccctagtcggaaaaaagctggtgcaattcagatggtctgtagttcagttaataatatcgtaccaatataaatttattcattttgataacttgggaggaaacagtacgtagctta

SEQ ID NO: 583276 - DNA, 451 bp, Homo sapiens
gtaaatggtaaagggatttaaagcagtggttttcagctgccagaggcctgagwgagtttgggcacactctgtgtgatcgggcagaaggcctgtgggaagtttagctgaggacagggccaggaaaggtgatggacagtgggggtctgtcctggtcaccaggcccctgggtcctgcccacctgcttggagctccccacccatcacacatgatgctgccaagccctctgggtattgtgggcaaataccttaggagagaagctgatgaactttgtttcttgaaatgcacagattccttggacgtccctgagaggccattcatgaaggtcaacttggttttctccccctcatttgggttcagaatttaaagtccacacacacgggcagtaagatgatatagataaggacatcatcactcggtttcggatgttaaaatgtctaggtgggttaggggt

SEQ ID NO: 583277 - DNA, 451 bp, Homo sapiens
gtaaatggtaaagggatttaaagcagtggttttcagctgccagaggcctgagtgagtttgggcayactctgtgtgatcgggcagaaggcctgtgggaagtttagctgaggacagggccaggaaaggtgatggacagtgggggtctgtcctggtcaccaggcccctgggtcctgcccacctgcttggagctccccacccatcacacatgatgctgccaagccctctgggtattgtgggcaaataccttaggagagaagctgatgaactttgtttcttgaaatgcacagattccttggacgtccctgagaggccattcatgaaggtcaacttggttttctccccctcatttgggttcagaatttaaagtccacacacacgggcagtaagatgatatagataaggacatcatcactcggtttcggatgttaaaatgtctaggtgggttaggggt

SEQ ID NO: 583278 - DNA, 451 bp, Homo sapiens
gtaaatggtaaagggatttaaagcagtggttttcagctgccagaggcctgagtgagtttgggcacactctgtgtgatcgggcagaaggcctgtgggaagtttagcwgaggacagggccaggaaaggtgatggacagtgggggtctgtcctggtcaccaggcccctgggtcctgcccacctgcttggagctccccacccatcacacatgatgctgccaagccctctgggtattgtgggcaaataccttaggagagaagctgatgaactttgtttcttgaaatgcacagattccttggacgtccctgagaggccattcatgaaggtcaacttggttttctccccctcatttgggttcagaatttaaagtccacacacacgggcagtaagatgatatagataaggacatcatcactcggtttcggatgttaaaatgtctaggtgggttaggggt

SEQ ID NO: 583279 - DNA, 451 bp, Homo sapiens
gtaaatggtaaagggatttaaagcagtggttttcagctgccagaggcctgagtgagtttgggcacactctgtgtgatcgggcagaaggcctgtgggaagtttagctgaggacagggccaggaaaggtgatggacagtgggggtctgtcctggtcaccaggcccctgggtcctgcccacctgcttggagctccccacccatcacacatgatgctgccaagccctctgggtattgtgggcaaataccttaggagagaagctgatgaactttgtttcttgaaatgcacagattccttggacgtccctgagaggccattcatgaaggtcaacttggttttctccccctcatttgggttcagaatttaaagtccacacacacrggcagtaagatgatatagataaggacatcatcactcggtttcggatgttaaaatgtctaggtgggttaggggt

SEQ ID NO: 583280 - DNA, 385 bp, Homo sapiens
tcatgctcacctgtgcagtgccccttgacttccattgtgcctgcctttggatccctcagatctagtttccctttctaggacttcaacctgaagcttggaattaagtttggggcaagaaggtgcttcaggagggtttatggactcattaaattaaatgtcaggtgtccctcaccagactgcagccagcagctggcggggctgctccttcacttcttccttatcattaagtccaatgctaagrtaaagctgtggaactggatcctcctcaaacaaggggaagggagaattggggtcctggcctagtaatatgcctttcaaaaggttaaataagtaaataaataaatagaaatcaataaaaattaacaaacaaacagaaaacaccttt

SEQ ID NO: 583281 - DNA, 504 bp, Homo sapiens
taaatttgaatatattcaatttaaaagaaatttgtataaaacaatataacttatcacagttaaaagaaaagctgctaaatgagaaaatatatttacaatgcttatgaacaactttgtttactgaatatataatatgttcctaaagcatcccattaggaaaaaaatggggataatatataaatagggcttttattaacaagaaagcaagaatgattaataatgtgaaaagatgctcaayctcattaatagagaaatacaaaatgacaatgtcatgctatttcatacccactgggtttatatctgagaaagcagcatgtttaaaaagatggaaagaaacaggtactcttaaggaacttctagtggggatataaatatttcttgtctgaaaaataatctagatttatttaatacagttgaagacacacacagctagcaaaggctcaacgatgtacaccacacacacaaacacacatataaatatatatctgtatatatatagagcaa

SEQ ID NO: 583282 - DNA, 447 bp, Homo sapiens
atccaagttaggcaaaacagagaccagtcattcaggcagtccccagacaggttagaatgttacagttaagatctgctgtgctccctttggtttcaaaggagggaattgaaaactaagctaccactttcttcagaccaagactgttccatgccagggaaggagtagggcaaggttgagtaaaaatgtcatacaatttcctactgttttgaatgtcattaaaaaaaatggtcattcagttgacggttatagacccttgaaacttttcargagcttttatacaataatgttaaacagtttttggtgtttttgtttggttgttctgcctttttttcccatgtttccatggaggaatgaggacttggagcttcttaatgcaccaatttactgatgtcacttatctaatctctacctttaaattgaaccattaatatttacatttaaggtaat

SEQ ID NO: 583283 - DNA, 584 bp, Homo sapiens
atggtggtgtgtgcctgtaatcccagctactcaggaggctgaggcagcagaatcacttgaacctgggaggtggaggttgcagtgagccaagatcacaccactgcattccagcctgagtgacaaagtgagacttcatctcaagaaaaaaaaaamaaaaaaaaaagtacagtgaatgagataaatgttttaggtaaactttttgtgtaaattaaaatattaaaattatttttgatgctcattgaatatctgagtcatttccaatttaaaaagtttgtgatatggggaaatgtgtttctaaaaattgtagaattatacttatctataaatgctcatatctgatggttcaggatttcttgctttttaggatttcgcttaagttttaggttactaaggataagagttctagttaacacataattctgtatacaaaatgtaccagaaatggttctgttattagtgagaaaaacaataatctcatctaatttggaagttatctaaaagttagttcaaattacagatttgaaaaggttatttatgaaacaatgtagtaaggaccagtaagtaggggagaaagaagtgaaaaa

SEQ ID NO: 583284 - DNA, 568 bp, Homo sapiens
atatcttttcattggcttgtgtcttcttcaacatctttcaccaatgtkttatagattttcttaaggaaatattttatttctttggttaaagttattcctatgcactttttttgtagatattagaaatgtgattgttgcctaaggttccagagattaccgcaactccaggtttgagaggatacatgaagactttccttctgtggccattcacaaggacaacctcacaaggatacagcctgtctgccaaacatggacctgtctgagtcagttcttgtgcaccagatccaacaaaagaaattcaagcatgaagccagtgattgaaggaagctaccccaaggcccaagaatgaaataggtgaggagaatatttctctatcttccaccaaagaacactactgccaactgtaccaaaacacaaaagagccttatagcagagtaagagtctgtctgctgtcttaaaactcttagataccaactactggatcacagcccaaaatacaacaccaaaatattttgccagtatacagggcctgtgaaaattaaggcaaaaattccctccagcatcccac

SEQ ID NO: 583285 - DNA, 370 bp, Homo sapiens
tatttagaaattaagcaacatatttctcaataacccatgggttataggaagtttggggaaaatttgaaatcattttgaactggattttaaaaatacaatatattaaaatatgtgagttggagccaaaacagtgcttaggagaaaatgtatagcataaaatactcttttagaacagaaagmtgatttcatatcatgaattaattttccaatttaagcaaggggaagaatataaaataaaagtcaaatcaggcagaatgaaggaaaatgggatttactaatattagaaatcaaagatggcacatcataagtgatcccaatagaatctaaaaggaacttaagagaacctgcaacaattacatgctcataaatt

SEQ ID NO: 583286 - DNA, 578 bp, Homo sapiens
ctcttcaataaatggtgctgggaaaactggatatctatatgcagaggtatgaaactggagctctttctcttgtcatatacaagatcaaatcaaagtagattaaagacttaaatctaatacttcaaactatgaawctactacaagaaaacattggtgaaactctccagggcactggtctgggcaaaaatgttttgagtaataccccacaagcacaggcaaccaaagcaaaaatggacaaataggataatgtcaagttaaagcttctgtacagcaaaggaaacaacaaagtgaaaagataagccacagaatgcaagaaaatatttgcaaactagccatctgacaagcgattaataactagaatatgtaaaaaattcaaacagttcaataggaaaaagactattaatcccatttaaaaatggcaaaaggtctgaatagacatttttcaaagacaagtgaaaccccatctctactaaaaatacaaaaatgagctgggtgtggtggcgcatgcctgtagtctcagctactcgggaggctgaggcaggagaatcgcttgaacccaggaggcagaggttgcagtg

SEQ ID NO: 583287 - DNA, 461 bp, Homo sapiens
tgcatgtcaccatgtccagctaatttttatttttacttttattttttgtagagatgtggtctccctgtattgcccagtctggcctagaactcctggcctcaactgatcctcctgactcagtctctcaaagtgctgggattacaggcatgagccaccacactggcaaatgtctacattttttaaaacaaattaaacataaagagctcataaagaatagtcaaagtttatttgtggaaaaatataagactgatctataagcttttaattccrctataatttgtgaatgtaaacctctctttaagataaaagcagattctagcatcatgaggtacctgagggctctagttagttaccaagatgggaaatgtgcctggggctttctgtaattgcatttccaccttgatttgatagggttgatttggcaaactagcattttctctctatctgtgtacttccaccat

SEQ ID NO: 583288 - DNA, 461 bp, Homo sapiens
tgcatgtcaccatgtccagctaatttttatttttacttttattttttgtagagatgtggtctccctgtattgcccagtctggcctagaactcctggcctcaactgatcctcctgactcagtctctcaaagtgctgggattacaggcatgagccaccacactggcaaatgtctacattttttaaaacaaattaaacataaagagctcataaagaatagtcaaagtttatttgtggaaaaatataagactgatctataagcttttaattccactataatttgtgaatgtaaacctctctttaagataaaagcagattctagcatcatgaggtacctgarggctctagttagttaccaagatgggaaatgtgcctggggctttctgtaattgcatttccaccttgatttgatagggttgatttggcaaactagcattttctctctatctgtgtacttccaccat

SEQ ID NO: 583289 - DNA, 399 bp, Homo sapiens
gttgaggctgcagtgagctgtgattgtaccactgcactccagcatgggcaacagagtgagaccctgtctcaaaaaataaataaataaaataaaaataattatgctttcttgttgtcttgtaacatgtagcaagaattaactgcatccttaaaatatatagcactccttagtaccttataagtaaatayaataaataccaaacatattattactataacattggtaagagatttttctctttatggcttgctggaaggcactatgtattgtagtttgcattcttaataaaacttcttttatagaattttaagacttttatttcatatttttaggagtattttcatatgaaaaaattataatttgaaattagctacaactactgcttttgctaaataacac

SEQ ID NO: 583290 - DNA, 307 bp, Homo sapiens
tggctttagttccaatggacaaaactaattctgtcagtttttattataattgcatacactggacatcaaagtaaagatttaatcatttaagagttgttgactatttttcatattttcctttgtgtatttctaacttcagygcaaagaagaaaaaagttctcaatgaaacaaaatcaaaaattttttttcatgaatagacatttctgtgttaaggaaactataatatttcaacaaacatatctgttgagtttattcttacctactaattgttggtcagtttgaaaaaaaggcattaaaataagattac

SEQ ID NO: 583291 - DNA, 561 bp, Homo sapiens
ttaagaatgaaatacggccaggtgtggtggctcacacctgtaatcccagcaatttgggaggccaagtcaggtggatcacctcaggtcggaagttcgagaccagcctgaccatcatgataaaaccccatctctactaaaaatacaaaaattagccagatgtgctggtgggtgcctgtaatcccagctactcgggaggctgaggcaggagaactgctagaacacgggaggcggatgttgcagtgagcagagattgtgccattgcactccagcctgggcgacagggcaagactccgtctcaaaaaaaaaaaaagaaataaaatactatttcttctgatgtaggtttattagttttttcagacaactactaagttttaaaaatatgaatactccttaagttatttggacctaacttcttaaaaaatagaccattcaggtatttattttggtaggggtacagtgaaaaaattaatgagaaaatagatagtcagtactggaaaatagttggaccctctggccyagagcttgaaaagtactatatttcaaaattattgatgaagaata

SEQ ID NO: 583292 - DNA, 580 bp, Homo sapiens
ttcaaactaaaacataacttatttgtgttgcatttttctaatatttttaattattttgtttacttttacatgcgatgtctcaaactctgtcttccttagtatatagctgctataatttcatcagttttctcaaatatattttattttaatcaaatgggaaaatgttcactttaggttgttttttataatcctgtatcttaratttccaggcttttattttggtttaaacattaatcatatacataagtgaggtcctcaggttaccttctgactcctgttttattgtcttaggattcaaaccctctgtccaaacttcttcattttgcagacatttttttcaggttcattttgacaaagaggacgtgagtaatcttattagaaagttcttctgaacaactagccattcctctgcatattccacatgcttcttatgcccttgatatggatacaagacccatcacttttaaatatgatagtatttaaatcacttcatatcagcatgctgtagtattttgtagcattggaagttattcgtttaggtagaaaatggcacttggccagtatgcctagtgcagatgct

SEQ ID NO: 583293 - DNA, 433 bp, Homo sapiens
ttctcttctgtaaaacagatgataatctctttcagaagagtaacaatttacaaaaggtactatcctatcaataaayagacattctaatgctaataaagcccaatttaaatctggaataattgctaatttttaagaaatactcattttaaacacacatgcacacgcacacacatatacccctgtcccacaaacaccaaataattctatcaaaacttcaagtttttttttttttttttggaaagctgtgtattacattcattcactgtatgtactttgtaaaaggttcctgttatgggttattttgtgtcaggctgaatcttttctcttccttggtgggtaggtcacccagtttctcatattttatatctgaataggtgagggggaggcaatgcagatatgaaaggagaggaataattttaaacaacaacaaaaa

SEQ ID NO: 583294 - DNA, 433 bp, Homo sapiens
ttctcttctgtaaaacagatgataatctctttcagaagagtaacaatttacaaaaggtactatcctatcaataaacagacattctaatgctaataaagcccaatttaaatctggaataattgctaatttttaagaaatactcattttaaacacacatgcacacgcacacacatatacccctgtcccacaaacaccaaataattctatcaaaacttcaagtttttttttttttttttggaaagctgtgtattacattcattcactgtatgtactttgtaaaaggttcctgttatgggttattttgtgtcaggctgaatcttttctcttccttggtgggtaggtcacccagtttctcatattttatatctgaataggtgagkgggaggcaatgcagatatgaaaggagaggaataattttaaacaacaacaaaaa

SEQ ID NO: 583295 - DNA, 403 bp, Homo sapiens
ataatcattagctactttttatttttatttgttttgagacagagtctcactctgtcacccaggctggagtgcagtgttacgatctcagctcactgtaacctccatctcccaggttcaagcaattctcctgcctcaccctcctgggtagctgggattacaggtgcccaccaccactcccggcmaatttttgtatttttaactagagacaaggttttaccatgttggccaggctggtctcaaacccctgacctcaggtgagctgctcacctcagcctcccaaagtgcgggattacaggcgtgagccactgcacccagcccattaggtacctattttgacttgaaaaatattccttgttcaaaataaatgtcaaaaatttgatgtagtgaaaaactcactggagca

SEQ ID NO: 583296 - DNA, 403 bp, Homo sapiens
ataatcattagctactttttatttttatttgttttgagacagagtctcactctgtcacccaggctggagtgcagtgttacgatctcagctcactgtaacctccatctcccaggttcaagcaattctcctgcctcaccctcctgggtagctgggattacaggtgcccaccaccactcccggccaatttttgtatttttaactagagacaaggttttaccatgttggccaggctggtctcaaacccctgacctcaggtgagctgctcacctcagcctcccaaagtgcgggattacaggcgtragccactgcacccagcccattaggtacctattttgacttgaaaaatattccttgttcaaaataaatgtcaaaaatttgatgtagtgaaaaactcactggagca

SEQ ID NO: 583297 - DNA, 660 bp, Homo sapiens
gctgaattctaccagaggtacaaagaagaactggttccaatcctactaaaattattccaaaaaattgaggaagagggactcctcctaagtcattctatgagaccagaatctttctgataccaaaacctggcagagacaaaagaaaaaaagaaaacttcaggccaatattcctgatgaacttagactccaaaatactcagcaaaatactagtaaaccaaaaccagcagcacaacaaaaagcccatctaccactatgatgtggtttggccrtgtccacacccaaatctcatcttgaattgtagctccaataattcccatgtgttgtgggagggaccctgtgagggatacttgaatcatgggtggcagtggggaggggggtcctttcctgtgctgttctcaggatagtgaatgagtctcatgacatctgatggtttttataaaggggacttctcctgcacatactctctcttgcctgctaccatgtaagatgtgactgctcctcattctcctgctgccatgtaagacatgactttgctcctcatttgccttccaacatgtttgtgaggcctcccaagccatgtggaactgtgagtcaattattaattatttacaaaatttcctttatcaattacccagtctcaggtatgtctttattagcagg

SEQ ID NO: 583298 - DNA, 571 bp, Homo sapiens
tctttctaaatgcacatgttgttgtacatgttgctagaagagaagcagttgttaarcagcccaaaaacttgagaaacgccctgccctgagcaggttccatggctgcccctgctctggggaaaactggccagggagctttattgctgtgtagcttttctttccccatcaggttcagaagtgggattaaccaacccctcatctcctgcaaacaagccttggtcacttagaggttgtcagacgttgagctgcacgcttgaagttgtagagccaaccttccagcaatcatggcagagcatgcctttcctccctcactggcctcacagcccatctatatcagccagacagctcacaatcctcacccactttgtgactccctccttccttctcttggaactcttgcagtatctctgtgcaagaacatcttcctggcaggccagcagagtcccagtgcacagagtgaggaagcatgtctctactcccagggcagacctcagtgatggtcctcaagcccagcagcatctgggcttggcctcttgctagctgcaaaaacacctaaattctctaagcccca

SEQ ID NO: 583299 - DNA, 647 bp, Homo sapiens
tctgcaacaactcactgagctcaaatttctgctgaccgggaggattttttactgcctgctgtctttcagattctctttattgagtgtgtaacgctctaggagtccactctggttggtgccagcaattcaagcagaaccatctgtatgccagggctgagcagtttttcctcagtcaactggtcataagaaactctccaygagccatttgtgtgaaccgaggtaccagaagaaatatagcaggaatgggtgtcagaagaacctgagatgtctttcatgtaattgagtagagccttctgggcctgctctgccagatcccttgaacactgtagtaagacaatcccagatggcctgtgacgaaccactaaaatcacatgtgatacagtttggctgtgtctccacccaaatctcatctcgaattgcagctcccgaaattccctcatgttgtgggagggacccgatgggagataattgaatcatgggggcaatttcccccatgctgttcttgtggtaatggagaagtctcacgagatctgatgcttttataaggggaaaccccttttgcttggttctcattctctctctcgcctgctgcctgtgcctttcgcctttcgccttccaccttgattgtggggcctccccagccacat

SEQ ID NO: 583300 - DNA, 616 bp, Homo sapiens
ctgggtggtgaaaaaaaagacaaggcaaactttagaatcctccatgataaaataggtcccaaaacatcgaagtctacacccctactgcccataacccccaaagcccactcagtagctacactgtgctataaagacagaagttgctctgaggayataaagcgtgcaatatcctccaaaccatcactataggaatagacataagcagccttcatttatgcaaagctaacgtgagaataaacagaaaatttagatcaaagtctttcagtggatgaatccaccaccaaaaaagtgaaataaaactaatgcaacacttcaaagtaaatcaaatatgctcagagaagcactgcatgtgataatattaaaaattcagaaattacaataaaataaacaagaagagaaagaaattgaagtagaagttatagaactcagaagagaaagaagaaaaaaggtactgtcatttagaaataaaggtgaatttaaaaactgcctgagaaagaatatatttgaaaagaaattttcataaaagaagctatagaataaaatcaggaaaatagctaggagaatgaaagtgaaagaaggaagtaaaaagggccagagaaaattggttgaaatagac

SEQ ID NO: 583301 - DNA, 574 bp, Homo sapiens
gatctttgtcctgtagcaggggagggaccttccagcttgcaaataggggagttcaatggtgtttctttaagacatrtgagtaaagcccagaaaatggactggagctggaggtggggagaccgtcggggccatcacataaacaagagccatggtgtagaagtgatgtcagcaggctggagccgagaacacaggacatgaggctcaggccggttcagggcataaaatacggcagaagaggttgtcgaccggatatgaaatctaagaaaaagataaaagatgactcagggcttcgataagaaactgcgagatagtattgtcattaatttagaaaagtaatttaagaggggcctgcacaggaaacagaaacagaatgaagtagggaaacacagggctgggcagagggcctcagcctggccaccgcctgtgcatgccctggctcccacttccaggggctttaacacaggaaatggtgatggaaacgctgagcttctttctgtggcagctgattatttactaaaataaaacatagacaagagcttctggtagaaaacaaaacagaaaagcaaaaacccta

SEQ ID NO: 583302 - DNA, 544 bp, Homo sapiens
atgtcatacctcttacaggaaaattaggcttttcattgacaatcaacactccattgtttatttytcaaaacaaaatgctgatcttcttacagaaatagttcaggaagggacctcaatcattgccaaagccattgatgtgggatccccaagttctctggggtgcatgtgaatgtgcaccggctaagtgctgaattgcctctgcagagggtcagtagagcttctacagacaggatggagccagtcccggcctgggattcatgatgacttttaacttgacgggaggcaagagggactttgcaggtgcgttggagtctgaacagaggtccaaccttgctcccttgccctaaatccttctatagggttctaagtgaacaagagcatggctggtccagaaatagggatcctggagacagcgtgtgagcgggaggtgggctcacacctagctgcacagctgggattagcacattctccgagttgaatgctggctccaggagacgctgcagctcttctgatgatttgctgatgctctcttgcttgggagttt

SEQ ID NO: 583303 - DNA, 619 bp, Homo sapiens
attgaacggatgttcatggagtgtctaagactgtgttgattcattcacctagtgtttattatcacctacaatgtgtcaggcactgcttaagcctctagggttgtagcttggtataaaaagcacatcctggccgggtgaggtggctcacacctggagtcccagcamtttaggagaccaaggcaggtggatcacctgaggtcaggagtttgagaccagtctgaccaacatggtgaaactccatctctaataaaaatacaaacattagctgggcgtggtggtggatgcctgtaatctcagctactctggaggttgaggcaggagaatcacttgaacctgggaggcagaggctgcagtaagccaagattgtgccactacactatagcctgggtggaaagaacaaaactccataaaaaaaaaaaaaaaaaaagcatgtccttactctttcttgaacattccatgaacatccccccctcctcagggcctttgcacacttctccccagaggcagcagtgaccactgcttcactttcgtcttgtctgctcatagtgacaatgaggaagcctcccctgtctggaatttctaacatgcctatcttgctctcctttcctccataggaggc

SEQ ID NO: 583304 - DNA, 619 bp, Homo sapiens
attgaacggatgttcatggagtgtctaagactgtgttgattcattcacctagtgtttattatcacctacaatgtgtcaggcactgcttaagcctctagggttgtagcttggtataaaaagcacatcctggccgggtgaggtggctcacacctggagtcccagcactttaggagaccaaggcaggtggatcacctgaggtcaggagtttgagaccagtctgaccaacatggtgaaactccatctctaataaaaatacaaacattagctgggcgtggtggtggatgcctgtaatctcagctactctggaggttgaggcaggagaatcacttgaacctgggaggcagaggctgcagtaagccaagattgtgccactacactatagcctgggtggaaagaacaaaactccataaaaaaaaaaaaaaaaaaagcatgtccttactctttcttgaacattccatgaacatccccccctcctcagggcctttgcacacttctccccagaggcagcagtgaccactgcttcactttcgtcttgtctgctcatagtgacartgaggaagcctcccctgtctggaatttctaacatgcctatcttgctctcctttcctccataggaggc

SEQ ID NO: 583305 - DNA, 463 bp, Homo sapiens
agagccttaacaagacaggactgcaggtctgggcctgctcccggatggatggtaatgccttctttytgattgggcattgagttatttgattcacatgcatggcctggttctcattgtggcctagaaaagtttgtagattctgctgggggctcagaatcacaaaagcggaggtagatttgtgcctgtttaacacacctgtgtgtatctcctcacgactcctgtctccaacctaggattttgattgtagggttgaggatagcaggcagagtagaatcccccaatccaccctttcttgccacatctttgttagcttcttatagctgctgtcacaaattaccacaagtgtagtgacttaaaacaacacaaatgtgttatcttcctgttctggacagcaggtgtccagcgtgggtctcactgggctaacatcaaggtatcatcagggctgtaattggaggctctggag

SEQ ID NO: 583306 - DNA, 463 bp, Homo sapiens
agagccttaacaagacaggactgcaggtctgggcctgctcccggatggatggtaatgccttctttttgattgggcattgagttatttgattcacatgcatggcctggttctcattgtggcctagaaaagtttgtagattctgctgggggctcagaatcacaaaagcggaggtagatttgtgcctgtttaacacacctgtgtgtatctcctcacgactcctgtctccaacctaggattttgattgtagggttgaggatagyaggcagagtagaatcccccaatccaccctttcttgccacatctttgttagcttcttatagctgctgtcacaaattaccacaagtgtagtgacttaaaacaacacaaatgtgttatcttcctgttctggacagcaggtgtccagcgtgggtctcactgggctaacatcaaggtatcatcagggctgtaattggaggctctggag

SEQ ID NO: 583307 - DNA, 631 bp, Homo sapiens
cctgctgaaacctgaaagcctgggagggcacatcctgtcccagactgggaggccgtacagatcttcggtagttctgtgcctcggggtccygagtgggaacaaactcggccctccaaggggacactggggagcctcaaatgcggagtctgtagggagagccacagcagggtccaggcagttcagatgggatgggaagcccccggccggcaatgccacagagccttcccagccctcggcctgcaggggcccaggcaggtgcagctgagcagaacccaggtgaatcaagcagagagctgcccagcggagagcgaccactgcctccccaagctgctgaggccacgcacagggagcggggggggggggaggggctccgggctccttcgggttccctgcccagccgctggcagccgggacactggccagagcagtcctgccagatccaggctcccacagcaccccacagggcagcgcaggtgggaagcaagtggatggtctccaacttcgaagccatcccagcaagcccgcgggagagaaccgtgcccatagaggtctcaacaggttgtcctgtgtgtccacagcctcaataggaagagattctagatgtattttgtgctcactgacgtgtgtttga

SEQ ID NO: 583308 - DNA, 631 bp, Homo sapiens
cctgctgaaacctgaaagcctgggagggcacatcctgtcccagactgggaggccgtacagatcttcggtagttctgtgcctcggggtcccgagtgggaacaaactcggccctccaaggggacactggggagcctcaaatgcggagtctgtagggagagccacagcagggtccaggcagttcagatgggatgggaagcccccggccggcaatgccacagagccttcccagccctcggcctgcaggggcccaggcaggtgcagctgagcagaacccaggtgaatcaagcagagagctgcccagcggagagcgaccactgcctccccaagctgctgaggccacgcacagggagcggggggggggggaggggctccgggctccttcgggttccctgcccagccgctggcagccgggacactggccagagcagtcctgccagatccaggctcccacagcaccccacagggcagcgcaggtgggaagcaagtggayggtctccaacttcgaagccatcccagcaagcccgcgggagagaaccgtgcccatagaggtctcaacaggttgtcctgtgtgtccacagcctcaataggaagagattctagatgtattttgtgctcactgacgtgtgtttga

SEQ ID NO: 583309 - DNA, 553 bp, Homo sapiens
tcacccacagcctggggacggagctggacgtcccttccccagctccctgtcttgctctctctctatctccaggcatagagaaagctgacaggcaagtctctttccactgatagctggaatttggcattgatggtgtgagctctctgcaatcagcttagaattgcatggtgctgcgatggaaaatggggttgacgctgaggccgaaataccgctgtgctcaaagtgagttgggttgtacttgaagagatctcatcatagaagcttattgtgtaacttatttttgggaaaaagaaatccctgtaggcccacctgtgggtgttatgaggttcctgaacgagagaggctttgaaaggaatccatgcccctgggatggaggtgcccaatttcagagagagcagacgtgaacgggagccagagacrctttagaatctgcttgagaaagatcatctgcattcatttcatgcatgctccaagaatgtgagtaaagcttagagtcttctaaaagagtggaatcaaacaagatatgtggaactaaacatctgtgtttgccact

SEQ ID NO: 583310 - DNA, 410 bp, Homo sapiens
caaaatcatttcattattatcagctgagtcatgtctaaaaaaatgtcaagttatggagacttcatagagaagggagggggtttcaagttccacagcactctatggctggagagcaattgtaggggcatttgaagaggtcctgcaggctgtgaaagggttggccaaggggaaggattggagagaagctgtctatgacacaacatctaggcagtaggtcgccttatgtgaaagttatgtgaggctgcctgtcatttcttaaatatttcaaagcacaatagactctaggcaaaaaagaaaacgtgcaatgcaggcccacacactcattcattcattcagcaaatcatcattgaatcctatgcgcatgcctggcaaygttctgggtgctggatcacagtgagtgacaccggcat

SEQ ID NO: 583311 - DNA, 601 bp, Homo sapiens
cattgtctattgaagcagcatagctcatatctgcctttagtcacgcacagtattagttcagcagctgttgataacataatgatgcccataaatatggtaaagttggcataaaacagtgtgcagttgtcgtcgaagtgtagtggtcaaagccagttacctgtaaaccttctggggcttgtttgcatccatcacccatgtgctgggaggaagagtgtcccccaaaatccatgtacatctagcgcctcagaatgtgaactttaactgagaagaagctcttttccgaagctattagttaagatgaagtcacaccgaactaggagaggctgtaagtccaataacgtgtgtctttataagaagacgagargaacacacagggaaaaagccatgtgacaacaaaggcagaaagtgaagggacacgcctgtaagccaaggaccccagcaacaatgaggggctagaagaggcgaggagtcatcctcccctagagcctttgggggaagcgcagccctgtagacatcttaactttggacttctggactctgaaagagtgatagagaaactttcattgttctaagccacccggtgcttggtcattggtcctgg

SEQ ID NO: 583312 - DNA, 187 bp, Homo sapiens
cacaattcagctttgttttttttyttttgtccaagaaatgtctctagaggtaaacggatgtgaattcatctcacattttcagcatggattctttttatttcttgctttaaaaaaaaaagacaaaaacaatgaaccgtgcactgtaaataaggagaaatgaaatccacttttttcatgatgataatgc

SEQ ID NO: 583313 - DNA, 547 bp, Homo sapiens
ttaaggcagaggggctaactgccaagttcctaaaggaagagtcagtgagtattaattgagcagctactgtatctgaggcactctatagaaacgggagcgggcgtggagactggggagacacagcagttggcctcaagagtgggctgtcgatgttgaaaggagacccctgtttcctaatgaagggcactgagtggtgtgatcattccagctgcagccttgcccatcacaccgcttcccaggaccacagctgcctactgacccctgcaccctcscacctgtgctctgcgtggactcgtggtgttagagccccttcccaaagcccaccatcaatgtgtgcagcaggcaccatgcccagggcttcatcagagaagaagaactactaggagggatagacaataagaggctcattatcaaggatagagcttctgcgagtgtgcaaaccggtgcaagcctgttccttctgcatctggtttggacctgtagtctcgtaggatcctccatgccagaggctgagaagaaaagtcagactgaagtgggagagagtgaa

SEQ ID NO: 583314 - DNA, 547 bp, Homo sapiens
ttaaggcagaggggctaactgccaagttcctaaaggaagagtcagtgagtattaattgagcagctactgtatctgaggcactctatagaaacgggagcgggcgtggagactggggagacacagcagttggcctcaagagtgggctgtcgatgttgaaaggagacccctgtttcctaatgaagggcactgagtggtgtgatcattccagctgcagccttgcccatcacaccgcttcccaggaccacagctgcctactgacccctgcaccctcccacctgygctctgcgtggactcgtggtgttagagccccttcccaaagcccaccatcaatgtgtgcagcaggcaccatgcccagggcttcatcagagaagaagaactactaggagggatagacaataagaggctcattatcaaggatagagcttctgcgagtgtgcaaaccggtgcaagcctgttccttctgcatctggtttggacctgtagtctcgtaggatcctccatgccagaggctgagaagaaaagtcagactgaagtgggagagagtgaa

SEQ ID NO: 583315 - DNA, 547 bp, Homo sapiens
ttaaggcagaggggctaactgccaagttcctaaaggaagagtcagtgagtattaattgagcagctactgtatctgaggcactctatagaaacgggagcgggcgtggagactggggagacacagcagttggcctcaagagtgggctgtcgatgttgaaaggagacccctgtttcctaatgaagggcactgagtggtgtgatcattccagctgcagccttgcccatcacaccgcttcccaggaccacagctgcctactgacccctgcaccctcccacctgtgctctgcgtggactcgtggtrttagagccccttcccaaagcccaccatcaatgtgtgcagcaggcaccatgcccagggcttcatcagagaagaagaactactaggagggatagacaataagaggctcattatcaaggatagagcttctgcgagtgtgcaaaccggtgcaagcctgttccttctgcatctggtttggacctgtagtctcgtaggatcctccatgccagaggctgagaagaaaagtcagactgaagtgggagagagtgaa

SEQ ID NO: 583316 - DNA, 561 bp, Homo sapiens
tgacacagtgtggacacacaagagtcaaatcctggagagacgtcygcaaacaggttttcagctatagacaggggagttcaaattgatatgtggatttgaaaatgattcgaaaactgtacaaagaatcttaaaatatttataacactttgccaattgattgtactattggaaatgtaggttaagaaaataattctaaatgaagaaaaataatagttctatcggtgttcagtagtagagaaacagttaaataaataagtgaataaataaatccacctaaggaaatattaaaaagtcattgaagacatttttacacagtgtagcatttttttaagtctgttacagtgtaaagtaacacacacaagttcctaggcagcatgaacaaaattctgtagaaaagaaactttaaataaaaagaggaagcggtattctgtttccaaaatcacaatagcacatgcttacacctcgcctctccacacacactcccaaatccttcagggctcaacaccgaaagccaaggaagtcacccagccccctgcccagagcatagctggtgactggttg

SEQ ID NO: 583317 - DNA, 597 bp, Homo sapiens
tgcttacatgaacttagatggtatagcctactacacacctaggctatatggtatagcttgtggctcctaggccacaaacctgtatagcatgttgctgtactgaatactgcaggcaatggtaacacaatggtaagtacttgtgtatctacacatatgtaaacatacaaaaggtacggtaaaaaagcataaaaagataaaaggcataaaaataaaaaataaagtataaaaagcatgaaaaataaaaaaatggtttatcaatataagggacttaacatgaayggagcttataggactagaagttgccctgggtgagtcagagagtaagcggtgagtgaatgcaaaggcctaggacaatactgtacactactgtacttaaacaacaatttctttcttcaataataaattaacctcagctgttactgtaactttttattttatgaactttagattttaaaagttttgactcttttaatacttagcttataacacaaacacactgtacagctatacaaaaatattttctccttatagctgtattctacacacttttttatattaatttttgttttactttttaaacttttttgttaaaaatga

SEQ ID NO: 583318 - DNA, 489 bp, Homo sapiens
tagtgacaatgagttactatgtctagaccagagttgacaaactatggcttacagacctaatctggcctgccacctgtttttgtaaataaaatttttttggaacacagccacagccatttttttaacatgttgcctatggctgctcttgtgctacaacagcagagctgagttgtgaccaaaaaacaatatatggctcacaaagccaaaaatatttaatatccagttttttacagagaaagtttgctgatccttgatctagataattatcatcataactctataattcagctattccagctatttttagctcagccatttaaataaatgatgttaaggtatgttactctgactttccatagcaatactctttgtccaagaagcataatgagraggaaaactactacaacaacaacaacagaaaaagccaacaacatactctgcatgcaatatataaatgaaataaaatgtccttgcaccagggaaattaca

SEQ ID NO: 583319 - DNA, 513 bp, Homo sapiens
tgtccagctaatttttgtatttttagtagagacagggtttcaccatgttgcccagggtggtcttgaactcttgggctcaagtgatctgtccaactcggcctcccaaaatgctggctgggatcacaggcaccgtgccagcccattctgccctttttaagatgggaacattaatttatttgagcaaatgtgtgaccatgctgcttttaaataaagatgatggcatactttactaatgtgtgtgtatttgttctttctcaagatcttagagatctctgtttctgtctcaccctctctttctgtcatactctacagctgcagaataggttmattattgtttcttcatagagaatagactttaatttgggttagtttagaagggaaagtaatccttttacttctccacttaactgtttttccaggccagctgggttgaccagtctcagtgggaaagaaagaacctgacagtatagtgagaatcaaatttgggtggtaggacctatatttactagtggg

SEQ ID NO: 583320 - DNA, 560 bp, Homo sapiens
atatcttgctctgtaacaagtcatacaattggctcagctcagtgagagactcaccatagcaatatgtagcaaaaataaaaatttcatcttgatcaaaatttgaaagaaatgtgcaatgataccaatgttctaatgaatttgtagaaatcttttctaaatctgagaaaagaaaacacaaaagaagttgatttctgaattggggatgggaagagggttatttttaagtagagtgggttgctgaaggaggtggaagaggcaagcctggatcaggtgccacagtcaggtttctgaacatttgggggcaatgtgaatgctggccccacacttcacctctctcacttggggtgagtactcctctcttcacctatatggaggatgggttctgatatagataagtgacagaatggaatccctagagatagacagtgtactgygttaagagatggaattttagtaggagagttaaggggatttcttaaaaaaaaaaaaaaaaaaaaagaactgaatgcagccaggtgcagtggctcacacctatagtcccagcactttgggaggtcaag

SEQ ID NO: 583321 - DNA, 560 bp, Homo sapiens
atatcttgctctgtaacaagtcatacaattggctcagctcagtgagagactcaccatagcaatatgtagcaaaaataaaaatttcatcttgatcaaaatttgaaagaaatgtgcaatgataccaatgttctaatgaatttgtagaaatcttttctaaatctgagaaaagaaaacacaaaagaagttgatttctgaattggggatgggaagagggttatttttaagtagagtgggttgctgaaggaggtggaagaggcaagcctggatcaggtgccacagtcaggtttctgaacatttgggggcaatgtgaatgctggccccacacttcacctctctcacttggggtgagtactcctctcttcacctatatggaggatgggttctgatatagataagtgacagaatggaatccctagagatagacagtgtactgcgttaagagatggaattttagtaggagagttaaggggatttcttaaaaaaaaaaaaaaaaaaaaagaactgaatgcagccaggtgcagtggctcacacctatartcccagcactttgggaggtcaag

SEQ ID NO: 583322 - DNA, 531 bp, Homo sapiens
cattttctctaacaaccaaaaaaaaaaaaaaacggtttaccttacatataaagcattttgtacttttaaaataacaccttaggtttgtttttagccatacttaatgctcccacaagtagacttaattttatttttaaagtaaattgaaaaagttatcaaggattagaatagagtgttttaaatagcccttaaagttatattggtatttatacacttttgttcaagttgatatataatatttgcttaggtttacttaaaattgttctgctcaacagattttttggagcttaaatttaatactasggaaaaactagaatttggaagacataggtgggtgttggtatagctaatcttttggtccattattgaacccttggcagccaataaatattatttcatagagtcctgacttctcttgtatggaatgtggtcacctgcatatcatttatagtaaatgtacattcgtctactagatgcctagagctgtgcatgtgatcctttcgtgtgtgtgtgtgtgtgtgtgtgtgtgtg

SEQ ID NO: 583323 - DNA, 302 bp, Homo sapiens
ataaaagggaataagaaagggaaccaactatgttgatagaggaataattcttcaaatgaatgttacattaagaaattgtcaatgaaacactgctgttaataatwtaaaaggttttatgtgttagattcctctgaatataactttcacattttgtcctcttttgtgctaatagaacattctagtatgccagtagaaaaaaatatcactttagaaaggccttctaatgtaaatctcacatgccagttcacaacatctggggatttgaatgcagtaaatgtgacttggaaaaaagatggtgaaca

SEQ ID NO: 583324 - DNA, 302 bp, Homo sapiens
ataaaagggaataagaaagggaaccaactatgttgatagaggaataattcttcaaatgaatgttacattaagaaattgtcaatgaaacactgctgttaataatataaaaggttttatrtgttagattcctctgaatataactttcacattttgtcctcttttgtgctaatagaacattctagtatgccagtagaaaaaaatatcactttagaaaggccttctaatgtaaatctcacatgccagttcacaacatctggggatttgaatgcagtaaatgtgacttggaaaaaagatggtgaaca

SEQ ID NO: 583325 - DNA, 302 bp, Homo sapiens
ataaaagggaataagaaagggaaccaactatgttgatagaggaataattcttcaaatgaatgttacattaagaaattgtcaatgaaacactgctgttaataatataaaaggttttatgtrttagattcctctgaatataactttcacattttgtcctcttttgtgctaatagaacattctagtatgccagtagaaaaaaatatcactttagaaaggccttctaatgtaaatctcacatgccagttcacaacatctggggatttgaatgcagtaaatgtgacttggaaaaaagatggtgaaca

SEQ ID NO: 583326 - DNA, 555 bp, Homo sapiens
gggaagcttggtggtgttgcgtctatcagaaacatttgctcctgatggaatgttgagggtgagtgcatcatattggctgagccaaagtcatgtgaccctgtcctggctgcaggagagactatctggccttttcagcaggtgtagtgagagccagactytaccaccaacactccaatatcaggggtgtccccaaacagaggaaggccaaagaaataacaaatgtccatatgaatatcaaaaattaaattggctctctttttttttttttttttttttttttttttggagatggagtctcactctgtcacccaggctggagtgcagtggcacaatcttggctcattgcaacctcgcctcccgggtttaagcaattctcctgtctcagcctcccaattagctgggactataggtgcatgccaccaccacccagctaatttttctattattagtagaaacgaggtttcatcatattggccaggctggtctccatctcctgacctcttgatccacctgcctcagcctcccaaagtgctgggattacaggtgtgagccacc

SEQ ID NO: 583327 - DNA, 562 bp, Homo sapiens
tcaaaaattaaattggctctctttttttttttttttttttttttttttttggagatggagtctcactctgtcacccaggctggagtgcagtggcacaatcttggctcattgcaacctcgcctcccgggtttaagcaattctcctgtctcagcctcccaattagctgggactataggtgcatgccaccaccacccagctaatttttctattattagtagaaacgaggtttcatcatattggccaggctggtctccatctcctgacctcttgatccacctgcctcagcctcccaaagtgctgggattacaggtgtgagccaccatgcccagcctaaattagctcttctaagtctgacatatttatccattcctgatgtggagcacaaagattattattatgttagtctcttcctcttccatttccaccccaactgggtgtactgcataaaattttgacactaattatctggagttagcacagaccccgtaggctaagagcaaagttctccatgaagttgtccccacttcmgatgccagccacacttcaaggggtcaccagatcc

SEQ ID NO: 583328 - DNA, 535 bp, Homo sapiens
ggctaatttttgtatttttagtagagatggggtttcaccatgttggccaggctggtcttgaactcctggcctcaagtgatcctcctgccttggcctcccaaagtgctgggattacaggcatgagccatcgcaccaggttgaacagacatttcttcaaagaagatatacaaattgccaataagtagatgaaaagatgctgaacatcattaatcaggaaaatgcaaatcaaaaccacaattaaataccactttctattctctaggatagctataataaaaaagatagacaatagcaagtgctgtcaaggatgtagagaaattgaaccctcataycttgctgatgggaatgtaaaatgatgaggttgcttttaagaacagtttggtcattcctcaaaaggttaaacagagttacatatgacccaacaatttcactcccagcaataaattcaaaagaattgacatcatatgttcacaaaaaattttgtacaccagtgttcatagcagcatgatttataatggccaaaaagcaaaaaaaa

SEQ ID NO: 583329 - DNA, 562 bp, Homo sapiens
cctggcctcaagtgattcacccaccttgacttccctaagtgttgggattacaggtgttggccaccacacccagcctaaacttgttttagctggcctctgacacccctctggccgggaaaggggtggcactgcctcagtaccgccaggtgggggtagaagtccaggttcctcagtttgcttctgttgacacttaagagggggattccctgttactgttggacagggtgcaagtttcagctccccacgtggtctccactaacactgcaaggtcagggagagcacctgtaatggctgggatgcaagtcctggctcctacytggccttctctgttaccacccagctggggatgttgggacccctcgttactgcctagtcaggaggaggtctagtctccccattcagcctttgtggcatgggtgggtggagctgcatactttcctgtggcgtttggctgcagtagggtatttattgcctaggaattttctgtcttgccaggccgcccttttcctggtcctttggctacagatagcaggttttgttgagggtttttttttgtagtggc

SEQ ID NO: 583330 - DNA, 562 bp, Homo sapiens
cctggcctcaagtgattcacccaccttgacttccctaagtgttgggattacaggtgttggccaccacacccagcctaaacttgttttagctggcctctgacacccctctggccgggaaaggggtggcactgcctcagtaccgccaggtgggggtagaagtccaggttcctcagtttgcttctgttgacacttaagagggggattccctgttactgttggacagggtgcaagtttcagctccccacgtggtctccactaacactgcaaggtcagggagagcacctgtaatggctgggatgcaagtcctggctcctacttggccttctctgttaccacccagctggggatgttgggacccctcgttactgcctagtcaggaggaggtctagtctccccattcagcctttgtggcatgggtgggtggrgctgcatactttcctgtggcgtttggctgcagtagggtatttattgcctaggaattttctgtcttgccaggccgcccttttcctggtcctttggctacagatagcaggttttgttgagggtttttttttgtagtggc

SEQ ID NO: 583331 - DNA, 578 bp, Homo sapiens
gttgtaatgttgtaagcattacattccaatgttgtaagcattacaacagatttcctggcagtaactacaaaagttattatagaaaaaaaggatgagaaactgaaaatgttgatgggaaaacagcaaaactgtcaacccaggatcatatacacagtggaaatctctttctaaaattaattwaaaaaattagtctaacaaaaactgacataattcattgacagcagctatgtgccaccaggaatgttaaaataacatatccaaggagaagcaaaatgatatcagatagaaactcaaagctatgcaaataaatacagagcatgggaaattatgtcaatgatctaaattcaaaagtgattttaaattgctctgaaatatatcagtcttaagaaaagacaccaattaaacagcatttatagactctgtaaaagtaaagtctacaacaatagcatcatgaataaggaggacttagatgtttattcttttagggtatgtagaagatcaataatttattagtaaatatattgtaaattgctgtaaaagtatcacaattttaaaagacttaaaataagaagtcaata

SEQ ID NO: 583332 - DNA, 618 bp, Homo sapiens
gcagtaggatagctacctgcatcctgacctctatgcactagatgtcaggagtatctctttccagctgtgacatcaaaatatctctacctttgccaaatgaatctttttggtggtggagacacaaattgacttccactttagaacaacagatttaaaggaataaatctgttgtaatgttgtaagcattacattccaatgttgtaagcattacaacagatttcctggcagtaactacaaaagttattatagaaaaaaaggatgagaaactgaaaatgttgatgggaaaacagcaaaactgtcaacccaggatcatatacacagtggaaatctctttctaaaattaattaaaaaaattartctaacaaaaactgacataattcattgacagcagctatgtgccaccaggaatgttaaaataacatatccaaggagaagcaaaatgatatcagatagaaactcaaagctatgcaaataaatacagagcatgggaaattatgtcaatgatctaaattcaaaagtgattttaaattgctctgaaatatatcagtcttaagaaaagacaccaattaaacagcatttatagactctgtaaaagtaaagtctacaacaatagcatca

SEQ ID NO: 583333 - DNA, 524 bp, Homo sapiens
gactttaaaagaaaagctatcagtcactaatagcaccttaatttttctgtagggatccaacctctcctsttcttgatgggtctctgtctttgcatccagtgtattttgggaagcattcatggccagtcatcaagagacctgctgatttgtttctggataggtactagtgagccagtgcctcagctgtgggattttgttagaattattggaaaagaagagcttctttctactgaggctaatcctctgggcaggtagaaactgcacaaaacatctcatagctctctttactaaaaaaagagaatctgcttgagagtttagtcatcaaaaagaaaaggatagcagagagctggagaatgggaaattttttgaacacttggatcctctctcaactaatctatgtccagatttttgtcatgtaaacaataaattcccacttttgcttaagccacttaaaaaatttaatctgccacatgcaaccaaagatgaaaaatgcaccttcttataaatattctttttttataaat

SEQ ID NO: 583334 - DNA, 524 bp, Homo sapiens
gactttaaaagaaaagctatcagtcactaatagcaccttaatttttctgtagggatccaacctctcctgttcttgatgggtctctgtctttgcatccagtgtattttgggaagcattcatggccagtcatcaagagacctgctgatttgtttctggataggtactagtgagccagtgcctcagctgtgggattttgttagaattattggaaaagaagagcttctttctactgaggctaatcctctgggcaggtagaaactgcacaaaacatctcatagctctctttactaaaaaaagagaatctgcttgagagtttagtcatcaaaaagaaaaggatagcagagagctggagaatgggaaattttttgaacacttggatcctctctcaactaatctatgtccagatttttgtcatgtaarcaataaattcccacttttgcttaagccacttaaaaaatttaatctgccacatgcaaccaaagatgaaaaatgcaccttcttataaatattctttttttataaat

SEQ ID NO: 583335 - DNA, 365 bp, Homo sapiens
taattaatatgttttttaaaaagtacattgcttgctcaaatgagtcatttacagagtcagcttaaagagctaagagctttattataacaacaaaaccaacccaaaccccttctcaatctctctgaagtaaattctccttttctgtacaactatataagcttattcatgtctaatacagcactcatcaaaacaactctacttatttacttacaaatctatcttatctattgattagcaagtcatggagaacaragactgtgctgtattcatctttgttactcaacagagtgcctaacacatattggtgcttagttaataaacagaaatgaaataaaaaaataaataaataaaaagtacattgcatt

SEQ ID NO: 583336 - DNA, 365 bp, Homo sapiens
taattaatatgttttttaaaaagtacattgcttgctcaaatgagtcatttacagagtcagcttaaagagctaagagctttattataacaacaaaaccaacccaaaccccttctcaatctctctgaagtaaattctccttttctgtacaactatataagcttattcatgtctaatacagcactcatcaaaacaactctacttatttacttacaaatctatcttatctattgattagcaagtcatggagaacaaagactgtgctgtattcatctttgttactcaacagagtgcctaacacataktggtgcttagttaataaacagaaatgaaataaaaaaataaataaataaaaagtacattgcatt

SEQ ID NO: 583337 - DNA, 526 bp, Homo sapiens
ttattttattaaataaagtcaattaattaaatttccattacctgttccttgatgtgctttaggtcacatcttctgagatatacatatatatgtatacatgtatgcacataatatgtattctatatgtrctaatacagaatatgttagaaaaatagaaacatctgtagttgtcaaaaatattttcatacaaaatatattctctgataccctgaaagttgtataatgaaaattacacatgttcttaaccaataagaaataaataatctctctttctttttttttttttttgagcttgaggcaattttattgaaattagtggtaagaatgaaagattacagccaatctaaaatcagtgggctacatcaaattataaacaaaggttgtaatctagtcattcaacatgcactgtttatatggagttatttctatttatttatttttgtttgcttgtttttgagacagggtctcactctgtcacccaggctagagtgcagtggcaagatcaatgctcactgcagcctcgaac

SEQ ID NO: 583338 - DNA, 555 bp, Homo sapiens
acaagccccaccaagatataaaggtaggcagtatgaaaaaagaggggaactcactggtgaatccgtgcacggctgaaggggccagtatagcagtctgactcctctaggtctggaaaagctgacttgtcaagaaccattgggttttgggccatccagtttttgattcttctaaaataagtttgcatcctggaatgaagtcacatttgagaactagattaggttgtattccaaagccrtgactaccttccactacaattcacttaagtactaaagaaacttctttgaaaagagatacacaaacctacacacaccacacatacacgtgcattgcttctgttcccacacaaaagaagaaaatagcaaaacaaaccaaatcttgcagttgtttaaactcttccaggacaactatgttatcctcatgaaaaaataaaataattgtggaaaagatttcagaaacaggatacataaagatggtggtaggaaagagattttttgtttttgtttttgtttttgttttttttctttgagacagtctcgctctgtcacctggctgga

SEQ ID NO: 583339 - DNA, 410 bp, Homo sapiens
tgatgattctcttattcaaaagggtatcagattctctgagtatagcagtatgatcaaaatatgcaaacaatcctgcaatttccaagaattaaaccacagtaccccattttgtaaaagctctttacataatccttatgcakacttgactctgcttaaaaaccttttgtctagtcaaagacactttagttcttatttgttgatacaagtaaaactggatgaaaagatgaaagaaagcaagcaaatatgacgactctacgagataacagacttttacaatttatacccagttttttccagtattatcacaggaccaagcacatagtttgaggacctagtaggtactcagtaaaatgtggtagaaaaattagtgaactagttaataaatgactagtggtaactggcagtgtttt

SEQ ID NO: 583340 - DNA, 611 bp, Homo sapiens
tagttcaataaatggaataagaatttgtcaccatgaagttgtttatgaaactaacttttgattactcaagcacccatacaagtcagaataaaacatatttccacagtaaaataaactaccatcaaagatacttgaacttagcatccgttggaactggcttttttgttttgttttgtttggatttgtatagagttctgtctacaatagcagatgtgtgtttgctgcaaaagaagtcaaaataaaccattacaaagaacattaatgggaggcgtaagtgttggcaacactatgggatccatacctcaataaacaaattaacagcacacactctcaggacatatagacagagatcaatgaaaagatgttcttgcaaatggcaatattgaaaggcaagcaattgtacacttctgccttcagcatctttccaatgaaaagcaagtttcaaaatagcagagactgctgtttttttttgtttttttttktttttttttttgcccctaatacagagtgagttcacctttcaggtatcacatgaacctctcttgaaatactagtcattaggaattatacctatgaatacagtgatagaaaagggatttgtctacagctag

SEQ ID NO: 583341 - DNA, 507 bp, Homo sapiens
actgagactgcctgttgctataggtattataccctttttgcagttgttctaataatgtatttgtgtataacattccatatgtatttagaagcatatcagaactactcctgaataagtgcagagagtaagcaraactaagtgcagagagtaagcagaactctattggaatggtagttccacatgtacattaagtatacagaccatcagaaatctttcaatatctgctggcaatgtagatctattactttgtgaactttgactttgaaatgtggttagtctttttgcggggcaaaggacctctttaatacataagctgtgaagagagattttttttcttgtaaacagaagcacatggagtctttcctctccagaaatctttgagaaaagcacatgccttaaggaagagtatgtttgctgtgaatcactggaggaaaaccaccccgttgagggagtgacatattcacatcaaaactcagttttgtaactggaagaattttttctcaaatt

SEQ ID NO: 583342 - DNA, 506 bp, Homo sapiens
cttgtctagtcctgtgtggctctgatggcttgtgcacgggtgctcatggcagaggtggaggatgcagtgataggacagctggtcctcacaggtccaccgccttgtgattgtgtcagttacgtcccacatcgccttagtgagtcatcctcttgcctgagcaatgcatactactgttctcagaagggaaactaaaataactaggtatggggtttttttgcattttattgcataaacagctataaaaggcacaatcaagtaccaagtaacaataataataatgaaaaacttaagagtcggcacatcaattctttacaaaatctccaatctcttgattacaasaactaggcagacataaattttacagagctgggattagtgttccacgtttttcccactgattattactttgtttagttcagtatatatctctagcacccataatctttatatgtaagcatttaaaacaatatttcctcctgtgaagacaccatggtctgcccagctgc

SEQ ID NO: 583343 - DNA, 615 bp, Homo sapiens
ctaattacactaaagagtttttcatggcaaaaggaacagtcagcagagtaaacasacaacccacagagtgggagaaaatcttcacagtctatacacctgacaaaggactaatatccagaatctacaacgaactcaaatcagtaagaaaaaaacaatcccatcaaaaagtgggctaaggacacgaatagacaattcccaaaagaagatatacaaatggccaacaaacatatgaaaaaatgttcaatgtcaccaatgatcagggaaacaaaaatgaaaaccacaatgcgataccaccttactcctgcaagaatggccataataaaaaaaatcaaaaaacaggagatgttggcatagatgcagtgatcagggaatgcttctatactgctggtgggaatataaactagtacagacactatggaaaacactgtggagatttcttaaagaattaaaagtagaactaccatttgatccagcaatcccactactgggtatctacccagaggaaaagaagtcattatgcgaaaaagatgcttgcacaagcatgcacaattcacagttgcaaaattgtgaaaccaacccaaatgcccaccaatcaacgagtgggtaaagaaactg

SEQ ID NO: 583344 - DNA, 615 bp, Homo sapiens
ctaattacactaaagagtttttcatggcaaaaggaacagtcagcagagtaaacagacaacccacagagtgggagaaaatcttcacagtctatacacctgacaaaggactaatatccagaatctacaacraactcaaatcagtaagaaaaaaacaatcccatcaaaaagtgggctaaggacacgaatagacaattcccaaaagaagatatacaaatggccaacaaacatatgaaaaaatgttcaatgtcaccaatgatcagggaaacaaaaatgaaaaccacaatgcgataccaccttactcctgcaagaatggccataataaaaaaaatcaaaaaacaggagatgttggcatagatgcagtgatcagggaatgcttctatactgctggtgggaatataaactagtacagacactatggaaaacactgtggagatttcttaaagaattaaaagtagaactaccatttgatccagcaatcccactactgggtatctacccagaggaaaagaagtcattatgcgaaaaagatgcttgcacaagcatgcacaattcacagttgcaaaattgtgaaaccaacccaaatgcccaccaatcaacgagtgggtaaagaaactg

SEQ ID NO: 583345 - DNA, 615 bp, Homo sapiens
ctaattacactaaagagtttttcatggcaaaaggaacagtcagcagagtaaacagacaacccacagagtgggagaaaatcttcacagtctatacacctgacaaaggactaatatccagaatctacaacgaactcaaatcagtaagaaaaaaacaatcccatcaaaaagtgggctaaggacacgaatagacaattcccaaaagaagatatacaaatggccaacaaacatatgaaaaaatgttcaatgtcaccaatgatcagggaaacaaaaatgaaaaccacaatgcgataccaccttactcctgcaagaatggccataataaaaaaaatmaaaaaacaggagatgttggcatagatgcagtgatcagggaatgcttctatactgctggtgggaatataaactagtacagacactatggaaaacactgtggagatttcttaaagaattaaaagtagaactaccatttgatccagcaatcccactactgggtatctacccagaggaaaagaagtcattatgcgaaaaagatgcttgcacaagcatgcacaattcacagttgcaaaattgtgaaaccaacccaaatgcccaccaatcaacgagtgggtaaagaaactg

SEQ ID NO: 583346 - DNA, 615 bp, Homo sapiens
aagctttcctctatacacatcttktatcatatcaatgctagcatttatttaataattttaatagaaaggacagatgatagtctgtagattagcattttcatttataaattatgtgctatgctggttatggaagcatcactaaaaacatttaaatgggttatggcaaagctaaagctaaaaattaattgtcctttcatttggaatctgtgctctgcaaactaattatgtattcaaaataatcttaatatgtattcatcatgaatattatgaatctgcattaaaatcattgttcaattcaatgtaataattattcagtgaaagccttaagattccaaaatattaattttcttattgatttgtacatccagtttgtatcaaacaaataaatatattaatagtcatgatttatttgggattcattgacttttattaagcacttctaatttgctaaatactacgtatattacatgataggaaatagtcactgtttattttcaaggtgtttcctaagactgaataacaacatcttgagcaaggctggcactgtgccaggttttaataagctgccactcctctcctcctttttccagatgagaagaggacagctgacatgtg

SEQ ID NO: 583347 - DNA, 519 bp, Homo sapiens
atagtattctattatttatatatactacattttctttattcatttatggatagaagcttagattgagttcatatgttgggtatagatctcgtgagacttattcagtaccatgagaacagtttgggggcatgatcgtgaggcctctctagcttcatggaactgtgagtccattaaacttctttttcwttataaattacccaatctcgggtatgtgtttatcagcagtgtgaaaactgactaatacaggtattgagaataatgctgcaatgaacatgggaatgcagatatctgtttgacatactgatttcttttggatatatacccagaagtgaaattgttagattatatgatagttctatttttaattttttgaggaagctccatactgttttacataatgtctgtactaatttacactccaaccaacagtgtacaagggttttcttttccctgcaccctcatgaggtatatagtaatatcttattgtggttttgatttgcatttctctgatgattagtg

SEQ ID NO: 583348 - DNA, 519 bp, Homo sapiens
atagtattctattatttatatatactacattttctttattcatttatggatagaagcttagattgagttcatatgttgggtatagatctcgtgagacttattcagtaccatgagaacagtttgggggcatgatcgtgaggcctctctagcttcatggaactgtgagtccattaaacttctttttctttataaattacccaatctcgggtatgtgtttatcagcagtgtgaaaactgactaatacaggtattgagaataatgctgcaatgaacatgggaatgcagatatctgtttgacatactgatttcttttggatatatacccagaagtgaaattgttagattatatgrtagttctatttttaattttttgaggaagctccatactgttttacataatgtctgtactaatttacactccaaccaacagtgtacaagggttttcttttccctgcaccctcatgaggtatatagtaatatcttattgtggttttgatttgcatttctctgatgattagtg

SEQ ID NO: 583349 - DNA, 590 bp, Homo sapiens
gctgcttcctcatgtaccacacacctcaatattctccatcgcctgccctgacataatctataatacctgagcaagagcagatggggtaggaatgactcaaggagtcttctaacttgaattaatgtgaatcccctgtatgttgcagagtccagtagaaccgaaagttcataaagtggtgtatacttgtatagcttttgaaggaactcaagaaacgtcacccagaaatatcccacattggtctgctgattacttcaaactgagggaactttgggaacagcaaatgcagggagagactttctctgaacttacatcatttgcctaaagatggatcctacaaaaggaatgaaatggtmatgaatccccttcccaggaattttattaaccagggtcaggggattaacttggaccacaagagaggagacgagagggcaacacaacatcccaaaaccatttactctcctttaagtagcctatatccttcctcccctctctcctatgaaaaggggatataagcttttatacctcaccgggtttgggggtattcacttttatttcatgtgatatccctgtgcacataatgaatttgtaca

SEQ ID NO: 583350 - DNA, 589 bp, Homo sapiens
ccttggtcctcttgctagtcatgagctatgaagtaaaggtccatgtttttaatttttaattttctattcagttacttaatgaacatttattgaatgaaaacaagaatttagggttttagaaataaacttcttgttaaaaaaatatgaaactgagatgcataggaatccagacaaaagaagatggctgcagtgtgaaacagatgtcagcctgctcggtgcaaaagtggagttcattggacagtytaaaagtgcctccacttgactggagaagaaccaagattttggcccatggctatggaaatgtgcaaatgtagctccttttacctttttactcaatgtcctgagattacctttttggaatgtccatatagctacatttatcttattatcttgcattctggcaaaaaaaaaaaaaaaaaaatctgagagtatacagaaaaaaaaaaaacagctgtcatacttgaagccaagaaataccatcatgaaaattcaatttaaatgcaaacttcataaattatatttcaaatagtccttagaggactaattaataattgtaaagggctttgaagatggaaagggctaaattaac

SEQ ID NO: 583351 - DNA, 613 bp, Homo sapiens
acataattagtttttttaactttccattttgaactaactttagactcccagaaattttgcaaaaatagtaaaaagagtgcttacatatgcctcactcagctttccccaatattaacaccctatataattatagtagaaatatcaataccaggaaactaatattgttacaatactatttacaaaaatgtaacccttattcaaatgccaccattttttcttaccaatacgytttttctatcccaggatattacattacatttcactgttatttcttatttgtcacctctaatttataacatttcttcggtatttccttttctgtcatgttgttaacagttaaaaaaatttgttaattattgtgtagaatgtccctcaattagatttgcatgacatttttttcatgattacattgaagtcaggcatatttggcaagaataccacagaaataacattgtgttcttcccaatgcatctaccaaagagttcatgatatcaatttgtcttactgttgttgatattaactttaatcatgtgattttactcatgtctgccttagtttcttcactgcagagatactaactttacttttgtagttagtaaatatttgtaggtag

SEQ ID NO: 583352 - DNA, 514 bp, Homo sapiens
gcagttttgaatctctctttttgtggaatctgcaagtggatatgtggtcctctttgaagatgtctttggaaacgggaatatcttcacataaaaactaaacagaagcattctcagaaacttctctgtgatgtttgtgttcaactcacagagtttcacgttgcttttcatagagcagatgagaaacatrcttttcgtagggtctgcaagtggacatttggagagatttcaggcctgtggtggaaaacgaattatcgtcacgtaaaaactagagagaagcattgtcagaaacttgtttgtgatgactgcattcaactcacagagttgaaggttccttttcaaacagcagtttccaaacactctttctgtggcatctgcaagtggatgtttgggcctctttgaagatttcgttggaaacgggatactcttcacagaaaagctaaacagaagcattctcagaaacttctttgtgatgtttgctttcaactcacagagttgaactttccttttgagagag

SEQ ID NO: 583353 - DNA, 556 bp, Homo sapiens
tgcattcaactcaaagagttgaaccctcctatggatagagcagttttgaatctctctttttgtggaatctgcaagtggatatgtggtcctctttgaagatgtctttggaaacgggaatatcttcacattaaaactaaacagaagcattctcagaaacttctctgtgatgtttgtgttcaactcacagagtttcacgttgcttttcatagagcagatgagaaacatgcttttcgtagggtctgcaagtggacatttggagaactttcaggcctgtggtggaaaacgaattatcgtcacgtaaaaactagagagaagcattgtcagaaacttgwttgtgatgactgcattcaactcacacagttgaaggttccttttcaaacagcagtttccaaacactctttctgtggcatctgcagtggatgtttgggcctctttgaagatttcgttggaaacgggataatcttcacagaaaagctaaacagaagcattctcagaaacttctttgtgatgtttgctttcaactcacagagttgaactttccttttgagagagaagc

SEQ ID NO: 583354 - DNA, 508 bp, Homo sapiens
agtttctgagaatgcttctgtttagcttttctgtgaagagtatcccgtttccaacgaaatcttcaaagaggcccaaacatccacttgcagatgccacagaaagagtgtttggaaactgctgtttgaaaaggaaccttcaactctgtgagttgaatgcagtcatcacaaacaagtttctgacaatgcttctctctagtttttacgtgacgataattcgttttccaccacaggcctgaaatctctccaaatgtccacttgcagaccctacgaaaagcatgtttctcatctgctctatgaaaagcaacgtgaaactctgtgagttgaacacaaacatcacagagaagtttctgagaatgcttctgtttagtttttatgtgaagatattcccgtttccaaagacatcttcaaagaggaccacatatccacttgcagattccacaaaaagagagattcaaarctgctctatccataggagggttcaacgctgtgagttgaatgcaatcgtcac

SEQ ID NO: 583355 - DNA, 228 bp, Homo sapiens
ctttctttgatagttcaggtttgaaacgstctttctgtagaaactgcaagtagatatttggacctctctgaggatttcgttggaaacgggataaaccgcacagaactaaaacagaagcattctcagaaccctcttcgtgatgtttgcattcaactcacagtgctgaacctttctttgatagttcagctttgaaacactcttcttgtagaaactgcaagtggatatttg

SEQ ID NO: 583356 - DNA, 228 bp, Homo sapiens
ctttctttgatagttcaggtttgaaacggtctttctgtagaaactgcaagtagatatttggacctctctgaggatttcgttggaaacgggataaaccgcacagaactaaaacagaagcattctcaraaccctcttcgtgatgtttgcattcaactcacagtgctgaacctttctttgatagttcagctttgaaacactcttcttgtagaaactgcaagtggatatttg

SEQ ID NO: 583357 - DNA, 583 bp, Homo sapiens
tttctcagaaaattctttgggatgattgagtggaactcacagagctgarcattccttgcgatgtagcagtttagaaacacactttatgcagaatctgcaagtgcatatttggacctctctgaggaattcgttggaaacgggataatttcagctgactaaacagaagcagtctcagaatcttctttgtgatgtttgcattcaaatcccagagttgaactttcctttcaaagttcacgtttgaaacactctttttgcaggatctacaagtggatatttggaccactctgtgtccttcgttcgaaacgggtatatcttcacatgacatctagacagaagcattctcagaagcttctctgtgatgactgcattcaactcacggagttgaacactccttttgagagcgcagttttgaaactctctttctgtggcatctgcaaggggacatgtagacctctttgaagatttcgttggaaacggaatcatcttcacataaaaactatacagatgcattctcaggaactttttggtgatgtttgtattcaactcccagagttgaactttcctttggaaagagcagctatga

SEQ ID NO: 583358 - DNA, 625 bp, Homo sapiens
gctttctcagaaaattctttgggatgattgagtggaactcacagagctgaacattccttgcgatgtagcagtttagaaacacactttatgcagaatctgcaagtgcatatttggacctctctgaggaattcgttggaaacgggataatttcagctgactaaacagaagcagtctcagaatcttctttgtgatgtttgcattcaaatcccagagttgaactttcctttcaaagttcacgtttgaaacactctttttgcaggatctacaagtggatatttggaccactctgtgtccttcgttcgaaacgggtatatcttcacatgacatctagacagaagcattctcagaagcttctctgtgatgactgcattcaactcacggagttgaacactccttttgagagcgcagttttgaaactctctttctgtggcatctgcaaggggacatgtagacctctttgaagatttcgttggaaacggaatcatcttcacataaaaactatacagaygcattctcaggaactttttggtgatgtttgtattcaactcccagagttgaactttcctttggaaagagcagctatgaaacactctttttctagaatctgcaagtggacgtttggagg

SEQ ID NO: 583359 - DNA, 465 bp, Homo sapiens
acatgacatctagacagaagcattctcagaagcttctctgtgatgactgcattcaactcacggagttgaacactccttttgagagcgcagttttgaaactctctttctgtggcatctgcaaggggacatgtagacctctttgaagatttcgttggaaacggaatcatcttcacataaaaactatacagatgcattctcaggaactttttggtgatgtttgtattcaactcccagagttgaactttcctttggaaagagcagctatgaaacactctttttctagaatctgcaagtggacgtttggagggctttgtggtttgtggtggaaaaggaaatatcttcacctaaatactagatagaagcattctcagaaactgctttgtgatgattgcattcacctcacagagttgaacattcctattgatagagcagtttggaaacmctcttgttgtggaatgtgcaagt

SEQ ID NO: 583360 - DNA, 341 bp, Homo sapiens
aggtttgaaacactctttttgtaggatctgcaagtggatatttggaccactctgtggccttcgttcgaaacgggtacatcttcacataaaatctagacagaagccttctcagaaacttctctgggatgattgcattcaactcacagatttgaaccctcctatggatagagcattgttgaaactctctttttgtggaatctgcaagtggatatgtggacctctccgaagatgtctttggaaacgggaatatcttcrcataaaaactaaacagaagcatcctcagaaacttctctgtgatgtttgtgttcaactcccagagtttcacattgcttttcatagag

SEQ ID NO: 583361 - DNA, 523 bp, Homo sapiens
tctcagaaccttcttcgtgatgtctgcattcaactcacagtgtggaacctttctttgatagttcaggtttgaaacactctttttgtagaaactgcaaggggataattgcacttctttgaggcctaccgtagtaaaggaaataacttcctatagaaagaagacagaagctttctcagaaaattctttgggatgattgagtkgaactcacagagctgaacattccttgcgatgtagcagtttagaaacacactttctgcagaatctgcaagtgcatatttggacctctctgaggaattcgttggaaacgggataatttcagctgactaaacagaagcagtctcagaatcttctttgtgatgtttgcattcaaatcccagagttgaactttcctttcaaagttcacgtttgaaacactctttttgcaggatctacaagtggatatttggaccactctgtgtccttcgttcgaaacgggtatatcttcacatgacatctagacagaagcattctcagaagcttctct

SEQ ID NO: 583362 - DNA, 592 bp, Homo sapiens
tctcagaaaattctttgggatgattgagtggaactcacagagctgaacaytccttgcgatgtagcagtttagaaacacactttctgcagaatctgcaagtgcatatttggacctctctgaggaattcgttggaaacgggataatttcagctgactaaacagaagcagtctcagaatcttctttgtgatgtttgcattcaaatcccagagttgaactttcctttcaaagttcacgtttgaaacactctttttgcaggatctacaagtggatatttggaccactctgtgtccttcgttcgaaacgggtatatcttcacatgacatctagacagaagcattctcagaagcttctctgtgatgactgcattcaactcacggagttgaacactccttttgagagcgcagttttgaaactctctttctgtggcatctgcaaggggacatgtagacctctttgaagatttcgttggaaacggaatcatcttcacataaaaactatacagatgcattctcaggaactttttggtgatgtttgtattcaactcccagagttgaactttcctttggaaagagcagctatgaaacactctttt

SEQ ID NO: 583363 - DNA, 592 bp, Homo sapiens
tctcagaaaattctttgggatgattgagtggaactcacagagctgaacattccttgcgatgtagcagtttagaaacacmctttctgcagaatctgcaagtgcatatttggacctctctgaggaattcgttggaaacgggataatttcagctgactaaacagaagcagtctcagaatcttctttgtgatgtttgcattcaaatcccagagttgaactttcctttcaaagttcacgtttgaaacactctttttgcaggatctacaagtggatatttggaccactctgtgtccttcgttcgaaacgggtatatcttcacatgacatctagacagaagcattctcagaagcttctctgtgatgactgcattcaactcacggagttgaacactccttttgagagcgcagttttgaaactctctttctgtggcatctgcaaggggacatgtagacctctttgaagatttcgttggaaacggaatcatcttcacataaaaactatacagatgcattctcaggaactttttggtgatgtttgtattcaactcccagagttgaactttcctttggaaagagcagctatgaaacactctttt

SEQ ID NO: 583364 - DNA, 592 bp, Homo sapiens
tctcagaaaattctttgggatgattgagtggaactcacagagctgaacattccttgcgatgtagcagtttagaaacacactttctgcagaatctgcaagtgcatatktggacctctctgaggaattcgttggaaacgggataatttcagctgactaaacagaagcagtctcagaatcttctttgtgatgtttgcattcaaatcccagagttgaactttcctttcaaagttcacgtttgaaacactctttttgcaggatctacaagtggatatttggaccactctgtgtccttcgttcgaaacgggtatatcttcacatgacatctagacagaagcattctcagaagcttctctgtgatgactgcattcaactcacggagttgaacactccttttgagagcgcagttttgaaactctctttctgtggcatctgcaaggggacatgtagacctctttgaagatttcgttggaaacggaatcatcttcacataaaaactatacagatgcattctcaggaactttttggtgatgtttgtattcaactcccagagttgaactttcctttggaaagagcagctatgaaacactctttt

SEQ ID NO: 583365 - DNA, 523 bp, Homo sapiens
tctcagaaccttcttcgtgatgtctgcattcaactcacagtgtggaacctttctttgatagttcaggtttgaaacactctttttgtagaaactgcaaggggataattgcacttctttgaggcctaccgtagtaaaggaaataacttcctatagaaagaagacagaagctttctcagaaaattctttgggatgattgagtggaactcacagagctgaacattccttgcgatgtagcagtttagaaacacactttctgcagaatctgcaagtgcatatttggacctctstgaggaattcgttggaaacgggataatttcagctgactaaacagaagcagtctcagaatcttctttgtgatgtttgcattcaaatcccagagttgaactttcctttcaaagttcacgtttgaaacactctttttgcaggatctacaagtggatatttggaccactctgtgtccttcgttcgaaacgggtatatcttcacatgacatctagacagaagcattctcagaagcttctct

SEQ ID NO: 583366 - DNA, 515 bp, Homo sapiens
agcagttttgaatctctctttttgtggaatctgcaagtggatatgtggtcctctttgaagatgtctttggaaacgggaatatcttcacattaaaactaaacagaagcattctcagaaacttctctgtgatgtttgtgttcaactcacagagtttcacgttgcttttcatagagcagatgagaaacatgcttttcgtagggtctgcaagtggacatttggagarctttcaggcctgtggtggaaaacgaattatcgtcacgtaaaaactagagagaagcattgtcagaaacttgtttgtgatgactgcattcaactcacagagttgaaggttccttttcaaacagcagtttccaaacactctttctgtggcatctgcagtggatgtttgggcctctttgaagatttcgttggaaacgggataatcttcacagaaaagctaaacagaagcattctcagaaacttctttgtgatgtttgctttcaactcacagagttgaactttccttttgagagaga

SEQ ID NO: 583367 - DNA, 515 bp, Homo sapiens
agcagttttgaatctctctttttgtggaatctgcaagtggatatgtggtcctctttgaagatgtctttggaaacgggaatatcttcacattaaaactaaacagaagcattctcagaaacttctctgtgatgtttgtgttcaactcacagagtttcacgttgcttttcatagagcagatgagaaacatgcttttcgtagggtctgcaagtggacatttggagaamtttcaggcctgtggtggaaaacgaattatcgtcacgtaaaaactagagagaagcattgtcagaaacttgtttgtgatgactgcattcaactcacagagttgaaggttccttttcaaacagcagtttccaaacactctttctgtggcatctgcagtggatgtttgggcctctttgaagatttcgttggaaacgggataatcttcacagaaaagctaaacagaagcattctcagaaacttctttgtgatgtttgctttcaactcacagagttgaactttccttttgagagaga

SEQ ID NO: 583368 - DNA, 666 bp, Homo sapiens
caacaaagatatgaaacaacatctgtagaagaactgtgttcaatagcaaaaaatgttcattaatagtgggatatataaatttgtgattattcatttaatggaatattatataagagtaaagatgaataaactaattacatgcaacaatatggatgaatctcaaaaatcgaatgtgtgaaagaagcaaatcatcactggatatatagagtataaaatattattctatatacttaatgttcaaaaccagctattaccaaatagtacatattttaggcatacatacatataataaaaatttaaatcaaagttgtgaaattattggcacaaaaaattcagttacctctgaagatgttgaaatagtttacagaggtacatttagaaaccttcaaggtatttcttaagcttgatgttaggtacagggggctctatttatttatttattaatttatttaatgtattgagacagagtctcactgtcacccaggctagagtgcagtggcatgatctcractcactgcagcctctatctcacgggttcaagcgattctcctgcctcagcctcccgagcagctgggattacaggcacccaccaccacacccagctaacttttttgtatttttagtagagacagggtttcactatgttggccaggctggtctcgaact

SEQ ID NO: 583369 - DNA, 614 bp, Homo sapiens
tacccatatgacttgtcttcttaactacttcacatgttgattaaaattttacatttttgtaaagctttttccaagcagcctatatataattgcaatcactctatgccggactatttcttcccacctttgttgctttgatatttttccatcacatgcatattcatgacatactaaatamgcatcagaatgtaaggtttatgaagatagagaaatgttattcactcctatatcctcagtccctggaacatttctttagacagggcaagctttaatcgtgtgtaaggaattgaatgaattaaatatgttagtcattatcactgttcaccaaatatttatttctctcttccttccaggcacatggtaagagttaagcatggtcacatgacttgctttcacccagggaatatgagcagaagtggtatatgtcacttcctggcagaatccccaacattcagtgtgtagtttatgcatttcaccaaattccactagtagacttgtatatcacgggaaagcatgtattgtccctgatccttgaatgactacagggagaaaatcttttctgcctgttgtcatatagtataagcaagaaataagctttctttagacactgagat

SEQ ID NO: 583370 - DNA, 602 bp, Homo sapiens
tatgactcactctctgcttgcatggaaattacaatcaagaaaattaaacataaaatagaacactgtcatcaacatcataatagagaaagtacagggtagcatgtagaagtgccttctctagtattgggataatcaaagaaacttcctgtagaaattgatttcaagttctgtgtacggcatgtacatatatacacaggtgtaggcttattgaataagagggtcaatctatgaaaaggytcagaggggaaagtgtgcttcaggaacttgatgcagagttatttgctttccaaccacatagatccttaacaacctcaggtatgtgcacagggttcctggtcatttcatcttggactggacaggcaggattcaccatctgtcagctgccaggagaaccaagtaagtattatgcacaaggaccttatgaaagcaaattctgttgaattgaattggctttcttcatagatctagaaatcatctggtttaagattccttttcaatgccaaatatgaataattcagtcaagcctgaaataaacaccgtgatcaagtgtggcttttattgtccaatttattcactcacttattcagtatttgttgtttgtc

SEQ ID NO: 583371 - DNA, 602 bp, Homo sapiens
tatgactcactctctgcttgcatggaaattacaatcaagaaaattaaacataaaatagaacactgtcatcaacatcataatagagaaagtacagggtagcatgtagaagtgccttctctagtattgggataatcaaagaaacttcctgtagaaattgatttcaagttctgtgtacggcatgtacatatatacacaggtgtaggcttattgaataagagggtcaatctatgaaaaggttcagaggggaaagtgtgcttcaggaacttgatgcagagttatttgctttccaaccacatagatccttaacaacctcaggtatgtgcacagggttcctggtcatttcatcttggactggacaggcaggattcaccatctgtcagctgccaggagaaccaagtaagtattatgcacaaggaccttatgaaagcaaattctgttgaaytgaattggctttcttcatagatctagaaatcatctggtttaagattccttttcaatgccaaatatgaataattcagtcaagcctgaaataaacaccgtgatcaagtgtggcttttattgtccaatttattcactcacttattcagtatttgttgtttgtc

SEQ ID NO: 583372 - DNA, 405 bp, Homo sapiens
atttcctgaggcctccacagccaggctcaactgtgagtcaattaaacttctttcctttataaattacccaatcttgggtatgtctttattagcagtgtgagaacaaactaatacaaaagaaaatgtggatgtgctatcagtgatcagtggtggctaatttaaagcttaagagtagacctggtgagggacagtcatccattttcttcctgatcacacarcataagtgaacatgttgaaatgcagaagagccatgtggctgaataagagccatgtggctgaataagagcctatctgtcagctgtcattcttaagcatcacctactgtatcacggtccaaattacaatgccaaaaatattctgccagtacacaggtgcctgtaaaacctaaggaaatcttcagccaca

SEQ ID NO: 583373 - DNA, 405 bp, Homo sapiens
atttcctgaggcctccacagccaggctcaactgtgagtcaattaaacttctttcctttataaattacccaatcttgggtatgtctttattagcagtgtgagaacaaactaatacaaaagaaaatgtggatgtgctatcagtgatcagtggtggctaatttaaagcttaagagtagacctggtgagggacagtcatccattttcttcctgatcacacaacataagtgaacatgttgaaatgcagaagagccatgtggctgaataagagccatgtggctgaataagagcctatctgtcagctgtcattcttaagcaycacctactgtatcacggtccaaattacaatgccaaaaatattctgccagtacacaggtgcctgtaaaacctaaggaaatcttcagccaca

SEQ ID NO: 583374 - DNA, 574 bp, Homo sapiens
acataccccaattaataaatgtgattcactacataaacagaattttaaaaccatatgctcacaattatgtggaaaaagctttggataaaatccaatatcccttcatgaaaaaaactctcaagaaacgagacatcaaaggaatgtamctcaaaaataaaagtcacctatgacaaacccacagccaacatcatactgaatgggcaaaaactagaaccattcccatggagaaatggaatgtccagttccatcacaaggatgtccactctcataatgcctactcaatatggttttggaagaccttcccagagcaatcaggaaaaagaaaaaagtaaaagccatctaaatagcaaaaagaggagaaacatctctttttgctgatgatatgatcctgaacccagaaaaggctagagacctcaccaaaagactcctggaactgataaaggacttcagaaaagttttagaatacaaaatcaatgaacaaaaatcactagcaattttatacaccaataacattcaagctgagagccaaatcaggaacacaactccatttacaacagccacagacacagacaga

SEQ ID NO: 583375 - DNA, 574 bp, Homo sapiens
acataccccaattaataaatgtgattcactacataaacagaattttaaaaccatatgctcacaattatgtggaaaaagctttggataaaatccaatatcccttcatgaaaaaaactctcaagaaacgagacatcaaaggaatgtaactyaaaaataaaagtcacctatgacaaacccacagccaacatcatactgaatgggcaaaaactagaaccattcccatggagaaatggaatgtccagttccatcacaaggatgtccactctcataatgcctactcaatatggttttggaagaccttcccagagcaatcaggaaaaagaaaaaagtaaaagccatctaaatagcaaaaagaggagaaacatctctttttgctgatgatatgatcctgaacccagaaaaggctagagacctcaccaaaagactcctggaactgataaaggacttcagaaaagttttagaatacaaaatcaatgaacaaaaatcactagcaattttatacaccaataacattcaagctgagagccaaatcaggaacacaactccatttacaacagccacagacacagacaga

SEQ ID NO: 583376 - DNA, 569 bp, Homo sapiens
agggaagtttatggtaaaaaaaagcctatattaaaaaatagaaaaayttcaataaacaatctaattatgtacttcaaaagactagaaaagagcattagctagaataactaagaaaaagagaagaccctaaagtcagaaacaaaaagggaaacatacagagaatcattaaagattattatgaacaactatacactaacaaatcagaaaacctagaagcaatagataaattcctggatatagacaacttatcaagattgaaccatgaagaaacagaaaatctctacaaaccaatcaataacaggaaacaagtttaaagttgtaacaaaaagtcttctatcaaagaaaagcccaggacctaaaagcttcactcctgagttctaccaaacatttaaagaagaactaataccatattctactcaaagctttcaaagctctgaagaggagggaacacttccaaaatcattttacgagaccagcattaccctgataatgaaaccagagtagaacacagcaaaaaagaaaatgcacaggccaatattattggtgaatacagatgcaaaaattctcaa

SEQ ID NO: 583377 - DNA, 569 bp, Homo sapiens
agggaagtttatggtaaaaaaaagcctatattaaaaaatagaaaaacttcaataaacaatctaattatgtacttcaaaagactagaaaagagcattagctagaataactaagaaaaagagaagaccctaaagtcagaaacaaaaagggaaacatacagagaatcattaaagattattatgaacaactatacactaacaaatcagaaaacctagaagmaatagataaattcctggatatagacaacttatcaagattgaaccatgaagaaacagaaaatctctacaaaccaatcaataacaggaaacaagtttaaagttgtaacaaaaagtcttctatcaaagaaaagcccaggacctaaaagcttcactcctgagttctaccaaacatttaaagaagaactaataccatattctactcaaagctttcaaagctctgaagaggagggaacacttccaaaatcattttacgagaccagcattaccctgataatgaaaccagagtagaacacagcaaaaaagaaaatgcacaggccaatattattggtgaatacagatgcaaaaattctcaa

SEQ ID NO: 583378 - DNA, 598 bp, Homo sapiens
aatgactacaacctataccattcacctggagcaatcttctttgctataatatttcagtaactatattggtatctttgtactttcaaaatgcaatcaagataaatatgtagaaatgaatctagcagtacaattcattaattccacacacatttctaygttaggcactacataacattcaaaaggcatagtccctgatcttatgaaggatacatcaatggggaaggtgtaaaagtacaattatattggagtataaaatgtgaaggaatataattacaagaatgaactgtgtatgagagagtagtgggtattcaagtctactaagagtcatctcaagaaatgtttacaaaggcttccacaatggttgaactagtttacagtcccaccaacagtgtaaaagtgttcctatttctccacatcctctccagcacctgttgtttcctgactttttaatgatcaccattctaacttgtgtgagatggtatctcattgtggtttagatttgcagtggggcgattcctcagggatctagaactagaaataccatttgacccagcaatcccattactgggtatatacccaaaggattataaatcatgct

SEQ ID NO: 583379 - DNA, 598 bp, Homo sapiens
aatgactacaacctataccattcacctggagcaatcttctttgctataatatttcagtaactatattggtatctttgtactttcaaaatgcaatcaagataaatatgtagaaatgaatctagcagtacaattcattaattccacacacatttctatgttaggcactacataacattcaaaaggcatagtccctgatcttatgaaggatacatcaatggggaaggtgtaaaagtacaattatattggagtataaaatgtgaaggaatataattacaagaatgaactgtgtatgagagagtagtgggtattcaagtctactaagagtcatctcaagaaatgtttacaaaggcttccacaatggttgaactagtttacagtcccaccaacagtgtaaaagtgttcctatttctccacatcctctccagcacctgttgtttcctgactttttaatgatcaccattctaacttgtgtgagatggtatctcattgtggtttagatttgcagtggggcgattcctcagggatctagaactagaaataccatttgacccagcaatccmattactgggtatatacccaaaggattataaatcatgct

SEQ ID NO: 583380 - DNA, 594 bp, Homo sapiens
atatttaacttacttctctttcttctgtaaattttttacttaattcaggttggacaaccaaaaaattatcaagaatctgtgtattatttgatctgtgttacctcacctaatttaaaaaatggtttaaggaaatataatttctggatttttattttatagacaaagagacaacaataaatgttgattagatgtaaattaaaatgaggataaaaacatggattgggagtggtaagatggaggtcattagtgcctgtgaaaattttcaacaccttagtgtttttttgttaatttaatacttctaatgttaaaaaaaaccttagatttttcctcatctgcttaacatgtttacaaactatacataaactatcaaagttatattttaattctgattttctcatgaaaatgagagacatattttaattctattgttgacagtttttacattttatttgctttttaatgagattttttagttttataatgaaagatgaaataataataataataaatattggccttttacaagaagtcgcttcttcatttttatcatgagraacacttggtgaactgacttcattccctcataaattatac

SEQ ID NO: 583381 - DNA, 531 bp, Homo sapiens
tttggggtctcaaaatgtattttcctttcactctagattggaaactcctgagaagcaatgtctatgtctcctcaggcctgatgtagagtaatcacttaataaactatccaaagtccagcaatccgtttctataatgaaactttcctgattactcctgcctcctattgtaatgcatgttacaaccacagagtgaatgttctccaatcttttgacattagcattttggcaggattagacttcagttccttcagagtgacatctagctatattggttttaatcagtttcaaattaattgattctagtaagtacgacactggtaaaagccaatatatgtgtgtaagagttaaatttgttacttcccagccaggtgcrgtgactcattcatgtaatccctgcatttttggaggctgaggcgggcagatcacaatgtcaggagttcgagactagcctggacaatatggtgaaacccctctctactaaaaatacgaaaattagccaggcgtagtggtgcacgcctgtaatcccagcta

SEQ ID NO: 583382 - DNA, 420 bp, Homo sapiens
gctgaaccttggccccttttagccatggctagagtgactatgatgtggggcaccacatccctaggttttacacagcaggggtgccctgggcccacccaaggaaaccattttttcctcctggacttccaggcctgtgatgggagaggckgtcgagaaggtctctgacatgccttggagacatttttcccactgtcttggtgattatcattcagctcttggttactcatgcaaatttctgcagtgggcttgaatttctccccagaaaatgggtttttcttttatattgcaatctcaggctgcaaattttccaaacttttatgctctgcttcatcttaaatcctttgtcatttagaaatttcctctgccagataccttaaatcatctctctccagttcaaagttccacagatctctagggcag

SEQ ID NO: 583383 - DNA, 420 bp, Homo sapiens
gctgaaccttggccccttttagccatggctagagtgactatgatgtggggcaccacatccctaggttttacacagcaggggtgccctgggcccacccaaggaaaccattttttcctcctggacttccaggcctgtgatgggagaggctgtcgagaaggtctctgacatgccttggagacatttttcccactgtcttggtgattatcattcagctcttggttactcatgcaaatttctgcagtgggcttgaatttctccccagaaaatgggtttttcttttatattgcaakctcaggctgcaaattttccaaacttttatgctctgcttcatcttaaatcctttgtcatttagaaatttcctctgccagataccttaaatcatctctctccagttcaaagttccacagatctctagggcag

SEQ ID NO: 583384 - DNA, 375 bp, Homo sapiens
gccattgcactccagcctgggcatcaagagcaacactccatctcaaaaaaaaaaaaaatatatatatatatatatatatatgtatatatatatatgtgtgtgtttctaaaattaattattcaaagatcaaatattgtcattccttagtaaaaattattttgttactgagtagtgttaaatttacttattgaaaaggagtatcaaaaaatccattaatgaatccaacaaacattcattgatatcttactagagctcaggccctttgcttgttgcttaggatacaaaatacccaggtgttcacatttactgtctagtagaagcayagtcacctaaaccaaaattacactacatgttgctctaagtaaaaaattacag

SEQ ID NO: 583385 - DNA, 370 bp, Homo sapiens
gaagatcatttatattacttaaattagagacttctatattctgagattccaagagcaataatgtgtyctgctcattctgacaacttatccatgtctagcatgtaaattctcctctagaaatatttctgtttttaagcaaatccaggtcatttttacatttttattaaagtcccatattcagcaaatgtaataataacataggcattctactggcatataaagatgtattaatcaaagttatccactattacaatgatattttaaagcaattcaaacctattgatttcctagtttttgtgtgggaacatgctatcatatataatttttatgttatgaaatgatattttatgataattcagtaactactcat

SEQ ID NO: 583386 - DNA, 568 bp, Homo sapiens
aatttcatgtgttatcaaacatcatygttgggagaattaagtattctccacatgacttcactgggagaggaaacatggaagcttctgccttgtttctcctggacttcctccattcatgtttttcctttgctgattttaatctgtatcctttttactgtaataaaccataagtgtgagtatgaccgttattctaagttatttgagtctttctagtgtgaaaattttcagaatcaacatggaatttttaaaaacctgacagatagaaccaggaaagattacgaagagaagattcttatgcttatatgcctattaacaaaaagtattgtaaaatactctgcaaaaatcttaactttgcacagaggccactgcaacctttcacaaaaaaataccactgcaagcatgtccgcttctgtgcttctgcacagcaaaggaaactattaactaagtaaatagacaacctacagaataggagaaaatatttgtaaactataaactgacaaaggtctaatatccaggatataaaaggaacttacacaattcaacaagcaaaaatcaaataaccctatta

SEQ ID NO: 583387 - DNA, 615 bp, Homo sapiens
gactggcaagtgcctctgtgctgatattgtacctgggctcagtggtctggctaaaggagaggtgctggggccaggtgacaggcgagtctctatacggcaggcccaaaaaatggaggtgcaggcttcatctatactttgatgtgtatgcttccttctttaaacttgtgataatcagagttatagctgctttaaacttgtaaaaatcagagttatagctgcttttgaactagtacttgttgtgtgcccaggaaatggccaaatgttatcactcatccttccaagaamcacatgaaggttatattattatgtcgactttccagatgaggagactgaggctcagtggcttgtcataggtgtcaaagacaggagtccaatgtaaggacttctggcttcagcacaggggattttcctaccatcccatattgccaccccatctgcaaaaatacctggatctatcttcctcctgctgattctcagctccctccaggactgaagagatgatattgattctcacttgatagaggttagaaagggcctctcccttccctagctgaatagagagggtttcctttttcttttctttttttttttttttttttaaatgggaaacttaca

SEQ ID NO: 583388 - DNA, 594 bp, Homo sapiens
tcatcccatatttgtgtccagtctgtacatgtaatttgtgtgcaggatagaatctggcaccatgtatgcgtctcagtaagtgtgagctagaatcatgttcaagaagaacactcatgacatgagaaaatgttgctgttagtgaaaactggagacgagaaagccatacttatactattgatgctatttttgaaaggcatagagatgtgtataacagtggctagaaaattttgcccaratgttatcagtaggtggtgcatttttgttttcctttctaaactctgccatgatttctaaaaactaactcaatgagcactagtatgttgaattttaaaatgagaataaaatgtgactctgttaagtacaaatggccagataacatcgcgtctcagctgctttgcgtgtttaacctcagcccttatcattatttctgtgctgcctgtaagccgcagaatctgtctctgagatgctgcatttccctaagaaaggaggaggagtgagacgcctctggggtgtgtggttatttgctgttgttaatatcagggatggtcacgatcaccacagtccggaagtgcatgcagtctgctcgtaaaacat

SEQ ID NO: 583389 - DNA, 432 bp, Homo sapiens
acatttctcaaaaaatacatacaaatggcaaatgtccatcaacatcaatcatcagagaaatgcaaatcaaaactacaatgagatatcatctcagcctagttaaaatggcttatattcaaaaggcaataacaaacgttggygaagatgtggagagagggagcccttatacattgttggcaggaatgtaaattaatacaaccactaaggagaacagtttggaggttcctcagaaaactaaaaataaagctagcatatgatccagcaaccccactgctgggtctatacccaaaagaaaggaaataagaatatcaaagagatatctgcactcccatgtttactgcagcactgttcacaatagccaagatttggaagctacctaagtgtccatcaacagatgaataaagaaagtgtggtatatatacgcagcagaac

SEQ ID NO: 583390 - DNA, 522 bp, Homo sapiens
ctagaatacagactgtgacagatcagtctaactgtattacaaatgtatgataacctaactgaatgatgtttargtaatacagatacagatagacacaaaaataattatagatgggttagcatatacatatacatactcacatttcatagctctgtcgactttcagagcctgaagcagtgacacacccgtagtaataagcatatccaacacccagttcttggtttctaaatatcatcctccaataaaagaaaccagagtcccttggacatagggctgattttggtactgggataaggcaagtacaagatagagtaacttgtagtgtcagaaagtaaggaagtggccaaacaacaaaaagattgggggaaaaggatacagaagccaacttgaaagagctctcaatggccacagctgcaataatctgagcaacaaaagtaagtatcaatagtattggcactttgggagtcaaggtaggaggattgcttgagggcaggaggttgagaccagcctgggcaacacagc

SEQ ID NO: 583391 - DNA, 591 bp, Homo sapiens
tgacaggctgggtctgagccttagttgctttatcagttgatcaataaatacagggtaatatcagtacctatttccyaggactcccagaagtgagggggactgagtgagacaaagctcatgatagtgtatggcacatgctaagcattagctatcgttttacatgtattattaatgaaacaaaaggagtgctgacttcaaaagctgctggtattaaaaactgcacaggatttacttggaaaaaattagctctgtcattaaaaatgattgaataaagcacctgaagttttaacctggactgaggatttttccatttcagttttaataatattagaaagttcatgattaaaggaaccataaagaaataatttctgcccaggtgtggtggctcacgcctgtaatcccagcactttgggaggcggaggcaggcagatcacttgaggtaagaagttcaagaccagcctggcccacatggcgaaaccctggctctactaaaaatacaaaaattagctgggcgtggtggcacatgcttgtaatcccatctactcaggaggctgaggtgggaggatcacttgaacctgggaggcagaggct

SEQ ID NO: 583392 - DNA, 487 bp, Homo sapiens
atgttgcccaggctggtcttgaactcccggcctcaaytgatcctcccacctcagcctcccaatgtgctgggattacaggcatgagcaaccacacctggcattgaatgaattcttgccttctcccacataccaaaaccatctccaagacctgtccattttgccctttaaacattctctttcctggcatggtgatgcatacttgtagtcccagctactccagaggctgaggcaagaggattacttaatcccaggagttcaaggccagcctatagaacatagcgagacccatcttataaaaagaataaaatgaaaacattctctcacatacttctacatcctccaacaacgttgctgctcccctagcctaagtccccctcatctcttgctaggacgagtgcaacaaagtcctcactggtctttctgcttttgctctcccattccctggggcaccagctggcggatgctttctacaaccccagcatgacgt

SEQ ID NO: 583393 - DNA, 487 bp, Homo sapiens
atgttgcccaggctggtcttgaactcccggcctcaactgatcctcccacctcagcctcccaatgtgctgggattacaggcatgagcaaccacacctggcattgaatgaattcttgccttctcccacataccaaaaccatctccaagacctgtccattttgccctttaaacattctctttcctggcatggtgatgcatacttgtagtcccagctactccagaggctgaggcaagaggattacttaatcccaggagttcaaggccagcctatagaacatagcgagacccatcttataaaaagaataaaatgaaaacattctctcacatacttctacatcctccaacaacgttgctgctcccctagcctaagtccccctcatctcttgctaggacgagtgcaacaaaktcctcactggtctttctgcttttgctctcccattccctggggcaccagctggcggatgctttctacaaccccagcatgacgt

SEQ ID NO: 583394 - DNA, 377 bp, Homo sapiens
aatggaattgatttgaatgcaatggaatcacctgaaatsgaaaggaatggaatggaatcaactagaatggaaaggaatggaatggaatggaatgcagttgaatggaatggaatggaatcaacccgtgtggaatgtaatgcaaaggaatggaatggaatggaatggaatggaatcatcaaaagtggaatggaagggaatggaatagaatggaattgaatggaatggaatggaaagcaatggagtcaacccgaacggaatcgaatgtaatgaaatgcaatggaatggaatggaatgcaatggaatggaatggaattgaatggaatgggataggatggaatggaatggaatgaaccagagtggaatagaattgaatggaa

SEQ ID NO: 583395 - DNA, 377 bp, Homo sapiens
aatggaattgatttgaatgcaatggaatcacctgaaatcgaawggaatggaatggaatcaactagaatggaaaggaatggaatggaatggaatgcagttgaatggaatggaatggaatcaacccgtgtggaatgtaatgcaaaggaatggaatggaatggaatggaatggaatcatcaaaagtggaatggaagggaatggaatagaatggaattgaatggaatggaatggaaagcaatggagtcaacccgaacggaatcgaatgtaatgaaatgcaatggaatggaatggaatgcaatggaatggaatggaattgaatggaatgggataggatggaatggaatggaatgaaccagagtggaatagaattgaatggaa

SEQ ID NO: 583396 - DNA, 377 bp, Homo sapiens
aatggaattgatttgaatgcaatggaatcacctgaaatcgaaaggaatggaatggaatcaactagaatggaaaggaatggaatggaatggaatgcagttgaatggaatggaatggaatcaacccgtgtggaatgtaatgcaaaggaatggaatggaatggaatggaatggaatcatcaaaagtggaatggaagggaatggaatagaatggaattgaatggaatggaatggaaagcaatggagtcaacccgaayggaatcgaatgtaatgaaatgcaatggaatggaatggaatgcaatggaatggaatggaattgaatggaatgggataggatggaatggaatggaatgaaccagagtggaatagaattgaatggaa

SEQ ID NO: 583397 - DNA, 542 bp, Homo sapiens
ggaatggtatggagtgaaatggaacggaatggaatggtatgsaatggaatggaatgaaaaggaaaggaaagcaatggaatcaaaacgagtggaatggaatggaatgtaaagaaatgaagtggaattcaatagaatcaacacgagtggaatgaaatggaaaggaatttaacggaatggaatggaatggaatggaatccaatccaatgtaaaggaatggaatggaacggaatagaatggaatggaatggaatggaatggaatggaaaaaattcgagtggaatggaatggaatgcaaagtaatataatgaaaatgaatggaatccacccgaatggaaaggaaaggaatggaatggaatggaatggaatggaatggaatggaatggaatggtatggagaggaatggaatttaatggaatggagaggaatggaatggaattgaatggaatggaatgcaaaggaacggaaaggaatggaatggaatggaattgaatggagtcaacgcaagtgtaattgaatggaatggaatggaatggaatggaatgg

SEQ ID NO: 583398 - DNA, 542 bp, Homo sapiens
ggaatggtatggagtgaaatggaacggaatggaatggtatgcaatggaatggaatgaaaaggaaaggaaagcaatggaatcaaaacgagtggaatggaatggaatgtaaagaaatgaagtggaattcaatagaatcaacacgagtggaatgaaatggaaaggaatttaacggaatggaatggaatggaatggaatycaatccaatgtaaaggaatggaatggaacggaatagaatggaatggaatggaatggaatggaatggaaaaaattcgagtggaatggaatggaatgcaaagtaatataatgaaaatgaatggaatccacccgaatggaaaggaaaggaatggaatggaatggaatggaatggaatggaatggaatggaatggtatggagaggaatggaatttaatggaatggagaggaatggaatggaattgaatggaatggaatgcaaaggaacggaaaggaatggaatggaatggaattgaatggagtcaacgcaagtgtaattgaatggaatggaatggaatggaatggaatgg

SEQ ID NO: 583399 - DNA, 542 bp, Homo sapiens
ggaatggtatggagtgaaatggaacggaatggaatggtatgcaatggaatggaatgaaaaggaaaggaaagcaatggaatcaaaacgagtggaatggaatggaatgtaaagaaatgaagtggaattcaatagaatcaacacgagtggaatgaaatggaaaggaatttaacggaatggaatggaatggaatggaatccaatccaatgwaaaggaatggaatggaacggaatagaatggaatggaatggaatggaatggaatggaaaaaattcgagtggaatggaatggaatgcaaagtaatataatgaaaatgaatggaatccacccgaatggaaaggaaaggaatggaatggaatggaatggaatggaatggaatggaatggaatggtatggagaggaatggaatttaatggaatggagaggaatggaatggaattgaatggaatggaatgcaaaggaacggaaaggaatggaatggaatggaattgaatggagtcaacgcaagtgtaattgaatggaatggaatggaatggaatggaatgg

SEQ ID NO: 583400 - DNA, 423 bp, Homo sapiens
tcaaatggaatggaaaggaacggaatggaatttaatggaatggaatggaatggaatcaacctgagtggactrgaatgaaatggagtggaatggaaagcaatggatttgaatggaatcagccagagttgaatgaaattgaacggaatggaatggaatggaatcaacccaaatggaatgtaatggaatggaattgaatggaattaccccgagtgaaatggcatggaaaggaacggaatagaaattaatggaatgaaatggaatggaatggaatcaacatgagtggaatggaatggaatgaaatggaatgcaatgcaatggaatggaaccaataaaagtggaatcgaatggaatgaaagggaatggaatcaacccacgtggaatggaatggaatggaatggaatggaatggaatggaatggaatgg

SEQ ID NO: 583401 - DNA, 229 bp, Homo sapiens
gtggaatggaatggaatgaaaactaatataatggaaatgaatggaatccacccgaatggaaaggaaaggaatggaatggaatggaatggaatggaatggaatsgaatggagaggaatggaatggaatggaatggagaggaatggaatggaattgatttgaatgcaatggaatcaactggaatgaaatggaatggaatggaatggaatcaactagaatggaaaggaatgg

SEQ ID NO: 583402 - DNA, 229 bp, Homo sapiens
gtggaatggaatggaatgaaaactaatataatggaaatgaatggaatccacccgaatggaaaggaaaggaatggaatggaatggaatggaatggaatggaatggaatggagaggaatggaatggaatggaatggagaggaatggaatggaattgatttgaatgsaatggaatcaactggaatgaaatggaatggaatggaatggaatcaactagaatggaaaggaatgg

SEQ ID NO: 583403 - DNA, 229 bp, Homo sapiens
gtggaatggaatggaatgaaaactaatataatggaaatgaatggaatccacccgaatggaaaggaaaggaatggaatggaatggaatggaatggaatggaatggaatggagaggaatggaatggaatggaatggagaggaatggaatggaattgatttgaatgcaatggaatcaactggaatgraatggaatggaatggaatggaatcaactagaatggaaaggaatgg

SEQ ID NO: 583404 - DNA, 442 bp, Homo sapiens
ggaatggaaaggaatggaatagaatgaaatcaacccgagtgaaatggaatggattggaatgggatggaatagaatggaatggagtggattggaatcaatctgagtggaatggaaaggaatggaaaagaatggaattgaagggaatggaatggaatggaatggaatggaatggaatggaatggaatggaatggaatggaatggaatggaataaacccgagtagaatgcaatggaagggaaaggaatccaatgtaatggaatggcattgaatggaatcaacacragtgcaatggaatggaatggaatggattggagtggaatggaatcaaccccagtggaatgtaatgtaaaggaatggaatggaatggagtagaatgaacccgagtagaatggaatggtatggaatgaaacggaatggaatggaatggtatggaatggaatgg

SEQ ID NO: 583405 - DNA, 442 bp, Homo sapiens
ggaatggaaaggaatggaatagaatgaaatcaacccgagtgaaatggaatggattggaatgggatggaatagaatggaatggagtggattggaatcaatctgagtggaatggaaaggaatggaaaagaatggaattgaagggaatggaatggaatggaatggaatggaatggaatggaatggaatggaatggaatggaatggaatggaataaacccgagtagaatgcaatggaagggaaaggaatccaatgtaatggaatggcattgaatggaatcaacacaagtgcaatggaatggaatggaatggattggagtggaatggaatcaaccccagtggaatgtaatgtaaaggaatggaatggaatggagtagaatgaacccgagtagaatggaatggtatggaatgaaacggaatggaatggaatggtatkgaatggaatgg

SEQ ID NO: 583406 - DNA, 442 bp, Homo sapiens
ggaatggaaaggaatggaatagaatgaaatcaacccgagtgaaatggaatggattggaatgggatggaatagaatggaatggagtggattggaatcaatctgagtggaatggaaaggaatggaaaagaatggaattgaagggaatggaatggaatggaatggaatggaatggaatggaatggaatggaatggaatggaatggaatggaataaacccgagtagaatgcaatggaagggaaaggaatccaatgtaatggaatggcattgaatggaatcaacacaagtgcaatggaatggaatggaatggattggagtggaatggaatcaaccccagtggaatgtaatgtaaaggaatggaatggaatggagtagaatgaacccgagtagaatggaatggtatggaatgaaacggaatggaatggaatggtatggaayggaatgg

SEQ ID NO: 583407 - DNA, 580 bp, Homo sapiens
gaatgaaatggaatggaattcaatggaatggaatggaatggaatggaatggaatcaacccaaatggaatgtaatgaaatggaattgaatggaattaccccgagtgaaatggcatggraaggaacggaatagaatttaatggaatggaatggcatgcaatggaatcaacacgagtgcaatggaatggcatgaaatggaatgcaatgcaatggaatggaaccaataaaagtggaatggattggaatggaatggaatggaatggaatgaaagggaatggaatcaacccgagtggaatggaatggaatggaatggaatggaatggaatgcaatggaatggaatacaccatagtggaatggaatgcaatggaatggaatggagtggaatcaaccccattggaatggaatggaatggaattgaaaggaatggaatggaatgggatggaatgggttggaatcaaaccgagtggaatggaatggaatgcaatggaatggaaaggaatggaatggaatgaaataaacccgaatggaatggaatgaaatggaatggaatggaatggaatggaatggaatggaatggaatg

SEQ ID NO: 583408 - DNA, 580 bp, Homo sapiens
gaatgaaatggaatggaattcaatggaatggaatggaatggaatggaatggaatcaacccaaatggaatgtaatgaaatggaattgaatggaattaccccgagtgaaatggcatggaaaggaacggaatagaatttaatggaatggaatggcatgcaatggaatcaacmcgagtgcaatggaatggcatgaaatggaatgcaatgcaatggaatggaaccaataaaagtggaatggattggaatggaatggaatggaatggaatgaaagggaatggaatcaacccgagtggaatggaatggaatggaatggaatggaatggaatgcaatggaatggaatacaccatagtggaatggaatgcaatggaatggaatggagtggaatcaaccccattggaatggaatggaatggaattgaaaggaatggaatggaatgggatggaatgggttggaatcaaaccgagtggaatggaatggaatgcaatggaatggaaaggaatggaatggaatgaaataaacccgaatggaatggaatgaaatggaatggaatggaatggaatggaatggaatggaatggaatg

SEQ ID NO: 583409 - DNA, 580 bp, Homo sapiens
gaatgaaatggaatggaattcaatggaatggaatggaatggaatggaatggaatcaacccaaatggaatgtaatgaaatggaattgaatggaattaccccgagtgaaatggcatggaaaggaacggaatagaatttaatggaatggaatggcatgcaatggaatcaacacgagtgcaatggaatggcatgaaatggaatgcaatgyaatggaatggaaccaataaaagtggaatggattggaatggaatggaatggaatggaatgaaagggaatggaatcaacccgagtggaatggaatggaatggaatggaatggaatggaatgcaatggaatggaatacaccatagtggaatggaatgcaatggaatggaatggagtggaatcaaccccattggaatggaatggaatggaattgaaaggaatggaatggaatgggatggaatgggttggaatcaaaccgagtggaatggaatggaatgcaatggaatggaaaggaatggaatggaatgaaataaacccgaatggaatggaatgaaatggaatggaatggaatggaatggaatggaatggaatggaatg

SEQ ID NO: 583410 - DNA, 648 bp, Homo sapiens
ggaatggaattgaatggaatggaatggaattaacccgagtgaaatggaatggaaaggaatggaatggaatttaatggaatggaattgaatggaatcaacctgagtggactgaaatgaaatggagtggaatggaaagcaatggaattgaatggaatcacccagagttgaatggaattgaatggaatggaatcaacccaaatggaatgtaatgaaatggaattgaatggaattaccccgagtgaaatggcatggaaaggaacggaatagaatttaatggaatggaatggcatgcaatggaatcaacccgattggaatrgaatggcatgaaatggaatgcaatgcaatggaatggaaccaataagagtgaaatggattggaatggaatggaatggaatgaaagggaatggaaacaacgcgagtggaatggaatggaatggaatgcaacggaatggaatggaatgcaatggaatggaatggaatacaccagagtggaatggaatagaatggaatggaatggagtggaatcaaccccagtggaatggaacggaatggaatggaatggaatggaatggaatggaatgcaatggaatggaatggaatggattggaatcaaaccgagtgtaatggaatggaatggaaaggaatgga

SEQ ID NO: 583411 - DNA, 455 bp, Homo sapiens
aatggaatcaaccagagtggaatggaattgaatggaatggaatggaattaacccgagtgaaatggaatggaaaggaatggaatggaatttaatggaatggaattgaatggaatcaacctgagtggactgaaatgaaatggagtggaatggaaagcaatggaattgaatggaatcacccagagttgaatggaattgaatggaatggaatcaacccaaatggaatgtaatgaaatggaattgaatggaattaccccgagtgaaatggcatggaaaggaacggaatagaatttaatggaatggaatggcatgcaatggaatcaacccgattggaatagaatggcatgaaatggaatgcaatgcaatggaatggaaccaataagagtgaaatggattggaatggaatggaatggaatgaaarggaatggaaacaacgcgagtggaatggaatggaatgg

SEQ ID NO: 583412 - DNA, 648 bp, Homo sapiens
ggaatggaattgaatggaatggaatggaattaacccgagtgaaatggaatggaaaggaatggaatggaatttaatggaatggaattgaatggaatcaacctgagtggactgaaatgaaatggagtggaatggaaagcaatggaattgaatggaatcacccagagttgaatggaattgaatggaatggaatcaacccaaatggaatgtaatgaaatggaattgaatggaattaccccgagtgaaatggcatggaaaggaacggaatagaatttaatggaatggaatggcatgcaatggaatcaacccgattggaatagaatggcatgaaatggaatgcaatgcaatggaatggaaccaataagagtgaaatggattggaatggaatggaatggaatgaaagggaatggaaacaacgcgagtggaatggaatggaatggaatgcaacggaatggaatggaatgcaatggaatggaatggaatacaccagagtggaatggaatagaatggaatggaatggagtggaatcaaccccartggaatggaacggaatggaatggaatggaatggaatggaatggaatgcaatggaatggaatggaatggattggaatcaaaccgagtgtaatggaatggaatggaaaggaatgga

SEQ ID NO: 583413 - DNA, 438 bp, Homo sapiens
atggaatggaatggaatggaatggaatgcaatggaatggaatggaatggattggaatmaaaccgagtgtaatggaatggaatggaaaggaatggaatggaatgaaatcaacccgagtggaatggaatggaatggaatggaatgggatggaatagaatgaaatgacgtggattggaatcaatctgagtggaatggaaaggaatagaaaggaatggaattgaagagaatggaatggaatggaatggaatggaacggaacttaaaggaatcaaccagaatggaattgactgtaacggacgggaatggaatggaatggaatggaatggagaggaatggattggagtggaatggaatggaatggaatggaatggaatggaatggtatcaatacaagtgtaattgaatggaatggaatggaatggaatggaatggaatggagag

SEQ ID NO: 583414 - DNA, 561 bp, Homo sapiens
ggaatggaatggaatgaaagggaatggaaacaacgcgagtggaatggaatggaatggaatgcaacggaatggaatggaatgcaatggaatggaatggaatacaccagagtggaatggaatagaatggaatggaatggagtggaatcaaccccagtggaatggaacggaatggaatggaatggaatggaatggaatggaatgcaatggaatggaatggaatggattggaatcaaaccgagtgtaatggaatggaatggaaaggaatggaatggaatgaaatcaacccgagtggaatggaatggaatggaatggaatgggatggaatagaatgaaatgacgtggattggaatcaatctgagtggaatggaaaggaatagaaaggaatggaattgaagagaatggaatggaatggaatggaatggaacggaayttaaaggaatcaaccagaatggaattgactgtaacggacgggaatggaatggaatggaatggaatggagaggaatggattggagtggaatggaatggaatggaatggaatggaatggaatggtatcaatac

SEQ ID NO: 583415 - DNA, 523 bp, Homo sapiens
cccgagtgaaatggcatggaaaggaacggaatagaatttaatggaatggaatggcatgcaatggaatcaacccgattggaatggaatggcatgaaatggaatgcaatgcaatggaatggaaccaataagagtgaaatggattggaatggaatggaatggaatgaaagggaatggaaacaacgcgagtggaatggaatggaatggaatgcaacggaatggaatggaatgcaatggaatggaatggaatacaccagagtggaatggaatagaatggaatggaatggagtggaatcaaccacagtggaatggaacggaatggaatggaacggaatggaatggaatggaatgcaatggaatggaatggaatgsattggaatcaaaccgagtgtaatggaatgcaatggaaaggaatggaatggaatgaaatcaacccgagtggaatggaatggaatggaatggaatgggatggaatagaatgaaatgacgtggattggaatcaatctgagtggaatggaaaggaata

SEQ ID NO: 583416 - DNA, 381 bp, Homo sapiens
tcagttcctttccattccattcctttccattccgttcctttccatttcattccastagtgttgattccattctaatccattccgttcccttccattccagttgactccattccattccgtgtccttgcattcctttccattccattgcattccattgcattccattccattccattccattccattccattccattgtcttcaattccattcctttccattccactcagattgattccaatccactccattccgttcaattccatcccattctattccattccattgcactcggattgatttcattccattccattccattccattccatttcattccattccattcaattccattccattctctccatttgattccaatc

SEQ ID NO: 583417 - DNA, 650 bp, Homo sapiens
  misc_feature 267: n = A,T,C or G
ggaatggaattgaatggaatggaatggaattaacccgagtgaaatggaatggaaaggaatggaatggaatttaatggaatggaattgaatggaatcaacctgagtggactgaaatgaaatggagtggaatggaaagcaatggaattgaatggaatcacccagagttgaatggaattgaatggaatggaatcaacccaaatggaatgtaaygaaatggaattgaatggaattaccccgagtgaaatggcatggaaaggaacggaatanaatttaatggaatggaatggcatgcaatggaatcaacccgattggaatggaatggcatgaaatggaatgcaatgcaatggaatggaacccaataagagtgaaatggattggaatggaatggaatggaatgaaagggaatggaaacaacgcgagtggaatggaatggaatggaatgcaacggaatggaatggaatgcaatggaatggaatggaatacaccagagtggaatggaatagaatggaatggaatggagtggaatcaaccccagtggaatggaacggaatggaatggaatggaatggaatggaatggaatgcaatggaatggaatggaatggattggaatcaaaccgagtgtaatggaatgaaatggaaaggaatggaa

SEQ ID NO: 583418 - DNA, 612 bp, Homo sapiens
aatggaatcaacacgagtggaatggaatggaatggattggattggaaagttatggaatcaacccgaatggaatgtaatggaaaggaatggaatggaatgcagtgtaattaacccgagtggaatggaatggtatggagtraaatggaacggaatggaatggtatggaatggaatggaatgaaaaggaaaggaaagcaatggaatcaaaacgagtggaatggaatggaatgtaaagaaatgaagtggaattcaatagaatcaacacgactggaatgaaatggaaaggaatttaacggaatggaatggaatggaatggaatccaatccaatgtaaaggaatggaatggaacggaatagaatggaatggaatggaatggaatggaaaaaattcgagtggaatggaatggaatgcaaagtaatataatgaaaatgaatggaatccacccgaatggaaaggaaaggaatggaatggaatggaatggaatggaatggaatggaatggaatggtatggagaggaatggaatttaatggaatggagaggaatggaatggaattgaatggaatggaatgcaaaggaacggaaaggaatggaatggaatggaattgaatggag

SEQ ID NO: 583419 - DNA, 612 bp, Homo sapiens
aatggaatcaacacgagtggaatggaatggaatggattggattggaaagttatggaatcaacccgaatggaatgtaatggaaaggaatggaatggaatgcagtgtaattaacccgagtggaatggaatggtatggagtgaaatggaacggaatggaatggtatggaatggaatggaatgaaaaggaaaggaaagcaatggaatcaaaacgagtggaatggaatggaatgtaaagaaatgaagtggaattcaatagaatcaacacgastggaatgaaatggaaaggaatttaacggaatggaatggaatggaatggaatccaatccaatgtaaaggaatggaatggaacggaatagaatggaatggaatggaatggaatggaaaaaattcgagtggaatggaatggaatgcaaagtaatataatgaaaatgaatggaatccacccgaatggaaaggaaaggaatggaatggaatggaatggaatggaatggaatggaatggaatggtatggagaggaatggaatttaatggaatggagaggaatggaatggaattgaatggaatggaatgcaaaggaacggaaaggaatggaatggaatggaattgaatggag

SEQ ID NO: 583420 - DNA, 612 bp, Homo sapiens
aatggaatcaacacgagtggaatggaatggaatggattggattggaaagttatggaatcaacccgaatggaatgtaatggaaaggaatggaatggaatgcagtgtaattaacccgagtggaatggaatggtatggagtgaaatggaacggaatggaatggtatggaatggaatggaatgaaaaggaaaggaaagcaatggaatcaaaacgagtggaatggaatggaatgtaaagaaatgaagtggaattcaatagaatcaacacgactggaatgaaayggaaaggaatttaacggaatggaatggaatggaatggaatccaatccaatgtaaaggaatggaatggaacggaatagaatggaatggaatggaatggaatggaaaaaattcgagtggaatggaatggaatgcaaagtaatataatgaaaatgaatggaatccacccgaatggaaaggaaaggaatggaatggaatggaatggaatggaatggaatggaatggaatggtatggagaggaatggaatttaatggaatggagaggaatggaatggaattgaatggaatggaatgcaaaggaacggaaaggaatggaatggaatggaattgaatggag

SEQ ID NO: 583421 - DNA, 513 bp, Homo sapiens
ctggggttgattccactccattccattccattctattccattccactctggtgtattccattccattgcattccattccattccattccattccattccattccactcgggttgattccattccctttcattccattccattccattccattccaatccattccactcttattggttccattccattgcattgcattccatttcatgscattccattgcactcgtgttgattccattgcatgccattccattccattaaattctattccgttcctttccatgccatttcactcggggtaattccattcaattccatttcattacattccatttgggttgattccattccattccattccattccattccattgaattccattccatttcattcaattcctatcttgttgattccgttccattcgaatgcactacattccacgcaggtagattccaatccattttattccattccattccatttcattacattacattccacccgggttgattc

SEQ ID NO: 583422 - DNA, 513 bp, Homo sapiens
ctggggttgattccactccattccattccattctattccattccactctggtgtattccattccattgcattccattccattccattccattccattccattccactcgggttgattccattccctttcattccattccattccattccattccaatccattccactcttattggttccattccattgcattgcattccatttcatgccattccattgcactcgtgttgattccattgcatgccattccattccattaaattctattccgttcctttccatgccakttcactcggggtaattccattcaattccatttcattacattccatttgggttgattccattccattccattccattccattccattgaattccattccatttcattcaattcctatcttgttgattccgttccattcgaatgcactacattccacgcaggtagattccaatccattttattccattccattccatttcattacattacattccacccgggttgattc

SEQ ID NO: 583423 - DNA, 513 bp, Homo sapiens
ctggggttgattccactccattccattccattctattccattccactctggtgtattccattccattgcattccattccattccattccattccattccattccactcgggttgattccattccctttcattccattccattccattccattccaatccattccactcttattggttccattccattgcattgcattccatttcatgccattccattgcactcgtgttgattccattgcatgccattccattccattaaattctattccgttcctttccatgccatttcactcggggtaattccattcaattccatttcattacattccatttgggttgattccattscattccattccattccattccattgaattccattccatttcattcaattcctatcttgttgattccgttccattcgaatgcactacattccacgcaggtagattccaatccattttattccattccattccatttcattacattacattccacccgggttgattc

SEQ ID NO: 583424 - DNA, 444 bp, Homo sapiens
atggaatggaatgcaatggaatggaatggaatggattggaatcaaaccgagtgtaatggaatggaatggaaaggaatggaatggaatgaaatcaacccgagtggaatggaatggaatggaatggaatgggatggaatagaatgaaatgacrtggattggaatcaatctgagtggaatggaaaggaatagaaaggaatggaattgaagagaatggaatggaatggaatggaatggaacggaatttaaaggaatcaaccagaatggaattgactgtaacggacgggaatggaatggaatggaatggaatggaatggaatggaatggaatgcaatggaatggagaggaatggattggagtggaatggaatggaatggaatggaatggaatggaatggaatggtatcaatacaagggtaattgaatggaatggaatggaatggaatgg

SEQ ID NO: 583425 - DNA, 541 bp, Homo sapiens
ggtatggagtgaaatggaacggaatggaatggtatggaatggaatggaatgaaaaggaaaggaaagcaatggaatcaaaacgagtggaatggaatggaatgtaaagaaatgaagtggaattcaatagaatcaacacgagtggaatgaaatggaaaggaatttaacggaatggaatggaatggaatggaattcaatccaatgaaaaggaatggaatggaacggaatagaatggaatggaatggaatggaatggaaaaaattcgagtggaatggaatggaatgcaaagtaatataatgaaaatgaatggaatccacccgaatggaaaggaaaggaatggaatggaatggaatggaatggaatggtatggagaggaatggaatttaatggaatggagaggaatggaatggaattgaatggaatggaatgcaaaggaacggaaaggaatggaatggaayggaattgaatggagtcaacgcaagtgtaattgaatggaatggaatggaatggaatggaatggaatggaattgatttgaatggaatg

SEQ ID NO: 583426 - DNA, 433 bp, Homo sapiens
aatttaatggaatggaatggaatggaatggaatggaatggaatggaatggaatggaatggaatcacccagagtataattgaatggaatggaatggaatggaatggaatggaatggaakggaagggaatggaatggaatggattcaaaccaaatggaatggaatggaatggattggaatgcaatggaattgaatggaataaactgaagtggaatggtatagaatggaatggaatggattggaatgcaatggaatgggaaggaatggaatcaactagaatggaaaggaatggaatggaatggaatgcagtggaatggaatggaatggaatcaacccctgtggaatgtaatgcaaaggaatggaaaggaatggaatggaataaacaaaagtggaatggaagggaatggaatagaatggaatggaatggaatggaaa

SEQ ID NO: 583427 - DNA, 532 bp, Homo sapiens
cccgagtgaaatggcatggaaaggaacggaatagaatttaatggaatggaatggcatgcaatggaatcaacccgattggaatggaatggcatgaaatggaatgcaatgcaatggaatggaaccaataagagtgaaatggattggaatggaatggaatggaatgaaagggaatggaaacaacgcgagtggaatggaatggaatggaatgcaacggaatggaatggaatgcaatggaatggaatggaatacaccagagtggaatggaatagaatggaatggaatgsagtggaatcaaccccagtggaatggaacggaatggaatggaatggaatggaatggaatggaatgcaatggaatggaatggaatggattggaatcaaaccgagtgtaatggaatggaatggaaaggaatggaatggaatgaaatcaacccgagtggaatggaatggaatggaatggaatgggatggaatagaatgaaatgacgtggattggaatcaatctgagtggaatggaaaggaatagaaaggaat

SEQ ID NO: 583428 - DNA, 565 bp, Homo sapiens
ggaatgaaagggaatggaaacaacgcgagtggaatggaatggaatggaatgcaacggaatggaatggaatgcaatggaatggaatggaatacaccagagtggaatggaatagaatggaatggaatgcagtggaatcaaccccagtggaatggaacggaatggaatggaatggaatggaatggaatggaatgcaatggaatggaatggaatggattggaatcaaaccsagtgtaatggaatggaatggaaaggaatggaatggaatgaaatcaacccgagtggaatggaatggaatggaatggaatgggatggaatagaatgaaatgacgtggattggaatcaatctgagtggaatggaaaggaatagaaaggaatggaattgaagagaatggaatggaatggaatggaatggaacggaatttaaaggaatcaaccacaatggaattgactgtaacggacgggaatggaatggaatggaatggaatggaatggaatggagaggaatggattggagtggaatggaatggaatggaatggaatggaatggaatggtatcaatacaagt

SEQ ID NO: 583429 - DNA, 428 bp, Homo sapiens
ctaaaagtacaaaaaattagccggctgtggtggtgcacgcctgtaatcacagttacttgggaggctgaggcaggagaatcacttgaacccaagaagtggaggtcactccactgcattccagtctgggcaacagagtgagactccgcctcaaaaaaaaaaaaaagactcagtaatcctaygttttggaaaatttttcttaatagtgcaaatttctgaataatgatcaattcttcaccaatataataatctacctgtaaacatgcccacatttggtacaaaaagaatggtgttttcatgcctgactagaattaaagtatctcaaagttcagggccttttagccttcatccaggcagccaatcagaatggcaaggactatttcaagtaaatatccctcctccaagaaacacttaattgaatacctgctatg

SEQ ID NO: 583430 - DNA, 544 bp, Homo sapiens
ggcattcatgatgttcaagtgttttggaggccctaaaaaaaatgccacttatctctagagcagctgaaagtaagacccaatgagaggctgctgtgactttcaaccaagaggaaggaatcattataatggctacagcagtgaagcagggcaggaagcaaaatataaaaatatagaaaactatgatctttcttcaacaagttacgtttccactctggaaggaaagactctatataatytcaaatatttgagaaagcacttccattgactataggcaagagtagagaagtcttttattttttctggaactactctgaatcatacataataaaattctgtgtatagaaaacacaaacaatgtaaattctaggctggaaattacaaacacagatattttaaatcacaggcaatgatatattgtctagctatttttcatatgggcaactatagcatgaatagctgtttgttcattggggttttaaatgataattaaatagtctgaagaagtcttatagacagcagatactttagagtaatgatattagtt

SEQ ID NO: 583431 - DNA, 508 bp, Homo sapiens
ctctgcaaaggctaacttatgtctcctctttcaggctggttcacctgtagaaggagtaaaagttagtttgtaataatccatgcagtgaggtgcatctctttgaggtggagacttgaacttgtcccgttttgccagtcatagtcgaatcagtctgtttaagattagggcagtgagtattattcagctcttttatgggaggatctaaggttacattgtccagctgattttactgtaaatgcacctaatgtgttcatctctatttttctgtcttttgtgtttcacatttggctccaatctcagggagtgaagacagggcaatgcttgctagctccttacagccccagccacaaatcatgagatgagaagaataaagttatgcaggtagcaatcaactttagttcatactataatgcctacctcaaatatgaacataaattaaggagactgctatatggttaaaaaaaatttcagcctcttcacartagtttctttttaatccagtgtaatt

SEQ ID NO: 583432 - DNA, 550 bp, Homo sapiens
taaacctgccctgggcctcagctccattatctctctggttttttgtttgttttttgttttttgttttttttgagacagggccttgctctgtcacagaggctggagtccagtggcacaatcatggctcactgcaaccctcacctccgaggctcaagtgatcctcccacctcagcctccctagtagctgggactacaggcacatgccaccatacttggcttttttcttttttttggtagagacaggtttccaccatattgcccagactagtcttgaactcctgggctcaagctatctgcctgcctcagcctcccaaaatgctaggattgcaggttggccactgtgcctggccaactccatgctctttgtgctgagttccgtggctgttttatttacttgtaaaatccagttatttatatttggttaatgtttccctttggagctgcatccttggtgatttgcttccacctgtcccttgttttttcctstgtccttaagtgttatttatttgtttatttatttaaaaaaaatttttttttgagacagagtctc

SEQ ID NO: 583433 - DNA, 632 bp, Homo sapiens
aggacggggcattgtgaagctaataggcagtactgtctaatttctcaatttcctttcaataatagcggaacatgccggacgtgaatgaggccgcccggcattttccttcccttattcaatttacgtgctgccttttgacatctgactgatgtggtaaggatgcaccccaccctagaacgtgctttcaagaagaaattgagtttctcttaatcatgagatccatcttgctaattgattgtcctgtaaacagtgtggggcagcccatgctggcttcgtttcagtgacgctggggaaaagccacacgtctctgctgtcattttgatgtccacgcagctgcctttcccatctgggtcactggagggtgggaacagcccttaacctctgcctccctttcccagsacagagcattcgcctccctgcaagcctggctcggacttgcctgggacctgccaggagctgaacgtagttttctttctcccatgggaaataattttcttgggcgcggtggccgtgggttaccagtccctggctgtcaaagctcacgcgtgtgtgacagtgacgctgttgttaggcacgccggagtttccattacggagtccgtgtatctgccgcggggactttcctaggagagg

SEQ ID NO: 583434 - DNA, 579 bp, Homo sapiens
attttaagtttctccggtttccttgatgaatgtccctcaaacaacctaaaggacttaaaaaataagagaatggaagatgagttaaaatgccttaatgattcagaaaactacatccatattgctaccaagtaacaaaaagaaataattgttccagaagacaattctgtaatgataagaactagaaaattggtttagattcaaatggcatctggagagaactgaaatcaactagaaccagccttcttcaaagctgttcaaatcagacagcatttgctaccaaccacatttctccaacctatcttccaccacagagaaggcaccatctagccctcccagtcaattggggtcagtcagtgcacagctactttctcaatggctaataacatttataattcataatgttactacgtagtttgataagtaacaataacagtatctgaaaaaaatccttatctgagtgtttttgaggaaatgagagtggaggggaatgggggaaggacacaggcaggtataacaagwtatcagggctcaacaatccttgttaattaaacaactagtttcttttacggactgaatgtt

SEQ ID NO: 583435 - DNA, 289 bp, Homo sapiens
acttggtctattgattaactgcagctaatatggggtctacttcacatacaagttaaattcagtgcccttaatcagtcatatggtcaggtcaacagtaataaattatgcaatattttttcacccctatagttttaatttctctttccccttatgtctagaattaacattttattttacamaacatgatgataatcttctagagtagtgatgacaaagtataaatccaaagtttcttacctatgcaaatgacgtgtttgcttctattttctcatgagcttggtagatccag

SEQ ID NO: 583436 - DNA, 270 bp, Homo sapiens
atacatttattcattcaataaaaattcatgcttacaatggccactgatacttatgtcctaaatatttctgaaaacatctcctcaggcctgcatcatctttgcaacactgccttatattttatctttgttcattgatttatatgcctcagaattttatgctcctcacaataattagagttaattatctctaatgcaaatagawctgtgaaccactcctgaatacctatgtccaagcatcttaaagttttatataaggatttcagaaactga

SEQ ID NO: 583437 - DNA, 400 bp, Homo sapiens
tggctaaccttactctctaagtctcagctcatgcatgatctttaggaaagccatccctgacagcttttattttccttccttataccccagtgcctaacacttagcaggaactcaataagtaattatttagcaaaattaagactgtttatacaaagatgattcaaaagattgtcctctacagtctarcagcaaaggggatcaacatgtaaagacatgatgtgcagttcaggtggtaaagtgacgctggaaaatttgacaaagtactaagggactccaatgaagcagacacctgtgtgtgtggagaaagacagctagaatcaaggaagacttcacacagcattctgagccttttttttttctttttctgttgttggagacaagttcttactctgtcacccag

SEQ ID NO: 583438 - DNA, 599 bp, Homo sapiens
aaattaagactgtttatacaaagatgattcaaaagattgtcctctacagtctaacagcaaaggggatcaacatgtaaagacatgatgtgcagttcaggtggtaaagtgacgctggaaaakttgacaaagtactaagggactccaatgaagcagacacctgtgtgtgtggagaaagacagctagaatcaaggaagacttcacacagcattctgagccttttttttttctttttctgttgttggagacaagttcttactctgtcacccagggtggagtgcaatggtgtgatcgagactcactgcaacctcaaactcctgggctcgagggatcttctcacctaagcttcttgagtagctgggactacaggcacatatcaccatacctgtccaattttttgtagagtcaaggttatctatggttcccaggctggtcttaaactcctggccttgaacaattcccccattttggccttccaaagtgctgggattacagatgtgagctattatgcccagcctactttctgagtcttaaaagatgaaaataaatttttcagaatagtaggggaaaacatttgcgatgtaaaaaatggggtgcacact

SEQ ID NO: 583439 - DNA, 400 bp, Homo sapiens
tggctaaccttactctctaagtctcagctcatgcatgatctttaggaaagccatccctgacagcttttattttccttccttataccccagtgcctaacacttagcaggaactcaataagtaattatttagcaaaattaagactgtttatacaaagatgattcaaaagattgtcctctacagtctaacagcaaaggggatcaacatgtaaagacatgatgtgcagttcaggtggtaaagtgacgctggaaaatttgacaaagtactaagggactccaatgaagcagacacctgtgtgtgtggagaaagayagctagaatcaaggaagacttcacacagcattctgagccttttttttttctttttctgttgttggagacaagttcttactctgtcacccag

SEQ ID NO: 583440 - DNA, 599 bp, Homo sapiens
aaattaagactgtttatacaaagatgattcaaaagattgtcctctacagtctaacagcaaaggggatcaacatgtaaagacatgatgtgcagttcaggtggtaaagtgacgctggaaaatttgacaaagtactaagggactccaatgaagcagacacctgtgtgtgtggagaaagacagctagaatcaaggaagacttcacacagcattctgagccttttttttttctttttctgttgttggagacaagttcttactctgtcacccagggtggagtgcaatggtgtgatcgagactcactgcaacctcaaactcctgggctcgagggatcttctcacctaagcttcttgagtagctgggactacargcacatatcaccatacctgtccaattttttgtagagtcaaggttatctatggttcccaggctggtcttaaactcctggccttgaacaattcccccattttggccttccaaagtgctgggattacagatgtgagctattatgcccagcctactttctgagtcttaaaagatgaaaataaatttttcagaatagtaggggaaaacatttgcgatgtaaaaaatggggtgcacact

SEQ ID NO: 583441 - DNA, 541 bp, Homo sapiens
ccagggtggagtgcaatggtgtgatcgagactcactgcaacctcaaactcctgggctcgagggatcttctcacctaagcttcttgagtagctgggactacaggcacatatcaccatacctgtccaattttttgtagagtcaaggttatctatggttcccaggctggtcttaaactcctggccttgaacaattcycccattttggccttccaaagtgctgggattacagatgtgagctattatgcccagcctactttctgagtcttaaaagatgaaaataaatttttcagaatagtaggggaaaacatttgcgatgtaaaaaatggggtgcacactaattaaggtataaacaacaataattttgcaaattattagtaactgccaactcaattagtgtcttgttaaaaagatactgttatgaagtaaagtgttacattgtatattttgactgtatttcaaaattttgttttgtttctaacagttttgttgatttatgttgggtggaacaatttgtgagtgaccctgagatttcatatggcttg

SEQ ID NO: 583442 - DNA, 580 bp, Homo sapiens
aagatttattctgttttgtggtcacgatttgacttctgtgtctgtgttcagggagtgartggggtcataaaagtcaacccagttgcctattaagagaatcctaccttgtggaatgggacctttggtgtcagggtacaaacaataactttattttgacataaatacatagtaaatgttactaaaatttaaaaaatccatccactatcactagtggaacttaaaatatattagaagtggatataagcagataatccatctagatacataacactatcatagtatattatttgaattagaatttaaaattttgcttccctttcttattggtgttcagtttggctcttaataattcagtgtttgcctagtctgtagttaatcttcagaaatatacacgtactgtaggggctcactttttctggtatgatgaggtaaaatctttgtaagagaggaagattttataatactacctatcagctttgaattcatttctggtagattttacacataatgcattaagtttaatccaaacaaatgctaagagttcagcttgccagttcatatttctgtcctatgttaagcc

SEQ ID NO: 583443 - DNA, 580 bp, Homo sapiens
aagatttattctgttttgtggtcacgatttgacttctgtgtctgtgttcagggagtgaatggggtcataaaagtcaacccagttgcctattaagagaatcctaccttgtggaatgggacctttggtgtcagggtacaaacaataactttattttgacataaatacatagtaaatgttactaaaatttaaaaaatccatccactatcactagtggaacttaaaatatattagaagtggatataagcagataatccatctagatacataacactatcatagtatattatttgaattagaatttaaaattttgcttccctttcttattggtgttcagtttggctcttaataattcagtgtttgcctagtctgtagttaatcttcagaaatatacacgtactgtaggggctcactttttctggtatgmtgaggtaaaatctttgtaagagaggaagattttataatactacctatcagctttgaattcatttctggtagattttacacataatgcattaagtttaatccaaacaaatgctaagagttcagcttgccagttcatatttctgtcctatgttaagcc

SEQ ID NO: 583444 - DNA, 554 bp, Homo sapiens
cactttttctggtatgatgaggtaaaatctttgtaagagaggaagattttataatactacctatcagctttgaattcatttctggtagattttacacataatgcattaagtttaatcsaaacaaatgctaagagttcagcttgccagttcatatttctgtcctatgttaagccaaggcaaattatttttcactttttagttacaatcccataatttaagagtggcaacacatagattaagtttcacagttaaattttaattattttctagtatttttgtttatacttgattaaagctaattttaaaacatgcactctgacagaaaaggcatttgagaaacaaaacaagcaaatttgttttccattttgcacctgcccaaaaaaaaaaaaaagtctcaagaaccagaactgggtaagaattgtgataaagggaataatctgtctgtatattcacgactttctttaaaattcattacaaacaagttcaagctgaatattggtgaaagttttgaaaactccagaattactgcttgccctgaggaagagctcctacat

SEQ ID NO: 583445 - DNA, 554 bp, Homo sapiens
cactttttctggtatgatgaggtaaaatctttgtaagagaggaagattttataatactacctatcagctttgaattcatttctggtagattttacacataatgcattaagtttaatccaaacaaatgctaagmgttcagcttgccagttcatatttctgtcctatgttaagccaaggcaaattatttttcactttttagttacaatcccataatttaagagtggcaacacatagattaagtttcacagttaaattttaattattttctagtatttttgtttatacttgattaaagctaattttaaaacatgcactctgacagaaaaggcatttgagaaacaaaacaagcaaatttgttttccattttgcacctgcccaaaaaaaaaaaaaagtctcaagaaccagaactgggtaagaattgtgataaagggaataatctgtctgtatattcacgactttctttaaaattcattacaaacaagttcaagctgaatattggtgaaagttttgaaaactccagaattactgcttgccctgaggaagagctcctacat

SEQ ID NO: 583446 - DNA, 554 bp, Homo sapiens
cactttttctggtatgatgaggtaaaatctttgtaagagaggaagattttataatactacctatcagctttgaattcatttctggtagattttacacataatgcattaagtttaatccaaacaaatgctaagagttcagcttgccagttcatatttctgtcctatgttaagccaaggcaaattatttttcactttttagttacaatcccataatttaagagtggcaacacatagattaagtttcacagttaaattttaattattttctagtatttttgtttatacttgattaaagctaattttaaaacatgcactctgacagaaaaggcatytgagaaacaaaacaagcaaatttgttttccattttgcacctgcccaaaaaaaaaaaaaagtctcaagaaccagaactgggtaagaattgtgataaagggaataatctgtctgtatattcacgactttctttaaaattcattacaaacaagttcaagctgaatattggtgaaagttttgaaaactccagaattactgcttgccctgaggaagagctcctacat

SEQ ID NO: 583447 - DNA, 608 bp, Homo sapiens
tgttttccattttgcacctgccmaaaaaaaaaaaaaagtctcaagaaccagaactgggtaagaattgtgataaagggaataatctgtctgtatattcacgactttctttaaaattcattacaaacaagttcaagctgaatattggtgaaagttttgaaaactccagaattactgcttgccctgaggaagagctcctacatagtaactctaaagagggatgaacaaaaaaggagtgccctctaatctgatgaatcaggtccctgattgtgaggaggaagatgcatctggagggtctaactctgtggcattccaggcagcgcctgaacagaggaagcccatgtcaaatgtctttttattccattcatactccaggtccctgaaatacagttaccagtcatcttctaagcttcatttaaatgaaaataaatcagactataaaaatgatagcaaaccagacacatagcttgtttctaacacagatgatgaaaatttttgtaatgatactgaaaccaaaaaattaaggaacccagtaattatgattgaaatgaaagatgattaagagtttgacatgcaaatggcaaaaaatgtaaacccagataccactaatt

SEQ ID NO: 583448 - DNA, 642 bp, Homo sapiens
ttttaattattttctagtatttttgtttatacttgattaaagctaattttaaaacatgcactctgacagaaaaggcatttgagaaacaaaacaagcaaatttgttttccattttgcacctgcccaaaaaaaaaaaaaagtctcaagaaccagaactgggtaagaattgtgataaagggaataatctgtctgtatattcacgactttctttaaaattcattacaaacaagttcaagctgaatattggtgaaagttttgaaaactccagaattactgcttgccctgaggaagagctcctacatagtaactctaaagagggaygaacaaaaaaggagtgccctctaatctgatgaatcaggtccctgattgtgaggaggaagatgcatctggagggtctaactctgtggcattccaggcagcgcctgaacagaggaagcccatgtcaaatgtctttttattccattcatactccaggtccctgaaatacagttaccagtcatcttctaagcttcatttaaatgaaaataaatcagactataaaaatgatagcaaaccagacacatagcttgtttctaacacagatgatgaaaatttttgtaatgatactgaaaccaaaaaattaaggaacccagtaattatgatt

SEQ ID NO: 583449 - DNA, 559 bp, Homo sapiens
atgattgaaatgaaagatgattaagagtttgacatgcaaatggcaaaaaatgtaaacccagataccactaattggaaattggacattaggcattggcctcagtctagagatccagaaagtctttttgatttgttgtttacccaccccaaagaaatgaagcatatgattcagatagaaagccacagtatttctgctgctacagatacttayaaaaacagaaaaccaatacagcgtttattccagcagccactatatggcaatcccagtgctaacaactacagaagcatgaatcttgaattataaaatgtgagttattctttgccacatagtgagagaacatcaaaaatatagctagaagacttatgggaagatattccaaggtcaccaacatggcacatgaatagatatgtaacaaacctgcatgttgtgcacatgtaccagaacttaaagtataataataattaaaaaaaagaatgaggtaggcatgttacaagttgagttcctggctttggagaaaagcaagtccaacttcaaaaagacagaggttcacttgctgctt

SEQ ID NO: 583450 - DNA, 617 bp, Homo sapiens
ttctgctgctacagatacttataaaaacagaaaaccaatacagcgtttattccagcagccactatatggcaatcccagtgctaacaactacagaagcatgaatcttgaattataaaatgtgagttattctttgccacatagtgagagaacatcaaaaatatagctagaagacttatgggaagatattycaaggtcaccaacatggcacatgaatagatatgtaacaaacctgcatgttgtgcacatgtaccagaacttaaagtataataataattaaaaaaaagaatgaggtaggcatgttacaagttgagttcctggctttggagaaaagcaagtccaacttcaaaaagacagaggttcacttgctgcttctttttcctctttatcaattatttgatttagtcaaattttctattcaagaaaatctcatgtgtacagttacagtggggttatctaaatgtgtaattatgtgtcaaagtagattagttctgctatctaaataatggttctggagaatgttctcataatgtttgttcattaatcaacctatgtctcactatcagtcttccaagtggcgtatgagctgggaaactaattaagccacataccatgtgacc

SEQ ID NO: 583451 - DNA, 538 bp, Homo sapiens
ttaggcattggcctcagtctagagatccagaaagtctttttgatttgttgtttacccaccccaaagaaatgaagcatatgattcagatagaaagccacagtatttctgctgctacagatacttataaaaacagaaaaccaatacagcgtttattccagcagccactatatggcaatcccagtgctaacaactacagaagcatgaatcttgaattataaaatgtgagttattctttgccacatagtgagagaacatcaaaaatatagctagaagacttatgggaagatattccaaggtcaccaacatggcacatgaatagatatgtaacaaacctgcatgttgtgcacatgtaccagaacttaaagtataataataattaaaaaaaagaatgaggtaggcatgttacaagttgagttcctggctttggagaaaagcaagtccaacttcaaaaagacagaggttcacttgctgctkctttttcctctttatcaattatttgatttagtcaaattttctattcaagaaaatctcatgtgta

SEQ ID NO: 583452 - DNA, 617 bp, Homo sapiens
ttctgctgctacagatacttataaaaacagaaaaccaatacagcgtttattccagcagccactatatggcaatcccagtgctaacaactacagaagcatgaatcttgaattataaaatgtgagttattctttgccacatagtgagagaacatcaaaaatatagctagaagacttatgggaagatattccaaggtcaccaacatggcacatgaatagatatgtaacaaacctgcatgttgtgcacatgtaccagaacttaaagtataataataattaaaaaaaagaatgaggtaggcatgttacaagttgagttcctggctttggagaaaagcaagtccaacttcaaaaagacagaggttcacttgctgcttctttttcctctttatcaattatttgatttagtcaaattttctattcaagaaaatstcatgtgtacagttacagtggggttatctaaatgtgtaattatgtgtcaaagtagattagttctgctatctaaataatggttctggagaatgttctcataatgtttgttcattaatcaacctatgtctcactatcagtcttccaagtggcgtatgagctgggaaactaattaagccacataccatgtgacc

SEQ ID NO: 583453 - DNA, 616 bp, Homo sapiens
tattccaaggtcaccaacatggcacatgaatagatatgtaacaaacctgcatgttgtgcacatgtaccagaacttaaagtataataataattaaaaaaaagaatgaggtaggcatgttacaagttgagttcctggctttggagaaaagcaagtccaacttcaaaaagacagaggttcacttgctgcttctttttcctctttatcaattatttgatttagtcaaattttctattcaagaaaatctcatgtgtacagttacagtggggttatctaaatgtgtaattatgtgtcaaagtagattagttctgctatctaaataatggttctggagaatgttctcataatgtttgttcattaatcaacctatgtctcactatcagtcttccaagtggcgtatgagctgggaaactaattmagccacataccatgtgaccttctgaaccagatcaacataaagaaattgctaaagaaacaagctctagattctagattcttttttcttgtattcatttagagatgatttacatttatttaatgatagaatgggaatacaatgggagggaagcaatgactgagacaagccacaaaaacacgtctagccttgagagttgcaacg

SEQ ID NO: 583454 - DNA, 616 bp, Homo sapiens
tattccaaggtcaccaacatggcacatgaatagatatgtaacaaacctgcatgttgtgcacatgtaccagaacttaaagtataataataattaaaaaaaagaatgaggtaggcatgttacaagttgagttcctggctttggagaaaagcaagtccaacttcaaaaagacagaggttcacttgctgcttctttttcctctttatcaattatttgatttagtcaaattttctattcaagaaaatctcatgtgtacagttacagtggggttatctaaatgtgtaattatgtgtcaaagtagattagttctgctatctaaataatggttctggagaatgttctcataatgtttgttcattaatcaacctatgtctcactatcagtcttccaagtggcgtatgagctgggaaactaattaagccayataccatgtgaccttctgaaccagatcaacataaagaaattgctaaagaaacaagctctagattctagattcttttttcttgtattcatttagagatgatttacatttatttaatgatagaatgggaatacaatgggagggaagcaatgactgagacaagccacaaaaacacgtctagccttgagagttgcaacg

SEQ ID NO: 583455 - DNA, 423 bp, Homo sapiens
atgatttacatttatttaatgatagaatgggaatacaatgggagggaagcaatgactgagacaagccacaaaaacacgtctagccttgagagttgcaacgaatattcccagccaaatgagtctgtttaatgtgttttcatgcatgcaagtttatctgcttagctcgaactgtttgaacttacagtcccatcatggttatttccaatatttttgaaaacaaacatatacttacacatattttaaaaaatcaccactctgcaatatttctgttgtatcagaccttacrttatgttgtttaataaagtatggtaagttttggcatgtatgatttttatcatataagaagcataatttcttagccaaaaatttagcctttgactctagtagaaagttgagttctgtacattgtgttctaaagataga

SEQ ID NO: 583456 - DNA, 409 bp, Homo sapiens
gatgatttacatttatttaatgatagaatgggaatacaatgggagggaagcaatgactgagacaagccacaaaaacacgtctagccttgagagttgcaacgaatattcccagccaaatgagtctgtttaatgtgttttcatgcatgcaagtttatctgcttagctcgaactgtttgaacttacagtcccatcatggttatttccaatatttttgaaaacaaacatatacttacacatattttaaaaaatcaccactctgcaatatttctgttgtatcagaccttacgttaygttgtttaataaagtatggtaagttttggcatgtatgatttttatcatataagaagcataatttcttagccaaaaatttagcctttgactctagtagaaagttgagttctgtacattg

SEQ ID NO: 583457 - DNA, 411 bp, Homo sapiens
atgatttacatttatttaatgatagaatgggaatacaatgggagggaagcaatgactgagacaagccacaaaaacacgtctagccttgagagttgcaacgaatattcccagccaaatgagtctgtttaatgtgttttcatgcatgcaagtttatctgcttagctcgaactgtttgaacttacagtcccatcatggttatttccaatatttttgaaaacaaacatatacttacacatattttaaaaaatcaccactctgcaatatttctgttgtatcagaccttacgttatgttgtttaataaagtatgrtaagttttggcatgtatgatttttatcatataagaagcataatttcttagccaaaaatttagcctttgactctagtagaaagttgagttctgtacattgtgt

SEQ ID NO: 583458 - DNA, 419 bp, Homo sapiens
tgatttacatttatttaatgatagaatgggaatacaatgggagggaagcaatgactgagacaagccacaaaaacacgtctagccttgagagttgcaacgaatattcccagccaaatgagtctgtttaatgtgttttcatgcatgcaagtttatctgcttagctcgaactgtttgaacttacagtcccatcatggttatttccaatatttttgaaaacaaacatatacttacacatattttaaaaaatcaccactctgcaatatttctgttgtatcagaccttacgttatgttgtttaataaagtatggtragttttggcatgtatgatttttatcatataagaagcataatttcttagccaaaaatttagcctttgactctagtagaaagttgagttctgtacattgtgttctaaagat

SEQ ID NO: 583459 - DNA, 410 bp, Homo sapiens
tgatttacatttatttaatgatagaatgggaatacaatgggagggaagcaatgactgagacaagccacaaaaacacgtctagccttgagagttgcaacgaatattcccagccaaatgagtctgtttaatgtgttttcatgcatgcaagtttatctgcttagctcgaactgtttgaacttacagtcccatcatggttatttccaatatttttgaaaacaaacatatacttacacatattttaaaaaatcaccactctgcaatatttctgttgtatcagaccttacgttatgttgtttaataaagtatggtaagttttggcatgtatgatttttatcatataagaagcataatttyttagccaaaaatttagcctttgactctagtagaaagttgagttctgtacattgtgt

SEQ ID NO: 583460 - DNA, 598 bp, Homo sapiens
tatggtaagttttggcatgtatgatttttatcatataagaagcataatttcttagccaaaaatttagcctttgactctagtagaaagttgagttctgtacattgtgttctaaagatagacaaaaatctagagattttcttctttcaaagtaaaagcagatgaggcctttttccaccctctgaggcattaaattgctttgctcaagttagacttttaatatatctaatttgataaatktatctggtaatttatgtaattcagcaatatggaattgtatcatgttatatggtgccatgaaatgctagtgaatgccacctcaagagctctggatgaaacatttaatatgtcttggttggtttgactcccattatcagtagataatggggttaaagtaggtaactgtaccatatgttttccacctataaacttttgtggtaattgaatgtgaaatctgggaagcatctcattttccagaattctgcactagaaactcagcagtttcactctgcttcttttgttgtggcaaacgttggttcccataattcaaagagaacctttacttttttgatatcacaggattcaaaaaaaaaaaaagaga

SEQ ID NO: 583461 - DNA, 598 bp, Homo sapiens
tatggtaagttttggcatgtatgatttttatcatataagaagcataatttcttagccaaaaatttagcctttgactctagtagaaagttgagttctgtacattgtgttctaaagatagacaaaaatctagagattttcttctttcaaagtaaaagcagatgaggcctttttccaccctctgaggcattaaattgctttgctcaagttagacttttaatatatctaatttgataaatttatctgktaatttatgtaattcagcaatatggaattgtatcatgttatatggtgccatgaaatgctagtgaatgccacctcaagagctctggatgaaacatttaatatgtcttggttggtttgactcccattatcagtagataatggggttaaagtaggtaactgtaccatatgttttccacctataaacttttgtggtaattgaatgtgaaatctgggaagcatctcattttccagaattctgcactagaaactcagcagtttcactctgcttcttttgttgtggcaaacgttggttcccataattcaaagagaacctttacttttttgatatcacaggattcaaaaaaaaaaaaagaga

SEQ ID NO: 583462 - DNA, 557 bp, Homo sapiens
ttcttctttcaaagtaaaagcagatgaggcctttttccaccctctgaggcattaaattgctttgctcaagttagacttttaatatatctaatttgataaatttatctggtaatttatgtaattcagcaatatggaattgtatcatgttatatggtgccatgaaatgctagtgaatgccacctcaagagctctggatgaaacatttartatgtcttggttggtttgactcccattatcagtagataatggggttaaagtaggtaactgtaccatatgttttccacctataaacttttgtggtaattgaatgtgaaatctgggaagcatctcattttccagaattctgcactagaaactcagcagtttcactctgcttcttttgttgtggcaaacgttggttcccataattcaaagagaacctttacttttttgatatcacaggattcaaaaaaaaaaaaagagagataaaaggcagtggggaaaagagtagctcagtacagaaaagggaaaacttctttactgttcctgaaggcctacaaggtcacatcctcttaatc

SEQ ID NO: 583463 - DNA, 567 bp, Homo sapiens
cctagtagctgggattacaggcatgtgccaccatgcccggctaattttttgtatttttagtaaaaataggatttcaccatgttagccaagctcgtctcgaactcctgrcttcaggtgttctgcccacctcggcctcccaaagtgctgggtttacaggagtgagccaccgtgcctggccgcctatagcagtatttcacaggagataattgtcattgtgctataaactaattgaaaattggactaatattccttatgattaacaagttttatatttttaccaggggtatttagccctgcctggtaatcagaaaaatgcaaattaacataaaataagatatattttgtaaagtcatgctgatatttaaaaagtaattattagtgttggcaaatgtgaggaaaaaggcattctcatacactgttggtataggaaattagtaaattatttctgaagggtaacttagtgctgtgtatcaaaatttcaaatagcctgacatccctttaactcaacaactccacttctggggctagatttcacaggaaaacataactggtgtgaacatacacaca

SEQ ID NO: 583464 - DNA, 567 bp, Homo sapiens
cctagtagctgggattacaggcatgtgccaccatgcccggctaattttttgtatttttagtaaaaataggatttcaccatgttagccaagctcgtctcgaactcctgacttcaggtgttctgcccacctcggcctcccaaagtgctgggtttacaggagtgagccaccgtgcctggccgcctatagcagtatttcacaggagataattgtcattgtgctataaactaattgaaaattggactaatattccttatgattaacaagttttatatttttaccaggggtatttagccctgcctggtaatcagaaaaatgcaaattaacataaaataagatatattttgtaaagtcatgctgatatttaaaaagtaattattagtgttggcaaatgtgaggaaaaaggcattctcatacactgttggtataggaaattrgtaaattatttctgaagggtaacttagtgctgtgtatcaaaatttcaaatagcctgacatccctttaactcaacaactccacttctggggctagatttcacaggaaaacataactggtgtgaacatacacaca

SEQ ID NO: 583465 - DNA, 627 bp, Homo sapiens
ctgttggtataggaaattagtaaattatttctgaagggtaacttagtgctgtgtatcaaaatttcaaatagcctgacatccctttaactcaacaactccacttctgggrctagatttcacaggaaaacataactggtgtgaacatacacacacttattaatatataattaacatgcattaattatatattacacataatgaacaataggttaatgaatatataaaatatatgtaataagaaggtgaattgaaagtattaagaaagaaatataaaaagtgtggggaaacagatgttagactctttagcctagttttggatgacagtcatctgcagatatagtttgtgtgagagacatctgaaggtgtcatctcactctgtaaatcatttggagaaacacctgcaatatttcataaagatgaaaatttatttctagtgaacttatatgcttgtcaataaatagtaactttaaaaatttagttgattgtaaatgatcttttctaattagggagtaattatgactgtgtgatttaaaaaggtaattttgaacctgtaactttactgaattatctctggtatccttttttataatgtatattagagtgactagtaacaaaagctttagcaga

SEQ ID NO: 583466 - DNA, 627 bp, Homo sapiens
ctgttggtataggaaattagtaaattatttctgaagggtaacttagtgctgtgtatcaaaatttcaaatagcctgacatccctttaactcaacaactccacttctggggctagatttcacaggaaaacataactggtgtraacatacacacacttattaatatataattaacatgcattaattatatattacacataatgaacaataggttaatgaatatataaaatatatgtaataagaaggtgaattgaaagtattaagaaagaaatataaaaagtgtggggaaacagatgttagactctttagcctagttttggatgacagtcatctgcagatatagtttgtgtgagagacatctgaaggtgtcatctcactctgtaaatcatttggagaaacacctgcaatatttcataaagatgaaaatttatttctagtgaacttatatgcttgtcaataaatagtaactttaaaaatttagttgattgtaaatgatcttttctaattagggagtaattatgactgtgtgatttaaaaaggtaattttgaacctgtaactttactgaattatctctggtatccttttttataatgtatattagagtgactagtaacaaaagctttagcaga

SEQ ID NO: 583467 - DNA, 627 bp, Homo sapiens
ctgttggtataggaaattagtaaattatttctgaagggtaacttagtgctgtgtatcaaaatttcaaatagcctgacatccctttaactcaacaactccacttctggggctagatttcacaggaaaacataactggtgtgaacatacacacacttattaatatataattaacatgcattaattatatattacacataatgaacaataggttaatgaatatataaaatatatgtaataagaaggtgaattgaaagtattaagaaagaaatataaaaagtgtggggaaacagatgttagactytttagcctagttttggatgacagtcatctgcagatatagtttgtgtgagagacatctgaaggtgtcatctcactctgtaaatcatttggagaaacacctgcaatatttcataaagatgaaaatttatttctagtgaacttatatgcttgtcaataaatagtaactttaaaaatttagttgattgtaaatgatcttttctaattagggagtaattatgactgtgtgatttaaaaaggtaattttgaacctgtaactttactgaattatctctggtatccttttttataatgtatattagagtgactagtaacaaaagctttagcaga

SEQ ID NO: 583468 - DNA, 627 bp, Homo sapiens
ctgttggtataggaaattagtaaattatttctgaagggtaacttagtgctgtgtatcaaaatttcaaatagcctgacatccctttaactcaacaactccacttctggggctagatttcacaggaaaacataactggtgtgaacatacacacacttattaatatataattaacatgcattaattatatattacacataatgaacaataggttaatgaatatataaaatatatgtaataagaaggtgaattgaaagtattaagaaagaaatataaaaagtgtggggaaacagatgttagactctttagcctagttttggatgacagtcatctgcagatatagtttgtgtgagagacatctgaaggtgtcatctcactctgtaaatcatttggagaaacacctgcaatatttcataaagatgaaaatttatttctagtgaacttataygcttgtcaataaatagtaactttaaaaatttagttgattgtaaatgatcttttctaattagggagtaattatgactgtgtgatttaaaaaggtaattttgaacctgtaactttactgaattatctctggtatccttttttataatgtatattagagtgactagtaacaaaagctttagcaga

SEQ ID NO: 583469 - DNA, 607 bp, Homo sapiens
aaaagtgttaaaagagtcaaactgaaatagaatgttatcagtgaaacagaactgtaataactctgggaaattttatctgtccaaatacgtgtgaacaaaagttcttactrtagggtggtgtatgggttagatatcaaagtgtaaatgcaattttttgatatatcttaatttagccaaatttgttaatgctttaatttatgcttttgagtttgttgtaattcagggaaaggcttttccaattctgatattcttaaaaattctctggggtgtgtgtgtgtgtttacttttataaattcattgactctaaatacatttctgaactttctggaatttatgctctataaggttcaaagttttgcttcaactttttctccaggtggatatccacttatggtaaactttttagtggtacggatgtgcaggttattctttaacttcagaggtaatcatgatatgttattttattgagtactagctaaaactttcttttgttttatttaggattttcataatcatgaagaaatgaaaggtctgatggatgaaaattgcattttgaaggcagatattgctatactcagacaggaaatatgtacaatgaaaaatgaca

SEQ ID NO: 583470 - DNA, 607 bp, Homo sapiens
aaaagtgttaaaagagtcaaactgaaatagaatgttatcagtgaaacagaactgtaataactctgggaaattttatctgtccaaatacgtgtgaacaaaagttcttactgtagggtggtgtatgggttagatatcaaagtgtaaatgcaattttttgatatatcttaatttagycaaatttgttaatgctttaatttatgcttttgagtttgttgtaattcagggaaaggcttttccaattctgatattcttaaaaattctctggggtgtgtgtgtgtgtttacttttataaattcattgactctaaatacatttctgaactttctggaatttatgctctataaggttcaaagttttgcttcaactttttctccaggtggatatccacttatggtaaactttttagtggtacggatgtgcaggttattctttaacttcagaggtaatcatgatatgttattttattgagtactagctaaaactttcttttgttttatttaggattttcataatcatgaagaaatgaaaggtctgatggatgaaaattgcattttgaaggcagatattgctatactcagacaggaaatatgtacaatgaaaaatgaca

SEQ ID NO: 583471 - DNA, 633 bp, Homo sapiens
attttattgagtactagctaaaactttcttttgttttatttaggattttcataatcatgaagaaatgaaaggtctgatggatgaaaattgcattttgaaggcagatattgctatactcagacaggaaatatgtacaatgaaaaatgacaacttggaaaaagaaaataaatatcttaaggacattaaaattgttaaagaaacaaatgctgcccttgaaaagtatataaaactcaatgaggaaatgataacagaaacagcattccggtatcaacaagagcttaatgatctcaaggctgagaatacaaggctcaatgccgaactgttgaaggaaaaagaaagcaagaaaagactggaagctgacattgaatcttatcagtctagactggctgctgctataagcaaacacagtgaaagtgtgaaaacagaaagaaacctaaaacttgctttagagagaacacragatgtttctgtacaagtagaaatgagttctgctatttccaaagtaaaagatgagaatgagtttcttactgaacaactttctgaaacacaaattaaattcaatgccttaaaagataagttccgtaagacaagagatagtctcagaaaaaagtcattggctttagaaactgtaca

SEQ ID NO: 583472 - DNA, 633 bp, Homo sapiens
attttattgagtactagctaaaactttcttttgttttatttaggattttcataatcatgaagaaatgaaaggtctgatggatgaaaattgcattttgaaggcagatattgctatactcagacaggaaatatgtacaatgaaaaatgacaacttggaaaaagaaaataaatatcttaaggacattaaaattgttaaagaaacaaatgctgcccttgaaaagtatataaaactcaatgaggaaatgataacagaaacagcattccggtatcaacaagagcttaatgatctcaaggctgagaatacaaggctcaatgccgaactgttgaaggaaaaagaaagcaagaaaagactggaagctgacattgaatcttatcagtctagactggctgctgctataagcaaacacagtgaaagtgtgaaaacagaaagaaacctaaaacttgctttagagagaacacaagatgtttctgtacaagtagaaatgagttctgctatttccaaagtaaaagmtgagaatgagtttcttactgaacaactttctgaaacacaaattaaattcaatgccttaaaagataagttccgtaagacaagagatagtctcagaaaaaagtcattggctttagaaactgtaca

SEQ ID NO: 583473 - DNA, 633 bp, Homo sapiens
attttattgagtactagctaaaactttcttttgttttatttaggattttcataatcatgaagaaatgaaaggtctgatggatgaaaattgcattttgaaggcagatattgctatactcagacaggaaatatgtacaatgaaaaatgacaacttggaaaaagaaaataaatatcttaaggacattaaaattgttaaagaaacaaatgctgcccttgaaaagtatataaaactcaatgaggaaatgataacagaaacagcattccggtatcaacaagagcttaatgatctcaaggctgagaatacaaggctcaatgccgaactgttgaaggaaaaagaaagcaagaaaagactggaagctgacattgaatcttatcagtctagactggctgctgctataagcaaacacagtgaaagtgtgaaaacagaaagaaacctaaaacttgctttagagagaacacaagatgtttctgtacaagtagaaatgagttctgctatttccaaagtaaaagatgagaatgagtttcttactgaacaactttctgaaacacaaattaaattcaatgccttaaaagataagttcygtaagacaagagatagtctcagaaaaaagtcattggctttagaaactgtaca

SEQ ID NO: 583474 - DNA, 413 bp, Homo sapiens
tcagtatgagagagagaaaacagaagtagtagtaagtatcaaggaagataaatattttcaaacttctagaaagaaaatttaaacatttggttctggatacatgttgaacttagttgaatataaaaatctagatwaaaagtgtgtttaccatactgtataattccatttacatgaagcatccagaaaagataaatgtatagggacaaaaagtagattcatgtttgcaaggggctggggctggaagctggtagtgactgctaatgggcatgaggaatcttacagtgatggaaatgctctaaagttggattgtagagatggctgcacaactcagtaaatgtactaaaaatcttttaactttaagttaaaacagatacattctatagtatgtaaattatatttcaacaaagctgttt

SEQ ID NO: 583475 - DNA, 413 bp, Homo sapiens
tcagtatgagagagagaaaacagaagtagtagtaagtatcaaggaagataaatattttcaaacttctagaaagaaaatttaaacatttggttctggatacatgttgaacttagttgaatataaaaatctagattaaaagtgtgtttaccatactgtataattccatttacatgaagcatccagaaaagataaatgtatagggacaaaaagtagattmatgtttgcaaggggctggggctggaagctggtagtgactgctaatgggcatgaggaatcttacagtgatggaaatgctctaaagttggattgtagagatggctgcacaactcagtaaatgtactaaaaatcttttaactttaagttaaaacagatacattctatagtatgtaaattatatttcaacaaagctgttt

SEQ ID NO: 583476 - DNA, 557 bp, Homo sapiens
gtgtttaccatactgtataattccatttacatgaagcatccagaaaagataaatgtatagggacaaaaagtagattcatgtttgcaaggggctggggctggaagctggtagtgactgctaatgggcatgaggaatcttacagtratggaaatgctctaaagttggattgtagagatggctgcacaactcagtaaatgtactaaaaatcttttaactttaagttaaaacagatacattctatagtatgtaaattatatttcaacaaagctgttttaataaaaaaaggaaaaatgtgtttactatatcggcttagaaacatgcctcatttctaggaaataaaagatagaggtgagagatgatttactttgagaaaagacattgtgtcacctatgaaattttattaggcacagagtcatattttaaggtagatagttctgtactgctgaaatagtaattttaatgtctttatgttgccacatgttaagaccataatgtagttataaatggaaatgtttacacctgaagtgagtattttcaaattaaaatttaattaagtg

SEQ ID NO: 583477 - DNA, 547 bp, Homo sapiens
tgtgtttaccatactgtataattccatttacatgaagcatccagaaaagataaatgtatagggacaaaaagtagattcatgtttgcaaggggctggggctggaagctggtagtgactgctaatgggcatgaggaatcttacagtgatggaaatgctctaaagttggattgtagagatggctgcacaactcagtaaatgtactaaaaatcttttaactttaagtyaaaacagatacattctatagtatgtaaattatatttcaacaaagctgttttaataaaaaaaggaaaaatgtgtttactatatcggcttagaaacatgcctcatttctaggaaataaaagatagaggtgagagatgatttactttgagaaaagacattgtgtcacctatgaaattttattaggcacagagtcatattttaaggtagatagttctgtactgctgaaatagtaattttaatgtctttatgttgccacatgttaagaccataatgtagttataaatggaaatgtttacacctgaagtgagtattttcaaattaaaat

SEQ ID NO: 583478 - DNA, 547 bp, Homo sapiens
tgtgtttaccatactgtataattccatttacatgaagcatccagaaaagataaatgtatagggacaaaaagtagattcatgtttgcaaggggctggggctggaagctggtagtgactgctaatgggcatgaggaatcttacagtgatggaaatgctctaaagttggattgtagagatggctgcacaactcagtaaatgtactaaaaatcttttaactttaagttaaaacagatacattctatagtatgtaaattatatttcaacaaagctgttttaataaaaaaaggaaaaatgtgtttactatatcggcttagaaacatgcctcatttctaggaaataaaagatagaggtgagagatgatttactttgagaaaagacattgtgtcacctatgaaattttattaggcacagagtcatattttaaggtagatagttctgtactgctgaaatagtaattttaatgtctttatrttgccacatgttaagaccataatgtagttataaatggaaatgtttacacctgaagtgagtattttcaaattaaaat

SEQ ID NO: 583479 - DNA, 557 bp, Homo sapiens
gtgtttaccatactgtataattccatttacatgaagcatccagaaaagataaatgtatagggacaaaaagtagattcatgtttgcaaggggctggggctggaagctggtagtgactgctaatgggcatgaggaatcttacagtgatggaaatgctctaaagttggattgtagagatggctgcacaactcagtaaatgtactaaaaatcttttaactttaagttaaaacagatacattctatagtatgtaaattatatttcaacaaagctgttttaataaaaaaaggaaaaatgtgtttactatatcggcttagaaacatgcctcatttctaggaaataaaagatagaggtgagagatgatttactttgagaaaagacattgtgtcacctatgaaattttattaggcacagagtcatattttaaggtagatagttctgtactgctgaaatagtaattttaatgtctttatgttgccacatgttaagaccataatgtagttataaatggaaatgyttacacctgaagtgagtattttcaaattaaaatttaattaagtg

SEQ ID NO: 583480 - DNA, 537 bp, Homo sapiens
aattgacttttttcctgttaaacagtatttttaagtaatttttgtattkctctgatgaggcaggccagattaaatcagaggagaatgtttcatggaatgttccagaaaattgtcttatttcttcacttttgtgaatggacacagaatctgtgtctatttgtttcacagattctaggttaacttgtacagaaaggccattatactattctttgaaatgtgcatgttttaggttaatttacaaactatttgaaaagttaggcattttctttatctatcttttatttaaaatatactgtaaaactgtagaaatatttagattttatatagcatgtacatcaaaaattaagagttgagaaaattatcttgatcctgcctttggattttaaaaagattcactgagatgtcattcacatatcaggcagttcaaccatttaaaatgtacaactcagtgtctattagtatgttcacagcattttcgtcaccctgaaaagtgaccccacatctcctaggcatgactgcagccttcctccatgtccc

SEQ ID NO: 583481 - DNA, 537 bp, Homo sapiens
aattgacttttttcctgttaaacagtatttttaagtaatttttgtattgctctgatgaggcaggccagattaaatcagaggagaatgtttcatggaatgttccagaaaattgtcttatttcttcacttttgtgaatggacacagaatctgtgtctatttgtttcacagattctaggttaacttgtacagaaaggccrttatactattctttgaaatgtgcatgttttaggttaatttacaaactatttgaaaagttaggcattttctttatctatcttttatttaaaatatactgtaaaactgtagaaatatttagattttatatagcatgtacatcaaaaattaagagttgagaaaattatcttgatcctgcctttggattttaaaaagattcactgagatgtcattcacatatcaggcagttcaaccatttaaaatgtacaactcagtgtctattagtatgttcacagcattttcgtcaccctgaaaagtgaccccacatctcctaggcatgactgcagccttcctccatgtccc

SEQ ID NO: 583482 - DNA, 537 bp, Homo sapiens
aattgacttttttcctgttaaacagtatttttaagtaatttttgtattgctctgatgaggcaggccagattaaatcagaggagaatgtttcatggaatgttccagaaaattgtcttatttcttcacttttgtgaatggacacagaatctgtgtctatttgtttcacagattctaggttaacttgtacagaaaggccattatactattctttgaaatgtgcatgttttaggttaatttacaaactatttgaaaagttaggcattttctttatctatcttttatttaaaatatactgtaaaactgtagaaatatttagatttkatatagcatgtacatcaaaaattaagagttgagaaaattatcttgatcctgcctttggattttaaaaagattcactgagatgtcattcacatatcaggcagttcaaccatttaaaatgtacaactcagtgtctattagtatgttcacagcattttcgtcaccctgaaaagtgaccccacatctcctaggcatgactgcagccttcctccatgtccc

SEQ ID NO: 583483 - DNA, 537 bp, Homo sapiens
aattgacttttttcctgttaaacagtatttttaagtaatttttgtattgctctgatgaggcaggccagattaaatcagaggagaatgtttcatggaatgttccagaaaattgtcttatttcttcacttttgtgaatggacacagaatctgtgtctatttgtttcacagattctaggttaacttgtacagaaaggccattatactattctttgaaatgtgcatgttttaggttaatttacaaactatttgaaaagttaggcattttctttatctatcttttatttaaaatatactgtaaaactgtagaaatatttagattttatatagcatgtacatcaaaaattaagagttgagaaaattatcttgatcctgcctttggattttaaaaagattcactgagatgtcattcacatatcaggcagttcaaccatttaaaatgtacaactcagtrtctattagtatgttcacagcattttcgtcaccctgaaaagtgaccccacatctcctaggcatgactgcagccttcctccatgtccc

SEQ ID NO: 583484 - DNA, 640 bp, Homo sapiens
ttttttgttttcatgaagctttctctgactgttctgtcattgaccttatgtgttagcaatcgttgtctagtctgtgctgaaaaacttagtccttaattttacatggcttttatttttttatggaagataattttctctcattataaatttgcttaatgggggaataatatataatgtgtatgccacctatccttgcatacattgaaaatattttagcttagaagtttgtagcatacaattcaatcatttataccataccaattatttcttcyttgagaccttgacacagtaaggttatattctaaatatagttttagcaattaaatatcaaatctaacccaattagtctaacacaggagatgcgttcaatcacgtgtttatgtttttctctctatgaaaaagaatataaattggccttttttcactatgcagccattactgtgtttctggactgctcccagtctgtcagctgaacagttctggttgcagcttgtctgatgaaggatagcacagcccctcaatctgagtgctcagcagagtgcttgtgaaggcagcaccacagcaacagttgctcagagggaacggattcaggagccttgacttagcaatagagtccagggttttcagctcagtgtcttta

SEQ ID NO: 583485 - DNA, 640 bp, Homo sapiens
ttttttgttttcatgaagctttctctgactgttctgtcattgaccttatgtgttagcaatcgttgtctagtctgtgctgaaaaacttagtccttaattttacatggcttttatttttttatggaagataattttctctcattataaatttgcttaatgggggaataatatataatgtgtatgccacctatccttgcatacattgaaaatattttagcttagaagtttgtagcatacaattcaatcatttataccataccaattatttcttccttgagaccttgacacagtaaggttatattctaaatatakttttagcaattaaatatcaaatctaacccaattagtctaacacaggagatgcgttcaatcacgtgtttatgtttttctctctatgaaaaagaatataaattggccttttttcactatgcagccattactgtgtttctggactgctcccagtctgtcagctgaacagttctggttgcagcttgtctgatgaaggatagcacagcccctcaatctgagtgctcagcagagtgcttgtgaaggcagcaccacagcaacagttgctcagagggaacggattcaggagccttgacttagcaatagagtccagggttttcagctcagtgtcttta

SEQ ID NO: 583486 - DNA, 640 bp, Homo sapiens
ttttttgttttcatgaagctttctctgactgttctgtcattgaccttatgtgttagcaatcgttgtctagtctgtgctgaaaaacttagtccttaattttacatggcttttatttttttatggaagataattttctctcattataaatttgcttaatgggggaataatatataatgtgtatgccacctatccttgcatacattgaaaatattttagcttagaagtttgtagcatacaattcaatcatttataccataccaattatttcttccttgagaccttgacacagtaaggttatattctaaatatagttttagcaattaaatatcaaatctaacccaattagtctaacacaggagatgcgttcaatcacgtgtttatgtttttctctctatgaaaaagaatataaattggccttttttcactatgcagccattactgtgtttctggactgctcccagtctgtcagctgaacagttctggktgcagcttgtctgatgaaggatagcacagcccctcaatctgagtgctcagcagagtgcttgtgaaggcagcaccacagcaacagttgctcagagggaacggattcaggagccttgacttagcaatagagtccagggttttcagctcagtgtcttta

SEQ ID NO: 583487 - DNA, 517 bp, Homo sapiens
ggcatgccacctgcgtaaaayacacaattttgttaagatatacaataaaattattatgctaatagcaaatattttatgtagctcactatgttccatgtagtcttctaagtgcttcatgttagtccccagttaaacacctggttttggaaggctgaggcaggaggattgcttgagcccaggagtttgagaccagccagagcaatatagtgagactctgtctctaaaaaaaaaaaattttttttaaacacttagctgaggcatggtggtgcatgcctgtagtcccagctacattgggaggctgtggtaggagggtcgtttgagcttggaatattgaggctgcagtgagcagtgatcaagccactgcactccagcctaggtagcagaaggagactctgtctcataaataaaacatgttgtatagattcccatagaagtgagttagacatcaggcatagaattattagccgctttgatgtctgccttgggagtaaaacacataataaggggcagctttaaa

SEQ ID NO: 583488 - DNA, 625 bp, Homo sapiens
tgctggtcatgtcagttacgtactattccatccaggaggtgctatttacattgtagtacatacacagtcattgcctaatgagtcatacagagagaaaagtaagttataaattatgtcccccatttgctgcaactctcagtgttaagaatgattcagtgcagctataggagactacttccattggcatgccacctgcgtaaaatacacaattttgttaagatatacaataaaattattatgctaatagcaaatattttatgtagctcactatgttccatgtagtcttctaagtgcttcatgttagtccccakttaaacacctggttttggaaggctgaggcaggaggattgcttgagcccaggagtttgagaccagccagagcaatatagtgagactctgtctctaaaaaaaaaaaattttttttaaacacttagctgaggcatggtggtgcatgcctgtagtcccagctacattgggaggctgtggtaggagggtcgtttgagcttggaatattgaggctgcagtgagcagtgatcaagccactgcactccagcctaggtagcagaaggagactctgtctcataaataaaacatgttgtatagattcccatagaagtgagttaga

SEQ ID NO: 583489 - DNA, 517 bp, Homo sapiens
ggcatgccacctgcgtaaaatacacaattttgttaagatatacaataaaattattatgctaatagcaaatattttatgtagctcactatgttccatgtagtcttctaagtgcttcatgttagtccccagttaaacacctggttttggaaggctgaggcaggaggattgcttgagcccaggagtttgagascagccagagcaatatagtgagactctgtctctaaaaaaaaaaaattttttttaaacacttagctgaggcatggtggtgcatgcctgtagtcccagctacattgggaggctgtggtaggagggtcgtttgagcttggaatattgaggctgcagtgagcagtgatcaagccactgcactccagcctaggtagcagaaggagactctgtctcataaataaaacatgttgtatagattcccatagaagtgagttagacatcaggcatagaattattagccgctttgatgtctgccttgggagtaaaacacataataaggggcagctttaaa

SEQ ID NO: 583490 - DNA, 625 bp, Homo sapiens
tgctggtcatgtcagttacgtactattccatccaggaggtgctatttacattgtagtacatacacagtcattgcctaatgagtcatacagagagaaaagtaagttataaattatgtcccccatttgctgcaactctcagtgttaagaatgattcagtgcagctataggagactacttccattggcatgccacctgcgtaaaatacacaattttgttaagatatacaataaaattattatgctaatagcaaatattttatgtagctcactatgttccatgtagtcttctaagtgcttcatgttagtccccagttaaacacctggttttggaaggctgaggcaggaggattgcttgagcccaggagtttgagaccagccagagcaatatagtgagactctgtctctaaaaaaaaaaaattttttttaaacacttagctgaggcatggtggtgcatgcctgtagtcccagctacattgggaggctgtggtaggagggtygtttgagcttggaatattgaggctgcagtgagcagtgatcaagccactgcactccagcctaggtagcagaaggagactctgtctcataaataaaacatgttgtatagattcccatagaagtgagttaga

SEQ ID NO: 583491 - DNA, 365 bp, Homo sapiens
atgtagtcttctaagtgcttcatgttagtccccagttaaacacctggttttggaaggctgaggcaggaggattgcttgagcccaggagtttgagaccagccagagcaatatagtgagactctgtctctaaaaaaaaaaaattttttttaaacacttagctgaggcatggtggtgcatgcctgtagtcccagctacattgggaggctgtggtaggagggtcgtttgagcttggaatattgaggctgcagtgagcagtgatcaagccactgcactccagcctaggtagcagarggagactctgtctcataaataaaacatgttgtatagattcccatagaagtgagttagacatcaggcatagaatt

SEQ ID NO: 583492 - DNA, 517 bp, Homo sapiens
ggcatgccacctgcgtaaaatacacaattttgttaagatatacaataaaattattatgctaatagcaaatattttatgtagctcactatgttccatgtagtcttctaagtgcttcatgttagtccccagttaaacacctggttttggaaggctgaggcaggaggattgcttgagcccaggagtttgagaccagccagagcaatatagtgagactctgtctctaaaaaaaaaaaattttttttaaacacttagctgaggcatggtggtgcatgcctgtagtcccagctacattgggaggctgtggtaggagggtcgtttgagcttggaatattgaggctgcagtgagcagtgatcaagccactgcactccagcctaggtagcagaaggagactctgtctcataaataaaacatgttgtatagattcccatagaagtgagttagacatcaggcatagaattattagccgctttgatgtctrccttgggagtaaaacacataataaggggcagctttaaa

SEQ ID NO: 583493 - DNA, 509 bp, Homo sapiens
agagggctgggttccatggctcacatctgtaatcccaacactttgggaggctgagaggggtggataacctgaggtcaggagttcaaaaacagcctggccaacatggtgaaaccctgtctctactgaaaatacaaaaattagccaggcgtggtggtgtgcacctgtagtcccagctacttgcsaggcagaggcaggagaatcacttgaacccaggaggtagaagttgcagtaagctgagatggcttactgcatccagcctggatgacacagtgtgactccatctcaaaaaaagaaaaggacaaagtatattggtccaaaaaagaagaaagaatgaaaaaaaggacaaagtatactggttagtatcgtaacagtgagatagtccccctttgagattagaaaataacagtatactcaaagtaacatcaataagaaccaacataaaatagacaagattcactatctacaaaagtaatctgcaccaagtagcaatgtatgagcatgtggtggag

SEQ ID NO: 583494 - DNA, 551 bp, Homo sapiens
ccaaaaggaactttagaacaagatgttcatcatgccatatctctatggaaaaggaaattatttaaaagaaaacaaaggcaaacaattgataatctgattttcatgggaaagttttcattatcaaagaaaaagagggctgggttccatggctcacatctgtaatcccaacactttgggaggctgagaggggtggataacctgaggtcaggagttcaaaaacagcctggccaacatggtgaaaccctgtctctactgaaaatacaaaaattagccaggcgtggtggtgtgcacctgtagtcccagctacttgcgaggcagaggcaggagaatcacttgaacccaggaggtagaagttgcagtaagctgagatggcttactgcatccagcctggatgacacagtgtgactccatctcaaaaaaagaaaakgacaaagtatattggtccaaaaaagaagaaagaatgaaaaaaaggacaaagtatactggttagtatcgtaacagtgagatagtccccctttgagattagaaaataacagtatactcaaagtaac

SEQ ID NO: 583495 - DNA, 560 bp, Homo sapiens
aagtatactggttagtatcgtaacagtgagatagtccccctttgagattagaaaataacagtatactcaaagtaacatcaataagaaccaacataaaatagacaagattcactatctacaaaagtaatctgcaccaagtagcaatgtatgagcatgtggtggagaatattgtctataatatgtgtactagaaggaagagacctcaagaaaaaggtcagagctggaaatgtagattagggaatctaggtcaaagttttgagatttyaggagtcctgagagaatttaaaaagcgaaatagccgccgggcgtggtggccacacccgtaatcccagcactttgggaggccaaggcaggcagatcatgaggtcaggagttcaagaccagtctgaccaacatagtgaaaccccgtctctactaagaatacaaaaaattagctgggtgtggtagcacatgcctgtaatcctagctacttgggaggctgaggcaggagaatcgcttgaatccaggaggtggaggttgcggtgagccgagatcatgccactgcactccaacctgggtga

SEQ ID NO: 583496 - DNA, 570 bp, Homo sapiens
ggaagccacttccatccttaactgtgaaaaatgagtaggggaaggtggtgcattctgggtcccatgattccagactgaccattggccctatttgagtgcagctgctgttaggcagaaactctggactccaaactctcagtaaaacttctgaagacactgctgttgctattgcagctgtcagcaccattgattcagctgagaagaagtccagaatatcacactgacacccacgctgttggttgtgtttttttgaaccagattgaaattaatatctattgtatggttcaatttctatgaagttcaatgtcaagcaaatgtaatttataaagataaaagtaagaacagtggttgcctatagtaatgattggaggttcacaayagagactcctggattctagtaatactcaattcatattcatgtaggttgtgatgacattagtattttacattctaaaaatgtttaatgctatatgctcaagatctgtgtctttcacatgtgcatatcatatttcatatttcaattaataaatcagtaaaaaaagttccacttcaggatacaatactgtagaa

SEQ ID NO: 583497 - DNA, 601 bp, Homo sapiens
tgagcaaatgaaggaagccacttccatccttaactgtgaaaaatgagtaggggaaggtggtgcattctgggtcccatgattccagactgaccattggccctatttgagtgcagctgctgttaggcagaaactctggactccaaactctcagtaaaacttctgaagacactgctgttgctattgcagctgtcagcaccattgattcagctgagaagaagtccagaatatcacactgacacccacgctgttggttgtgtttttttgaaccagattgaaattaatatctattgtatggttcaatttctatgaagttcaatgtcaagcaaatgtaatttataaagataaaagtaagaacagtggttgcctatagtaatgattggaggttcacaatagagactcctggattctagtaatactcaattcatattcatgtaggttgtgatgacattagtattttacrttctaaaaatgtttaatgctatatgctcaagatctgtgtctttcacatgtgcatatcatatttcatatttcaattaataaatcagtaaaaaaagttccacttcaggatacaatactgtagaacaatccaaaatattaattt

SEQ ID NO: 583498 - DNA, 396 bp, Homo sapiens
tttaattgagctattatggttagtatttatttttaaagttctgaatttttttaaaaaattcaatattctatggtatattaacaagattgattggaataatgcatttttttaatgtagtgggttggtgatatgtttttctgctgagaaagaaggctgttcataatcttaaattatattaggttttagaaacaacgaaaattgtgggattcccttaatggctttcttacacttgagttctaaaatrtttatcaatctcaaatatattttacattatgttgaaaaatgactattaatagtttctgctaaaaagaattatcaactttttatgcatcaccatttcagagttgggcttataaaaatatcagtatctgtcctacatatataccaatgtttttc

SEQ ID NO: 583499 - DNA, 518 bp, Homo sapiens
atttaaccactgcctaccagagtagtacatagagaagcaarcctaatctataagcaacaatgagagcatgctacagataacttttaatattgtaaatatatatgatacagatgataaaatctttatgaaataatctataggagaggtgaaatgggtctctgccaggagaatgcaaaggcagtaaaaaattaaaaaccaaaatattgagaattattttgaggaaagtgttagtagaatttaataatacatttaatagaaacataagattaaaaatgcaaagatgaattcaaagttgcttacattcaaaaataactcattaaatgtacagtattttaagcacacttttgatctatgaagagtataaatatgaataagacatagttctttaggctagacatagagaatatttttttgtatagaaataaaatctagagtatgtaatattaggggaaagaaaatgcctcatagatgtcaataaaccttgttccctctatttttttttttactggtttcatttc

SEQ ID NO: 583500 - DNA, 548 bp, Homo sapiens
aacttttaatattgtaaatatatatgatacagatgataaaatctttatgaaataatctataggagaggtgaaatgggtctctgccaggagaatgcaaaggcagtaaaaaattaaaaaccaaaatattgagaattattttgaggaaagtgttagtagaatttaataatacatttaatagaaacataagattaaaaatgcaaagatgaattcaaagttgcttacattcaaaaataactcattaaatgtacagtattttaagcacacttttgatctatgaagagtataaatatgaataagacatagttctttaggctagacatagagaatatttttttgtatagaaataaaatctagagtatgtaatattaggggaaagaaaatgcctcatagatgtcaataaaccttgttccctctatttttttttttactggtttcatttcctgtaataattgtggtaasagtaatgctgaaacaattaaacctccaactcttaaaacaataaaagttattgcttgcttaaagaataggaatgctatctgtgatttcct

SEQ ID NO: 583501 - DNA, 548 bp, Homo sapiens
aacttttaatattgtaaatatatatgatacagatgataaaatctttatgaaataatctataggagaggtgaaatgggtctctgccaggagaatgcaaaggcagtaaaaaattaaaaaccaaaatattgagaattattttgaggaaagtgttagtagaatttaataatacatttaatagaaacataagattaaaaatgcaaagatgaattcaaagttgcttacattcaaaaataactcattaaatgtacagtattttaagcacacttttgatctatgaagagtataaatatgaataagacatagttctttaggctagacatagagaatatttttttgtatagaaataaaatctagagtatgtaatattaggggaaagaaaatgcctcatagatgtcaataaaccttgttccctctatttttttttttactggtttcatttcctgtaataattgtggtaagagtaatgctgaaamaattaaacctccaactcttaaaacaataaaagttattgcttgcttaaagaataggaatgctatctgtgatttcct

SEQ ID NO: 583502 - DNA, 437 bp, Homo sapiens
attggcatttgacaactggctaaaataatttatctaaagactggaatcaatagacaggagtgtaygggttaagataaggtgttttagagaccgaggttcttatgcagatgaagcttgcaggtagcaggcttcactgagaatagattgtaaatgatttttatcagacataaaaaggaaaaaggacttggaatcaggaaaaatcaggaaaaagacttggaaagagaaggggattctctacaaaatggagattttccccacagaaacagccttgtagggccatttcaaaatatgtcaaagaaatgtatttttgtggtgaaatactttgatttctttcaaggcctgctatctgtcatgttgatatcttattgctacgaagagtctgttttgtcattcttaagtctctactttaatgttaacactgttcagctatgcatgaa

SEQ ID NO: 583503 - DNA, 437 bp, Homo sapiens
attggcatttgacaactggctaaaataatttatctaaagactggaatcaatagacaggagtgtatgggttaagataaggtgttttagagaccgaggttcttatgcagatgaagcttgcaggtagcaggcttcactgagaatagattgtaaatgatttttatcagacataaaaaggaaaaaggacttggaatcaggaaaaatcaggaaaaagacttggaaagasaaggggattctctacaaaatggagattttccccacagaaacagccttgtagggccatttcaaaatatgtcaaagaaatgtatttttgtggtgaaatactttgatttctttcaaggcctgctatctgtcatgttgatatcttattgctacgaagagtctgttttgtcattcttaagtctctactttaatgttaacactgttcagctatgcatgaa

SEQ ID NO: 583504 - DNA, 437 bp, Homo sapiens
attggcatttgacaactggctaaaataatttatctaaagactggaatcaatagacaggagtgtatgggttaagataaggtgttttagagaccgaggttcttatgcagatgaagcttgcaggtagcaggcttcactgagaatagattgtaaatgatttttatcagacataaaaaggaaaaaggacttggaatcaggaaaaatcaggaaaaagacttggaaagagaasgggattctctacaaaatggagattttccccacagaaacagccttgtagggccatttcaaaatatgtcaaagaaatgtatttttgtggtgaaatactttgatttctttcaaggcctgctatctgtcatgttgatatcttattgctacgaagagtctgttttgtcattcttaagtctctactttaatgttaacactgttcagctatgcatgaa

SEQ ID NO: 583505 - DNA, 437 bp, Homo sapiens
attggcatttgacaactggctaaaataatttatctaaagactggaatcaatagacaggagtgtatgggttaagataaggtgttttagagaccgaggttcttatgcagatgaagcttgcaggtagcaggcttcactgagaatagattgtaaatgatttttatcagacataaaaaggaaaaaggacttggaatcaggaaaaatcaggaaaaagacttggaaagagaaggggattctctacaaaatggagattttccccacagaaacagcyttgtagggccatttcaaaatatgtcaaagaaatgtatttttgtggtgaaatactttgatttctttcaaggcctgctatctgtcatgttgatatcttattgctacgaagagtctgttttgtcattcttaagtctctactttaatgttaacactgttcagctatgcatgaa

SEQ ID NO: 583506 - DNA, 440 bp, Homo sapiens
gaattcaaagattttctgattggcatttgacaactggctaaaataatttatctaaagactggaatcaatagacaggagtgtatgggttaagataaggtgttttagagaccgaggttcttatgcagatgaagcttgcaggtagcaggcttcactgagaatagattgtaaatgatttttatcagacataaaaaggaaaaaggacttggaatcaggaaaaatcaggaaaaagacttggaaagagaaggggattctctacaaaatggagattttccccacagaaacagccttgtagggccatttcaaaatatgtcaaagaaatgtatttttgtggtgaaatactttgatttctttcaaggcctgctatctgtcatgttgatatcttattgctacgaagrgtctgttttgtcattcttaagtctctactttaatgttaacactgt

SEQ ID NO: 583507 - DNA, 535 bp, Homo sapiens
attctctacaaaatggagattttccccacagaaacagccttgtagggccatttcaaaatatgtcaaagaaatgtatttttgtggtgaaatactttgatttctttcaaggcctgctatctgtcatgttgatatcttattgctacgaagagtctgttttgtcattcttaagtctctactttaatgttaacactgttcagctatgcatgaattccgaaaggatgaaagtaaataacgaggcaygttcaaccacccatttccgtcatggcctccattactgtttcaggtttagtttaaaatgcccttggccaagataaagagcccatttagttggttaacggacattgaattttatttttggcttacatgcaggtgccatgctctccttaggttgctgctccctgccaatgctgagcaaggaagatattatagggcttttcattcttgtcccacatggactcatctaaaggtcaaagttcactttggtgctctttcagtgtggctgacaatttctcagatctgcactcttctctgaggc

SEQ ID NO: 583508 - DNA, 507 bp, Homo sapiens
ataaaactactcagtttagttggtcataatatactcattcctaacttattccactttacaaaaaaagtaaaagaaaagcataaataaataaataaggaaagagaaacaaacaaacaaaaaacattggaaactgacgaggtaacaatttatagaatcaaggattaatttccaccaattatggcatgaataaaactaatcaactaaaatatattttaaaaatcaagaagatagtaggaaaacagctccctgaggacccctggaacagtaattaggcaggcactctttgcctgttggacattaccattttctttaatgtttgtatgaaacgatgccaatttatctttaagcaatttatctttaagttgctaaagtgatgcaaayggctgtcatgtaacaatcaccaagagaggacccattctagttcacaaactgccctgatgctttttataaaaaacaatccacttcaggataatgtgttgttcctggtttctatgtctctttaacttc

SEQ ID NO: 583509 - DNA, 604 bp, Homo sapiens
acagtaattaggcaggcactctttgcctgttggacattaccattttctttaatgtttgtatgaaacgatgccaatttatctttaagcaatttatctttaagttgctaaagtgatgcaaatggctgtcatgtaacaatcaccaagagaggacccattctagttcacaaactgccctgatgctttttataaaaaacaatccacttcaggataatgtgttgttcctggtttctatgtctctttaacttctttaaatcagaagcattccatagtccttcttcaaccttcatagcatcctaaacattttttgaaggtaatattccaatggattctatttttrgaatgtctcccaatttcgatttgtctggtgttttctcataatgaggtgtcaagacatgcattattggcaataaaatcaccaacatgatgctatgctcttcttatcatatttcttcaggttatatatgaaattaatttttcccatcagtggtgattttaattttgatcatttgaaaggtaatgtcttccagatttctctattgcagaggtactcctcattttctttatattaatataacatgacataaaatgatattttttacatata

SEQ ID NO: 583510 - DNA, 270 bp, Homo sapiens
gtacttcaccatgatacagtaagaggaactaaactaaattctttacaaaacaaacaaacaaaaaacaaaaaaacacacacacaaataaaaactaactgcagacaaaatataatcaacagtgattttttaaccattgacaagaagctgaggatgctgatccctgataaaagaaaaaataaaatcttattccaagctttctctcagtttccagaagacayagtgaaaggataatccaaagaaaggataactctccctgtatattgagaaatt

SEQ ID NO: 583511 - DNA, 368 bp, Homo sapiens
gctgtacttcaccatgatacagtaagaggaactaaactaaattctttacaaaacaaacaaacaaaaaacaaaaaaacacacacacaaataaaaactaactgcagacaaaatataatcaacagtgattttttaaccattgacaagaagctgaggatgctgatccctgataaaagaaaaaataaaatcttattccaagctttctctcagtttccagaagacatagtgaaaggataatccaaagaaaggataactctccctgtatattgagaaattgaagattggggcttagaaaggaaaatttagctagaattgcagagctaaatagaagagagagarcatttgcacagagatggtgatatggtatggct

SEQ ID NO: 583512 - DNA, 446 bp, Homo sapiens
tcttttgatttactatttgctayaaggcatcattagaagtttattatatctaaatatttagggatttcattgtagttttggttttttattttaaatttaattctattgggtcagagaacatactctccatgatctaatcctgttaaatttgttgaaaatttattatttgttgcctaacatgtgatgaatgtcagtgcacttggaaaataaaataagtttttgctggtgatgagtataatattctatgcatcctagaacttgttaggttataatgtcattaaatttgtagatattttctttaaaattttttatttacttgtttaataatatcagaaaatagttttcaaatctttaaatatattgtggatttgtatatttttcttttcaattctgtaagtttttggcttgagtattttaaatgcagaattgtttgttaatgtgtgaaa

SEQ ID NO: 583513 - DNA, 446 bp, Homo sapiens
tcttttgatttactatttgctacaaggcatcattagaagtttattatatctaaatatttrgggatttcattgtagttttggttttttattttaaatttaattctattgggtcagagaacatactctccatgatctaatcctgttaaatttgttgaaaatttattatttgttgcctaacatgtgatgaatgtcagtgcacttggaaaataaaataagtttttgctggtgatgagtataatattctatgcatcctagaacttgttaggttataatgtcattaaatttgtagatattttctttaaaattttttatttacttgtttaataatatcagaaaatagttttcaaatctttaaatatattgtggatttgtatatttttcttttcaattctgtaagtttttggcttgagtattttaaatgcagaattgtttgttaatgtgtgaaa

SEQ ID NO: 583514 - DNA, 618 bp, Homo sapiens
tagttttggttttttattttaaatttaattctattgggtcagagaacatactctccatgatctaatcctgttaaatttgttgaaaatttattatttgttgcctaacatgtgatgaatgtcagtgcacttggaaaataaaataagttkttgctggtgatgagtataatattctatgcatcctagaacttgttaggttataatgtcattaaatttgtagatattttctttaaaattttttatttacttgtttaataatatcagaaaatagttttcaaatctttaaatatattgtggatttgtatatttttcttttcaattctgtaagtttttggcttgagtattttaaatgcagaattgtttgttaatgtgtgaaaaaacattttgcattatcaggttctcttgatgaattggaccaattatattgatctttatcctcctaaaaatatttcttgatttgtggcccattttgtctgatattaatagaagtcttcagtttttatatacttagtagttataccatagaaatactgccatcctcttatcttaaaagactccagaaatttgaactttcatgtaaaatattttcaatattaatttataatattttataacattaca

SEQ ID NO: 583515 - DNA, 587 bp, Homo sapiens
cttttatttctggaagactttgcatagagttgttactatttattctttaaacattgtgagaatacaagagtgaaaccttcctgacctggaattattttgtgtgtgagtttcaaattatagatttaatgtatttaatagatgcaggattattcatggtgtctctttatttttaagtgaattttgtaacctcttttctctcaagtaatgtgtccgtttaccaaacttttaaaatgtatttgcataaagtttaaacattgtgtgcttactatcattttataacctatagtataattagtgacagcctttcattactggctttagtatttagcattttttctcttttttgttaagtatagctagaattttttcattttttaataaattagctttttattttattgatattccattttggtgttctttcaatttttattgatttttgttcttatatgtattttattatttctttgtaccttagtacatttcgactgcaatagaaaaatacctttttgttgtggcttataarcaacataattttataatttataataacataaacttataacttataaatttacttctcatag

SEQ ID NO: 583516 - DNA, 587 bp, Homo sapiens
cttttatttctggaagactttgcatagagttgttactatttattctttaaacattgtgagaatacaagagtgaaaccttcctgacctggaattattttgtgtgtgagtttcaaattatagatttaatgtatttaatagatgcaggattattcatggtgtctctttatttttaagtgaattttgtaacctcttttctctcaagtaatgtgtccgtttaccaaacttttaaaatgtatttgcataaagtttaaacattgtgtgcttactatcattttataacctatagtataattagtgacagcctttcattactggctttagtatttagcattttttctcttttttgttaagtatagctagaattttttcattttttaataaattagctttttattttattgatattccattttggtgttctttcaatttttattgatttttgttcttatatgtattttattatttctttgtaccttagtacatttcgactgcaatagaaaaatacctttttgttgtggcttataaacaacataattttataatttataataayataaacttataacttataaatttacttctcatag

SEQ ID NO: 583517 - DNA, 587 bp, Homo sapiens
cttttatttctggaagactttgcatagagttgttactatttattctttaaacattgtgagaatacaagagtgaaaccttcctgacctggaattattttgtgtgtgagtttcaaattatagatttaatgtatttaatagatgcaggattattcatggtgtctctttatttttaagtgaattttgtaacctcttttctctcaagtaatgtgtccgtttaccaaacttttaaaatgtatttgcataaagtttaaacattgtgtgcttactatcattttataacctatagtataattagtgacagcctttcattactggctttagtatttagcattttttctcttttttgttaagtatagctagaattttttcattttttaataaattagctttttattttattgatattccattttggtgttctttcaatttttattgatttttgttcttatatgtattttattatttctttgtaccttagtacatttcgactgcaatagaaaaatacctttttgttgtggcttataaacaacataattttataatttataataacatraacttataacttataaatttacttctcatag

SEQ ID NO: 583518 - DNA, 417 bp, Homo sapiens
ttgtattttgttctcaaacacagttaaattatttggaatyagtttgatgcttttagagattgctataaaattttcttagagaagatgtagagttgctttaggtttaggaatgagtgagttccatcacaaaagcaggattcttccaaagattctacctaatagctcatacattaccctgtcttctactttggtttgtggcaacaataatatttgcagagctttctgagctttgagaattgttcttcaaaccctttgtgttggcattttaccccaggcttcagttattttctctcatgtattcacagtttagtattcaatgaaggactcaataatttcctaggaaggtctgcagacacacggtcatctgtattcattagcatgggctgctataacaaaatgccatagactgagcagctc

SEQ ID NO: 583519 - DNA, 348 bp, Homo sapiens
ctaggaaggtctgcagacacacggtcatctgtattcattagcatgggctgctataacaaaatgccatagactgagcagctcataaaccacagagatgtatttctcagtctaacctcacatggtggaagagggaggggtctctctggcacctttcataagggctccactcccatgatccagtcacctacaaaattgccyattttttaatattatcaccttggtggtgagaattttaatatacaaatttggggaggtcaattagaccagagcataattcttggcagataaaagaagccataagaaagctggtgtgatcagaccagaatgagccagagggaagttttaaga

SEQ ID NO: 583520 - DNA, 589 bp, Homo sapiens
cctcagacacaaaaatctacagatgctcaagacccttccataaaatgatgtataatagtattttatacacctacatccacactgtcacatactttaaatcatctctagatttcttatgataccaagtacaatgtaaatgytatgtagttagttatagtgtgttctttaggggataatgacaaggcagaattccatatgtgttcactttttcataaatgtttttccaaatatttttgatccatgggtggttgaatccacacatgcagaacctatggatatggagggtccactgtacttttttctatcctcctaactacatattggtttctatttttgtctttattaaatcttaaattgtagtcatactacaaattcgatcttttctattgtttcatttttttctatttcttgaacagtattctgtttctgtttcaatgcattagtatccacttatttatgtttaccaaaatattacacagtcaaataattcaggaagactttgaaaatttaaagtcaacagatttgtattagcctcaattatatcatctgtaataaatcagattatcctgtcattaggattaaatattaa

SEQ ID NO: 583521 - DNA, 589 bp, Homo sapiens
cctcagacacaaaaatctacagatgctcaagacccttccataaaatgatgtataatagtattttatacacctacatccacactgtcacatactttaaatcatctctagatttcttatgataccaagtacaatgtaaatgttatgtagktagttatagtgtgttctttaggggataatgacaaggcagaattccatatgtgttcactttttcataaatgtttttccaaatatttttgatccatgggtggttgaatccacacatgcagaacctatggatatggagggtccactgtacttttttctatcctcctaactacatattggtttctatttttgtctttattaaatcttaaattgtagtcatactacaaattcgatcttttctattgtttcatttttttctatttcttgaacagtattctgtttctgtttcaatgcattagtatccacttatttatgtttaccaaaatattacacagtcaaataattcaggaagactttgaaaatttaaagtcaacagatttgtattagcctcaattatatcatctgtaataaatcagattatcctgtcattaggattaaatattaa

SEQ ID NO: 583522 - DNA, 617 bp, Homo sapiens
gtatctggaaacttgtcttcttattttaatgtgccattcatctccttagcacaatttcttacacatatatgttctacaaatgtttattaaatgaattagtgtcaactacatgcatgctttattcattaagctgtcaaaggattgatctgctttacagctttgtcaaactatagaactttaattcttttgccatattttaaaaatmatacatgtttaggtaataataaaatcaatattcatactcataaaataacagattgtaaaagcattgtaggctaaccacatacattttggaaaagaaactgaaattaattcttaaattctttcaaattcttcatcttatttactctttttgttaagtaaatgtttatcttgtattttagttttaagctcttagaatcttcaacaatatagttttttgtacataaaatatttaaatcaacttaatctatgtacatgttataaactaagttcaagtaaaattacataaaatgcaacaatgcattttatttttctattcatatttttctaataaatcttgtaagtttaagtaattattttagttaatgctatgaaattctacctaggcaggtaaggtgtcaatttcccaatttgta

SEQ ID NO: 583523 - DNA, 555 bp, Homo sapiens
cagctttgtcaaactatagaactttaattcttttgccatattttaaaaataatacatgtttaggtaataataaaatcaatattcatactcataaaataacagattgtaaaagcattgtargctaaccacatacattttggaaaagaaactgaaattaattcttaaattctttcaaattcttcatcttatttactctttttgttaagtaaatgtttatcttgtattttagttttaagctcttagaatcttcaacaatatagttttttgtacataaaatatttaaatcaacttaatctatgtacatgttataaactaagttcaagtaaaattacataaaatgcaacaatgcattttatttttctattcatatttttctaataaatcttgtaagtttaagtaattattttagttaatgctatgaaattctacctaggcaggtaaggtgtcaatttcccaatttgtatgcaaactgaacaattttctctgggctcttcatcatttcatctttccacttaactttctctattttaacccaataatatttattgtattttc

SEQ ID NO: 583524 - DNA, 555 bp, Homo sapiens
cagctttgtcaaactatagaactttaattcttttgccatattttaaaaataatacatgtttaggtaataataaaatcaatattcatactcataaaataacagattgtaaaagcattgtaggctaaccacatacattttggaaaagaaactgaaattaattcttaaattctttcaaattcttcatcttatttactctttttgtwaagtaaatgtttatcttgtattttagttttaagctcttagaatcttcaacaatatagttttttgtacataaaatatttaaatcaacttaatctatgtacatgttataaactaagttcaagtaaaattacataaaatgcaacaatgcattttatttttctattcatatttttctaataaatcttgtaagtttaagtaattattttagttaatgctatgaaattctacctaggcaggtaaggtgtcaatttcccaatttgtatgcaaactgaacaattttctctgggctcttcatcatttcatctttccacttaactttctctattttaacccaataatatttattgtattttc

SEQ ID NO: 583525 - DNA, 555 bp, Homo sapiens
cagctttgtcaaactatagaactttaattcttttgccatattttaaaaataatacatgtttaggtaataataaaatcaatattcatactcataaaataacagattgtaaaagcattgtaggctaaccacatacattttggaaaagaaactgaaattaattcttaaattctttcaaattcttcatcttatttactctttttgttaagtaaatgtttatcttgtattttagttttaagctcttagaatcttcaacaatatagttttttgtacataaaatatttaaatcaacttaatctatgtacatgttatmaactaagttcaagtaaaattacataaaatgcaacaatgcattttatttttctattcatatttttctaataaatcttgtaagtttaagtaattattttagttaatgctatgaaattctacctaggcaggtaaggtgtcaatttcccaatttgtatgcaaactgaacaattttctctgggctcttcatcatttcatctttccacttaactttctctattttaacccaataatatttattgtattttc

SEQ ID NO: 583526 - DNA, 617 bp, Homo sapiens
gtatctggaaacttgtcttcttattttaatgtgccattcatctccttagcacaatttcttacacatatatgttctacaaatgtttattaaatgaattagtgtcaactacatgcatgctttattcattaagctgtcaaaggattgatctgctttacagctttgtcaaactatagaactttaattcttttgccatattttaaaaataatacatgtttaggtaataataaaatcaatattcatactcataaaataacagattgtaaaagcattgtaggctaaccacatacattttggaaaagaaactgaaattaattcttaaattctttcaaattcttcatcttatttactctttttgttaagtaaatgtttatcttgtattttagttttaagctcttagaatcttcaacaatatagttttttgtacataaaatatttaaatcaacttaatctatgtacatgttataaactaagttcaagtaaaattacataaaatgcaacaatgcattttatttttctattcatatttttctaataaatcttgtaagtttaagtaattattttagttaatgctatgaaattctacctaggcaggtwaggtgtcaatttcccaatttgta

SEQ ID NO: 583527 - DNA, 555 bp, Homo sapiens
cagctttgtcaaactatagaactttaattcttttgccatattttaaaaataatacatgtttaggtaataataaaatcaatattcatactcataaaataacagattgtaaaagcattgtaggctaaccacatacattttggaaaagaaactgaaattaattcttaaattctttcaaattcttcatcttatttactctttttgttaagtaaatgtttatcttgtattttagttttaagctcttagaatcttcaacaatatagttttttgtacataaaatatttaaatcaacttaatctatgtacatgttataaactaagttcaagtaaaattacataaaatgcaacaatgcattttatttttctattcatatttttctaataaatcttgtaagtttaagtaattattttagttaatgctatgaaattctacctaggcaggtaaggtgtcaatttcccaatttgtatkcaaactgaacaattttctctgggctcttcatcatttcatctttccacttaactttctctattttaacccaataatatttattgtattttc

SEQ ID NO: 583528 - DNA, 546 bp, Homo sapiens
attcagtgatatgaaagacagaatgaaaatgactatcatatattaaactggagtctaatatrttcattagtgagatttactgacatccctaatgaaagacatcaaattctcagattcaggagaaataagacattacactcaagatacataagatgaattcattcctcggcacacctaagttttcatcataacctgtaccttcaatcatcttcattcttcctgacctgatctatttttctcatcgtatttaccaccttcaaacatatggtacacatcctagttactttgggtatcttatattacaatataatctcaaaacagattttgttgattttatttacaagatgtaaccaaagggcctagattatctttatagcacagtatatgttcaaaatttattaccaaataaatataaagtacatttatgaaaggtgaaggagaatataaaacagagggaagatcttcagaactaccacaacaaaatgacacataacttaaatgtcaaaataccaacactgacttcttatcaacagcaataaaaagtaa

SEQ ID NO: 583529 - DNA, 546 bp, Homo sapiens
attcagtgatatgaaagacagaatgaaaatgactatcatatattaaactggagtctaatatgttcattagtgagatttactgacatccctaatgaaagacatcaaattctcagattcaggagaaataagacattacactcaagatacataagatgaattcattcctcggcacacctaagttttcatcataamctgtaccttcaatcatcttcattcttcctgacctgatctatttttctcatcgtatttaccaccttcaaacatatggtacacatcctagttactttgggtatcttatattacaatataatctcaaaacagattttgttgattttatttacaagatgtaaccaaagggcctagattatctttatagcacagtatatgttcaaaatttattaccaaataaatataaagtacatttatgaaaggtgaaggagaatataaaacagagggaagatcttcagaactaccacaacaaaatgacacataacttaaatgtcaaaataccaacactgacttcttatcaacagcaataaaaagtaa

SEQ ID NO: 583530 - DNA, 588 bp, Homo sapiens
tatttttctcatcgtatttaccaccttcaaacatatggtacacatcctagttactttgggtatcttatattacaatataatctcaaaacagattttgttgattttatttacaagatgtaaccaaagggcctagattatctttatagcacagtatatgttcaaaatttattaccaaataaatataaagtacatttatgaaaggtgaaggagaatataaaacagagggaagatcttcagaactaccacaacaaaatgacacataacttaaatgtcaaaataccaacactgacttcttatcaacagcaataaaaagtargaaaaaatttggaaaatatcctcaatgagtttagacacacttctatacattagaggtttataaaacacaaaaactccttttataaatgagtcaaaataatgacattttagacaaagaataacagaaaatttatcatccaaaagcaccttccaaagaaacctcaaaagacaaatttcaaacaaaggaaaatgatcacagataaaagatttgggataaaataaataataatgagaaaaatagaatatatatgggaggtataaaaaagaaaataa

SEQ ID NO: 583531 - DNA, 569 bp, Homo sapiens
taccacaacaaaatgacacataacttaaatgtcaaaataccaacactgacttcttatcaacagcaataaaaagtaagaaaaaatttggaaaatatcctcaatgagtttagacacacttctatacattagaggtttataaaacacaaaaactccttttataaatgagtcaaaataatgacattttagacaaagaataacagaaaatttatcatccaaaagcaccttccaaagaaacstcaaaagacaaatttcaaacaaaggaaaatgatcacagataaaagatttgggataaaataaataataatgagaaaaatagaatatatatgggaggtataaaaaagaaaataaaatttacttcaatacaaaattgaaatgtgtaaagatgttttggtgggggtctccattgctcttcagctttgattatttatttaaaaaactctcagaactcagagaagcaattatactcatgtttacagtttattaaaacaaaaggatgcagagtcgtatcaacaaaggaaaaagattctcagggcaaagtccaggagactccaggcacaaacttacaagtg

SEQ ID NO: 583532 - DNA, 508 bp, Homo sapiens
ctagcaaggagctagtgccagctatccgtggtagcacaaggatggttttgtgctcaactgaaatccagctgaatacagaattgtgtaggaaacagttaatatgttgacagaatagaaacagtagcaaacatgaactaaatcatgccatgaatgcctaaactaccattgggacttttggaagaatgataataccactttactgctctttgaagtrtgaatattttagtgtatatgctgtagaccacaaaccctataaagagtcccaaataagttggctggataaagcctgctgtgcatgtctttatactcaaagtctgatgatgcaattcgaatatgtgtccccaccaaatctcctatttaattatatttcctaatgtggaaggtggatcctggtataaggcaattgatttatgaaggcaaatttctcatgaatggttcagcaccatccccttgtaccatcctcacaatcatgagtgacttctcgtgagatctggccactgaaagctat

SEQ ID NO: 583533 - DNA, 508 bp, Homo sapiens
ctagcaaggagctagtgccagctatccgtggtagcacaaggatggttttgtgctcaactgaaatccagctgaatacagaattgtgtaggaaacagttaatatgttgacagaatagaaacagtagcaaacatgaactaaatcatgccatgaatgcctaaactaccattgggacttttggaagaatgataataccactttactgctctttgaagtgtgaatattttagtgtatatgctgtagaccacaaaccctataaagagtcccaaataagttggctggataaagcctgctgtgcatgtctttatactcaaagwctgatgatgcaattcgaatatgtgtccccaccaaatctcctatttaattatatttcctaatgtggaaggtggatcctggtataaggcaattgatttatgaaggcaaatttctcatgaatggttcagcaccatccccttgtaccatcctcacaatcatgagtgacttctcgtgagatctggccactgaaagctat

SEQ ID NO: 583534 - DNA, 560 bp, Homo sapiens
catgccatgaatgcctaaactaccattgggacttttggaagaatgataataccactttactgctctttgaagtgtgaatattttagtgtatatgctgtagaccacaaaccctataaagagtcccaaataagttggctggataaagcctgctgtgcatgtctttatactcaaagtctgatgatgcaattcgaatatgtgtccccaccaaatctcmtatttaattatatttcctaatgtggaaggtggatcctggtataaggcaattgatttatgaaggcaaatttctcatgaatggttcagcaccatccccttgtaccatcctcacaatcatgagtgacttctcgtgagatctggccactgaaagctatgtcacctccctactctgcgtgttttcctcttgccatgtgagacaactcactctttctttgccttgtacaaagattgaaagatttctgaggcctcccagaatcagaagccctgtgcttcctgtccaccctgcagaaccatgagccaattaaacctctttttcaaaatgaatcaaacagaaaatggcaaatgac

SEQ ID NO: 583535 - DNA, 560 bp, Homo sapiens
catgccatgaatgcctaaactaccattgggacttttggaagaatgataataccactttactgctctttgaagtgtgaatattttagtgtatatgctgtagaccacaaaccctataaagagtcccaaataagttggctggataaagcctgctgtgcatgtctttatactcaaagtctgatgatgcaattcgaatatgtgtccccaccaaatctcctatttaattatatttcctaatgtggaaggtggatcctggtataaggcaattgatttatgaaggcaaatttctcatgaatggttcagcaccatccccttgtaccatcctcacaatcatgagtgacttctcgtgagatctggccactgaaarctatgtcacctccctactctgcgtgttttcctcttgccatgtgagacaactcactctttctttgccttgtacaaagattgaaagatttctgaggcctcccagaatcagaagccctgtgcttcctgtccaccctgcagaaccatgagccaattaaacctctttttcaaaatgaatcaaacagaaaatggcaaatgac

SEQ ID NO: 583536 - DNA, 450 bp, Homo sapiens
tcttgggccaaattctaagtctggccagggccacagaaggctgagtcccctgggtggtaatcctggctgctgcagggaggcccatggtgctcctcccctcccagggctcaggatgaggttcaactgggacaggaccctttaggtatgggacttgtgccccaggagggggcctctgtcacacaggttgggtaagatgtatggcatgctgctggcttccagggctgttgggatgacacattcacccttccctccagggacctcaaaatgaccagcttcccctttgagaatgacttcccaaggcctaggagccatctggggctgcagggcagctgcctgcatgctgccctggcttcttccatgttgtgctggtcactacccaccaaggggggtcagatgcaggcaccatgcagggcrgttgtctctggacctgtgtctttgttatcatggagc

SEQ ID NO: 583537 - DNA, 463 bp, Homo sapiens
cctgtaccatcattatacgttagaagctgtgarcttgctttttatttcagagactcataggaaaaagagaccgtagccttgactcagatgagattttggactttgtaagtttgagttaatgctgaaatgagttaagactcattctggcaaggcatgattgtattttgcaatgtgagaaggacatgatattcatgggatcagggacagaataatatggtttgtctctgtgtccgtatcaaaacccatgtggaattatactccctaatgttagaggtggggcctaggtggaaaaagatttagttataaaagggtgcgggtaggttctccacgaatgataaaggaccatcaccttgatgctgtcctcctgatagcgagtgagttctcatgagatctggttgtttaaaaggctgtggaacctctttcctcactctgtcttcctcctactcctgccttaggaggtatc

SEQ ID NO: 583538 - DNA, 532 bp, Homo sapiens
cctgtaccatcattatacgttagaagctgtgaacttgctttttawttcagagactcataggaaaaagagaccgtagccttgactcagatgagattttggactttgtaagtttgagttaatgctgaaatgagttaagactcattctggcaaggcatgattgtattttgcaatgtgagaaggacatgatattcatgggatcagggacagaataatatggtttgtctctgtgtccgtatcaaaacccatgtggaattatactccctaatgttagaggtggggcctaggtggaaaaagatttagttataaaagggtgcgggtaggttctccacgaatgataaaggaccatcaccttgatgctgtcctcctgatagcgagtgagttctcatgagatctggttgtttaaaaggctgtggaacctctttcctcactctgtcttcctcctactcctgccttaggaggtatctcattgtcttggcttttggtataattaggaggcttcttgattcctcccagaaatggaagacactatgct

SEQ ID NO: 583539 - DNA, 532 bp, Homo sapiens
cctgtaccatcattatacgttagaagctgtgaacttgctttttatttcagagrctcataggaaaaagagaccgtagccttgactcagatgagattttggactttgtaagtttgagttaatgctgaaatgagttaagactcattctggcaaggcatgattgtattttgcaatgtgagaaggacatgatattcatgggatcagggacagaataatatggtttgtctctgtgtccgtatcaaaacccatgtggaattatactccctaatgttagaggtggggcctaggtggaaaaagatttagttataaaagggtgcgggtaggttctccacgaatgataaaggaccatcaccttgatgctgtcctcctgatagcgagtgagttctcatgagatctggttgtttaaaaggctgtggaacctctttcctcactctgtcttcctcctactcctgccttaggaggtatctcattgtcttggcttttggtataattaggaggcttcttgattcctcccagaaatggaagacactatgct

SEQ ID NO: 583540 - DNA, 459 bp, Homo sapiens
aactgccgagagagctgtgcatgtcttcaaggcctttttccctttgtcttggctattagcacagggcttctttatatgcaaatttctgaagtcttcttgaatttttccccttaaatggggttttgtgttattgctacatagccaacctgctatagagatacctgaaaaagtagaagcaggctcagtagtgggtagcaaacaaagattgggagggtttggagggattagagcatgacagaaagatgagggagagggaggaagtgatttaatcatggatgggcaggggtgggtgtggatggaaaaaggggtggktagggtgggaatgagtaggctggctgtagggtggtgggagggtcgtgggtagtaggaagggggagtagcgtgctgcagaggcagagcctcatgtaaaaccattactagggcagtgcacctgtggctttgcaggtttgagcccccatg

SEQ ID NO: 583541 - DNA, 546 bp, Homo sapiens
aaagcttggaagacagcaagatgaggaaaatttgaccactgtagagaattgttaaatacttgcratcagaaggctgacagaaggataaacactgaagttcagacttaaaaggtctcagatgaagattaggaatttcctgtgaacaggagccatggttacatttgattggccttagcaaagaacgtggctgcacggtgaccctgccctggacatctatgaaactatgaatttgggggtgatgatttaggatgtatctggtggaatgaacatctaggcagcatagcgaggtgtcctgtctgcattgaatagcctgtgttcttatgcgtgacctaagaaatgacttcaagttggaacttctattgaaatgagaagtggagacctaaagtttggaaaatctgcagcctggccaagtggtcaaaaagaaaagatgattttccgggggaaaattcaaggaggcttagagtatctgcataaaaagaagcccagtgcaaatagccaagacaatgggaaagaggcctcgaaggcatttcacagtcctctgcagca

SEQ ID NO: 583542 - DNA, 546 bp, Homo sapiens
aaagcttggaagacagcaagatgaggaaaatttgaccactgtagagaattgttaaatacttgcaatcagaaggctgacagaaggataaacactgaagttcagacttaaaaggtctcagatgaagattaggaatttcctgtgaacaggagccatggttacatttgattggccttagcaaagaacgtggctgcacggtgaccctgccctggacatctatgaaactatgaatttgggggtgatgatttaggatgtatctggtggaatgaacatctaggcagcmtagcgaggtgtcctgtctgcattgaatagcctgtgttcttatgcgtgacctaagaaatgacttcaagttggaacttctattgaaatgagaagtggagacctaaagtttggaaaatctgcagcctggccaagtggtcaaaaagaaaagatgattttccgggggaaaattcaaggaggcttagagtatctgcataaaaagaagcccagtgcaaatagccaagacaatgggaaagaggcctcgaaggcatttcacagtcctctgcagca

SEQ ID NO: 583543 - DNA, 616 bp, Homo sapiens
tttatgtcaatatcatgggctttctggtggaggagataacataggttgatacctgaaggacaaggaaaagcttgccagatagagggaagaggcgaaggcaaagagcctgaggtgaggaagagccctgcggagttctactctcctccactttggtgctagagcaaagggtagagtgcggtaagtggcaaaaaacaaggctgagtaacttgacaagaatcacattgacgtgggtgtttttatttcatggtgaaaattttggaacttttcctgagaacagatgtaagccaatgacacagtaaatgataggagatttaaaatgtcacctgtcaagtgactgcttatgaagggttattgcccagctaagratttcaaaatgagtctgaggtctgttggccttcaatctgtaccaaaaccctgagaacttggtgatgcctttgttttctgagaattgtttcagtgtgctggctgacagttccatgatgatggcaaaacttaagaaagtgtagagccagtaaaaaacagatgcacagacttcttgggaattttttaagctatggaacatgatgaatttatggtgcataagtacagtcttctctgtgaaagtttttgttttcac

SEQ ID NO: 583544 - DNA, 616 bp, Homo sapiens
tttatgtcaatatcatgggctttctggtggaggagataacataggttgatacctgaaggacaaggaaaagcttgccagatagagggaagaggcgaaggcaaagagcctgaggtgaggaagagccctgcggagttctactctcctccactttggtgctagagcaaagggtagagtgcggtaagtggcaaaaaacaaggctgagtaacttgacaagaatcacattgacgtgggtgtttttatttcatggtgaaaattttggaacttttcctgagaacagatgtaagccaatgacacagtaaatgataggagatttaaaatgtcacctgtcaagtgactgcttatgaagggttattgcccagctaaggatttcaaaatgagtctgaggtctgttggccttcaatctgtaccaaaaccctgagaacttggtgatgcctttgttttctgagaatygtttcagtgtgctggctgacagttccatgatgatggcaaaacttaagaaagtgtagagccagtaaaaaacagatgcacagacttcttgggaattttttaagctatggaacatgatgaatttatggtgcataagtacagtcttctctgtgaaagtttttgttttcac

SEQ ID NO: 583545 - DNA, 476 bp, Homo sapiens
aataagtagttttccaaccctggcccactctgtccctccctgttcttatttcccagtgtctattgttcccaggtttatgacaatgtgcacccaatgtgtagctcccacataagtgaaaacatgagatatttggtttctgtttctgtgttagtttgcttaggatagtggattccagctgtatccatgttgctgcaaaggacatgattttgttcttttcttggctgcatagtattccatggtatgtatggaacattccaatctaccttggattttcaatctgcyttggatgcacctggattgactccatgtctttgctgctttgaatagtgctgcaatgaacacacatgtgcaagcatctttttattaaaatgatttattgtcctttaggtatacccctagtatagtaatgggattgctgcatccaacggtcatccttagttcttaatttccaaactgctctccatagtagctgaatt

SEQ ID NO: 583546 - DNA, 476 bp, Homo sapiens
aataagtagttttccaaccctggcccactctgtccctccctgttcttatttcccagtgtctattgttcccaggtttatgacaatgtgcacccaatgtgtagctcccacataagtgaaaacatgagatatttggtttctgtttctgtgttagtttgcttaggatagtggattccagctgtatccatgttgctgcaaaggacatgattttgttcttttcttggctgcatagtattccatggtatgtatggaacattccaatctaccttggattttcaatctgctttggatgcacctggattgactccatgtctttgctgctttgaatagtgctgcaatgaacacacatgtgcaagcatctttttattamaatgatttattgtcctttaggtatacccctagtatagtaatgggattgctgcatccaacggtcatccttagttcttaatttccaaactgctctccatagtagctgaatt

SEQ ID NO: 583547 - DNA, 548 bp, Homo sapiens
tggtgagatcttggctcactccaatctccatttcctgggctcaggtgatcctcacacctcagccatccaagtagtttaaacaatagagctatgtcaccatagacctgtgtcaccatgctcagctgagttttgtagagacagggttttgccttgttgcccaggctggtctttaactgttgggctcaagtgttctgcctgcctcagcctctcaaagtgctgggttacaggcataagayattcagccttaatagttgtttaatctgaataaatagacaaatgaatttttatataatggaatgttataagtaatataataaacctaatgtatctaataattaaatattgtatttaaaatattgcttacattgtattttttaatatttaagggtgtataagttttgatatgttatgttgagaaattatgccataattaaaaaggaaataaaatagaaataggtcatcagtagcaaatagggttacaatatattttctagtatcattcaactggaatcttaacattgagattttagattaacatttcttaagct

SEQ ID NO: 583548 - DNA, 548 bp, Homo sapiens
tggtgagatcttggctcactccaatctccatttcctgggctcaggtgatcctcacacctcagccatccaagtagtttaaacaatagagctatgtcaccatagacctgtgtcaccatgctcagctgagttttgtagagacagggttttgccttgttgcccaggctggtctttaactgttgggctcaagtgttctgcctgcctcagcctctcaaagtgctgggttacaggcataagacattcagccttaatagttgtttaatctgaataaatagacaaatgaatttttatataatggaatgttataagtaatataataaacctaatgtatctaataattaaatattgtatttaaaatattgcttacrttgtattttttaatatttaagggtgtataagttttgatatgttatgttgagaaattatgccataattaaaaaggaaataaaatagaaataggtcatcagtagcaaatagggttacaatatattttctagtatcattcaactggaatcttaacattgagattttagattaacatttcttaagct

SEQ ID NO: 583549 - DNA, 543 bp, Homo sapiens
aaataactcaagagaaaataggtagaaataggtagagttgggatagaagccttggaagctacccccgtaccttgcccacctggcacaggccgaggaagtcctgggacaatgctgtgagcgacctgagggccgtccaggggagccccgccagcccatgctggcgcccgagctgcccgccgccatctgaatatgttgcaaagacagtgctggcctggcaaccggtgaygctccacgccccacctcgacccccacttctacccaagtagtggcaacgctagagacagatgcctgggcggcagcggttaagtctggcagttggccaggcggccaaaggacgggaactggctgttcaccccatcccagttccacagagaactcaaccactatggcccctgagcggaccttcaggcctggtgggctgtgctctgtgcccgcaaacttgacgccatccaggggagctccgccttcccgcgccagcgcctcagctgctgcagaaaactgcaaaactgcaagttgcacacgggcagagatgacggagcaacc

SEQ ID NO: 583550 - DNA, 282 bp, Homo sapiens
ggctcactgcagtatccacctctcaggctcaagtgatcctcccacatcagcttcccaagcagctgggactacaggcrcacaccatcatgcctgactccttttggtattttttgagtagagatgtgttctcattatgttgcccaggctggtctcaaactcctgaactcaagcaatccacccaccttggccttgcaaagggctgagattacaggtgtgagccaccatgcctgggcaacattgagattgatttaaagaaattgattagggctgggtgtggtggtg

SEQ ID NO: 583551 - DNA, 564 bp, Homo sapiens
agtctgtggtaattcagtgttttcttttttgataaatattttgatatcggaagcttattcgacatggtttattttatgtgttttatggaccgccttgcatgagtggatcaaggagctctaactcaaggccaaatgaggggayaggagaaatgtaggtgctgcagtagcccatgtgatcatgggaaaaatgagtagtttgattagctgtcatttcataagtgtgtatactagctgatcaatgtagaacactttctttgatgagaggtgaatcacactttcacctgaactgtcatcccaactgtgtatttcctcagtgacaagacgaggggaatttgtttgtggcatgctggcagcaatgcctctgctgtgttgagttaaaatactctgtacattcaccatcagctttgacgtcgattccctcaggtttgatttgctcctctgtttaatggtcccttttctcctcatcagtccacgtgttcacggtgatatccatgcttttctattttaggtataggcatttgaaacataatctcactactgaaatgtaaactgtgcattttagga

SEQ ID NO: 583552 - DNA, 564 bp, Homo sapiens
agtctgtggtaattcagtgttttcttttttgataaatattttgatatcggaagcttattcgacatggtttattttatgtgttttatggaccgccttgcatgagtggatcaaggagctctaactcaaggccaaatgaggggataggagaaatgtaggtgctgcagtagcccatgtgatcatgggaaaaatgagtagtttgattagctgtcatttcataagtgtgtatactagctgatcaatgtagaacactttctttgatgagaggtgaatcacactttcacctgaactgtcatcccaactgtgtatttcctcagtgacaagacraggggaatttgtttgtggcatgctggcagcaatgcctctgctgtgttgagttaaaatactctgtacattcaccatcagctttgacgtcgattccctcaggtttgatttgctcctctgtttaatggtcccttttctcctcatcagtccacgtgttcacggtgatatccatgcttttctattttaggtataggcatttgaaacataatctcactactgaaatgtaaactgtgcattttagga

SEQ ID NO: 583553 - DNA, 661 bp, Homo sapiens
caatatagtttgtgaatgtccagtggatcatgagcccttgatgggaaaatgacctttcaagtttcacttttgcatttttttgctcttttccttgacttgtcttaaaagcttaaattcaaccgttttatttttacagaaaccgggaatataacttttaaaatttatgtctgtcctgtctcacggtgttgtgtactcttcagatcttgtgtgaatatagacttatgtgggaacaattaggtgttttgtttgtttgtgtttttgagacagagtcttgctctgtcaccaaggctgcagtgcagtggctcggtcttgactcattaccacctctgcctctcgggttcaagcaattctcctgcctcagcccctcgagtagctgatactacctgcatgtgctaccataccctgctaaattctctatttttagtagagatggggtttcaccatgttggccaggctgctctcaaactcctgatctcaggtgatctgcctgcctcagcttgccagtatgctgggattacaggcaggarccactgtgccaggtacaaataagatttttaaggctattatattttatacaattctttggtctatgtgaattctgaaggtattcatgcattgagggaagatcatctcagtttaatgaaagcagtttttaatgtat

SEQ ID NO: 583554 - DNA, 620 bp, Homo sapiens
aagcttcgaaagtacttagtgacaaaaactaacagatcaggttaactacatgagacttttcaggggaaaaaagtcatacaaaagcaaaaaaaaaaagagagagagagagaaagaaatgggacagaaactatccttgactaacattttaaaggtaagattatttactaacattattttctgaaattacattattagattagcattcacttcctactaatctcctgaagccatctcactaaaaattatgctttcaaaacaaattaatgagcttaattcattttctatgagtgtatgtttygacttactttgttaacttttttgacatggaattgttagctttcaatgctgctgcaaaggcttccttatattcttctaattcggttgtaacctcttcataagcagttttcatttctgagaatttacattccacatctttaagtgtgagttcctttttatttagtgaagccatattatccttgtttaactgctctaattgtttttcatattgtgcttgttcctaaaacaaaggaaaagaatacacttttaaaacaattataacctaattattatatgtttgttgcctttcattttgagtcagtgattcaaagagcaattgtgaa

SEQ ID NO: 583555 - DNA, 614 bp, Homo sapiens
acagatcaggttaactacatgagacttttcaggggaaaaaagtcatacaaaagcaaaaaaaaaaagagagagagagagaaagaaatgggacagaaactatccttgactaacattttaaaggtaagattatttactaacattattttctgaaattacattattagattagcattcacttcctactaatctcctgaagccatctcactaaaaattatgctttcaaaacaaattaatgagcttaattcattttctatgagtgtatgtttcgacttactttgttaayttttttgacatggaattgttagctttcaatgctgctgcaaaggcttccttatattcttctaattcggttgtaacctcttcataagcagttttcatttctgagaatttacattccacatctttaagtgtgagttcctttttatttagtgaagccatattatccttgtttaactgctctaattgtttttcatattgtgcttgttcctaaaacaaaggaaaagaatacacttttaaaacaattataacctaattattatatgtttgttgcctttcattttgagtcagtgattcaaagagcaattgtgaatatgttagtaaaagaggctgaagct

SEQ ID NO: 583556 - DNA, 582 bp, Homo sapiens
tgaagcttaaaatatttatcagcaagatcaaaactaataactgaatttagaattgtctgatttataaaaatttgaaatcataattatgttagtattaatgtaatctggtcatataaaaagtaatagaatccattcataattttaaaaagtgattaatgaacaatgtagcttaagaccaattcaaaagtatcacataattttgaaatcacaattgtttcttatgccaactgatcttaatcatcaaatgactccacagtgagaatcattactctgaaagattgattttgttataataataatggaaatgtaaatatttaaaagaaaaaacagatgccattttttttctagaactctacaaagcaaattgctacaagagaggcagaggaaacataatatatacatatccaaaatataatttgyggtgaaataaatgaaagcacattacagataaacttacctgatttaaaaaactaacctgtaaatggatttcttctaatttttctactgcctgcattgccttttcatctagctccaatttatattcttgtagtttactaatttctaccctattgttttccatat

SEQ ID NO: 583557 - DNA, 582 bp, Homo sapiens
tgaagcttaaaatatttatcagcaagatcaaaactaataactgaatttagaattgtctgatttataaaaatttgaaatcataattatgttagtattaatgtaatctggtcatataaaaagtaatagaatccattcataattttaaaaagtgattaatgaacaatgtagcttaagaccaattcaaaagtatcacataattttgaaatcacaattgtttcttatgccaactgatcttaatcatcaaatgactccacagtgagaatcattactctgaaagattgattttgttataataataatggaaatgtaaatatttaaaagaaaaaacagatgccattttttttctagaactctacaaagcaaattgctacaagagaggcagaggaaacataatatatacatatccaaaatataatttgtggtgaaataaatgaaagcacattacagataaacttacctgatttaaaaaactaacctgtaaatggatttcttctaatttttctactgcctgcaytgccttttcatctagctccaatttatattcttgtagtttactaatttctaccctattgttttccatat

SEQ ID NO: 583558 - DNA, 588 bp, Homo sapiens
tacttttatttttctgataattcatttttgttcctccttagatggcactaagttatctcttagtaaaaagtgtctaaccaccttccctcattatcattccccataatatgtcaaaaaaaaagtttcagagatatcatattgagttatttaggccaaagtcaataaatggctctcagaataagactttgaaaataatataacactctatactaggcatggtggctcattcctgtaattgtagcaatttaaaagcctgtgccagaatgatcacttgaggccagaatttgagatcagccagagcaacatagtgagacccccatgtctacaaaattttttttttaaattagctgggcatggtggctcatgcctstagacccagctagttgggagactgaggcaaaaggatggcttgtacccagagttcagggctgcagtgaattatgaccacatcaccgcacttctgcctggatgacagacaaagaccatatctcaaaaaaacacaaaataatgaatcctgtaaataaggattctgatgccataagcctttccttaaactgcaaatgtttcatgctaatttgaattgcattt

SEQ ID NO: 583559 - DNA, 623 bp, Homo sapiens
atcatctttgccacagaacttttgcacttcatcttacttttatttttctgataattcatttttgttcctccttagatggcactaagttatctcttagtaaaaagtgtctaaccaccttccctcattatcattccccataatatgtcaaaaaaaaagtttcagagatatcatattgagttatttaggccaaagtcaataaatggctctcagaataagactttgaaaataatataacactctatactaggcatggtggctcattcctgtaattgtagcaatttaaaagcctgtgccagaatgatcacttgaggccagaatttgagatcagccagagcaacatagtgagacccccatgtctacaaaattttttttttaaattagctgggcatggtggctcatgcctgtagacccagctagttgggagactgaggcaaaargatggcttgtacccagagttcagggctgcagtgaattatgaccacatcaccgcacttctgcctggatgacagacaaagaccatatctcaaaaaaacacaaaataatgaatcctgtaaataaggattctgatgccataagcctttccttaaactgcaaatgtttcatgctaatttgaattgcatttt

SEQ ID NO: 583560 - DNA, 495 bp, Homo sapiens
ccaaggcaggagaatcacttgaggccaaagttccagagcaccctggacaacataggtagatagctctacaaagtcaaaaatcagacaggtgcaatggtgcatgcccataatcctagctgctcaggagggtgaggtcagaggatcacatgagcccaagagtttgaggctgcagtgagctatgatcaagccactgtctctagtctgggtgactacagatgcccagagcccagactggactagcaaggccctgtctcttaacaacaacaaaaaagctcacagaggtaggggaggggaggatgttaatggataccgaattacagttagataagaggaakgagttctggtgttctgtggcattgtagggtgaatatggttaactatgatttattgtatatttttaaaaaggcagaagattttgaatgttcacaattcaaaaaatgaaaaatggttgaagtagtaaatgtgctagttagctcgatcattacacactatata

SEQ ID NO: 583561 - DNA, 548 bp, Homo sapiens
ctgcctgctccaaccaaggttccagccaatggccagcatcaaccatcaaacacatgggtgagcaaagcttcagaggattccatttccccaactgataagctattcctagggaagctgaggggagcagagatgacctgtcctggctaagcttttttcaaaccacaggttcatgaacaaaataaatgtttttcttttaagccacaaaaccctggataattgttagaaaaataagttttaaaaagagacaacaggaaacataacttatgcagagaaaagagtctcctttaaagtaggatytaataaatgttgagattaatttattgatgacaaacattattgagaagcagtagataaccaggagagagacataagctgctgaggaggaacatttcctaaaacccccttcaattatgaactctgataacaagacaagggtgtctccttacaatttcccctcaagttaggaaataagactgcaaagaaagaagaagtatgatttgaaaaacaactagaaatacttggttagataaccaaaatcagacatttgc

SEQ ID NO: 583562 - DNA, 634 bp, Homo sapiens
ctgctttccctttgaactcagcccccagattgtgagtgagatcaggccagagagacagcctgggagtgtcagtgtcaatattcatgctgcctgctccaaccaaggttccagccaatggccagcatcaaccatcaaacacatgggtgagcaaagcttcagaggattccatttccccaactgataagctattcctagggaagctgaggggagcagagatgacctgtcctggctaagcttttttcaaaccacaggttcatgaacaaaataaatgtttttcttttaagccacaaaaccctggataattgttagaaaaataagttttaaaaagagacaacaggaaacataacttatgcagagaaaagagtctcctttaaagtaggatttaataaatgttgagattaatttattgatgrcaaacattattgagaagcagtagataaccaggagagagacataagctgctgaggaggaacatttcctaaaacccccttcaattatgaactctgataacaagacaagggtgtctccttacaatttcccctcaagttaggaaataagactgcaaagaaagaagaagtatgatttgaaaaacaactagaaatacttggttagataaccaaaatcagacatttgc

SEQ ID NO: 583563 - DNA, 548 bp, Homo sapiens
ctgcctgctccaaccaaggttccagccaatggccagcatcaaccatcaaacacatgggtgagcaaagcttcagaggattccatttccccaactgataagctattcctagggaagctgaggggagcagagatgacctgtcctggctaagcttttttcaaaccacaggttcatgaacaaaataaatgtttttcttttaagccacaaaaccctggataattgttagaaaaataagttttaaaaagagacaacaggaaacataacttatgcagagaaaagagtctcctttaaagtaggatttaataaatgttgagattaatttattgatgacaaacattattgagaagcagtagataaccaggagagagacataagctgctgaggaggaacatttcctaaaacccccttcaattatgaactctsataacaagacaagggtgtctccttacaatttcccctcaagttaggaaataagactgcaaagaaagaagaagtatgatttgaaaaacaactagaaatacttggttagataaccaaaatcagacatttgc

SEQ ID NO: 583564 - DNA, 548 bp, Homo sapiens
ctgcctgctccaaccaaggttccagccaatggccagcatcaaccatcaaacacatgggtgagcaaagcttcagaggattccatttccccaactgataagctattcctagggaagctgaggggagcagagatgacctgtcctggctaagcttttttcaaaccacaggttcatgaacaaaataaatgtttttcttttaagccacaaaaccctggataattgttagaaaaataagttttaaaaagagacaacaggaaacataacttatgcagagaaaagagtctcctttaaagtaggatttaataaatgttgagattaatttattgatgacaaacattattgagaagcagtagataaccaggagagagacataagctgctgaggaggaacatttcctaaaacccccttcaattatgaactctgataacaagrcaagggtgtctccttacaatttcccctcaagttaggaaataagactgcaaagaaagaagaagtatgatttgaaaaacaactagaaatacttggttagataaccaaaatcagacatttgc

SEQ ID NO: 583565 - DNA, 558 bp, Homo sapiens
caatgaacttcaaaattgaaaactgctgtgcttgagaagacagtatcaagaagtgaaaaggtaagatactgagtagaagaaagtatttgaaaagcatgtatctgataagggacttacatatgtaggatatataaagaacctttgcaattcataaataacaagataacccaatttaaaaaatgggcaaagattttgaatagatatatttgcaaagaagatataaagatggataataagcacattaatagatgcttaatgtaattagtcattaggaaaaagtaaatcaaaaccacgtgtggtatcacttcacaccacaggatgaaacctttattcaataaaaaagagaaaataagtgttaggaaaaatgtaaagaaattaaagcccttatccaatgctgctggggatgtaaagtggtgcagccactttggaaaacaaactggcagctcctcaaaaggttaagcatgaagttaccacaygacccagaaattccagtcatgagtatatactccagaaaatcaaaaacatatgcaagcacaaaaattcatacataaatgttta

SEQ ID NO: 583566 - DNA, 492 bp, Homo sapiens
gtaattagtcattaggaaaaagtaaatcaaaaccacgtgtggtatcacttcacaccacaggatgaaacctttattcaataaaaaagagaaaataagtgttaggaaaaatgtaaagaaattaaagcccttatccaatgctgctggggatgtaaagtggtgcagccactttggaaaacaaactggcagctcctcaaaaggttaagcatgaagttaccacacgacccagaaattccagtcatgagtatatactccagaaaatcaaaaacatatgcaagcacaaaaattcatacrtaaatgtttacagcagcattattagtaagagtgaaaagtggaaagaaccaaaatgtccatcacctttgggtgggaaagaacccaaaggtccatcacctggtgaatggataaataaactgtttgatgtatccatacaatggaatatcactcagcaataagaagaaactaagtactgatactgtattaggaggagacagcaaa

SEQ ID NO: 583567 - DNA, 492 bp, Homo sapiens
gtaattagtcattaggaaaaagtaaatcaaaaccacgtgtggtatcacttcacaccacaggatgaaacctttattcaataaaaaagagaaaataagtgttaggaaaaatgtaaagaaattaaagcccttatccaatgctgctggggatgtaaagtggtgcagccactttggaaaacaaactggcagctcctcaaaaggttaagcatgaagttaccacacgacccagaaattccagtcatgagtatatactccagaaaatcaaaaacatatgcaagcacaaaaattcatacataaatgtttacagcagcattattartaagagtgaaaagtggaaagaaccaaaatgtccatcacctttgggtgggaaagaacccaaaggtccatcacctggtgaatggataaataaactgtttgatgtatccatacaatggaatatcactcagcaataagaagaaactaagtactgatactgtattaggaggagacagcaaa

SEQ ID NO: 583568 - DNA, 616 bp, Homo sapiens
aatgtgaaatgcagaattcactgctttggatttctgaaaatctgtttggaaaggggagagttattgttcctcttttttgttgaccaatttccctttgctttctctgcttgctcctctctggaaataggatgaaatgccctgagttgggtttagcaacttgaagaccattggaaagattgtccctacaacaaaaccttcaatctacaagatttctccctccccaatggcatgttgtgtatccctggctgccgtggactatttctggacttgtttcatgaaactaacccctagtagaactaagaaacattttaggagagaagtttacaacagattaaatgataaacctaaaaaatgaataaaacatattataaaaataaagaggatagacaaaacgggcttgcagatgctgactggccacactcatccttggtgcttgcccccatggatgmctcactgactgtgacacttggagagctggcagccatcactcaaaaatcagaacacagtggcctctactgcagcatcagggaacaaaaactaagcttgtcagctctcaagaaacatacttatgtgtgtgtgtgtgtgtgtgtgtgtgtgtgtatatatatatatatat

SEQ ID NO: 583569 - DNA, 534 bp, Homo sapiens
atgggcttctgtctcagtgggatcaggggtcaactaatatcaaccaaggctcattctgtcccttcatttcctatgtcagctctgcttttcaggcaagctgttttgagagagcagcaaaaatggctccataaagttcacatcacttacttccttacaaatagatatgccaataaaaagaaagcacctcattcccagcagtttcatcaaaagttcagggatgacttccatgagcccagcttggatcacatgaccactcctgaatcaattaccctgctgatctgattgcccagggtgggtcagccttcccaaatcacatggactagtattgaaagacaggtcctcccatgaaaaaaaaaaaaaaaaaaaaaaaggaagggtagtggcagargaatatgagtggggggggcctcatctctatataaaaagtatgagcgtatttgtgctcttttgtacattcatttgtatagtcactgggaaaaaaatgagaaaaacccaaacacggctttctatatgcctctgtgctttgttttcaac

SEQ ID NO: 583570 - DNA, 586 bp, Homo sapiens
gtacttatcaatctttgttagttaccaaagttaaacacattttttgaatcaactagccatatgtatgtttttctctgaccaactttccattaccaccataaaacaatgataggtaaaccactgctaaatttgaaaagtaaatactaygcaaaagtacattcagagtgagaaaattaattttacaagagaccactttaccttagtagcaacattcaagtctttgtcatccgatgcaggcaatgaatccacacgcagttcatggaaaatgcttgagagcaaaaacacacaacgaaaatgagcaagttgatttctttacaatttttttaactgccagtttatatccagcttccccctcaaaaaaagaaaccataatctagggaaaggtcagcaatctatatattagtgattcttgatataattaaaatatgtcctcttctaaaaatagattttagttacctatttctgcctccacttgtctaaatctataaaatattcaatgaaaactaaccttgagctttataacaaatagtgacagtcaataaattggcagagcctgacaatgatttgccctcacaaattatctgtc

SEQ ID NO: 583571 - DNA, 586 bp, Homo sapiens
gtacttatcaatctttgttagttaccaaagttaaacacattttttgaatcaactagccatatgtatgtttttctctgaccaactttccattaccaccataaaacaatgataggtaaaccactgctaaatttgaaaagtaaatactacgcaaaagtacattcagagtgagaaaattaattttacaagagaccactttaccttagtagcaacattcaagtctttgtcatccgatgcaggcaatgaatccacacgcagttcatggaaaatgcttgagagcaaaaacacacaacgaaaatgagcaagttgatttctytacaatttttttaactgccagtttatatccagcttccccctcaaaaaaagaaaccataatctagggaaaggtcagcaatctatatattagtgattcttgatataattaaaatatgtcctcttctaaaaatagattttagttacctatttctgcctccacttgtctaaatctataaaatattcaatgaaaactaaccttgagctttataacaaatagtgacagtcaataaattggcagagcctgacaatgatttgccctcacaaattatctgtc

SEQ ID NO: 583572 - DNA, 586 bp, Homo sapiens
gtacttatcaatctttgttagttaccaaagttaaacacattttttgaatcaactagccatatgtatgtttttctctgaccaactttccattaccaccataaaacaatgataggtaaaccactgctaaatttgaaaagtaaatactacgcaaaagtacattcagagtgagaaaattaattttacaagagaccactttaccttagtagcaacattcaagtctttgtcatccgatgcaggcaatgaatccacacgcagttcatggaaaatgcttgagagcaaaaacacacaacgaaaatgagcaagttgatttctttacaatttttttaactgccagtttatatccagcttccccctcaaaaaargaaaccataatctagggaaaggtcagcaatctatatattagtgattcttgatataattaaaatatgtcctcttctaaaaatagattttagttacctatttctgcctccacttgtctaaatctataaaatattcaatgaaaactaaccttgagctttataacaaatagtgacagtcaataaattggcagagcctgacaatgatttgccctcacaaattatctgtc

SEQ ID NO: 583573 - DNA, 673 bp, Homo sapiens
gatttgccctcacaaattatctgtcctgaagctgaacttaaaattcaattaatggatgacataaattttgttacctaaactggaagaaaactaataacctaaaacaaggtagaaagatccactgtctcttttccatgatctgtctctggataaaagactaatctgcatcacttcaatatgrcagtcttgattcctcagcatggaacccacttaggaaggtcctattgctttcctttgccctaaatcagtacaggaaagcccctacaatatttgaaatgtatgaaagctaaatgtacagaagtcaaataacaaaggtgtatgttcttattgagaatacttttcccagaaagattgaaatattaacaattataaaatcccattattttcaacctataggtcctaccttattcaggtccacataaactagcaagcccttaaaacttttcataggcactcagacacccaaggagagagactgtcagaaaaaaacagagtcctggtaggtgtacctctatttccctaagtactctctaagtatctgtcttcctatgggctcccacttccagattccacttctgcagggctccacagaagtctccaatctttaaatcttcagtctatgaaagcacagattcctgaaaggatggcctcaaatgaccaggactaggagctc

SEQ ID NO: 583574 - DNA, 657 bp, Homo sapiens
aactaataacctaaaacaaggtagaaagatccactgtctcttttccatgatctgtctctggataaaagactaatctgcatcacttcaatatgacagtcttgattcctcagcatggaacccacttaggaaggtcctattgctttcctttgccctaaatcagtacaggaaagcccctacaatatttgaaatgtatgaaagctaaatgtacagaagtcaaataacaaaggtgtatgttcttattgagaatacttttyccagaaagattgaaatattaacaattataaaatcccattattttcaacctataggtcctaccttattcaggtccacataaactagcaagcccttaaaacttttcataggcactcagacacccaaggagagagactgtcagaaaaaaacagagtcctggtaggtgtacctctatttccctaagtactctctaagtatctgtcttcctatgggctcccacttccagattccacttctgcagggctccacagaagtctccaatctttaaatcttcagtctatgaaagcacagattcctgaaaggatggcctcaaatgaccaggactaggagctctctatatccctgctcctgaaaaacaagctaactggagtctccatcacctgcccccagctagacacactacca

SEQ ID NO: 583575 - DNA, 657 bp, Homo sapiens
aactaataacctaaaacaaggtagaaagatccactgtctcttttccatgatctgtctctggataaaagactaatctgcatcacttcaatatgacagtcttgattcctcagcatggaacccacttaggaaggtcctattgctttcctttgccctaaatcagtacaggaaagcccctacaatatttgaaatgtatgaaagctaaatgtacagaagtcaaataacaaaggtgtatgttcttattgagaatacttttcccagaaagattgaaatattaacaattataaaatcccattattttcamcctataggtcctaccttattcaggtccacataaactagcaagcccttaaaacttttcataggcactcagacacccaaggagagagactgtcagaaaaaaacagagtcctggtaggtgtacctctatttccctaagtactctctaagtatctgtcttcctatgggctcccacttccagattccacttctgcagggctccacagaagtctccaatctttaaatcttcagtctatgaaagcacagattcctgaaaggatggcctcaaatgaccaggactaggagctctctatatccctgctcctgaaaaacaagctaactggagtctccatcacctgcccccagctagacacactacca

SEQ ID NO: 583576 - DNA, 584 bp, Homo sapiens
gaaatattaacaattataaaatcccattattttcaacctataggtcctaccttattcaggtccacataaactagcaagcccttaaaacttttcataggcactcagacacccaaggagagagactgtcagaaaaaaacagagtcctggtaggtgtacctctatttccctaagtmctctctaagtatctgtcttcctatgggctcccacttccagattccacttctgcagggctccacagaagtctccaatctttaaatcttcagtctatgaaagcacagattcctgaaaggatggcctcaaatgaccaggactaggagctctctatatccctgctcctgaaaaacaagctaactggagtctccatcacctgcccccagctagacacactaccaactacccaactgaactccatgactgatttgccagccaatcatgcccctgacccagcccacatggacatgggaaggacatcagtgaatcgggaaaagaggcagaggtgaggagacacctgtactgggccacagatctatgtagttcagcaatctccagccccttagtactccaggggctctaagccacccctt

SEQ ID NO: 583577 - DNA, 584 bp, Homo sapiens
gaaatattaacaattataaaatcccattattttcaacctataggtcctaccttattcaggtccacataaactagcaagcccttaaaacttttcataggcactcagacacccaaggagagagactgtcagaaaaaaacagagtcctggtaggtgtacctctatttccctaagtactctctaagtatctgtcttcctatgggctcccacttccagattccacttctgcagggctccacagaagtctccaatctttaaatcttcagtctatgaaagcacagattcctgaaaggatggcctcaaatgaccaggactaggagctctctatatccctgctcctgaaaaacaagctaactggagtctccatcacctgcccccagctagacacactaccaactacccaactgaactccatgactgatttgccagccaatcatgcccctgamccagcccacatggacatgggaaggacatcagtgaatcgggaaaagaggcagaggtgaggagacacctgtactgggccacagatctatgtagttcagcaatctccagccccttagtactccaggggctctaagccacccctt

SEQ ID NO: 583578 - DNA, 500 bp, Homo sapiens
tcagtccttgatttaaaaaaaagcagcaaactttttagagctcccttgaaccttctattttaatgtgccttcgtagataattcccaacatcttgtgtccttcatttttataatttatctttatcaaacttgtcataaaccccaatattttgatctcttatagaagagtctgtactcctatccaayccagtgttgtttatcttcaaacttggacttcccctgctcattccattcttatctacttccattgggttccccggctaattccattctcattctacccacagactcactcccgtttgtattattaaaacacacgccaataggatataaaaagaagcaagagtactgggctttaacatgagttcaaatctcatttctgccaattcctatgtctaaaaaaaagcatcctaaactctttgagcctcacattctctatctagagaatcatttgaccagaatgttcaacacaggtaaaaatactagaaggtattttaattc

SEQ ID NO: 583579 - DNA, 500 bp, Homo sapiens
tcagtccttgatttaaaaaaaagcagcaaactttttagagctcccttgaaccttctattttaatgtgccttcgtagataattcccaacatcttgtgtccttcatttttataatttatctttatcaaacttgtcataaaccccaatattttgatctcttatagaagagtctgtactcctatccaatccagtgttgtttatcttcaaacttggacttcccctgctcattccattcttatctacttccattgggttccccggctaattccattctcattctacccacagactcactccygtttgtattattaaaacacacgccaataggatataaaaagaagcaagagtactgggctttaacatgagttcaaatctcatttctgccaattcctatgtctaaaaaaaagcatcctaaactctttgagcctcacattctctatctagagaatcatttgaccagaatgttcaacacaggtaaaaatactagaaggtattttaattc

SEQ ID NO: 583580 - DNA, 514 bp, Homo sapiens
tcactcccgtttgtattattaaaacacacrccaataggatataaaaagaagcaagagtactgggctttaacatgagttcaaatctcatttctgccaattcctatgtctaaaaaaaagcatcctaaactctttgagcctcacattctctatctagagaatcatttgaccagaatgttcaacacaggtaaaaatactagaaggtattttaattcattccaagattccttaaaattctgtaattctatgtcctcttgattctgtctatagaaaaacttagaatacatagccagcagagtttgaaaaaataatagaacaaaagaaataccaagaaaagcagagaagaaagttttaaaaaatgaaggcaagattatagaaaagtcacggaaaaagcaacaagactaaaaaatgtattatggaagtaagcagaaatacttgcctaaatggaaaaccaaactgggaagtcaaataatttgtctctaagacttgcctaaacttgcttttgtaaaacttacac

SEQ ID NO: 583581 - DNA, 514 bp, Homo sapiens
tcactcccgtttgtattattaaaacacacgccaataggatataaaaagaagcaagagtactgggctttaacatgagttcaaatctcatttctgccaattcctatgtctaaaaaaaagcatcctaawctctttgagcctcacattctctatctagagaatcatttgaccagaatgttcaacacaggtaaaaatactagaaggtattttaattcattccaagattccttaaaattctgtaattctatgtcctcttgattctgtctatagaaaaacttagaatacatagccagcagagtttgaaaaaataatagaacaaaagaaataccaagaaaagcagagaagaaagttttaaaaaatgaaggcaagattatagaaaagtcacggaaaaagcaacaagactaaaaaatgtattatggaagtaagcagaaatacttgcctaaatggaaaaccaaactgggaagtcaaataatttgtctctaagacttgcctaaacttgcttttgtaaaacttacac

SEQ ID NO: 583582 - DNA, 514 bp, Homo sapiens
tcactcccgtttgtattattaaaacacacgccaataggatataaaaagaagcaagagtactgggctttaacatgagttcaaatctcatttctgccaattcctatgtctaaaaaaaagcatcctaaactctttgagcctcacattctctatctagagaatcatttgaccagaatgttcaacacaggtaaaaatactagaaggtattttaattcattccaagattccttaaaattctgtaattctatgtcctcttgattctgtctatagaaaaacttagaatacatagccagcagagtttgaaaaaataatagaacaaaagaaataccaagaaaagcagagaagaaagttttaaaaaatgaaggcaagattatagaaaagtcayggaaaaagcaacaagactaaaaaatgtattatggaagtaagcagaaatacttgcctaaatggaaaaccaaactgggaagtcaaataatttgtctctaagacttgcctaaacttgcttttgtaaaacttacac

SEQ ID NO: 583583 - DNA, 514 bp, Homo sapiens
tcactcccgtttgtattattaaaacacacgccaataggatataaaaagaagcaagagtactgggctttaacatgagttcaaatctcatttctgccaattcctatgtctaaaaaaaagcatcctaaactctttgagcctcacattctctatctagagaatcatttgaccagaatgttcaacacaggtaaaaatactagaaggtattttaattcattccaagattccttaaaattctgtaattctatgtcctcttgattctgtctatagaaaaacttagaatacatagccagcagagtttgaaaaaataatagaacaaaagaaataccaagaaaagcagagaagaaagttttaaaaaatgaaggcaagattatagaaaagtcacggaaaaagcaacaagactaaaaaatgtattatggaagtaagcagaaatacttgmctaaatggaaaaccaaactgggaagtcaaataatttgtctctaagacttgcctaaacttgcttttgtaaaacttacac

SEQ ID NO: 583584 - DNA, 571 bp, Homo sapiens
tatgggatcatgaggcaattaatcagctctaatccatagttgtttatttaataaacagtaggttataggaacacagatgttgtgatggctttatgagatgatatatgcatagaacatattaggatgtctagcccagaatacaacactcaacagatactcrtttcttccatctatattttcttagttaacataattttttaaatctataaaatcctacctgactgcagattcatcagaacttccaacatctattaaagaaaaaggtaaaatgcattttaaatcaataacaaatgtacagaatattaaaagcataagaatgcacagtgatgcatccctctaatccaaactacttgggaggctgaggcaggaggatcacttgaggagcccagaagtttgagaccagcttgggaaacatagtaagactctaccttcataaaaaaattgtgcacacttgtatgtatgctttagatcctgtttgttgttgttgttgtttttgttttggtttggtttggttttttaaagcataagactgatgctttgttacaaagcattcctttgggagcatgcctgg

SEQ ID NO: 583585 - DNA, 497 bp, Homo sapiens
acctgactgcagattcatcagaacttccaacatctattaaagaaaaaggtaaaatgcattttaaatcaataacaaatgtacagaatattaaaagcataagaatgcacagtgatgcatccctctaatccaaactacttgggaggctgaggcaggaggatcacttgaggagcccagaagtttgagaccagcttgggaaacatagtaagactctaccttcataaaaaaattgtgcacacttgtatgtatgctttagatcctgtttkttgttgttgttgtttttgttttggtttggtttggttttttaaagcataagactgatgctttgttacaaagcattcctttgggagcatgcctgggaccttattagaattaacattcgttatacatattggtaggtaattaatgcagtaagaactcttccctttgtatttattagatgcaaagaagaataaatttattaaaatttggtatctacaagtgaactgcagtatgcaagt

SEQ ID NO: 583586 - DNA, 497 bp, Homo sapiens
acctgactgcagattcatcagaacttccaacatctattaaagaaaaaggtaaaatgcattttaaatcaataacaaatgtacagaatattaaaagcataagaatgcacagtgatgcatccctctaatccaaactacttgggaggctgaggcaggaggatcacttgaggagcccagaagtttgagaccagcttgggaaacatagtaagactctaccttcataaaaaaattgtgcacacttgtatgtatgctttagatcctgtttgttgttgttgttgtttttgttttgktttggtttggttttttaaagcataagactgatgctttgttacaaagcattcctttgggagcatgcctgggaccttattagaattaacattcgttatacatattggtaggtaattaatgcagtaagaactcttccctttgtatttattagatgcaaagaagaataaatttattaaaatttggtatctacaagtgaactgcagtatgcaagt

SEQ ID NO: 583587 - DNA, 497 bp, Homo sapiens
acctgactgcagattcatcagaacttccaacatctattaaagaaaaaggtaaaatgcattttaaatcaataacaaatgtacagaatattaaaagcataagaatgcacagtgatgcatccctctaatccaaactacttgggaggctgaggcaggaggatcacttgaggagcccagaagtttgagaccagcttgggaaacatagtaagactctaccttcataaaaaaattgtgcacacttgtatgtatgctttagatcctgtttgttgttgttgttgtttttgttttggtttggtttggttttttaaagcataagactgatgctttgttacaaagcattcctttgrgagcatgcctgggaccttattagaattaacattcgttatacatattggtaggtaattaatgcagtaagaactcttccctttgtatttattagatgcaaagaagaataaatttattaaaatttggtatctacaagtgaactgcagtatgcaagt

SEQ ID NO: 583588 - DNA, 605 bp, Homo sapiens
ggtttggtttggttttttaaagcataagactgatgctttgttacaaagcattcctttgggagcatgcctgggaccttattagaattaacattcgttatacatattggtaggtaattaatgcagtaagaactcttccctttgtatttattagatgcaaagaagaataaatttattaaaatttggtatctacaagtgaactgcagtatgcaagtcatcttagccaaacmctatgaggttgagtaaaaatggtattgttagcagaacaggtgtgatgagtcaacagtgtcaaagagcatgatttctggaccaaaatatgaggcgccattaaaacagagtacacagtagtaccccttatccactatacgtgcagaaagacatacttgacacatttttctctgctgtcacaccacagcaacaatcatcaacaaagaaggcttctgtgaccaaatgtgtggagggtttttccccaccaacaagcaagcaatcattcctgctgatgacacaattcaattctcacaccttatctgctggtaacatcagattcaatttaatttataaattaaactttagcatacatatgtatgtatagggaaaaacagtttgtg

SEQ ID NO: 583589 - DNA, 605 bp, Homo sapiens
ggtttggtttggttttttaaagcataagactgatgctttgttacaaagcattcctttgggagcatgcctgggaccttattagaattaacattcgttatacatattggtaggtaattaatgcagtaagaactcttccctttgtatttattagatgcaaagaagaataaatttattaaaatttggtatctacaagtgaactgcagtatgcaagtcatcttagccaaacccyatgaggttgagtaaaaatggtattgttagcagaacaggtgtgatgagtcaacagtgtcaaagagcatgatttctggaccaaaatatgaggcgccattaaaacagagtacacagtagtaccccttatccactatacgtgcagaaagacatacttgacacatttttctctgctgtcacaccacagcaacaatcatcaacaaagaaggcttctgtgaccaaatgtgtggagggtttttccccaccaacaagcaagcaatcattcctgctgatgacacaattcaattctcacaccttatctgctggtaacatcagattcaatttaatttataaattaaactttagcatacatatgtatgtatagggaaaaacagtttgtg

SEQ ID NO: 583590 - DNA, 605 bp, Homo sapiens
ggtttggtttggttttttaaagcataagactgatgctttgttacaaagcattcctttgggagcatgcctgggaccttattagaattaacattcgttatacatattggtaggtaattaatgcagtaagaactcttccctttgtatttattagatgcaaagaagaataaatttattaaaatttggtatctacaagtgaactgcagtatgcaagtcatcttagccaaaccctatgaggttgagtaaaaatggtattgttagcagaacaggtgtgatgagtcaacagtgtcaaagagcatgatttctggaccaaaatatgaggckccattaaaacagagtacacagtagtaccccttatccactatacgtgcagaaagacatacttgacacatttttctctgctgtcacaccacagcaacaatcatcaacaaagaaggcttctgtgaccaaatgtgtggagggtttttccccaccaacaagcaagcaatcattcctgctgatgacacaattcaattctcacaccttatctgctggtaacatcagattcaatttaatttataaattaaactttagcatacatatgtatgtatagggaaaaacagtttgtg

SEQ ID NO: 583591 - DNA, 607 bp, Homo sapiens
atacttgacacatttttctctgctgtcacaccacagcaacaatcatcaacaaagaaggcttctgtgaccaaatgtgtggagggtttttccccaccaacaagcaagcaatcattcctgctgatgacacaattcaattctcacaccytatctgctggtaacatcagattcaatttaatttataaattaaactttagcatacatatgtatgtatagggaaaaacagtttgtgattcagtactattcatggtttcatgcatccacttgggggtcttggaatgtatctcccacagttaagggggagctactgcacttattttgttataacacaacacagcctctctagctcttcagttcaaactgctcagtttagaataaaacaccctaacaccagatgtcagcaaaacataggaatcagaccagaaacaggaatccttgcaaagactttccagccgctagtggaaaagagctcaaaagagatcaatgtattactctggctactactctttggggaaggtgctgggtggtttacttagttgtagctatttgctctgccctacatatagcaaggcccaaattcacctgccattttacctcccacagaaaaacc

SEQ ID NO: 583592 - DNA, 607 bp, Homo sapiens
atacttgacacatttttctctgctgtcacaccacagcaacaatcatcaacaaagaaggcttctgtgaccaaatgtgtggagggtttttccccaccaacaagcaagcaatcattcctgctgatgacacaattcaattctcacaccttatctgctggtaacatcagattcaatttaatttataaattaaactttagcatasatatgtatgtatagggaaaaacagtttgtgattcagtactattcatggtttcatgcatccacttgggggtcttggaatgtatctcccacagttaagggggagctactgcacttattttgttataacacaacacagcctctctagctcttcagttcaaactgctcagtttagaataaaacaccctaacaccagatgtcagcaaaacataggaatcagaccagaaacaggaatccttgcaaagactttccagccgctagtggaaaagagctcaaaagagatcaatgtattactctggctactactctttggggaaggtgctgggtggtttacttagttgtagctatttgctctgccctacatatagcaaggcccaaattcacctgccattttacctcccacagaaaaacc

SEQ ID NO: 583593 - DNA, 607 bp, Homo sapiens
atacttgacacatttttctctgctgtcacaccacagcaacaatcatcaacaaagaaggcttctgtgaccaaatgtgtggagggtttttccccaccaacaagcaagcaatcattcctgctgatgacacaattcaattctcacaccttatctgctggtaacatcagattcaatttaatttataaattaaactttagcatacatatgtatgtatagggaaaaacagtttgtgattcagtactattyatggtttcatgcatccacttgggggtcttggaatgtatctcccacagttaagggggagctactgcacttattttgttataacacaacacagcctctctagctcttcagttcaaactgctcagtttagaataaaacaccctaacaccagatgtcagcaaaacataggaatcagaccagaaacaggaatccttgcaaagactttccagccgctagtggaaaagagctcaaaagagatcaatgtattactctggctactactctttggggaaggtgctgggtggtttacttagttgtagctatttgctctgccctacatatagcaaggcccaaattcacctgccattttacctcccacagaaaaacc

SEQ ID NO: 583594 - DNA, 571 bp, Homo sapiens
caacaatcatcaacaaagaaggcttctgtgaccaaatgtgtggagggtttttccccaccaacaagcaagcaatcattcctgctgatgacacaattcaattctcacaccttatctgctggtaacatcagattcaatttaatttataaattaaactttagcatacatatgtatgtatagggaaaaacagtttgtgattcagtactattcatggtttcatgcatccacttgggggtcttggaatgtatctcccacagttaagggggagctactgcacttattttgttataacacaacacagcctctctagctcttcagttcaaactgctcagtttagaataaaacaccctaacaccagatgtcagcaaaacataggaatcmgaccagaaacaggaatccttgcaaagactttccagccgctagtggaaaagagctcaaaagagatcaatgtattactctggctactactctttggggaaggtgctgggtggtttacttagttgtagctatttgctctgccctacatatagcaaggcccaaattcacctgccattttacctcccacagaaaaacc

SEQ ID NO: 583595 - DNA, 607 bp, Homo sapiens
atacttgacacatttttctctgctgtcacaccacagcaacaatcatcaacaaagaaggcttctgtgaccaaatgtgtggagggtttttccccaccaacaagcaagcaatcattcctgctgatgacacaattcaattctcacaccttatctgctggtaacatcagattcaatttaatttataaattaaactttagcatacatatgtatgtatagggaaaaacagtttgtgattcagtactattcatggtttcatgcatccacttgggggtcttggaatgtatctcccacagttaagggggagctactgcacttattttgttataacacaacacagcctctctagctcttcagttcaaactgctcagtttagaataaaacaccctaacaccagatgtcagcaaaacataggaatcagaccagaaacaggaatccttgcaaagactttccagccgctagtggaaaagagctcaaaagagatcaatgtattactctggctactactctttggggaaggtgctgggtggtttacttagttgtagctatttgctctgccctacatatagcaaggcccaaattcacctgcyattttacctcccacagaaaaacc

SEQ ID NO: 583596 - DNA, 481 bp, Homo sapiens
tagttgtaggtgagtcacatcatcataatacaggctgttgtcaacctcrtccctcaaaggaagaggatcagtgaggaacctatgtacttacctatagcattcactgtctggtcttatttccaaccgaaggtaagtatgaaagactttgtgattccagttttataaagtacaaccccttgcacttgtccccttccattgctagagaatctatctggacccacctcacagagcaagatgctccagtttgtgctgtgtggtacagcatggtgtccttttcctcaaccctttctattatgtgccacatatctatacaaatcatgttttctaagtatgtaaagcatatgtcatcagaatatatcattctttacaatgataaagaagcaaaagaaaaacaaaaggacaaagaacatcttaaatgactacattcaactgccatggagctttaattttttaactattcaaaaagatatccactgtatta

SEQ ID NO: 583597 - DNA, 481 bp, Homo sapiens
tagttgtaggtgagtcacatcatcataatacaggctgttgtcaacctcatccctcaaaggaagaggatcagtgaggaacctatgtacttacctatagcattcactgtctggtcttatttccaaccraaggtaagtatgaaagactttgtgattccagttttataaagtacaaccccttgcacttgtccccttccattgctagagaatctatctggacccacctcacagagcaagatgctccagtttgtgctgtgtggtacagcatggtgtccttttcctcaaccctttctattatgtgccacatatctatacaaatcatgttttctaagtatgtaaagcatatgtcatcagaatatatcattctttacaatgataaagaagcaaaagaaaaacaaaaggacaaagaacatcttaaatgactacattcaactgccatggagctttaattttttaactattcaaaaagatatccactgtatta

SEQ ID NO: 583598 - DNA, 481 bp, Homo sapiens
tagttgtaggtgagtcacatcatcataatacaggctgttgtcaacctcatccctcaaaggaagaggatcagtgaggaacctatgtacttacctatagcattcactgtctggtcttatttccaaccgaaggtaagtatgaaagactttgtgattccagttttataaagtacaaccccttgcacttgtccccttccattgctagagartctatctggacccacctcacagagcaagatgctccagtttgtgctgtgtggtacagcatggtgtccttttcctcaaccctttctattatgtgccacatatctatacaaatcatgttttctaagtatgtaaagcatatgtcatcagaatatatcattctttacaatgataaagaagcaaaagaaaaacaaaaggacaaagaacatcttaaatgactacattcaactgccatggagctttaattttttaactattcaaaaagatatccactgtatta

SEQ ID NO: 583599 - DNA, 623 bp, Homo sapiens
tccagaacaattacaataaataaataaataaataaataaataaataaatggctgggggcagtggctcatgcctgtaatcccagcactttgagaggccgaggtaggtggatcacctgaggtcaggagttcgagaccagcctgactaacatggtgaaaccccatctctactaaatacaaaaaattagccaggcatgattgtgcatgcctgtagttccaggtacctaggaggctgaggcaggagaatcatttgaaactgggaggtggaagttgcaatgagccaagattatgtcattgtactgcagcctgggcaacaagagcaaaactccgtctcaaaaaaataagtaaataaaataaaaaataaagatattcactgaacctgttactatgatatatttaagcaagacacggtgaccctaaaaattagagatcattgaagaccaaagtaacaacatgtggtcattacttctcaaattgaactatataaaatatataaaataaataaatttaattgcatgcttagataagaaaatattgataaaaataattgaatattttatcttatttcataattctaaacagggatttarcacaatatgaaaactagactattcatgtaatcaaaa

SEQ ID NO: 583600 - DNA, 584 bp, Homo sapiens
gtcaaaaaagtaacaagcactgcaacttaagatggatcatacaacagaaattagtaccaagttaccttatcttataatattatgttattaaaatgaaattttaaaacaacaccaaaaattaagttggggttacaagtgttgtgcagaaaagatttcatatagcaggcaagaggctgccatccttagaaaggccygcatgcaaggctggcccttggctggtgtttaggaaattggaaatgggagggtttccaccattccctgagaagagtggctcactgtgtctaaagtgcttatagaaacagtgtatttactctaaacagctgctttccttgtaagagtctggaatttgggtacatgtgagggagagtaacctccatagaaaaacttgggcacttagtctctaatgaaactctggtactggtagacatcactgcacatatgttgtcaaaatgtgagcctgggagaattaagcagatcccgggaactccacaggacagaactcctggaggcttgtgccttgtttcctccagaattgaccacatgcacctttttcctctactaattttgcttgtccccttccttgt

SEQ ID NO: 583601 - DNA, 625 bp, Homo sapiens
gagtatgactatttgttgagtcctgtgagtccttctaatgaaccaccaaacctggggtggtcttgggaaaccttgacacaaattcattgtgtaagatttgtattaagttgatatgatacgtgtaactgtaatcagatggttatttcacagaataactttacctaatctgtttttcttttctttttttgycttgatatttgacttggagattcttgtatttctatatctatccaattgaataaagccatagaaggaataaatgaaaaaataatgtcagaaaataatgtgaaatgagcagcaatcctcttttatctgaataaaaaatagagaatctgggtgattgacaatatgttctacaatatgaatgtttctagaaaaaaaatgaaaaagtggtcaattttctgcaactcaactgggcttcattcctttttataataattttgaaggccaggtgcagtggctcacacttgtaaatctgagcattttgggaggttgaggcaggaggatcacttgagcccggaagttccagaccggcctcggcaatatagtgagacctcatctattaaacaaacaaacaaacaaaaatcccttaaaaagaaaattagccaagtgtggtagtgcatgc

SEQ ID NO: 583602 - DNA, 625 bp, Homo sapiens
gagtatgactatttgttgagtcctgtgagtccttctaatgaaccaccaaacctggggtggtcttgggaaaccttgacacaaattcattgtgtaagatttgtattaagttgatatgatacgtgtaactgtaatcagatggttatttcacagaataactttacctaatctgtttttcttttctttttttgtcttgatatttgacttggagattcttgtatttctatatctatccaattgaataaagccatagaaggaataaatgaaaaaataatgtcagaaaataatgtgaaatgagcagcaatcctcttttatctgaataaaaaatrgagaatctgggtgattgacaatatgttctacaatatgaatgtttctagaaaaaaaatgaaaaagtggtcaattttctgcaactcaactgggcttcattcctttttataataattttgaaggccaggtgcagtggctcacacttgtaaatctgagcattttgggaggttgaggcaggaggatcacttgagcccggaagttccagaccggcctcggcaatatagtgagacctcatctattaaacaaacaaacaaacaaaaatcccttaaaaagaaaattagccaagtgtggtagtgcatgc

SEQ ID NO: 583603 - DNA, 625 bp, Homo sapiens
gagtatgactatttgttgagtcctgtgagtccttctaatgaaccaccaaacctggggtggtcttgggaaaccttgacacaaattcattgtgtaagatttgtattaagttgatatgatacgtgtaactgtaatcagatggttatttcacagaataactttacctaatctgtttttcttttctttttttgtcttgatatttgacttggagattcttgtatttctatatctatccaattgaataaagccatagaaggaataaatgaaaaaataatgtcagaaaataatgtgaaatgagcagcaatcctcttttatctgaataaaaaatagagaatctgggtgattgacaatatgttctacaatatgaatgtttctagaaaaaaaatgaaaaagtggtcaattttctgcaactcaactgggcttcattcctttttataataattttgaaggccaggtgcagtggctcacacttgtaaatcygagcattttgggaggttgaggcaggaggatcacttgagcccggaagttccagaccggcctcggcaatatagtgagacctcatctattaaacaaacaaacaaacaaaaatcccttaaaaagaaaattagccaagtgtggtagtgcatgc

SEQ ID NO: 583604 - DNA, 447 bp, Homo sapiens
acatattaaattccaaaacactttcaagcaatatcagacctaatctcagaattttaatgtcccatacacttcaaatttgtaaaccttacaagcttattaagcttataattaaagaagaaaagaaagtgaagtactcataaatggaggaagcacagctcagtaaatgaactctagttagctggatatcatgcaaagtgtcctgcactcagagtaagtccttgctctgtaaccaaaatacctcgctctgtaggtattttgtcttcagacaagttgcttctcttaggctccatggtttcttctaaaaaacaaggattctgctaccttacttcamtaggttgtttggaagatgtaatgagattacatgtttatatgttcagagaaatagtaaagcaatggaataatttattcttgaactttattgctgaaaccattttggaatcccaaata

SEQ ID NO: 583605 - DNA, 622 bp, Homo sapiens
gtactaacaacatgtaacatccccttattactcagctctgttcccatttcagagatcaccatacatcaatagtttcatagcrataatcacaatttcaatattgtgtgtcacctgttttggttttgctcacactgcttccttggagctactcaacaaatagtcaaatggccttcctgggactaggcaaaatatggaatgttttctgaatttgtgtgccatccctaggcagtagccatgcttatctgctctgtattgatccaattttaaaatatgtgctgttgaaataagtacaaagccctgtttgatacatggatattcatgagtcatggatgaggcttagctctattaaatccaactcacttacttcagattcagagaattttattgaatggcttcctgtgaggtagaattttaaaatatattgaaaacttgaggaagagctgcaagtagcccaggagattttcatgattatagagacacattacttgaggggccaactgcaagctggttcccactactcagtggaaagataacatggaacattccgctatctaaccaaagctgctgcacaggatataaaaaagcctcaaggtacagatctgatagcaaaagagacagggaa

SEQ ID NO: 583606 - DNA, 622 bp, Homo sapiens
gtactaacaacatgtaacatccccttattactcagctctgttcccatttcagagatcaccatacatcaatagtttcatagcaataatcacaatttcaatattgygtgtcacctgttttggttttgctcacactgcttccttggagctactcaacaaatagtcaaatggccttcctgggactaggcaaaatatggaatgttttctgaatttgtgtgccatccctaggcagtagccatgcttatctgctctgtattgatccaattttaaaatatgtgctgttgaaataagtacaaagccctgtttgatacatggatattcatgagtcatggatgaggcttagctctattaaatccaactcacttacttcagattcagagaattttattgaatggcttcctgtgaggtagaattttaaaatatattgaaaacttgaggaagagctgcaagtagcccaggagattttcatgattatagagacacattacttgaggggccaactgcaagctggttcccactactcagtggaaagataacatggaacattccgctatctaaccaaagctgctgcacaggatataaaaaagcctcaaggtacagatctgatagcaaaagagacagggaa

SEQ ID NO: 583607 - DNA, 622 bp, Homo sapiens
gtactaacaacatgtaacatccccttattactcagctctgttcccatttcagagatcaccatacatcaatagtttcatagcaataatcacaatttcaatattgtgtgtcacctgttttggttttgctcacactgcttccttggagctactcaacaaatagtcaaatggcctwcctgggactaggcaaaatatggaatgttttctgaatttgtgtgccatccctaggcagtagccatgcttatctgctctgtattgatccaattttaaaatatgtgctgttgaaataagtacaaagccctgtttgatacatggatattcatgagtcatggatgaggcttagctctattaaatccaactcacttacttcagattcagagaattttattgaatggcttcctgtgaggtagaattttaaaatatattgaaaacttgaggaagagctgcaagtagcccaggagattttcatgattatagagacacattacttgaggggccaactgcaagctggttcccactactcagtggaaagataacatggaacattccgctatctaaccaaagctgctgcacaggatataaaaaagcctcaaggtacagatctgatagcaaaagagacagggaa

SEQ ID NO: 583608 - DNA, 606 bp, Homo sapiens
ttgtgtgtcacctgttttggttttgctcacactgcttccttggagctactcaacaaatagtcaaatggccttcctgggactaggcaaaatatggaatgttttctgaatttgtgtgccatccctaggcagtagccatgcttatctgctctgtattgatccaattttaaaatatgtgctgttgaaataagtacaaagccctgtttgatacatggataytcatgagtcatggatgaggcttagctctattaaatccaactcacttacttcagattcagagaattttattgaatggcttcctgtgaggtagaattttaaaatatattgaaaacttgaggaagagctgcaagtagcccaggagattttcatgattatagagacacattacttgaggggccaactgcaagctggttcccactactcagtggaaagataacatggaacattccgctatctaaccaaagctgctgcacaggatataaaaaagcctcaaggtacagatctgatagcaaaagagacagggaactctgatctcttcctgcaacattatttgaacatccctgactattgagaacaatcccaactaatattggttaaaggaaagacaaa

SEQ ID NO: 583609 - DNA, 552 bp, Homo sapiens
tttgaacatccctgactattgagaacaatcccaactaatattggttaaaggaaagacaaacatggctctcaaaggataacataccaygaaggcctaggcaaagtctagctaagacgtgggctccaaataaggtttttagtgtagggtgagcatcaacttgctcaatatttgtgtggataaagctaggaggcctagctgccagagcagggtgctgggaacaatgactgagcacaagtacataaactaataaacaccgtagctttgacctctatatatgaatcaccatgaaaactgaggggtctgaatcagtgaaggcatcctggtggcaaaggtcaatcattatcagattgcaggaccggttataatggcaataatacagcaagtgagtccatggaaacaacagaatgattagaatggccttttttccccttcttctgacttgtaaagaaagattgccttccttggacttaggaaaccccttagcttcttggaaaattcaaagaaggaagacacaggagagagccccaggggacaatacaagattttctgtta

SEQ ID NO: 583610 - DNA, 567 bp, Homo sapiens
gagcagggtgctgggaacaatgactgagcacaagtacataaactaataaacaccgtagctttgacctctatatatgaatcaccatgaaaactgaggggtctgaatcagtgaaggcatcctggtggcaaaggtcaatcattatcagattgcaggaccggttataatggcaataatacagcaagtgagtccatggaaacaacagaatgattagaatggccttttttccccttcttctgacttgtaaagaaagattgccttccttggacttaggaaaccccttagcttcttggaaaattcaaagaaggaagacacaggagagagccccaggggacaatacawgattttctgttaaactggacattacaagactcaataactaattagaaaagtcaggccaggcatggtggctagcactttcagaggccgaggcagggggattacttgacctcaaaagttcaagaccagccagggcaacagagtgagaccttgtctctacaaaaaaaaaaaaaaaaaaaggaaaggaaaggaaaagaaatcaaagacatggctctttttatcccatgcatg

SEQ ID NO: 583611 - DNA, 511 bp, Homo sapiens
agattttctgttaaactggacattacaagactcaataactaattagaaaagtmaggccaggcatggtggctagcactttcagaggccgaggcagggggattacttgacctcaaaagttcaagaccagccagggcaacagagtgagaccttgtctctacaaaaaaaaaaaaaaaaaaaggaaaggaaaggaaaagaaatcaaagacatggctctttttatcccatgcatggggattatacttagaataaaatgaataacattgagatccctagggataaatgtctcaaaaatccagaaaaaatctcgcactctacttctaactaatctagacttctgcttgatttctggctaaaaggtagactaactcttcgctatttcaaactatctgaaccaaactatgaactctcacctaatgtataagatggagtagttgcaattattttaaacttcaatttagcattaactggccttttaacataaacacttactttgtcaaatgatgagaaatagc

SEQ ID NO: 583612 - DNA, 511 bp, Homo sapiens
agattttctgttaaactggacattacaagactcaataactaattagaaaagtcaggccaggcatggtggctagcactttcagaggccgaggcagggggattacttgacctcaaaagttcaagaccagccagggcaacagagtgagaccttgtctctacaaaaaaaaaaaaaaaaaaaggaaaggaaaggaaaagaaatcaaagacatggctctttttatcccatgcatggggattatacttagaataaaatgaataacattgagatccctagggataaatgtctcaaaaatccagaaaaaatctcgcactctacttctaactaatctagacttctgcttgatttctggctaaaaggtagactaactcttcgctatttcmaactatctgaaccaaactatgaactctcacctaatgtataagatggagtagttgcaattattttaaacttcaatttagcattaactggccttttaacataaacacttactttgtcaaatgatgagaaatagc

SEQ ID NO: 583613 - DNA, 571 bp, Homo sapiens
atctaaagtaggcaaagatttagatgaagatttccccgttgctttcctagtcaaatcagctaggggtcagataagagttatctgcaggctgaaaacaacaacaacaacaayaataataatgacaatgctagtagtcataaactaaaagtccacactttaaaaatgaataaaacttgtcaggtgcagtgtctcatgcctgtaatcccagcactttgggaagccaaggagagcagatcacgaggtcaagagatcaagaccatcctggccaacatggtgaaatcccatctctactaaaaatacaaaaattagctgggcatggtggcgtgcacctgtagtcccagctacttgggaggccgaggcaggagaatcgcttgaacctgggaggtggagaatgcagtgagctgagatcacaccactgcactccagcctggcaacagagcaagactccatctcaaaaaaaaaaaaaattaataaaactaatacaaaaccctttagctaataaaagattacagtaccaaaaacatctgattataaataccaaactctgtatattataagagaagatgaatcc

SEQ ID NO: 583614 - DNA, 571 bp, Homo sapiens
atctaaagtaggcaaagatttagatgaagatttccccgttgctttcctagtcaaatcagctaggggtcagataagagttatctgcaggctgaaaacaacaacaacaacaacaataataatgacaatgctagtagtcataaactaaaagtccacactttaaaaatgaataaaacttgtcaggtgcagtgtctcatgcctgtaatcccagcactttgggaagccaaggagagcagatcacgaggtcaagagatcragaccatcctggccaacatggtgaaatcccatctctactaaaaatacaaaaattagctgggcatggtggcgtgcacctgtagtcccagctacttgggaggccgaggcaggagaatcgcttgaacctgggaggtggagaatgcagtgagctgagatcacaccactgcactccagcctggcaacagagcaagactccatctcaaaaaaaaaaaaaattaataaaactaatacaaaaccctttagctaataaaagattacagtaccaaaaacatctgattataaataccaaactctgtatattataagagaagatgaatcc

SEQ ID NO: 583615 - DNA, 558 bp, Homo sapiens
ttccccgttgctttcctagtcaaatcagctaggggtcagataagagttatctgcaggctgaaaacaacaacaacaacaacaataataatgacaatgctagtagtcataaactaaaagtccacactttaaaaatgaataaaacttgtcaggtgcagtgtctcatgcctgtaatcccagcactttgggaagccaaggagagcagatcacgaggtcaagagatcaagaccatcctggccaacatggtgaaatcccatctctactaaaaatacaaaaattrgctgggcatggtggcgtgcacctgtagtcccagctacttgggaggccgaggcaggagaatcgcttgaacctgggaggtggagaatgcagtgagctgagatcacaccactgcactccagcctggcaacagagcaagactccatctcaaaaaaaaaaaaaattaataaaactaatacaaaaccctttagctaataaaagattacagtaccaaaaacatctgattataaataccaaactctgtatattataagagaagatgaatcctactatatactattcttt

SEQ ID NO: 583616 - DNA, 571 bp, Homo sapiens
atctaaagtaggcaaagatttagatgaagatttccccgttgctttcctagtcaaatcagctaggggtcagataagagttatctgcaggctgaaaacaacaacaacaacaacaataataatgacaatgctagtagtcataaactaaaagtccacactttaaaaatgaataaaacttgtcaggtgcagtgtctcatgcctgtaatcccagcactttgggaagccaaggagagcagatcacgaggtcaagagatcaagaccatcctggccaacatggtgaaatcccatctctactaaaaatacaaaaattagctgggcatggtggcgtgcacctgtagtcccagctacttgggaggccgaggcaggagaatcgcttgaacctgggaggtggagaatgcagtgagctgagatcacaccactgcactccagcctggcaacagagcaagactccatctcaaaaaaaaaaaaaattaataaaactaatacaaaaccctttagctaataaaagaytacagtaccaaaaacatctgattataaataccaaactctgtatattataagagaagatgaatcc

SEQ ID NO: 583617 - DNA, 558 bp, Homo sapiens
ttccccgttgctttcctagtcaaatcagctaggggtcagataagagttatctgcaggctgaaaacaacaacaacaacaacaataataatgacaatgctagtagtcataaactaaaagtccacactttaaaaatgaataaaacttgtcaggtgcagtgtctcatgcctgtaatcccagcactttgggaagccaaggagagcagatcacgaggtcaagagatcaagaccatcctggccaacatggtgaaatcccatctctactaaaaatacaaaaattagctgggcatggtggcgtgcacctgtagtcccagctacttgggaggccgaggcaggagaatcgcttgaacctgggaggtggagaatgcagtgagctgagatcacaccactgcactccagcctggcaacagagcaagactccatctcaaaaaaaaaaaaaattaataaaactaatacaaaaccctttagctaataaaagattacagtacsaaaaacatctgattataaataccaaactctgtatattataagagaagatgaatcctactatatactattcttt
